United States Patent Application Publication US 2018/0126003 A1 - sequence listing, part 165

SEQ ID NO: 290136 - protein, 1110 aa, Artificial Sequence
  derived and/or modified sequence
MAAGCLLALTLTLFQSLLIGPSSEEPFPSAVTIKSWVDKMQEDLVTLAKTASGVNQLVDIYEKYQDLYTVEPNNARQLVEIAARDIEKLLSNRSKALVRLALEAEKVQAAHQWREDFASNEVVYYNAKDDLDPEKNDSEPGSQRIKPVFIEDANFGRQISYQHAAVHIPTDIYEGSTIVLNELNWTSALDEVFKKNREEDPSLLWQVFGSATGLARYYPASPWVDNSRTPNKIDLYDVRRRPWYIQGAASPKDMLILVDVSGSVSGLTLKLIRTSVSEMLETLSDDDFVNVASFNSNAQDVSCFQHLVQANVRNKKVLKDAVNNITAKGITDYKKGFSFAFEQLLNYNVSRANCNKIIMLFTDGGEERAQEIFNKYNKDKKVRVFTFSVGQHNYDRGPIQWMACENKGYYYEIPSIGAIRINTQEYLDVLGRPMVLAGDKAKQVQWTNVYLDALELGLVITGTLPVFNITGQFENKTNLKNQLILGVMGVDVSLEDIKRLTPRFTLCPNGYYFAIDPNGYVLLHPNLQPKPIGVGIPTINLRKRRPNIQNPKSQEPVTLDFLDAELENDIKVEIRNKMIDGESGEKTFRTLVKSQDERYIDKGNRTYTWTPVNGTDYSLALVLPTYSFYYIKAKLEETITQARCKYCERSDSETLKPDNFEESGYTFIAPRDYCNDLKISDNNTEFLLNFNEFIDRKTPNNPSCNADLINRVLLDAGFTNELVQNYWSKQKNIKGVKARFVVTDGGITRVYPKEAGENWQENPETYEDSFYKRSLDNDNYVFTAPYFNKSGPGAYESGIMVSKAVEIYIQGKLLKPAVVGIKIDVNSWIENFTKTSIRDPCAGPVCDCKRNSDVMDCVILDDGGFLLMANHDDYTNQIGRFFGEIDPSLMRHLVNISVYAFNKSYDYQSVCEPGAAPKQGAGHRSAYVPSVADILQIGWWATAAAWSILQQFLLSLTFPRLLEAVEMEDDDFTASLSKQSCITEQTQYFFDNDSKSFSGVLDCGNCSRIFHGEKLMNTNLIFIMVESKGTCPCDTRLLIQAEQTSDGPNPCDMVKQPRYRKGPDVCFDNNVLEDYTDCGGVSGLNPSLWYIIGIQFLLLWLVSGSTHRLL

SEQ ID NO: 290137 - DNA, 3333 bp, Artificial Sequence
  derived and/or modified sequence
atggccgccggctgcctgctggccctgaccctgaccctgttccagagcctgctgatcggccccagcagcgaggagcccttccccagcgccgtgaccatcaagagctgggtggacaagatgcaggaggacctggtgaccctggccaagaccgccagcggcgtgaaccagctggtggacatctacgagaagtaccaggacctgtacaccgtggagcccaacaacgccagacagctggtggagatcgccgccagagacatcgagaagctgctgagcaacagaagcaaggccctggtgagactggccctggaggccgagaaggtgcaggccgcccaccagtggagagaggacttcgccagcaacgaggtggtgtactacaacgccaaggacgacctggaccccgagaagaacgacagcgagcccggcagccagagaatcaagcccgtgttcatcgaggacgccaacttcggcagacagatcagctaccagcacgccgccgtgcacatccccaccgacatctacgagggcagcaccatcgtgctgaacgagctgaactggaccagcgccctggacgaggtgttcaagaagaacagagaggaggaccccagcctgctgtggcaggtgttcggcagcgccaccggcctggccagatactaccccgccagcccctgggtggacaacagcagaacccccaacaagatcgacctgtacgacgtgagaagaagaccctggtacatccagggcgccgccagccccaaggacatgctgatcctggtggacgtgagcggcagcgtgagcggcctgaccctgaagctgatcagaaccagcgtgagcgagatgctggagaccctgagcgacgacgacttcgtgaacgtggccagcttcaacagcaacgcccaggacgtgagctgcttccagcacctggtgcaggccaacgtgagaaacaagaaggtgctgaaggacgccgtgaacaacatcaccgccaagggcatcaccgactacaagaagggcttcagcttcgccttcgagcagctgctgaactacaacgtgagcagagccaactgcaacaagatcatcatgctgttcaccgacggcggcgaggagagagcccaggagatcttcaacaagtacaacaaggacaagaaggtgagagtgttcaccttcagcgtgggccagcacaactacgacagaggccccatccagtggatggcctgcgagaacaagggctactactacgagatccccagcatcggcgccatcagaatcaacacccaggagtacctggacgtgctgggcagacccatggtgctggccggcgacaaggccaagcaggtgcagtggaccaacgtgtacctggacgccctggagctgggcctggtgatcaccggcaccctgcccgtgttcaacatcaccggccagttcgagaacaagaccaacctgaagaaccagctgatcctgggcgtgatgggcgtggacgtgagcctggaggacatcaagagactgacccccagattcaccctgtgccccaacggctactacttcgccatcgaccccaacggctacgtgctgctgcaccccaacctgcagcccaagcccatcggcgtgggcatccccaccatcaacctgagaaagagaagacccaacatccagaaccccaagagccaggagcccgtgaccctggacttcctggacgccgagctggagaacgacatcaaggtggagatcagaaacaagatgatcgacggcgagagcggcgagaagaccttcagaaccctggtgaagagccaggacgagagatacatcgacaagggcaacagaacctacacctggacccccgtgaacggcaccgactacagcctggccctggtgctgcccacctacagcttctactacatcaaggccaagctggaggagaccatcacccaggccagatgcaagtactgcgagagaagcgacagcgagaccctgaagcccgacaacttcgaggagagcggctacaccttcatcgcccccagagactactgcaacgacctgaagatcagcgacaacaacaccgagttcctgctgaacttcaacgagttcatcgacagaaagacccccaacaaccccagctgcaacgccgacctgatcaacagagtgctgctggacgccggcttcaccaacgagctggtgcagaactactggagcaagcagaagaacatcaagggcgtgaaggccagattcgtggtgaccgacggcggcatcaccagagtgtaccccaaggaggccggcgagaactggcaggagaaccccgagacctacgaggacagcttctacaagagaagcctggacaacgacaactacgtgttcaccgccccctacttcaacaagagcggccccggcgcctacgagagcggcatcatggtgagcaaggccgtggagatctacatccagggcaagctgctgaagcccgccgtggtgggcatcaagatcgacgtgaacagctggatcgagaacttcaccaagaccagcatcagagacccctgcgccggccccgtgtgcgactgcaagagaaacagcgacgtgatggactgcgtgatcctggacgacggcggcttcctgctgatggccaaccacgacgactacaccaaccagatcggcagattcttcggcgagatcgaccccagcctgatgagacacctggtgaacatcagcgtgtacgccttcaacaagagctacgactaccagagcgtgtgcgagcccggcgccgcccccaagcagggcgccggccacagaagcgcctacgtgcccagcgtggccgacatcctgcagatcggctggtgggccaccgccgccgcctggagcatcctgcagcagttcctgctgagcctgaccttccccagactgctggaggccgtggagatggaggacgacgacttcaccgccagcctgagcaagcagagctgcatcaccgagcagacccagtacttcttcgacaacgacagcaagagcttcagcggcgtgctggactgcggcaactgcagcagaatcttccacggcgagaagctgatgaacaccaacctgatcttcatcatggtggagagcaagggcacctgcccctgcgacaccagactgctgatccaggccgagcagaccagcgacggccccaacccctgcgacatggtgaagcagcccagatacagaaagggccccgacgtgtgcttcgacaacaacgtgctggaggactacaccgactgcggcggcgtgagcggcctgaaccccagcctgtggtacatcatcggcatccagttcctgctgctgtggctggtgagcggcagcacccacagactgctgtag

SEQ ID NO: 290138 - DNA, 3333 bp, Artificial Sequence
  derived and/or modified sequence
atggccgccgggtgcctgctggctctgacactgaccctcttccagtccctgttaattggcccctcaagcgaggaacctttcccgtccgccgtcacgatcaagtcgtgggtggacaagatgcaagaagacctcgttacactagctaaaacagctagcggcgtcaatcagctggtggacatttacgagaagtatcaggatctgtatactgtcgaacccaataacgcccgtcagttagttgagatcgcggctcgcgatatcgaaaaactgttaagtaataggtccaaggctctggtacggctcgccttggaggcagagaaagtccaagccgcacatcaatggagggaggacttcgccagcaatgaggtggtttactataacgccaaagatgacctggatcccgagaagaacgattctgaacccggctcccagaggattaaaccagtgtttatcgaagacgcaaacttcggccggcagatctcatatcagcacgctgctgtgcacatacccacggatatctatgaaggaagcacgattgtgctgaacgagctcaactggacatccgcactggatgaagtgttcaagaagaatagggaagaggaccctagcttgctgtggcaggtgtttgggtccgctacggggctcgcccgttattacccagcatccccctgggtggacaattctcgaactccgaataagatcgatctgtatgacgtacgccggcgcccctggtatatccaaggtgcggcctcaccaaaggatatgctgattttggtggatgtctccgggtccgtgtcagggctgacgctgaagcttattcggacctcagtttccgagatgttagagacactgtccgacgacgatttcgtgaatgtggccagcttcaacagtaacgcgcaggatgtgtcttgcttccagcatctcgtccaggcaaatgtgcgcaacaaaaaagtattaaaagatgctgttaataacattaccgccaagggtattacagactacaagaagggtttcagtttcgcattcgagcagctgctaaactacaacgtgtctcgagccaattgtaataaaattattatgcttttcactgacggcggcgaagagcgcgcacaggagatttttaataaatataataaagacaaaaaggtgagggtcttcaccttttctgtgggccaacacaattatgataggggtccaatccagtggatggcgtgcgagaataagggctactactatgagatcccatccatcggggcaattcggattaatacgcaggaatatctggacgttctgggaagacccatggtgttggcaggggacaaagcaaagcaggtacagtggacaaacgtgtaccttgatgccctggaattgggtctggtgatcaccggcacactgccagtatttaatattactggccaattcgagaacaagacaaatctgaagaatcaactcatcctgggggtcatgggggtggatgtgtccttggaggacattaagaggttaaccccacgatttaccctgtgtccaaatgggtactattttgctattgaccctaacggatatgtgttgttgcatcccaacctgcaaccgaagcctatcggcgttgggatccctactataaacctgagaaagaggcgacccaatatccagaatcccaagtcccaggaacctgttaccctggattttctggatgccgaacttgaaaacgacattaaggtggagatcagaaacaagatgattgacggcgagtctggtgagaaaacctttagaaccctggtcaaatcgcaagatgaacggtacattgacaaaggtaaccggacctatacctggactccagttaatgggacagattattccttggccctcgtgctacccacttactccttttactatatcaaggcaaaactcgaggaaacaataacgcaggcacgatgcaaatattgtgaacggagcgatagcgaaacactgaagcccgacaatttcgaggagagtggatacacctttattgccccgagagattactgcaatgacctgaagatcagtgacaataacactgaattcctgctgaattttaatgaattcatcgatcggaagactccgaataacccctcctgcaacgctgatttaatcaacagggttctgttggacgcgggcttcacgaatgagttggtccagaattattggagtaagcagaaaaatattaaaggggtgaaggcacggtttgttgtcactgatggagggatcaccagggtgtatccaaaggaggccggagagaattggcaggaaaatcccgaaacctatgaagactccttttataagaggtcccttgacaacgataattatgtgttcactgcaccctatttcaataaatccggcccaggcgcatacgaaagcggaattatggtgagcaaggcagttgagatatatatccagggcaaacttctaaaaccagccgttgtgggcatcaagattgacgtgaattcctggatcgagaacttcacaaagacatctatcagggatccctgcgcaggaccggtgtgcgactgtaagagaaactctgacgttatggactgcgtcattctggacgatggaggctttttattgatggctaatcacgacgactataccaatcagatagggaggtttttcggcgagatagaccctagcctgatgcgacacctcgttaacatcagcgtatatgccttcaataagtcatacgactaccagagcgtgtgcgagccaggcgccgcgccaaagcagggtgctggccaccggtccgcctatgtcccttccgtggcggacatactgcagattgggtggtgggctaccgctgctgcctggtctatcctgcaacaattccttctgtctctgacattcccgcgcttgcttgaagccgtcgaaatggaggatgacgactttacagcgtctctaagcaagcagagctgcatcactgagcagacgcagtatttctttgataacgattctaagtcgtttagcggcgtgttggactgcggaaactgcagtcgcatcttccacggcgagaagttgatgaatacaaacctgatttttataatggttgagtccaagggaacctgtccctgcgacacacgcctgttaatacaggctgaacagacttctgatggaccaaatccctgtgatatggtgaaacaaccccgctatcgcaagggacctgacgtttgctttgacaataatgtgctcgaggactatacggattgcgggggtgttagcgggctcaatccttccttgtggtatataattgggattcaatttctgctcctctggctggtaagcgggagtacacacagactgctgtag

SEQ ID NO: 290139 - DNA, 3333 bp, Artificial Sequence
  derived and/or modified sequence
atggctgctggctgcctgctggccctgaccctgaccctcttccagagcctgctgattggccccagcagcgaggagcccttccccagcgctgtgaccatcaagtcctgggtggacaagatgcaggaggacctggtgaccctggccaagacagccagcggcgtgaaccagctggtggacatctatgagaagtaccaggacctgtacacagtggagcccaacaatgcccggcagctggtggagattgctgcccgggacatcgagaagctgctgagcaacagaagcaaggccctggtgcggctggccctggaggccgagaaggtgcaggccgcccaccagtggagagaagattttgccagcaatgaggtggtgtactacaatgccaaggatgacctggaccctgagaagaatgacagcgagcccggcagccagaggatcaagcctgtgttcattgaagatgccaactttggccggcagatctcctaccagcacgccgctgtgcacatccccacagacatctatgagggcagcaccatcgtgctgaatgagctgaactggaccagcgccctggatgaggtgttcaagaagaaccgggaggaggaccccagcctgctgtggcaggtgtttggcagcgccaccggcctggcccgctactacccagccagcccctgggtggacaacagcaggacccccaacaagattgacctgtatgatgtgagaagaagaccctggtacatccagggcgccgccagccccaaggacatgctgatcctggtggatgtgtctggctctgtgtctggcctgaccctgaagctgatccgcacctctgtgtctgagatgctggagaccctgagtgatgatgactttgtgaatgtggccagcttcaacagcaatgcccaggatgtgtcctgcttccagcacctggtgcaggccaacgtgaggaacaagaaggtgctgaaggatgctgtgaacaacatcacagccaagggcatcacagactacaagaagggcttctcctttgcctttgagcagctgctgaactacaacgtgtcccgggccaactgcaacaagatcatcatgctgttcacagatggaggagaggagcgggcccaggagatcttcaacaagtacaacaaggacaagaaggtgcgggtcttcaccttctctgtgggccagcacaactatgaccggggccccatccagtggatggcctgtgaaaataaaggctactactatgagatccccagcatcggggccatccgcatcaacacccaggagtacctggatgtgctgggccggcccatggtgctggccggggacaaggccaagcaggtgcagtggaccaacgtgtacctggatgccctggagctgggcctggtgatcaccggcaccctgcctgtgttcaacatcaccggccagtttgagaacaagaccaacctgaagaaccagctgatcctgggcgtgatgggcgtggatgtgtccctggaggacatcaagaggctgaccccccgcttcaccctgtgccccaacggctactactttgccatcgaccccaacggctacgtgctgctgcaccccaacctgcagcccaagcccatcggcgtgggcatccccaccatcaacctgaggaagaggcggcccaacatccagaaccccaagagccaggagcctgtgaccctggacttcctggatgctgagctggagaatgacatcaaggtggagatccggaacaagatgattgatggagagagcggggagaagaccttccgcaccctggtgaagagccaggatgagcgctacatcgacaagggcaacagaacctacacctggacccctgtgaatggaacagactacagcctggccctggtgctgcccacctacagcttctactacatcaaggccaagctggaggagaccatcacccaggcccgctgcaagtactgtgagaggagtgacagcgagaccctgaagccagacaactttgaggagagcggctacaccttcatcgccccccgggactactgcaatgacctgaagatcagtgacaacaacacagagttcctgctgaacttcaatgagttcatcgacaggaagacccccaacaaccccagctgcaatgctgacctgatcaacagagtgctgctggatgctggcttcaccaatgagctggtgcagaactactggagcaagcagaagaacatcaagggcgtgaaggccaggtttgtggtgacagatggcggcatcaccagggtgtaccccaaggaggccggggagaactggcaggagaaccctgagacctatgaagattccttctacaagaggagcctggacaatgacaactacgtgttcaccgccccctacttcaacaagagcggccctggggcctatgaaagtggcatcatggtgtccaaggctgtggagatctacatccagggcaagctgctgaagccagctgtggtgggcatcaagattgatgtgaacagctggattgagaacttcaccaagaccagcatccgggacccctgtgccggccctgtgtgtgactgcaagaggaacagtgatgtgatggactgtgtgatcctggatgatggcggcttcctgctgatggccaaccatgatgactacaccaaccagatcggccgcttcttcggggagattgaccccagcctgatgaggcacctggtgaacatctctgtgtatgccttcaacaagagctatgactaccagagcgtgtgtgagcctggagctgcccccaagcagggcgccggccacaggtctgcctacgtgcccagcgtggccgacatcctgcagatcggctggtgggccacagctgctgcctggagcatcctgcagcagttcctgctgagcctgaccttcccccggctgctggaggccgtggagatggaggatgatgacttcaccgccagcctgagcaagcagagctgcatcacagagcagacccagtacttctttgacaatgacagcaagagcttcagcggcgtgctggactgtggcaactgcagccgcatcttccatggagagaagctgatgaacaccaacctgatcttcatcatggtggagagcaagggcacctgcccctgtgacacccggctgctgatccaggccgagcagaccagtgatggccccaacccctgtgacatggtgaagcagccccgctacagaaaaggaccagatgtgtgctttgacaacaacgtgctggaggactacacagactgtggcggcgtgtctggcctgaaccccagcctgtggtacatcatcggcatccagttcctgctgctgtggctggtgtctggcagcacccaccggctgctgtag

SEQ ID NO: 290140 - DNA, 3333 bp, Artificial Sequence
  derived and/or modified sequence
atggccgccggctgcctgctggccctgaccctgaccctgttccagtctctcctgattggcccctcttcagaggagccattcccaagcgccgtgacaatcaagagctgggtcgataagatgcaagaagacctggtgaccttggcaaaaacagcgagcggagttaaccaactggtggatatatacgagaagtaccaagacttgtatacagtcgagcccaataacgctagacagctggtggagattgctgcacgggatatcgagaaacttctgtcgaatcgctccaaagccctggtacggctggccttggaggccgaaaaagtccaagccgctcaccagtggcgcgaagattttgcctctaacgaggtagtgtactacaacgctaaggatgacctcgatcctgagaagaatgatagcgaaccaggttctcagcgcataaagcccgtctttatcgaggacgctaatttcggacggcagatctcataccagcatgctgcagtccacatcccaactgacatctacgagggctcaacaattgtgctgaacgagctgaactggacatcagccttggatgaggtgtttaagaaaaatagagaggaggatccaagtcttctgtggcaggtattcggctctgctacaggacttgctcgatactatccagccagtccttgggttgataatagccgtacaccaaacaagattgatctttatgacgttaggagaagaccctggtatattcagggggcagcatctcccaaagatatgctgatattggtggatgtatccggatccgtgagtggactcacgcttaaactcattcggacctccgtgtcggagatgctggagaccctgtccgacgatgacttcgtgaacgtagcttccttcaatagcaacgcccaggacgtgtcatgttttcagcacctcgtgcaggccaatgtgcgcaataagaaagtgctcaaagatgccgtcaataatataaccgccaaaggaattacagattataaaaagggtttttcattcgcatttgaacagcttctcaactacaacgtgagccgcgctaactgcaataagatcatcatgctgtttactgacggcggtgaagagcgggcccaggagatcttcaacaagtacaacaaagacaagaaggtccgggtatttaccttctccgtgggccagcataactatgatagggggccaattcaatggatggcatgcgagaacaagggatactactacgagattccatctatcggcgccatccgcatcaatacacaggaatacctggatgtgctcggaagaccaatggtgttggccggggacaaagcgaagcaggttcaatggactaatgtatacctcgacgcactcgagctcggcttggttatcactggcactctcccagtgttcaatatcaccggtcaattcgagaataaaacaaacctcaagaatcagctcatcttgggcgtgatgggcgtcgacgtcagtctcgaggacatcaaacgcctgacacctcggtttactctgtgcccgaacggatattactttgcaatagacccaaatggctacgtgctcctgcatcccaacctgcaacccaagccaattggagtggggatccctaccatcaacctgagaaagaggcgcccaaacattcaaaatcccaaatctcaagagccagtcaccctggattttcttgacgctgagctggaaaatgacattaaggtggagatacgtaacaagatgattgatggtgagtctggggagaaaacgtttagaaccctggtgaagagccaggatgagcggtacatcgacaaggggaacagaacctatacttggacaccggtgaacggtaccgactactccctcgctcttgtgctgccaacctattctttctactacatcaaggcaaaactggaggagaccatcactcaagctaggtgtaaatattgtgagaggtcagactccgagacgctgaaacctgataatttcgaggagagcggctatacatttatcgcccccagagattattgcaacgatctgaaaatttcagacaacaacaccgagtttttactgaacttcaacgagttcattgatcgcaagaccccaaataatcccagctgcaacgccgacttaattaaccgagtgttgctcgatgcaggcttcacaaatgagctagttcagaattattggtccaagcaaaaaaatatcaagggtgttaaggcacgcttcgttgtgacagacggcggtatcacgagggtctatccaaaggaggccggtgaaaattggcaagagaaccctgaaacatatgaggatagcttctataagcgctctctggacaacgataactacgtcttcactgcgccatatttcaataaatctggaccaggggcatatgagtccggcattatggtgagcaaagctgtggagatttacatccaggggaagttactcaagcctgctgtagtgggtattaaaatcgacgttaacagctggatagaaaacttcactaaaacttcaatccgagacccatgtgcgggaccagtctgcgactgtaaacggaactcagacgtcatggactgcgttattttagatgatgggggtttcttgctgatggcgaaccacgatgattacacaaatcaaattgggcgtttctttggcgaaatcgaccccagtctgatgcgtcatctcgtcaacatctccgtgtacgcttttaataagagttacgattaccagagcgtatgtgaacctggagccgcacccaaacagggcgctggccacagaagtgcctacgtgccaagtgtagcagatattctgcagataggctggtgggccaccgcggcagcgtggagcatcctccaacagttcctcctgagccttacctttccaaggctgcttgaggccgtggaaatggaggacgatgattttactgcttcgctcagcaagcagtcttgtattactgaacagacacaatacttttttgacaatgatagcaagtccttctcgggtgtgcttgactgcgggaattgcagccgcatttttcatggggagaagctgatgaacacaaatctcatctttatcatggtggaatctaagggaacatgcccctgcgatacaaggctgctaattcaggctgaacaaaccagtgatggtcccaatccatgtgacatggttaagcagcctcggtatcgaaaaggacctgacgtgtgtttcgataacaatgtcctcgaggattatacggattgtggaggcgtctccggattgaatccctctctttggtatattatcggaatacagtttctattactgtggcttgttagcggatccacccacaggctcctgtag

SEQ ID NO: 290141 - DNA, 3333 bp, Artificial Sequence
  derived and/or modified sequence
atggccgcagggtgcctcctggctctgactttgaccctgttccagtccttgctaatcgggccatcaagtgaagaaccgtttcccagtgccgtgactatcaagtcgtgggtagacaaaatgcaagaggaccttgttaccctggctaagacagcaagcggggtgaatcaactggtcgacatttacgagaaataccaggacctatacaccgtggagcccaacaatgcaaggcagctcgtggagatcgccgcacgggacattgagaagctgctgtcaaaccgcagtaaagccctagttcgccttgctctggaggcagagaaggtgcaggccgctcatcagtggagggaggactttgctagcaatgaagtggtttattataacgccaaagatgatctggatccagaaaaaaatgattctgagcctgggtcccagcgaatcaaaccagtgtttattgaagacgccaattttggacgccagattagctatcaacatgctgcggtgcatatacctaccgatatctatgaggggagtaccattgtactgaatgagctgaattggactagtgcgctcgacgaagtctttaagaaaaatcgtgaagaagatccaagtctcctttggcaggtgttcggcagtgccaccggcttggcacgttactatcccgcttccccgtgggtggacaattcacgaacacccaataaaatcgacctctatgacgtgagaaggagaccatggtatatccaaggagctgctagtcccaaggacatgctgatactagtcgacgtttcaggtagtgtcagtgggctcacgctgaagctgattcggacttcagtcagtgagatgctcgaaactctgtcggacgatgacttcgtgaatgtggccagctttaattctaacgcccaagacgtgagctgctttcagcatctggtccaggccaatgtgcggaacaagaaagtgcttaaggacgctgtgaacaacattaccgctaaggggataaccgattacaaaaaaggtttcagcttcgcttttgagcagttgttgaactacaatgtgagtcgcgctaattgtaataagataatcatgctctttaccgatgggggagaagagagggcccaagaaattttcaataagtataataaagataagaaggtccgtgtgtttacattctcagtgggccaacataattacgaccgtggacctatccagtggatggcatgcgaaaataagggctactattacgaaatccccagcatcggagcaatccgcatcaacacgcaggaatatctcgatgtgctgggcaggccgatggtactcgccggagacaaggcaaaacaggtacagtggacgaacgtgtacctggacgctctggaactggggctcgtgataaccggaactctccctgtgtttaatattaccggtcaattcgagaacaagacaaacctgaagaaccagctcatcttgggagttatgggtgtcgatgtcagcctcgaagatattaagcgtttgaccccccgatttaccctttgccctaatgggtattacttcgctattgaccctaatggctacgtattgctgcaccccaatctccagcctaaacctattggcgtcggtatccctacaattaacctaagaaaaagacggcctaatattcagaatccaaaatcccaggagcccgttacactcgacttcttagacgccgagctggagaatgacatcaaggtggaaattaggaataagatgatcgatggagaaagcggcgaaaaaacattccgcaccttggtcaaatcccaggatgagcggtatatcgataaaggtaacagaacatacacctggacccctgtgaatgggaccgattacagtcttgcccttgttctgcctacttacagcttctactacataaaggccaaactggaggagaccatcacacaagctcgatgtaagtactgtgaacgttccgatagcgaaacattgaaacctgacaattttgaagagtccgggtacacctttatagcacctcgggattactgtaatgaccttaaaatttcagataataatacagagttcctgcttaacttcaatgaatttatcgacaggaagaccccaaacaacccatcatgtaatgcggatctaattaacagagtcctacttgatgcaggattcacaaacgagcttgtgcagaattattggtcaaaacagaagaacataaaaggtgttaaagccaggttcgtcgtgacagatggagggatcactagagtatatcctaaggaggccggagaaaactggcaggaaaatcccgaaacttatgaggacagtttctacaagcggtccctggacaatgacaattacgtattcaccgcaccttatttcaacaagtctgggccaggcgcatacgaaagtggaatcatggtgtccaaggctgtggaaatctacattcaaggtaaactgctgaaacctgctgtcgtggggattaagatcgacgtgaactcatggatagagaacttcacgaaaacatcaatccgtgatccatgcgccggacctgtgtgtgattgcaaacgaaacagcgatgtgatggactgcgtcattctggacgacggtggcttcctactgatggccaaccacgatgactacaccaaccaaatcggacggttttttggagaaatcgacccctcactgatgagacacctagtgaatatctctgtatacgctttcaacaaaagctacgactaccaatctgtctgcgagcctggggcagcccctaaacaaggagcaggacacagatcagcctatgtcccctccgtggcagacatactgcaaataggctggtgggcgacggcagcggcttggtcaatattgcagcagttcttattgagcttgaccttcccccgtcttttagaggctgtagagatggaggacgatgatttcaccgcatccttaagcaagcagagctgtattacggagcagacgcagtactttttcgataatgattccaaatcgttttctggggttctggactgtggcaattgcagtcgtatatttcacggagaaaagctgatgaacaccaacctcatctttatcatggtagagtcaaaagggacttgcccatgtgacactcggctcttgatccaagctgagcagacatcagatggccctaatccatgcgacatggtcaagcagcctcgatacagaaaggggccagatgtttgcttcgacaacaacgtgttggaagactacactgattgtggaggcgtgtcaggcctgaacccaagcctgtggtacatcatcggcatccaattcctgttgttgtggctcgtaagtggaagtacccaccgtctgctatag

SEQ ID NO: 290142 - DNA, 3879 bp, Artificial Sequence
  derived and/or modified sequence
cggcggaggcaaggcggccgcggcgcggagcagccgacgcacgctagtgggtccgcccgccaccgccccttcctcggcgtccgctcccgcccttgccgtcccccgcgcggctccgcgcctcgggccccgggcgcagccagccctccagacgcccgcggtcccggcggcgtgtgctgctcttcctccgcccgcggtttccagcgccgctccttcccccgcttgggcagggagggggcattgatcttcgatcgcgaagatggctgctggctgcctgctggccttgactctgacacttttccaatctttgctcatcggcccctcgtcggaggagccgttcccttcggccgtcactatcaaatcatgggtggataagatgcaagaagaccttgtcacactggcaaaaacagcaagtggagtcaatcagcttgttgatatttatgagaaatatcaagatttgtatactgtggaaccaaataatgcacgccagctggtagaaattgcagccagggatattgagaaacttctgagcaacagatctaaagccctggtgcgcctggcattggaagcggagaaagttcaagcagctcaccagtggagagaagattttgcaagcaatgaagttgtctactacaatgcaaaggatgatctcgatcctgagaaaaatgacagtgagccaggcagccagaggataaaacctgttttcattgaagatgctaattttggacgacaaatatcttatcagcacgcagcagtccatattcctactgacatctatgagggctcaacaattgtgttaaatgaactcaactggacaagtgccttagatgaagttttcaaaaagaatcgcgaggaagacccttcattattgtggcaggtttttggcagtgccactggcctagctcgatattatccagcttcaccatgggttgataatagtagaactccaaataagattgacctttatgatgtacgcagaagaccatggtacatccaaggagctgcatctcctaaagacatgcttattctggtggatgtgagtggaagtgttagtggattgacacttaaactgatccgaacatctgtctccgaaatgttagaaaccctctcagatgatgatttcgtgaatgtagcttcatttaacagcaatgctcaggatgtaagctgttttcagcaccttgtccaagcaaatgtaagaaataaaaaagtgttgaaagacgcggtgaataatatcacagccaaaggaattacagattataagaagggctttagttttgcttttgaacagctgcttaattataatgtttccagagcaaactgcaataagattattatgctattcacggatggaggagaagagagagcccaggagatatttaacaaatacaataaagataaaaaagtacgtgtattcacgttttcagttggtcaacacaattatgacagaggacctattcagtggatggcctgtgaaaacaaaggttattattatgaaattccttccattggtgcaataagaatcaatactcaggaatatttggatgttttgggaagaccaatggttttagcaggagacaaagctaagcaagtccaatggacaaatgtgtacctggatgcattggaactgggacttgtcattactggaactcttccggtcttcaacataaccggccaatttgaaaataagacaaacttaaagaaccagctgattcttggtgtgatgggagtagatgtgtctttggaagatattaaaagactgacaccacgttttacactgtgccccaatgggtattactttgcaatcgatcctaatggttatgttttattacatccaaatcttcagccaaagcctattggtgtaggtataccaacaattaatttaagaaaaaggagacccaatatccagaaccccaaatctcaggagccagtaacattggatttccttgatgcagagttagagaatgatattaaagtggagattcgaaataagatgattgatggggaaagtggagaaaaaacattcagaactctggttaaatctcaagatgagagatatattgacaaaggaaacaggacatacacatggacacctgtcaatggcacagattacagtttggccttggtattaccaacctacagtttttactatataaaagccaaactagaagagacaataactcaggccagatgtaagtactgtgaaagatcagattcggaaaccctgaagccagataattttgaagaatctggctatacattcatagcaccaagagattactgcaatgacctgaaaatatcggataataacactgaatttcttttaaatttcaacgagtttattgatagaaaaactccaaacaacccatcatgtaacgcggatttgattaatagagtcttgcttgatgcaggctttacaaatgaacttgtccaaaattactggagtaagcagaaaaatatcaagggagtgaaagcacgatttgttgtgactgatggtgggattaccagagtttatcccaaagaggctggagaaaattggcaagaaaacccagagacatatgaggacagcttctataaaaggagcctagataatgataactatgttttcactgctccctactttaacaaaagtggacctggtgcctatgaatcgggcattatggtaagcaaagctgtagaaatatatattcaagggaaacttcttaaacctgcagttgttggaattaaaattgatgtaaattcctggatagagaatttcaccaaaacctcaatcagagatccgtgtgctggtccagtttgtgactgcaaaagaaacagtgacgtaatggattgtgtgattctggatgatggtgggtttcttctgatggcaaatcatgatgattatactaatcagattggaagattttttggagagattgatcccagcttgatgagacacctggttaatatatcagtttatgcttttaacaaatcttatgattatcagtcagtatgtgagcccggtgctgcaccaaaacaaggagcaggacatcgctcagcatatgtgccatcagtagcagacatattacaaattggctggtgggccactgctgctgcctggtctattctacagcagtttctcttgagtttgacctttccacgactccttgaggcagttgagatggaggatgatgacttcacggcctccctgtccaagcagagctgcattactgaacaaacccagtatttcttcgataacgacagtaaatcattcagtggtgtattagactgtggaaactgttccagaatctttcatggagaaaagcttatgaacaccaacttaatattcataatggttgagagcaaagggacatgtccatgtgacacacgactgctcatacaagcggagcagacttctgacggtccaaatccttgtgacatggttaagcaacccagataccgaaaagggcctgatgtctgctttgataacaatgtcttggaggattatactgactgtggtggtgtttctggattaaatccctccctgtggtatatcattggaatccagtttctactactttggctggtatctggcagcacacaccgcctgttatgaccttctaaaaaccaaatctgcatagttaaactccagaccctgccaaaacatgagccctgccctcaattacagtaacgtagggtcagctataaaatcagacaaacattagctgggcctgttccatggcataacactaaggcgcagactcctaaggcacccactggctgcatgtcagggtgtcagatccttaaacgtgtgtgaatgctgcatcatctatgtgtaacatcaaagcaaaatcctatacgtgtcctctattggaaaatttgggagtttgttgttgcattgttggt

SEQ ID NO: 290143 - protein, 303 aa, Artificial Sequence
  derived and/or modified sequence
MVGLPEFIPKIVGIKIDVNSWIENFTKTSIRDPCAGPVCDCKRNSDVMDCVILDDGGFLLMANHDDYTNQIGRFFGEIDPSLMRHLVNISVYAFNKSYDYQSVCEPGAAPKQGAGHRSAYVPSVADILQIGWWATAAAWSILQQFLLSLTFPRLLEAVEMEDDDFTASLSKQSCITEQTQYFFDNDSKSFSGVLDCGNCSRIFHGEKLMNTNLIFIMVESKGTCPCDTRLLIQAEQTSDGPNPCDMVKQPRYRKGPDVCFDNNVLEDYTDCGGVSGLNPSLWYIIGIQFLLLWLVSGSTHRLL

SEQ ID NO: 290144 - DNA, 912 bp, Artificial Sequence
  derived and/or modified sequence
atggtgggcctgcccgagttcatccccaagatcgtgggcatcaagatcgacgtgaacagctggatcgagaacttcaccaagaccagcatcagagacccctgcgccggccccgtgtgcgactgcaagagaaacagcgacgtgatggactgcgtgatcctggacgacggcggcttcctgctgatggccaaccacgacgactacaccaaccagatcggcagattcttcggcgagatcgaccccagcctgatgagacacctggtgaacatcagcgtgtacgccttcaacaagagctacgactaccagagcgtgtgcgagcccggcgccgcccccaagcagggcgccggccacagaagcgcctacgtgcccagcgtggccgacatcctgcagatcggctggtgggccaccgccgccgcctggagcatcctgcagcagttcctgctgagcctgaccttccccagactgctggaggccgtggagatggaggacgacgacttcaccgccagcctgagcaagcagagctgcatcaccgagcagacccagtacttcttcgacaacgacagcaagagcttcagcggcgtgctggactgcggcaactgcagcagaatcttccacggcgagaagctgatgaacaccaacctgatcttcatcatggtggagagcaagggcacctgcccctgcgacaccagactgctgatccaggccgagcagaccagcgacggccccaacccctgcgacatggtgaagcagcccagatacagaaagggccccgacgtgtgcttcgacaacaacgtgctggaggactacaccgactgcggcggcgtgagcggcctgaaccccagcctgtggtacatcatcggcatccagttcctgctgctgtggctggtgagcggcagcacccacagactgctgtag

SEQ ID NO: 290145 - DNA, 912 bp, Artificial Sequence
  derived and/or modified sequence
atggtcggactccctgagtttatcccaaaaatcgtgggcatcaagattgatgtcaacagctggatagaaaattttacgaagacatctatccgagatccctgcgccggtcctgtttgtgattgtaagaggaatagcgacgtgatggattgcgtgatcctagacgacggcggcttcctccttatggcaaaccacgacgactacactaaccagataggtcgattttttggtgaaatcgacccgtccctaatgcgccacctggtgaacatatctgtgtacgccttcaataagtcatatgattaccagtctgtatgcgagcctggtgctgctcccaagcagggtgctggacatagatcggcttacgttccctccgtcgccgacattttgcagattggatggtgggctactgcagccgcctggagtatcttgcagcagtttctgctgtctctcacctttcccagactactggaggctgtggaaatggaggatgacgacttcaccgccagccttagcaagcaaagctgtattacagagcaaacccagtattttttcgataatgattctaagagcttctcaggggttctggattgtggcaattgctcacgcatttttcacggggagaaacttatgaataccaacctgatcttcataatggttgagtccaagggaacctgtccatgcgatacgcggctgttaattcaggcagagcagacctccgacggccctaacccgtgcgatatggttaagcagccgaggtaccggaaagggccagatgtgtgcttcgataataatgtgctcgaagactataccgactgtgggggggtgtcaggactgaatccctcactttggtacatcataggcattcagttcctgctgctttggcttgtatctggaagtacccacaggctgctttag

SEQ ID NO: 290146 - DNA, 912 bp, Artificial Sequence
  derived and/or modified sequence
atggtgggcctgcctgagttcatccccaagatcgtgggcatcaagattgatgtgaacagctggattgagaacttcaccaagaccagcatccgggacccctgtgccggccctgtgtgtgactgcaagaggaacagtgatgtgatggactgtgtgatcctggatgatggcggcttcctgctgatggccaaccatgatgactacaccaaccagatcggccgcttctttggagaaattgaccccagcctgatgaggcacctggtgaacatctctgtgtatgccttcaacaagagctatgactaccagagcgtgtgtgagcccggggccgcccccaagcagggcgccggccacaggtctgcctacgtgcccagcgtggccgacatcctgcagatcggctggtgggccacagctgctgcctggagcatcctgcagcagttcctgctgagcctgaccttcccccggctgctggaggccgtggagatggaggatgatgacttcaccgccagcctgagcaagcagagctgcatcacagagcagacccagtacttctttgacaatgacagcaagagcttctctggagtgctggactgtggcaactgcagccgcatcttccacggggagaagctgatgaacaccaacctgatcttcatcatggtggagagcaagggcacctgcccctgtgacacccggctgctgatccaggccgagcagaccagtgatggccccaacccctgtgacatggtgaagcagccccgctacaggaagggcccagatgtgtgctttgacaacaacgtgctggaggactacacagactgtggcggcgtgtctggcctgaaccccagcctgtggtacatcatcggcatccagttcctgctgctgtggctggtgtctggcagcacccaccggctgctgtag

SEQ ID NO: 290147 - DNA, 912 bp, Artificial Sequence
  derived and/or modified sequence
atggtgggcctgcccgagttcatccccaagatcgtgggcatcaagatagacgttaactcttggatcgaaaacttcacgaaaacatccattcgggacccatgcgccgggccggtctgcgactgcaagcgtaactccgatgtgatggattgtgtaatcctcgatgacggtggcttcctgctgatggctaatcatgacgattacacgaatcagatcggacgctttttcggcgagatagacccgtctctcatgagacatctggtcaacataagcgtatatgcatttaataaatcttatgactatcagtctgtttgtgaaccaggcgctgcccccaaacagggcgctggacatcgatccgcttacgtcccctccgtcgcagacattctgcagataggctggtgggcgactgcagccgcctggtccatactacaacagttccttctgtcactgacttttccacggctgttagaggcggtagaaatggaggacgacgattttactgcctccctcagcaagcagagctgtatcactgaacagacacagtactttttcgacaacgactccaagagcttcagcggcgtgcttgattgcggaaactgttccaggatctttcacggtgaaaaactcatgaatactaacttgatcttcataatggtggaatccaaaggcacctgtccatgcgacacccgactacttattcaagccgaacagacatccgatggaccaaacccatgtgacatggtgaaacagccaagatatcgtaaagggcccgacgtgtgttttgataataatgtgctcgaggactacaccgactgcggcggggttagtggtctgaacccaagtctgtggtacattatcggcatccaattcctgcttctctggcttgtaagcggatcaacccatcgcctgctctag

SEQ ID NO: 290148 - DNA, 912 bp, Artificial Sequence
  derived and/or modified sequence
atggtgggcctgccggaattcatccccaaaattgtgggaattaagattgatgtgaactcctggatcgagaatttcactaaaacctctatccgagacccctgtgcgggaccagtgtgcgactgcaagcgaaactccgatgtcatggattgcgttatactcgacgatggtgggttcctcctgatggccaatcacgacgattataccaaccagattggcagattctttggggagatagatccctcactgatgagacatctggttaacatatccgtttatgctttcaacaaaagctatgattatcaatccgtttgtgaacctggggcagcccctaagcaaggggctggacacaggagcgcttacgtcccctcagtggctgatatcttgcagatcggctggtgggccacagccgcagcctggtctatattgcagcagtttctgctatcactgacatttcccagactgctagaggcggtcgagatggaggatgatgacttcactgccagtctttctaagcagtcatgcatcaccgagcagacacagtatttttttgacaacgattcaaagtcgttttcaggagtactggattgcggcaattgtagtaggattttccatggagaaaaactcatgaacaccaatctgatttttatcatggtggagtccaaagggacctgtccttgtgatacgcggctgctgatccaggctgagcagacttccgatgggcctaacccttgcgatatggtgaaacagcctagatacagaaaaggtccagatgtgtgtttcgacaacaacgtgttggaagattacaccgactgtgggggtgtttcgggcctcaacccatctctctggtacattatcggaatccagtttctgctgctttggctagtgagcggctcgactcaccggctcctgtag

SEQ ID NO: 290149 - DNA, 1447 bp, Artificial Sequence
  derived and/or modified sequence
tccttttgtcttacgttttttttctataccaaacaccagccatctctggtagctttcccttatgtatacattcctctctacaagtgataccttcctgctttctgtgtcattgctgtcaattcatactccatgttcaaaatgcacctcagtcattatttcctatgagatgtcttccttaaacatccttcaagtacaaatttaatagatatttaaattattaaaacatagttgtgtatctattgatatatttcctttacttcctaaacttacttctctttgtatcaccaacacctaactttgttttttagaatatgttcaatagaacatttccttgttttgtcttctgtttcagcaagggagtgaaagcacgatttgttgtgactgatggtgggattaccagagtttatcccaaagattgttggaattaaaattgatgtaaattcctggatagagaatttcaccaaaacctcaatcagagatccgtgtgctggtccagtttgtgactgcaaaagaaacagtgacgtaatggattgtgtgattctggatgatggtgggtttcttctgatggcaaatcatgatgattatactaatcagattggaagattttttggagagattgatcccagcttgatgagacacctggttaatatatcagtttatgcttttaacaaatcttatgattatcagtcagtatgtgagcccggtgctgcaccaaaacaaggagcaggacatcgctcagcatatgtgccatcagtagcagacatattacaaattggctggtgggccactgctgctgcctggtctattctacagcagtttctcttgagtttgacctttccacgactccttgaggcagttgagatggaggatgatgacttcacggcctccctgtccaagcagagctgcattactgaacaaacccagtatttcttcgataacgacagtaaatcattcagtggtgtattagactgtggaaactgttccagaatctttcatggagaaaagcttatgaacaccaacttaatattcataatggttgagagcaaagggacatgtccatgtgacacacgactgctcatacaagcggagcagacttctgacggtccaaatccttgtgacatggttaagcaacccagataccgaaaagggcctgatgtctgctttgataacaatgtcttggaggattatactgactgtggtggtgtttctggattaaatccctccctgtggtatatcattggaatccagtttctactactttggctggtatctggcagcacacaccgcctgttatgaccttctaaaaaccaaatctgcatagttaaactccagaccctgccaaaacatgagccctgccctcaattacagtaacgtagggtcagctataaaatcagacaaacattagctgggcctgttccatggcataacactaaggcgcagactccta

SEQ ID NO: 290150 - DNA, 297 bp, Artificial Sequence
  derived and/or modified sequence
atgtggaatcccaacgcggggggacccccacacccagtccctcagcccggatatccaggctgtcaaccattgggcccttatcctcctccctacccacccccagctcctgggatccctcccgtcaaccctctcgcaccgggtatggtcggaccggcagtgattgtcgacaaaaagatgcaaaaaaagatgaagaaggctcacaagaaaatgcataagcatcagaagcaccataagtaccataagcacgggaagcattcaagtagcagctcctcctcttccagcagcgattcagactag

SEQ ID NO: 290151 - protein, 399 aa, Artificial Sequence
  derived and/or modified sequence
MQSLSLGQTSISKGLNYLTIMAPGNLWHMRNNFLFGSRCWMTRFSAENIFKSVSFRLFGVKCHNTDSEPLKNEDLLKNLLTMGVDIDMARKRQPGVFHRMITNEQDLKMFLLSKGASKEVIASIISRYPRAITRTPENLSKRWDLWRKIVTSDLEIVNILERSPESFFRSNNNLNLENNIKFLYSVGLTRKCLCRLLTNAPRTFSNSLDLNKQMVEFLQAAGLSLGHNDPADFVRKIIFKNPFILIQSTKRVKANIEFLRSTFNLNSEELLVLICGPGAEILDLSNDYARRSYANIKEKLFSLGCTEEEVQKFVLSYPDVIFLAEKKFNDKIDCLMEENISISQIIENPRVLDSSISTLKSRIKELVNAGCNLSTLNITLLSWSKKRYEAKLKKLSRFA

SEQ ID NO: 290152 - protein, 158 aa, Artificial Sequence
  derived and/or modified sequence
MQSLSLGQTSISKGLNYLTIMAPGNLWHMRNNFLFGSRCWMTRFSAENIFKSVSFRLFGVKCHNTDSEPLKNEDLLKNLLTMGVDIDMARKRQPGVFHRMITNEQDLKMFLLSKGASKEVIASIISRYPRAITRTPENLSKRWDLWRKIVTSDLEIVN

SEQ ID NO: 290153 - DNA, 1200 bp, Artificial Sequence
  derived and/or modified sequence
atgcagtccttaagtctgggtcagacaagtatttctaagggcctgaactatctcaccatcatggcccccggtaacctgtggcatatgcgcaacaactttctattcggctcccgctgttggatgacaaggtttagcgctgagaacatctttaaatccgtctcctttcgactgtttggcgtgaaatgtcataacaccgattcagagcctctcaaaaatgaagacctgttgaagaacctgctgacaatgggcgtcgatatagacatggcaagaaagcgccagccgggagtcttccataggatgatcactaacgaacaggacctcaagatgtttttattaagtaagggggcctcgaaggaggttattgcctcaattatcagccggtaccctcgcgcaataacacggactccggagaacttatcgaagcgctgggacctgtggcgtaagatcgtcacttctgaccttgagatagtgaatatcttggagagatcgcccgaaagcttctttcgttcaaataataacttgaaccttgaaaacaatataaagtttctctattcagtgggcctgactaggaaatgtctgtgcaggctgctaacgaacgcccctagaactttctctaatagcctggatctaaacaaacaaatggtggaattcctgcaggcggcaggcctctctctcggccataacgaccccgcagacttcgtgaggaaaattatctttaaaaatcctttcatcttaatccagtccactaaaagggtgaaagcgaatatagaatttctcaggtcgacattcaatcttaactcagaggagctgttggtgcttatatgtggccctggggccgaaatactggacttgtccaatgactatgcgcggaggtcctatgccaatattaaggagaaacttttctcccttgggtgtactgaggaggaggtgcagaaattcgtgctcagttacccagacgtcatttttcttgccgagaaaaagttcaatgataagattgactgcctgatggaggaaaatatctccatcagtcagattatcgaaaaccctcgggtcttggactcctctattagcacccttaagtcacggatcaaagagctcgttaacgctggatgcaacctttccaccctgaacatcaccctgctgtcatggagtaagaaacgctacgaagcaaagttgaagaaactgagcaggtttgcttag

SEQ ID NO: 290154 - DNA, 477 bp, Artificial Sequence
  derived and/or modified sequence
atgcaatcgttgtcattgggccagacatctatctcaaaagggctgaactatctgacaatcatggcccctgggaacctgtggcatatgaggaacaattttctttttgggagccgatgctggatgacaagattttctgctgagaacatctttaaatccgtgtcttttcgactattcggcgtgaagtgccataatactgactccgagccgctgaaaaacgaggatctgctgaaaaatctacttacgatgggtgtagacattgacatggcacggaaaaggcagccgggcgtgttccacaggatgatcaccaacgagcaggatctcaagatgtttttacttagcaagggggccagcaaagaggtaatcgcatcaatcatttccagatacccccgcgctatcacaagaaccccagaaaatctcagtaaacgatgggatctgtggcgcaagattgtaacatcagatctcgaaatcgttaattag

SEQ ID NO: 290155 - DNA, 1200 bp, Artificial Sequence
  derived and/or modified sequence
atgcagagcctgagcctgggccagaccagcatcagcaagggcctgaactacctgaccatcatggcccctggcaacctgtggcacatgaggaacaacttcctgtttggcagccgctgctggatgacccgcttctctgctgagaacatcttcaagtctgtgtccttccggctgtttggagtgaagtgccacaacacagattctgagcccctgaagaatgaagacctgctgaagaacctgctgaccatgggcgtggacatcgacatggccaggaagaggcagcccggggtcttccacaggatgatcaccaatgagcaggacctgaagatgttcctgctgagcaagggggccagcaaggaggtgattgccagcatcatcagccgctacccccgggccatcaccaggaccccagagaacctgagcaagcgctgggacctgtggaggaagatcgtgaccagtgacctggagatcgtgaacatcctggagaggagccctgagagcttcttccgcagcaacaacaacctgaacctggagaacaacatcaagttcctgtacagcgtgggcctgaccaggaagtgcctgtgccgcctgctgaccaatgcccccaggaccttcagcaacagcctggacctgaacaagcagatggtggagttcctgcaggccgccggcctgagcctgggccacaatgaccctgctgactttgtgaggaagatcatcttcaagaaccccttcatcctgatccagagcaccaagagggtgaaggccaacatcgagttcctgcggagcaccttcaacctgaacagcgaggagctgctggtgctgatctgtggccctggagctgagatcctggacctgagcaatgactatgcccggcgctcctatgccaacatcaaggagaagctgttcagcctgggctgcacagaggaggaggtgcagaagtttgtgctgagctacccagatgtgatcttcctggccgagaagaagttcaatgacaagattgactgcctgatggaggagaacatcagcatcagccagatcatcgagaacccccgggtgctggacagcagcatcagcaccctgaagagccgcatcaaggagctggtgaatgccggctgcaacctgagcaccctgaacatcaccctgctgtcctggagcaagaagagatatgaggccaagctgaagaagctgagcagatttgcctag

SEQ ID NO: 290156 - DNA, 477 bp, Artificial Sequence
  derived and/or modified sequence
atgcagagcctgagcctgggccagaccagcatcagcaagggcctgaactacctgaccatcatggcccctggcaacctgtggcacatgaggaacaacttcctgtttggcagccgctgctggatgacccgcttctctgctgagaacatcttcaagtctgtgtccttccggctgtttggagtgaagtgccacaacacagattctgagcccctgaagaatgaagacctgctgaagaacctgctgaccatgggcgtggacatcgacatggccaggaagaggcagcccggggtcttccacaggatgatcaccaatgagcaggacctgaagatgttcctgctgagcaagggggccagcaaggaggtgattgccagcatcatcagccgctacccccgggccatcaccaggaccccagagaacctgagcaagcgctgggacctgtggaggaagatcgtgaccagtgacctggagatcgtgaactag

SEQ ID NO: 290157 - DNA, 1997 bp, Artificial Sequence
  derived and/or modified sequence
ctagccgctccggaccccagaggcggaagtaaaagcgaactacagtggatgggtgcagttcaggagatagctgttctccagcctttctggagggatgcagagcctttccttaggacaaacaagcatttcaaaaggtttgaactacctaaccattatggcaccaggaaacctctggcatatgagaaataactttctctttggttcaagatgttggatgactcgattttcagcagaaaacatcttcaaatcagtttcatttaggctttttggtgtgaagtgtcataatacagacagtgagcctttgaaaaatgaggacctactgaaaaacttacttactatgggagtagatattgacatggcaaggaaacgacagcctggagtttttcataggatgattaccaatgagcaggacctgaagatgttccttctttccaaaggagctagcaaagaagtgatcgctagcatcatatcaagatatccacgagcaataacacgtactcccgagaatctttcaaaacggtgggatctgtggagaaagattgtgacatcagaccttgaaattgtaaatattttggaacgttctcctgaatccttttttcggtccaataacaacctaaacttagagaataatataaagttcctctactcagttggattgacccgtaaatgcctttgtcgattgttgaccaatgcccctcgtaccttctccaatagtcttgatctgaataaacagatggttgaatttttgcaggcagccggtttgtcattgggtcacaatgatcccgcagattttgtcagaaagataatttttaaaaacccttttatcttaattcagagcaccaagcgggtgaaagctaacattgaattcttacggtcaactttcaatttgaacagtgaggaactgctggttctgatatgtggtccaggagctgaaatcctagacctttccaatgactatgccagaagaagctacgcaaacatcaaagagaagctgttttctcttggatgtactgaagaagaggtacagaagtttgtcttaagctatccagatgtgatcttcttggcagagaaaaagtttaatgataaaatagactgcctcatggaagaaaacattagcatttcacaaataatcgaaaatcctcgggttctggattcaagcataagtactttaaaaagtcgaatcaaagaattggtaaatgctggctgtaacttgagtactttaaacatcactcttctatcttggagtaaaaaaagatatgaagctaaattgaaaaagttaagcagatttgcctaaggatgccaatgtttttaattctcaggaactgtgaatatgttatgccacattgcaaaagaattttgcagaagtgattaatttaaaatgttattaagggccttgagatggggagattatcctgaattactttggagggcctaatataattgtagggatctttaaaagttgaagagggaggcaaaagaggaggtcagagtgatcctgtataagaaagacaactacttttgaaggaagttaaaaggtggctttgaaggaggaagacaccttgagccaaggaatgaagggggcctgtaaaaaaagattgaaaaggcaaggaaacagattctccattagagtccccagaaaggaatgcagccttgctggcacctttttagcccagtgagatcaatgtcaaacttctgacccacagaaccataagatggtaaatttgtgttgttttaaaccactgagtcagtgataatttgctgaagaagcaaatagattaacatagcaactaagtagatgattagttgcattataggtgaagtcaaaaatacagtcctttagtaaagtctctatttcttccttttataagagtaattatatttaaaaaatctacctacccttctggaattgctaatgttagtgtttataaagtcttaaatgtgtgcataaaaaactaaatgtgaatataaaatctaaataaaggaatatgtttgcctaa

SEQ ID NO: 290158 - DNA, 554 bp, Artificial Sequence
  derived and/or modified sequence
aaaagcgaactacagtggatgggtgcagttcagggtgagattgggaagagatagctgttctccagcctttctggagggatgcagagcctttccttaggacaaacaagcatttcaaaaggtttgaactacctaaccattatggcaccaggaaacctctggcatatgagaaataactttctctttggttcaagatgttggatgactcgattttcagcagaaaacatcttcaaatcagtttcatttaggctttttggtgtgaagtgtcataatacagacagtgagcctttgaaaaatgaggacctactgaaaaacttacttactatgggagtagatattgacatggcaaggaaacgacagcctggagtttttcataggatgattaccaatgagcaggacctgaagatgttccttctttccaaaggagctagcaaagaagtgatcgctagcatcatatcaagatatccacgagcaataacacgtactcccgagaatctttcaaaacggtgggatctgtggagaaagattgtgacatcagaccttgaaattgtaaatat

SEQ ID NO: 290159 - DNA, 1200 bp, Artificial Sequence
  derived and/or modified sequence
atgcagagcctgagcctgggccagaccagcatcagcaagggcctgaattaccttactatcatggcccctggcaacctgtggcacatgcggaataacttccttttcggatctcgctgttggatgactagattctcggccgagaacattttcaagagcgtgtcgtttaggctatttggcgtgaaatgtcacaataccgactccgagccgctgaagaacgaagatcttctgaagaacctattaactatgggcgtagatatcgacatggcccgaaagcgccagccaggcgtcttccatcgtatgatcaccaatgagcaagatttgaaaatgtttctgctctccaagggagcatcaaaggaggtgattgccagcatcatcagccgttatccgcgggcaattacacgcacgcctgaaaatctgtctaagaggtgggatctttggaggaaaatcgtgacaagcgatctggaaattgttaatatccttgaacgtagccctgaatccttctttaggagtaataataatttaaacctggagaataatatcaaatttctgtactcagttggactgactcggaagtgcctgtgccggctgcttaccaatgcacccaggacattctctaactctctggacctgaacaagcagatggtcgagttcctgcaagccgctggcctaagcctcggacacaatgatcctgccgactttgtgaggaaaattattttcaagaacccattcatcctcatccagagcaccaagagagtaaaggctaatatcgagttcttgcgatctactttcaatctcaactctgaggagcttctggtgttaatatgtggccccggggccgaaattcttgatttatccaatgattatgcccggaggtcttatgccaatatcaaggaaaaactgttctccctcggttgcaccgaggaggaagtgcaaaagtttgtcctgagttaccccgacgtgatttttctagcagaaaaaaaattcaacgataagatcgattgcctcatggaagaaaacattagcatcagccagatcatcgaaaacccgagggtcttggactcatcaatctctaccctgaagtcccgaatcaaagaattagtaaatgccggctgcaatttgtctaccctgaacatcaccctgctgagctggtctaagaaacgctacgaggccaaactgaagaagctttcccggttcgcatag

SEQ ID NO: 290160 - DNA, 477 bp, Artificial Sequence
  derived and/or modified sequence
atgcagagcctgagcctgggccagaccagcatcagcaagggcctgaattatctgacaatcatggctccaggaaatctgtggcacatgagaaataattttctgttcggttcccgctgctggatgacgaggttctccgccgagaacatatttaagtctgtgtcttttagattgttcggagtgaagtgccataacaccgactccgaacccctgaagaacgaagacttactgaagaatttactaaccatgggcgtcgacatcgacatggcacggaagagacagcccggcgtttttcataggatgattaccaatgagcaggacctgaaaatgttcttgctctctaaaggagcaagcaaggaagtgatcgccagcataatcagtcgctatccaagggctatcactcgcacacctgaaaacctcagcaaaagatgggatctctggcgcaaaattgtgacctctgatctcgaaatagtaaattag

SEQ ID NO: 290161 - DNA, 1200 bp, Artificial Sequence
  derived and/or modified sequence
atgcagtctctttctctgggtcaaacatcaatttcaaagggattgaattaccttaccataatggctcccggaaatctctggcatatgaggaacaactttctttttgggagtagatgctggatgactagattttcagccgaaaacattttcaaatctgtgagcttccgtctatttggcgtgaagtgtcacaatactgactcggagcccctcaaaaatgaagatcttctgaagaacttgctcactatgggcgtcgatatcgatatggccagaaaacgacagcccggagtgtttcataggatgatcacaaatgaacaagatctaaaaatgttcctgctctctaagggggctagcaaagaagtgatcgcgtccatcatttcccgttatccacgggctatcaccaggactcctgagaatcttagtaaacggtgggatctgtggcgcaagatcgttacttcagatctcgaaattgttaacatcctagaacggagccccgaatccttcttcaggagtaacaataatctgaatctcgaaaacaatattaaatttctgtactccgttgggttgaccaggaaatgcctctgccgattattgacaaatgccccaaggactttttcaaactctttagatctgaacaaacagatggtagaattcctgcaggcagccggactttccctgggccataacgacccagctgatttcgtgaggaaaatcatctttaaaaacccttttattctgatccagtctacaaaacgcgtgaaggcgaatatagagtttttgcgatctaccttcaatttaaactctgaggaactcctagtcctgatatgcggcccaggcgctgagattctggacctatccaatgactatgccaggcgatcctatgcaaatattaaggagaagttattctcactagggtgcacagaagaggaggtccagaagtttgtgttgtcttacccagatgtcatttttctcgccgagaaaaaatttaacgacaagattgattgcctcatggaggagaatatttcaatcagtcaaattattgagaatccacgggttctggactcctcaatctctactctgaagagccgaatcaaggagctcgtgaacgctggatgcaacttgagtacgctgaacatcactctgctgtcgtggagcaaaaaacgctacgaagcaaagctgaaaaagctttctcgctttgcatag

SEQ ID NO: 290162 - DNA, 477 bp, Artificial Sequence
  derived and/or modified sequence
atgcagtcactttcattgggccagacgtctatcagtaagggcctgaactaccttacaattatggctccaggcaacttatggcatatgagaaacaattttctcttcggaagcagatgctggatgacccggttttctgccgaaaacatcttcaaatctgtaagcttcaggctgtttggcgttaagtgtcacaacacagattctgagccactaaaaaacgaggatctgctcaagaatctgttgactatgggcgtggatattgatatggcccgtaagagacaaccgggtgtgttccataggatgatcacgaatgagcaagacttgaagatgtttctactatccaagggtgcatcaaaagaggttatagctagcattatctccaggtaccctagagcaattacgcgcacccctgagaacctatccaagagatgggatctctggcgcaagattgtcacatcagacctggagatcgtgaactag

SEQ ID NO: 290163 - DNA, 1200 bp, Artificial Sequence
  derived and/or modified sequence
atgcagagcctgagcctgggccagaccagcatcagcaagggcctgaactacctgaccatcatggcccccggcaacctgtggcacatgagaaacaacttcctgttcggcagcagatgctggatgaccagattcagcgccgagaacatcttcaagagcgtgagcttcagactgttcggcgtgaagtgccacaacaccgacagcgagcccctgaagaacgaggacctgctgaagaacctgctgaccatgggcgtggacatcgacatggccagaaagagacagcccggcgtgttccacagaatgatcaccaacgagcaggacctgaagatgttcctgctgagcaagggcgccagcaaggaggtgatcgccagcatcatcagcagataccccagagccatcaccagaacccccgagaacctgagcaagagatgggacctgtggagaaagatcgtgaccagcgacctggagatcgtgaacatcctggagagaagccccgagagcttcttcagaagcaacaacaacctgaacctggagaacaacatcaagttcctgtacagcgtgggcctgaccagaaagtgcctgtgcagactgctgaccaacgcccccagaaccttcagcaacagcctggacctgaacaagcagatggtggagttcctgcaggccgccggcctgagcctgggccacaacgaccccgccgacttcgtgagaaagatcatcttcaagaaccccttcatcctgatccagagcaccaagagagtgaaggccaacatcgagttcctgagaagcaccttcaacctgaacagcgaggagctgctggtgctgatctgcggccccggcgccgagatcctggacctgagcaacgactacgccagaagaagctacgccaacatcaaggagaagctgttcagcctgggctgcaccgaggaggaggtgcagaagttcgtgctgagctaccccgacgtgatcttcctggccgagaagaagttcaacgacaagatcgactgcctgatggaggagaacatcagcatcagccagatcatcgagaaccccagagtgctggacagcagcatcagcaccctgaagagcagaatcaaggagctggtgaacgccggctgcaacctgagcaccctgaacatcaccctgctgagctggagcaagaagagatacgaggccaagctgaagaagctgagcagattcgcctag

SEQ ID NO: 290164 - DNA, 477 bp, Artificial Sequence
  derived and/or modified sequence
atgcagagcctgagcctgggccagaccagcatcagcaagggcctgaactacctgaccatcatggcccccggcaacctgtggcacatgagaaacaacttcctgttcggcagcagatgctggatgaccagattcagcgccgagaacatcttcaagagcgtgagcttcagactgttcggcgtgaagtgccacaacaccgacagcgagcccctgaagaacgaggacctgctgaagaacctgctgaccatgggcgtggacatcgacatggccagaaagagacagcccggcgtgttccacagaatgatcaccaacgagcaggacctgaagatgttcctgctgagcaagggcgccagcaaggaggtgatcgccagcatcatcagcagataccccagagccatcaccagaacccccgagaacctgagcaagagatgggacctgtggagaaagatcgtgaccagcgacctggagatcgtgaactag

SEQ ID NO: 290165 - DNA, 1692 bp, Artificial Sequence
  derived and/or modified sequence
atggacgactttgaaaggaggagggaactgagaaggcaaaagcgcgaagaaatgaggctggaggcagagagaatagcttatcagagaaatgacgatgatgaggaggaagccgctcgcgaacgtcgcagacgggctcggcaagagaggctccgacaaaaacaggaggaggagtcgctagggcaggtgaccgaccaggttgaggtgaatgcacagaattctgtccctgacgaggaggccaaaacgaccacaacaaacacccaggtcgagggcgacgatgaagcagccttcctcgaacggcttgcccggagggaggagaggcggcagaaacgactgcaggaggctctggaaagacagaaagagtttgaccctacaattacggacgcaagtctgagtctgccatcccgtagaatgcagaatgataccgccgagaatgagaccactgaaaaggaggaaaagagcgagtcgagacaggagcgctacgagatcgaggaaacggagactgtgaccaagagttatcaaaagaacgattggcgggacgcggaagagaacaagaaggaagacaaggaaaaggaagaggaagaagaagaaaaacctaagagaggttccattggtgaaaatcagggggaggagaaaggcactaaggtgcaggccaaacgcgaaaaactgcaagaagataaacctacttttaaaaaagaagagattaaagatgaaaaaattaaaaaagataaggagccaaaggaggaggtcaaatcgttcatggataggaagaagggcttcaccgaggtaaagtcccagaacggagaattcatgactcacaagctgaagcacactgaaaacaccttctctcgacccggcggtcgggccagtgtggacacaaaagaagctgagggggccccgcaggtggaggccgggaaacgcctcgaggaactgcgcaggagacgaggcgaaactgaatccgaggaattcgaaaagctgaaacagaagcagcaagaagccgccctggaactggaggagttaaagaagaaacgggaggaacgacgaaaagttcttgaagaagaggagcagaggaggaagcaggaagaggccgaccggaagctgagggaagaagaggagaagcggcgtctcaaagaagaaattgaacgacgaagagcggaagccgctgagaagaggcaaaaaatgccagaagatgggctgagcgatgacaaaaagcccttcaaatgttttactcctaaaggtagcagcctgaagattgaagaacgcgcagaatttctcaacaagagtgtgcaaaagtctggtgttaagagcacccatcaagccgcgatagtttccaagattgacagcaggctggagcagtacacctctgccatcgaaggaaccaagtcagcaaagccgactaaaccagcagcgtcagacctgcccgtgcccgcggaaggagtgcggaacatcaaatcaatgtgggaaaaaggtaacgtcttttcctcacccaccgctgcagggactcctaataaggagacggctgggctcaaagtcggtgttagttcgcgaatcaacgaatggctcaccaaaaccccagatggaaacaagagcccagcccccaagccatctgacctgaggcccggcgatgtgtcgagcaaaaggaacctgtgggaaaagcagtccgtagataaggtgaccagcccgactaaagtatag

SEQ ID NO: 290166 - DNA, 528 bp, Artificial Sequence
  derived and/or modified sequence
atgccagaggacggcctctctgatgataaaaaacccttcaagtgtttcacacctaaagggagctccctgaaaatagaggagagagccgagttcttgaataagtccgtacagaaaagcggtgtcaaatctacccaccaggccgcaattgtgagcaagatcgatagtaggctagagcagtacacttctgccattgagggcaccaaatctgccaaacctacaaaacctgccgcatcggacctgcctgtccctgcagagggcgtacgcaatattaagtctatgtgggaaaagggaaacgtgttttcttccccaaccgcagccggaaccccaaataaagaaactgcgggacttaaagtgggcgtgagctcaaggattaatgaatggttgaccaagacccctgatgggaacaagtcaccggcacccaaaccgtctctgacattctgcagtagcctgttcggcttgtggttaataggtaacctcctgctcctccctagctttctgccactgctgcccgagtgggtcttcctgtag

SEQ ID NO: 290167 - DNA, 219 bp, Artificial Sequence
  derived and/or modified sequence
atggatgacttcgagcgcagacgggagctacggaggcaaaagcgggaggagatgcgcttagaagccgagcgcatcgcataccagcggaatgatgacgatgaggaagaggctgcccgcgaaaggcgccgcagggcacgccaggagcgcttgcgtcagaagcaggaggaggaatccctggggcaggttacagatcaggttgaagtcaacgcccagaactag

SEQ ID NO: 290168 - DNA, 1380 bp, Artificial Sequence
  derived and/or modified sequence
atggatgatttcgaaaggagaagagaactgcgccggcagaaacgagaggaaatgcggttggaggccgagaggatcgcataccaaaggaacgacgacgatgaggaagaagcagccagagagcgtcgtcggcgggcccgacaggaacgtttaagacagaagcaagaggaagagagtctaggtcaagtcactgatcaggtagaggtgaacgcgcaaaattccgtgccagacgaggaagctaagaccacaacaaccaatacccaagtcgagggagatgacgaggccgcattcctggagcgactggcccgaagggaagagcggcggcaaaagagacttcaggaggcccttgagcggcagaaggagttcgaccctaccattaccgacgcctcattgtccctgccctctcgcagaatgcagaacgacactgcagagaacgagactaccgaaaaggaagagaaatcggaatcccgtcaggagaggtacgagatagaagaaactgagacagtgactaaatcctatcaaaaaaacgactggagagatgccgaggaaaataagaaagaggacaaagagaaagaagaggaagaggaagaaaaaccgaagcgggggtctatcggagagaatcagatcaaagatgagaagataaaaaaggacaaagaacccaaggaggaagtcaagagctttatggaccggaagaaggggtttactgaggtgaaatcccagaacggcgaattcatgacccacaaactgaagcacacggagaacacgttctctagacccggtggcagggcttccgttgatacaaaagaggcggaaggtgctccacaggttgaagccgggaaacggctggaagagctgcgcagacgccgcggggaaacggagagtgaagagttcgagaagctgaagcaaaagcaacaggaagcagctctggagttggaggagctgaagaagaagagggaggaaagacgcaaggtgctagaggaggaagagcagaggaggaagcaggaggaagccgatcgaaagctgcgggaggaagaggaaaaaagacgactgaaggaggagatcgagcgcagacgtgccgaggctgctgagaagagacagaagatgcctgaggatggcctgagcgacgataaaaaaccctttaagtgctttactccgaaaggctctagtctgaagatagaggagcgagctgagttccttaacaagagcgtacaaaagtcaagcggtgtcaaatctactcaccaggcggccattgtgagcaaaatcgactccaggcttgagcaatatacctctgctattgagggaacgaaaagtgccaaaccaactaagcccgccgcctctgatcttcccgttcccgccgagggagtgaggaatatcaaatcttag

SEQ ID NO: 290169 - DNA, 219 bp, Artificial Sequence
  derived and/or modified sequence
atggacgacttcgaaaggcgtcgcgagctcaggcggcagaaaagagaagagatgcgattggaggccgagaggattgcctatcagcgcaacgacgatgacgaggaggaggcggcaagggagaggagacgccgggcccggcaagagcggctgaggcagaagcaggaagaggaaagcttaggacaagtgacagatcaagtggaagtgaatgcgcagaactag

SEQ ID NO: 290170 - DNA, 1692 bp, Artificial Sequence
  derived and/or modified sequence
atggatgactttgagaggagaagagagctgcggcggcagaagcgggaggagatgaggctggaggccgagagaattgcctaccagagaaatgatgatgatgaggaggaggccgcccgggagaggagaagaagagcccggcaggagcggctgcggcagaagcaggaggaggagagcctgggccaggtgacagaccaggtggaggtgaatgcccagaacagcgtgcctgatgaggaggccaagaccaccaccaccaacacccaggtggagggagatgatgaggccgccttcctggagcggctggcccggcgggaggagcggcggcagaagaggctgcaggaggccctggagcggcagaaggagtttgaccccaccatcacagatgccagcctgagcctgcccagcaggaggatgcagaatgacacagcagaaaatgagaccacagagaaggaggagaagtctgagagccggcaggagagatatgaaattgaggagacagaaacagtgaccaagagctaccagaagaatgactggagagatgctgaggagaacaagaaggaggacaaggagaaggaggaggaggaggaggagaagcccaagaggggcagcattggagagaaccagggcgaggagaagggcaccaaggtgcaggccaagcgggagaagctgcaggaggacaagcccaccttcaagaaggaggagatcaaggatgagaagatcaagaaggacaaggagcccaaggaggaggtgaagagcttcatggacaggaagaagggcttcacagaggtgaagagccagaatggagagttcatgacccacaagctgaagcacacagagaacaccttcagcaggcctgggggccgggcctctgtggacaccaaggaggccgagggcgccccccaggtggaggccggcaagaggctggaggagctgcggaggagaagaggagaaacagaaagtgaggagtttgagaagctgaagcagaagcagcaggaggccgccctggagctggaggagctgaagaagaagcgggaggagaggaggaaggtgctggaggaggaggagcagaggaggaagcaggaggaggccgacaggaagctgcgggaggaggaggagaagaggcggctgaaggaggagattgaaagaagaagagctgaggccgctgagaagaggcagaagatgccagaagatggcctgagtgatgacaagaagcccttcaagtgcttcacccccaagggcagcagcctgaagattgaggagagagctgagttcctgaacaagtctgtgcagaagtctggagtgaagagcacccaccaggccgccatcgtgtccaagattgacagccggctggagcagtacaccagcgccatcgagggcaccaagagcgccaagcccaccaagccagctgccagtgacctgcctgtgcctgctgagggcgtgaggaacatcaagtccatgtgggagaagggaaatgtgttcagcagccccacagctgctggcacccccaacaaggagacagctggcctgaaggtgggcgtgagcagccgcatcaatgagtggctgaccaagaccccagatggcaacaagagccctgcccccaagcccagcgacctgcggcctggagatgtgagcagcaagaggaacctgtgggagaagcagagcgtggacaaggtgaccagccccaccaaggtgtag

SEQ ID NO: 290171 - DNA, 528 bp, Artificial Sequence
  derived and/or modified sequence
atgccagaagatggcctgagtgatgacaagaagcccttcaagtgcttcacccccaagggcagcagcctgaagattgaggagagagctgagttcctgaacaagtctgtgcagaagtctggagtgaagagcacccaccaggccgccatcgtgtccaagattgacagccggctggagcagtacaccagcgccatcgagggcaccaagagcgccaagcccaccaagccagctgccagtgacctgcctgtgcctgctgagggcgtgaggaacatcaagtccatgtgggagaagggaaatgtgttcagcagccccacagctgctggcacccccaacaaggagacagctggcctgaaggtgggcgtgagcagccgcatcaatgagtggctgaccaagaccccagatggcaacaagagccctgcccccaagcccagcctgaccttctgcagcagcctgtttggcctgtggctgattggcaacctgctgctgctgcccagcttcctgcccctgctgcctgagtgggtgttcctgtag

SEQ ID NO: 290172 - DNA, 219 bp, Artificial Sequence
  derived and/or modified sequence
atggatgactttgagaggagaagagagctgcggcggcagaagcgggaggagatgaggctggaggccgagagaattgcctaccagagaaatgatgatgatgaggaggaggccgcccgggagaggagaagaagagcccggcaggagcggctgcggcagaagcaggaggaggagagcctgggccaggtgacagaccaggtggaggtgaatgcccagaactag

SEQ ID NO: 290173 - DNA, 1380 bp, Artificial Sequence
  derived and/or modified sequence
atggatgactttgagaggagaagagagctgcggcggcagaagcgggaggagatgaggctggaggccgagagaattgcctaccagagaaatgatgatgatgaggaggaggccgcccgggagaggagaagaagagcccggcaggagcggctgcggcagaagcaggaggaggagagcctgggccaggtgacagaccaggtggaggtgaatgcccagaacagcgtgcctgatgaggaggccaagaccaccaccaccaacacccaggtggagggagatgatgaggccgccttcctggagcggctggcccggcgggaggagcggcggcagaagaggctgcaggaggccctggagcggcagaaggagtttgaccccaccatcacagatgccagcctgagcctgcccagcaggaggatgcagaatgacacagcagaaaatgagaccacagagaaggaggagaagtctgagagccggcaggagagatatgaaattgaggagacagaaacagtgaccaagagctaccagaagaatgactggagagatgctgaggagaacaagaaggaggacaaggagaaggaggaggaggaggaggagaagcccaagaggggcagcattggagagaaccagatcaaggatgagaagatcaagaaggacaaggagcccaaggaggaggtgaagagcttcatggacaggaagaagggcttcacagaggtgaagagccagaatggagagttcatgacccacaagctgaagcacacagagaacaccttcagcaggcctgggggccgggcctctgtggacaccaaggaggccgagggcgccccccaggtggaggccggcaagaggctggaggagctgcggaggagaagaggagaaacagaaagtgaggagtttgagaagctgaagcagaagcagcaggaggccgccctggagctggaggagctgaagaagaagcgggaggagaggaggaaggtgctggaggaggaggagcagaggaggaagcaggaggaggccgacaggaagctgcgggaggaggaggagaagaggcggctgaaggaggagattgaaagaagaagagctgaggccgctgagaagaggcagaagatgccagaagatggcctgagtgatgacaagaagcccttcaagtgcttcacccccaagggcagcagcctgaagattgaggagagagctgagttcctgaacaagtctgtgcagaagagcagcggcgtgaagagcacccaccaggccgccatcgtgtccaagattgacagccggctggagcagtacaccagcgccatcgagggcaccaagagcgccaagcccaccaagccagctgccagtgacctgcctgtgcctgctgagggcgtgaggaacatcaagagctag

SEQ ID NO: 290174 - DNA, 1692 bp, Artificial Sequence
  derived and/or modified sequence
atggacgacttcgagcggcggcgggagctgcggcggcagaagcgggaggagatgcgtctagaggccgaaaggattgcatatcagcgcaacgatgacgatgaggaggaagctgcacgggaaagaagacgcagagccagacaggagcgtctgcgtcagaaacaggaggaagagtccctgggccaagtcacagatcaggtggaagtgaatgcccaaaactccgtccccgatgaggaagctaaaactaccacaaccaatacccaggtcgagggcgacgacgaagctgcattccttgagagacttgcccgccgagaggagagaagacagaaacgattacaagaagctttggagcgccagaaagagtttgaccccaccatcacagatgcctccctgtcgcttccttcacggaggatgcagaacgacaccgcggaaaatgaaacgactgaaaaggaggagaagtcagagtctcggcaagaaaggtacgagattgaggagactgaaacggtcacaaagtcctaccagaaaaatgattggcgcgacgccgaagagaataagaaagaggacaaggaaaaggaggaggaggaggaggagaagccaaagcgcggtagtataggggagaaccagggggaggaaaagggcaccaaagtccaggccaaaagagagaagttacaggaagacaaacccaccttcaaaaaggaagagatcaaagacgaaaaaattaagaaggacaaagagccgaaagaggaggtgaagtcctttatggatcgaaaaaagggttttacagaggttaagagccagaatggagaatttatgacgcataagctcaaacatacagagaatacgtttagtcgccctggtggccgcgccagcgttgatacgaaagaagcagaaggtgcccctcaggtcgaggcaggcaagcgcttggaggaactgcgccgtaggcggggcgagaccgagtccgaagaattcgagaaactcaagcagaaacagcaggaagcagctctcgaactagaggaactgaaaaagaaaagagaggaaaggcgcaaggtgctcgaagaggaggagcaacgcagaaaacaagaggaggccgacagaaaactcagggaggaggaagagaagagacgcctgaaagaggaaattgagcggagacgggcggaagccgcggaaaagcgccaaaaaatgccggaggacggcctgtcggacgataagaaaccattcaaatgctttacacctaaaggaagtagtctaaaaatcgaagagagagcagaatttcttaataagtccgtgcagaaatcaggcgtcaagagcactcaccaagcagcaattgtgtctaagatagattctcggttagaacagtatacctcagcgatcgagggtactaaatccgcaaagccgacaaagccagccgcttccgatttgcccgtacctgcagagggagtaagaaacatcaaaagtatgtgggagaagggaaacgttttttcctcccccaccgcagccggtacaccgaataaggaaactgccggtttgaaagtgggcgtgtcatcccgcatcaacgagtggctgaccaaaacaccagatggcaataaatcccctgcacccaagcctagcgatctgaggcccggtgacgtgtcaagcaagagaaacttatgggaaaagcagagcgttgacaaggtcacctctccaacaaaagtgtag

SEQ ID NO: 290175 - DNA, 528 bp, Artificial Sequence
  derived and/or modified sequence
atgcccgaggacggcctgagcgacgacaagaagcccttcaagtgcttcacgcctaaaggatcatctcttaagatagaggagagagccgaatttcttaacaagtccgttcagaagtcaggtgtaaagtccacccaccaggccgccatcgtaagcaagattgactccaggcttgaacaatacacatccgccatcgagggaactaagtctgcgaagcccaccaaacctgcagcgagtgatctaccagttcccgcagaaggcgtcagaaacattaaaagtatgtgggagaaaggtaacgttttctcatctcccactgcagccgggacacctaataaggagacagctgggcttaaggtcggagtgagctctaggattaacgaatggcttacgaagacccccgatggaaacaaatctcctgctccaaaaccatccctcacgttttgttcctctctgttcggactttggctgatcggcaacctgctgttgcttccttcgtttctgcccctacttccagagtgggtgtttctgtag

SEQ ID NO: 290176 - DNA, 219 bp, Artificial Sequence
  derived and/or modified sequence
atggacgacttcgagcggcggcgggagctgcggcggcagaagcgggaggaaatgcgccttgaggccgagcggatcgcctatcagaggaatgacgacgacgaggaggaagccgcacgtgagcgacgtcgtagggcccgccaggaacgactcagacagaaacaggaggaagagtctctgggtcaggtaactgatcaagtcgaggtcaacgcccagaactag

SEQ ID NO: 290177 - DNA, 1380 bp, Artificial Sequence
  derived and/or modified sequence
atggacgacttcgagcggcggcgggagctgcggcggcagaagcgggaggaaatgcgactggaagccgagcgaattgcttaccaacggaacgatgacgacgaagaggaggctgcacgggaaagacggcgtcgggctaggcaagagcggctcagacagaagcaggaggaggaaagtctgggccaggtcacagaccaggttgaagtcaatgcccagaatagcgttcccgatgaggaggccaagaccacaactaccaatactcaggttgagggggacgatgaagcagcgttcctagaacggttggctcgtcgcgaagaaaggaggcaaaaacgccttcaagaggccctggagaggcaaaaggaattcgatcctaccattaccgatgcttccctttcattgccatctagacgcatgcagaatgatactgccgagaatgagacaactgaaaaggaggaaaaaagcgagtctaggcaggagagatatgagatagaggagacagagaccgttacaaaaagttaccagaagaacgactggagggacgcggaggagaacaagaaggaggacaaagagaaagaagaggaggaagaggagaaacctaagagaggatcaattggcgaaaaccagattaaagacgagaaaatcaaaaaagataaagaaccaaaggaagaagtcaaatctttcatggaccgtaagaagggtttcactgaagtcaaaagccaaaacggggaatttatgacacataagctgaagcacacagaaaataccttcagcagacccggagggagggccagtgtggacacaaaggaggctgagggagcccctcaggttgaagctggaaagcgtctggaggagctgcggaggcggaggggggagactgagtccgaggagttcgagaagcttaaacaaaaacagcaggaagctgcccttgagctcgaggagctgaaaaagaagagggaggaacggagaaaagtgttagaggaggaggagcagcgcagaaaacaggaggaggctgaccggaaactccgggaggaggaagaaaaacgccggcttaaggaggaaatcgaaagacggagggccgaggccgctgagaagcgccagaaaatgccagaagatggacttagtgacgacaaaaagcctttcaagtgtttcactcctaaaggatctagcctcaagattgaagagcgagcagagtttctgaataagagtgtgcagaagagcagtggagtcaaatcaacccaccaggctgcaattgtctctaagattgacagccgactggagcagtatacaagcgccattgagggaaccaagtcagctaagcccacgaaaccagcagcctctgacttacctgtacccgccgagggagtccgcaatattaaatcttag

SEQ ID NO: 290178 - DNA, 219 bp, Artificial Sequence
  derived and/or modified sequence
atggacgacttcgagcggcggcgggagctgcggcggcagaagcgggaggagatgaggcttgaagccgaacgaattgcctaccaaaggaatgacgacgacgaagaggaagcggctagagagagacgaagacgcgcaagacaggagagactgagacagaagcaggaggaggagtcgttaggacaagtgaccgatcaggtagaggtaaatgcccagaattag

SEQ ID NO: 290179 - DNA, 1692 bp, Artificial Sequence
  derived and/or modified sequence
atggatgactttgagagaagacgagagctacgccgacagaagcgcgaggagatgaggctggaagctgaaaggattgcataccagcgcaacgatgatgatgaggaggaggccgcaagggagaggcgcagacgcgctagacaagagagactcagacagaagcaggaggaagaatctctcggccaagtgacggaccaggtggaggttaatgctcagaattctgtaccggatgaagaagccaagacgaccactactaacacacaagtcgagggagacgatgaagctgctttcctggagaggctggcgcgacgagaggaacgccgacaaaagcgcctccaagaggctctggagcgacagaaggagtttgaccccacaatcacagatgcctctctgagtctgcccagtaggcggatgcagaacgacacagcagaaaacgagaccactgagaaggaagagaagtctgagagcagacaagagcggtacgaaattgaggagacggagacagtaactaaaagctatcagaaaaatgattggagagacgcggaggagaacaagaaggaagacaaggagaaagaagaagaggaagaggaaaagccgaaacggggatctattggggaaaatcaaggggaagagaaaggtacgaaagtgcaggcaaagagagaaaagctccaggaagacaagcctacttttaagaaagaagaaattaaggatgagaaaatcaagaaggataaggaacctaaagaagaggtgaagtctttcatggatcggaagaaagggtttactgaagttaagagtcaaaacggggagttcatgacacataagcttaagcatacagagaacaccttctcaagaccaggcggtagagccagcgtggatactaaggaggccgaaggcgcaccgcaggtggaagcaggtaagagactcgaggagctgagaagacggagaggagaaaccgaatcagaagagtttgaaaagcttaaacagaagcagcaggaagctgccttagaacttgaggaattgaaaaagaaacgggaagagcggaggaaggtgcttgaagaagaagagcagcgacgcaagcaggaagaagctgatcgcaaattacgagaggaagaggaaaaaaggcgcctgaaggaagaaatcgagcggaggagggctgaggctgctgaaaagcgacaaaagatgcccgaggacggactaagcgacgacaaaaaaccgtttaagtgcttcaccccgaaaggctcctcattgaagatagaggagcgtgctgagtttttaaacaaatcagtgcagaagtcaggcgtgaagtctactcaccaggcagcgatcgtaagtaagatagattctcgcctggagcagtacactagtgctattgagggtacgaagagcgccaagccaactaagccagcagccagcgacctgcctgttcccgcagagggcgtgcggaatataaagtctatgtgggaaaaaggcaacgtcttctcttccccaaccgcggcaggtacccccaataaggagacagcaggcttgaaggtgggtgtgagctctcggatcaacgagtggctgactaagacaccagatgggaacaaatctccagctcctaaaccctccgatctaaggccaggagatgtgtcatcaaaacgcaacctgtgggagaaacaaagcgttgataaggtaacatctcctacaaaagtttag

SEQ ID NO: 290180 - DNA, 528 bp, Artificial Sequence
  derived and/or modified sequence
atgccagaagacggactttctgatgataagaaacctttcaagtgctttacaccaaaaggttctagtctgaagatagaggaacgggctgagtttctgaacaagagcgtccagaaatccggcgttaaaagtacccatcaggcagccattgtatcaaagattgattccagactggagcagtatacatctgcaattgagggaaccaagagtgcgaaacccacaaagccagcagcgagtgatcttcctgtccctgccgagggagttcgcaacattaaatccatgtgggagaagggaaacgtgttctcctctcccacagcagccggtacccctaacaaagagactgctggtcttaaggtgggggtctcaagtcgaataaatgagtggttgaccaagacccccgatggcaataagtccccagctcccaagcctagcctgacattttgcagctcacttttcggattatggctgattggcaatctactcctgcttccaagctttctgccgctcttgcccgagtgggtcttcctgtag

SEQ ID NO: 290181 - DNA, 219 bp, Artificial Sequence
  derived and/or modified sequence
atggatgactttgaaagacgaagagaacttcgaagacagaagagagaggagatgcgtctcgaggcagagcgcattgcgtaccaacgcaacgatgacgacgaggaggaggccgctcgagaacgacggaggagagcacgacaagaacgacttcgtcagaagcaggaggaagagtcgctggggcaggttactgaccaggtggaggtaaacgcccagaactag

SEQ ID NO: 290182 - DNA, 1380 bp, Artificial Sequence
  derived and/or modified sequence
atggatgattttgagaggcgcagagagctcaggcgccagaaaagggaagagatgcggctggaggcagaacgcatcgcctaccaacggaacgacgacgacgaggaagaggccgcaagggagcgcaggcgcagagccaggcaagaacggcttcgtcaaaagcaggaagaggaaagcctgggtcaggtgactgatcaagtggaggtaaatgcccaaaactccgtgccagacgaagaggccaagactacaaccactaatactcaagtggagggcgacgatgaggcagcatttctcgaacgcctggctaggagagaggagcgtcggcagaaacggctccaagaagctctggagcgccagaaagagttcgaccccaccatcaccgacgcctctctgtcactcccttctcgcagaatgcaaaatgataccgctgagaatgaaactacagagaaggaagagaagagcgagtctagacaggaaagatatgagatcgaggaaaccgaaacagtgacaaaatcatatcagaaaaacgattggcgggatgctgaggaaaataagaaggaagataaggagaaagaagaagaagaagaggagaagcccaaacggggatcaatcggcgagaaccagataaaggacgagaagatcaaaaaagacaaggaacctaaagaagaggttaaatcgtttatggatcgtaagaagggatttactgaggtgaaaagccagaatggcgagttcatgacgcataaactgaagcatactgaaaacacttttagccgtcctggcggtcgcgcttcagtggatacaaaggaggccgagggggctccacaagttgaggcagggaagagacttgaggaactgaggaggaggcgcggtgagacggagagcgaagaatttgaaaagctcaagcagaagcaacaggaggccgcactggagttggaggaactgaaaaagaaacgggaagagaggagaaaggtccttgaagaagaggagcagcggaggaagcaagaagaggccgatagaaagctgcgggaggaggaggaaaaacgtaggttaaaggaagagatcgagagacgacgggctgaggcggcagagaaacggcagaagatgcccgaagacgggttgtctgacgacaagaaacccttcaagtgctttacccccaaagggtcctctctgaagatcgaagagcgagccgaatttcttaataagtctgtgcaaaagagtagtggcgtcaagtctacacatcaggctgccatcgtgtccaagatcgattccaggttggagcagtacacatcagctattgaagggacaaagagcgccaagccaacaaaacccgcagccagtgatctgccagttcccgctgagggagttagaaatattaaatcctag

SEQ ID NO: 290183 - DNA, 219 bp, Artificial Sequence
  derived and/or modified sequence
atggacgacttcgaacgcaggagggagttgcggagacagaagcgagaggaaatgcgattagaagcagagcgcattgcatatcagcgtaacgacgatgacgaggaagaagcagcgagggagcgtcggagaagagcacgccaggagcgcttaaggcaaaagcaggaagaagagtccctgggccaggtgacggaccaggtcgaggtgaacgcacagaactag

SEQ ID NO: 290184 - DNA, 2665 bp, Artificial Sequence
  derived and/or modified sequence
gatttcctgagcatgcctagggaatgacaggcatctccacaggcaggctgcatccaccttggctggggtgtcgtcattggctgcctattagaaaaacgacaggacaatgcataccaccgcctcccgactgtaaacataggggatatgtgttcacttagcatggacttctgggaggggccaaggaagggcggtctggagttttattgaatagagcagtgtgtattcggctgcctgcctgcccgcctgcttgctctctggctgtgctcctgcttaaagaaatcagtccttcctttccgacttagtcctcgggaagaagtttcagactacaaggtatcattggaacatttcaagatcatcaaatcaaattccacagggattggtgaccaaccagaaggctcagacatctgattgctgacctgtccagacatcatctggtctccctgaacctgaaatcacaccatggatgattttgagcgtcgcagagaacttagaaggcaaaagagggaggagatgcgactcgaagcagaaagaatcgcctaccagaggaatgacgatgatgaagaggaggcagcccgggaacggcgccgccgagcccgacaggaacggctgcggcagaagcaggaggaagaatccttgggacaggtgaccgaccaggtggaggtgaatgcccagaacagtgtgcctgacgaggaggccaagacaaccaccacaaacactcaagtggaaggggatgatgaggccgcattcctggagcgcctggctcggcgtgaggaaagacgccaaaaacgccttcaggaggctctggagcggcagaaggagttcgacccaacaataacagatgcaagtctgtcgctcccaagcagaagaatgcaaaatgacacagcagaaaatgaaactaccgagaaggaagaaaaaagtgaaagtcgccaagaaagatacgagatagaggaaacagaaacagtcaccaagtcctaccagaagaatgattggagggatgctgaagaaaacaagaaagaagacaaggaaaaggaggaggaggaagaggagaagccaaagcgagggagcattggagaaaatcagggagaagagaagggaactaaagtgcaagctaaaagagaaaagctccaagaagacaagcctaccttcaaaaaagaagagatcaaagatgaaaagattaaaaaggacaaagaacccaaagaagaagttaagagcttcatggatcgaaagaagggatttacagaagttaagtcgcagaatggagaattcatgacccacaaacttaaacatactgagaatactttcagccgccctggagggagggccagcgtggacaccaaggaggctgagggcgccccccaggtggaagccggcaaaaggctggaggagcttcgtcgtcgtcgcggggagaccgagagcgaagagttcgagaagctcaaacagaagcagcaggaggcggctttggagctggaggaactcaagaaaaagagggaggagagaaggaaggtcctggaggaggaagagcagaggaggaagcaggaggaagccgatcgaaaactcagagaggaggaagagaagaggaggctaaaggaagagattgaaaggcgaagagcagaagctgctgagaaacgccagaagatgccagaagatggcttgtcagatgacaagaaaccattcaagtgtttcactcctaaaggttcatctctcaagatagaagagcgagcagaatttttgaataagtctgtgcagaaaagtggtgtcaaatcgacccatcaagcagcaatagtctccaagattgacagcagactggagcagtataccagtgcaattgagggaacaaaaagcgcaaaacctacaaagccggcagcctcggatcttcctgttcctgctgaaggtgtacgcaacatcaagagtatgtgggagaaagggaatgtgttttcatcccccactgcagcaggcacaccaaataaggaaactgctggcttgaaggtaggggtttctagccgcatcaatgaatggctaactaaaaccccagatggaaacaagtcacctgctcccaaaccttctgacttgagaccaggagacgtatccagcaagcggaacctctgggaaaagcaatctgtggataaggtcacttcccccactaaggtttgagacagttccagaaagaacccaagctcaagacgcaggacgagctcagttgtagagggctaattcgctctgttttgtatttatgttgatttactaaattgggttcattatcttttatttttcaatatcccagtaaacccatgtatattatcactatatttaataatcacagtctagagatgttcatggtaaaagtactgcctttgcacaggagcctgtttctaaagaaacccatgctgtgaaatagagacttttctactgatcatcataactctgtatctgagcagtgataccaaccacatctgaagtcaacagaagatccaagtttaaaattgcctgcggaatgtgtgcagtatctagaaaaatgaaccgtagtttttgtttttttaaatacagaagtcatgttgtttctgcactttataataaagcatggaagaaattatcttagtaggcaattgtaacactttttgaaagtaacccatttcagatttgaaatactgcaataatggttgtcttt

SEQ ID NO: 290185 - DNA, 458 bp, Artificial Sequence
  derived and/or modified sequence
aaccactgacagctctgtaaacaaagcaaggacaaaaagagcccgcttccccctttctggtagtcattttgggtttgggggctgcaggggaattctggaatacttgactccatggcacagaaacgcaggggaaacgggctcctcatttaaagagctggaaggggaaggtctttccggaattaaaaccatcacagaggaggtccagacatcatctggtctccctgaacctgaaatcacaccatggatgattttgagcgtcgcagagaacttagaaggcaaaagagggaggagatgcgactcgaagcagaaagaatcgcctaccagaggaatgacgatgatgaagaggaggcagcccgggaacggcgccgccgagcccgacaggaacggctgcggcagaagcaggaggaagaatccttgggacaggtgaccgaccaggtggaggtgaatgcccagaacag

SEQ ID NO: 290186 - DNA, 1614 bp, Artificial Sequence
  derived and/or modified sequence
aagaattctggattaaactccctcccttgcattgtattcaggggtgccttccttgaagaattgaaagcagaaagatttgggagctgagagttaagctgaacaaaaggtatcattggaacatttcaagatcatcaaatcaaattccacagggattggtgaccaaccagaaggctcagacatctgattgctgacctgtccagacatcatctggtctccctgaacctgaaatcacaccatggatgattttgagcgtcgcagagaacttagaaggcaaaagagggaggagatgcgactcgaagcagaaagaatcgcctaccagaggaatgacgatgatgaagaggaggcagcccgggaacggcgccgccgagcccgacaggaacggctgcggcagaagcaggaggaagaatccttgggacaggtgaccgaccaggtggaggtgaatgcccagaacagtgtgcctgacgaggaggccaagacaaccaccacaaacactcaagtggaaggggatgatgaggccgcattcctggagcgcctggctcggcgtgaggaaagacgccaaaaacgccttcaggaggctctggagcggcagaaggagttcgacccaacaataacagatgcaagtctgtcgctcccaagcagaagaatgcaaaatgacacagcagaaaatgaaactaccgagaaggaagaaaaaagtgaaagtcgccaagaaagatacgagatagaggaaacagaaacagtcaccaagtcctaccagaagaatgattggagggatgctgaagaaaacaagaaagaagacaaggaaaaggaggaggaggaagaggagaagccaaagcgagggagcattggagaaaatcagatcaaagatgaaaagattaaaaaggacaaagaacccaaagaagaagttaagagcttcatggatcgaaagaagggatttacagaagttaagtcgcagaatggagaattcatgacccacaaacttaaacatactgagaatactttcagccgccctggagggagggccagcgtggacaccaaggaggctgagggcgccccccaggtggaagccggcaaaaggctggaggagcttcgtcgtcgtcgcggggagaccgagagcgaagagttcgagaagctcaaacagaagcagcaggaggcggctttggagctggaggaactcaagaaaaagagggaggagagaaggaaggtcctggaggaggaagagcagaggaggaagcaggaggaagccgatcgaaaactcagagaggaggaagagaagaggaggctaaaggaagagattgaaaggcgaagagcagaagctgctgagaaacgccagaagatgccagaagatggcttgtcagatgacaagaaaccattcaagtgtttcactcctaaaggttcatctctcaagatagaagagcgagcagaatttttgaataagtctgtgcagaaaagcagtggtgtcaaatcgacccatcaagcagcaatagtctccaagattgacagcagactggagcagtataccagtgcaattgagggaacaaaaagcgcaaaacctacaaagccggcagcctcggatcttcctgttcctgctgaaggtgtacgcaacatcaagagtat

SEQ ID NO: 290187 - DNA, 558 bp, Artificial Sequence
  derived and/or modified sequence
gaatagagcagtgtgtattcggctgcctgcctgcccgcctgcttgctctctggctgtgctcctgcttaaagaaatcagtccttcctttccgacttagtcctcgggaagaagtttcagactacaaggtatcattggaacatttcaagatcatcaaatcaaattccacagggattggtgaccaaccagaaggctcagacatctgattgctgaccttcctggatcaatcatgaagtcttcacttcctgtgaaaaatgctagtgacttgaatcaataaagacaacatgagtcagccttccaaggtccagacatcatctggtctccctgaacctgaaatcacaccatggatgattttgagcgtcgcagagaacttagaaggcaaaagagggaggagatgcgactcgaagcagaaagaatcgcctaccagaggaatgacgatgatgaagaggaggcagcccgggaacggcgccgccgagcccgacaggaacggctgcggcagaagcaggaggaagaatccttgggacaggtgaccgaccaggtggaggtgaatgcccagaacag

SEQ ID NO: 290188 - DNA, 1692 bp, Artificial Sequence
  derived and/or modified sequence
atggacgacttcgagagaagaagagagctgagaagacagaagagagaggagatgagactggaggccgagagaatcgcctaccagagaaacgacgacgacgaggaggaggccgccagagagagaagaagaagagccagacaggagagactgagacagaagcaggaggaggagagcctgggccaggtgaccgaccaggtggaggtgaacgcccagaacagcgtgcccgacgaggaggccaagaccaccaccaccaacacccaggtggagggcgacgacgaggccgccttcctggagagactggccagaagagaggagagaagacagaagagactgcaggaggccctggagagacagaaggagttcgaccccaccatcaccgacgccagcctgagcctgcccagcagaagaatgcagaacgacaccgccgagaacgagaccaccgagaaggaggagaagagcgagagcagacaggagagatacgagatcgaggagaccgagaccgtgaccaagagctaccagaagaacgactggagagacgccgaggagaacaagaaggaggacaaggagaaggaggaggaggaggaggagaagcccaagagaggcagcatcggcgagaaccagggcgaggagaagggcaccaaggtgcaggccaagagagagaagctgcaggaggacaagcccaccttcaagaaggaggagatcaaggacgagaagatcaagaaggacaaggagcccaaggaggaggtgaagagcttcatggacagaaagaagggcttcaccgaggtgaagagccagaacggcgagttcatgacccacaagctgaagcacaccgagaacaccttcagcagacccggcggcagagccagcgtggacaccaaggaggccgagggcgccccccaggtggaggccggcaagagactggaggagctgagaagaagaagaggcgagaccgagagcgaggagttcgagaagctgaagcagaagcagcaggaggccgccctggagctggaggagctgaagaagaagagagaggagagaagaaaggtgctggaggaggaggagcagagaagaaagcaggaggaggccgacagaaagctgagagaggaggaggagaagagaagactgaaggaggagatcgagagaagaagagccgaggccgccgagaagagacagaagatgcccgaggacggcctgagcgacgacaagaagcccttcaagtgcttcacccccaagggcagcagcctgaagatcgaggagagagccgagttcctgaacaagagcgtgcagaagagcggcgtgaagagcacccaccaggccgccatcgtgagcaagatcgacagcagactggagcagtacaccagcgccatcgagggcaccaagagcgccaagcccaccaagcccgccgccagcgacctgcccgtgcccgccgagggcgtgagaaacatcaagagcatgtgggagaagggcaacgtgttcagcagccccaccgccgccggcacccccaacaaggagaccgccggcctgaaggtgggcgtgagcagcagaatcaacgagtggctgaccaagacccccgacggcaacaagagccccgcccccaagcccagcgacctgagacccggcgacgtgagcagcaagagaaacctgtgggagaagcagagcgtggacaaggtgaccagccccaccaaggtgtag

SEQ ID NO: 290189 - DNA, 528 bp, Artificial Sequence
  derived and/or modified sequence
atgcccgaggacggcctgagcgacgacaagaagcccttcaagtgcttcacccccaagggcagcagcctgaagatcgaggagagagccgagttcctgaacaagagcgtgcagaagagcggcgtgaagagcacccaccaggccgccatcgtgagcaagatcgacagcagactggagcagtacaccagcgccatcgagggcaccaagagcgccaagcccaccaagcccgccgccagcgacctgcccgtgcccgccgagggcgtgagaaacatcaagagcatgtgggagaagggcaacgtgttcagcagccccaccgccgccggcacccccaacaaggagaccgccggcctgaaggtgggcgtgagcagcagaatcaacgagtggctgaccaagacccccgacggcaacaagagccccgcccccaagcccagcctgaccttctgcagcagcctgttcggcctgtggctgatcggcaacctgctgctgctgcccagcttcctgcccctgctgcccgagtgggtgttcctgtag

SEQ ID NO: 290190 - DNA, 219 bp, Artificial Sequence
  derived and/or modified sequence
atggacgacttcgagagaagaagagagctgagaagacagaagagagaggagatgagactggaggccgagagaatcgcctaccagagaaacgacgacgacgaggaggaggccgccagagagagaagaagaagagccagacaggagagactgagacagaagcaggaggaggagagcctgggccaggtgaccgaccaggtggaggtgaacgcccagaactag

SEQ ID NO: 290191 - DNA, 1380 bp, Artificial Sequence
  derived and/or modified sequence
atggacgacttcgagagaagaagagagctgagaagacagaagagagaggagatgagactggaggccgagagaatcgcctaccagagaaacgacgacgacgaggaggaggccgccagagagagaagaagaagagccagacaggagagactgagacagaagcaggaggaggagagcctgggccaggtgaccgaccaggtggaggtgaacgcccagaacagcgtgcccgacgaggaggccaagaccaccaccaccaacacccaggtggagggcgacgacgaggccgccttcctggagagactggccagaagagaggagagaagacagaagagactgcaggaggccctggagagacagaaggagttcgaccccaccatcaccgacgccagcctgagcctgcccagcagaagaatgcagaacgacaccgccgagaacgagaccaccgagaaggaggagaagagcgagagcagacaggagagatacgagatcgaggagaccgagaccgtgaccaagagctaccagaagaacgactggagagacgccgaggagaacaagaaggaggacaaggagaaggaggaggaggaggaggagaagcccaagagaggcagcatcggcgagaaccagatcaaggacgagaagatcaagaaggacaaggagcccaaggaggaggtgaagagcttcatggacagaaagaagggcttcaccgaggtgaagagccagaacggcgagttcatgacccacaagctgaagcacaccgagaacaccttcagcagacccggcggcagagccagcgtggacaccaaggaggccgagggcgccccccaggtggaggccggcaagagactggaggagctgagaagaagaagaggcgagaccgagagcgaggagttcgagaagctgaagcagaagcagcaggaggccgccctggagctggaggagctgaagaagaagagagaggagagaagaaaggtgctggaggaggaggagcagagaagaaagcaggaggaggccgacagaaagctgagagaggaggaggagaagagaagactgaaggaggagatcgagagaagaagagccgaggccgccgagaagagacagaagatgcccgaggacggcctgagcgacgacaagaagcccttcaagtgcttcacccccaagggcagcagcctgaagatcgaggagagagccgagttcctgaacaagagcgtgcagaagagcagcggcgtgaagagcacccaccaggccgccatcgtgagcaagatcgacagcagactggagcagtacaccagcgccatcgagggcaccaagagcgccaagcccaccaagcccgccgccagcgacctgcccgtgcccgccgagggcgtgagaaacatcaagagctag

SEQ ID NO: 290192 - DNA, 3207 bp, Artificial Sequence
  derived and/or modified sequence
atggacgcagccggccggggatgtcacttgcttcccttgccagcagctcggggcccagccagagcccctgccgccgctgctgcggccgccgccagcccgcccgggccgtgctccggcgccgcctgcgctccatccgccgctgccggcgcaggcgctatgaacccctcttcttctgcaggagaagaaaagggggccacggggggatcttcatccagcggctccggcgccggcagctgttgtctgggcgccgaaggcggtgctgatccacggggcgctggaagcgccgctgccgctggggccgccgctctcgatgagccggccgcggcgggacagaaagaaaaggacgaggcgctagaggaaaagcttaggaacttaacttttaggaagcaggtgtcctatcggaaagccatatctagagcagggctgcagcacctggctccagcccaccctttatcactcccggtcgcgaatgggcctgcaaaagagcccagagccaccttggattggtccgagaatgcagtgaatggagagcacctgtggctcgagaccaacgtcagtggggatttgtgttatcttggggaggagaattgtcaggtacggttcgcgaaatccgccctgcgacggaaatgcgctgtgtgtaaaatcgtcgtgcacaccgcctgtattgagcagctagaaaaaattaactttcgctgtaaacccacatttagagaaggtggcagtcggtcacccagggaaaactttgtacgacatcactgggtacataggagaagacaagaggggaagtgcaagcagtgcgggaaaggattccaacagaaattctcatttcattctaaagagatagtagccatctcttgctcatggtgtaaacaggcgtttcacaataaagtgacatgcttcatgttgcaccacatcgaagagccgtgcagtttgggcgcccacgccgctgtgattgtcccccccacatggatcattaaagttaagaagccacagaacagcttgaaggcttcgaatcgcaagaaaaagagaacctccttcaagcgaaaggccagcaagcgggggatggaacaggagaataaaggtagacccttcgttatcaagcccatttcttcgcccctcatgaagcctctgcttgtgttcgtgaaccctaaatccggtggaaatcagggtacaaaggtcctgcagatgttcatgtggtatctgaatcctcgccaggtcttcgatctcagtcaggaggggcccaaggacgccctagaactgtaccgtaaggttccaaatctacggatactagcttgcggcggcgacggcactgttggttggattctgagcatactggatgaactgcagttgtctcctcagccaccagtcggagttctgccactggggacagggaatgacttagccaggaccctaaactgggggggcggatatacggacgagccagtgtctaaaatcctgtgccaagtggaggacgggaccgtggtgcaacttgataggtggaacctgcacgttgagcgaaaccccgaccttcccccagaagagttggaggatggcgtgtgcaaactcccattaaacgtctttaacaactacttttcactgggatttgacgcccacgtcaccttggagtttcacgagagccgcgaggctaaccctgaaaagttcaacagccggtttcgtaataaaatgttctacgcgggagccgccttcagcgattttctgcagcgcagttcaagggatctgagtaagcatgtcaaggtagtgtgtgacggcaccgatctgacgcctaaaatccaagaattgaagttccagtgcattgtcttcctgaatattccacgctattgcgccggcaccatgccttggggcaaccctggtgaccatcatgatttcgaaccacaacggcacgacgatggctacattgaggtcattgggttcacaatggcatctctcgctgccctgcaggtggggggacacggcgagaggctgcaccaatgtcgcgaagtgatgttgctaacctataagagcataccaatgcaggtggacggcgagccatgcagactcgctcccgccatgatccggatttccttgcgaaaccaagctaatatggtgcaaaagtctaaacgtagaacaagcatgcccctgctcaacgatattcatcaggttcagacagccgatttgagacgggtgtcagccccacctgggtcgtttactatcccccagtctgtcccggaccggctgagaatccgggtaaataaaataagcctacaagattatgagggattccactacgataaggagaagctgcgagaggcaagcattcctctcggcattctggtggtgaggggcgattgtgacctggagacttgtagaatgtatattgataggctgcaggaggacctgcagtccgtaagtagtgggagtcaaagggtgcactaccaggaccacgagactagtttcccgcgagcattaagcgcccaacgattgagcccgcgatggtgttttctggatgaccgaagccaggaacatttacactttgtcatggaaattagtcaggacgaaatcttcattctcgatcccgatatggtagtgtcgcagccagccggcactcctcctggcatgcctgatttggtggtggagcaagcttcaggcatatctgattggtggaacccagccttgagaaagcgaatgttgagcgattccggccttgggatgatagccccatactatgaggatagtgacctcaaagacctttctcacagccgtgtgttgcagtccccagttagctctgaagaccacgctatcctacaagccgtgatcgccggtgatctgatgaagctgatcgagagctacaagaatggtggatctctgctcattcagggccccgaccactgttctttacttcactatgcagccaagaccggcaacggagagattgtcaaatacattctagaccacggtccttcagagctcctggacatggccgacagtgaaaccggggagactgccctgcataaggcagcctgccaaagaaatagagctgtgtgccagctcctggtggatgctggcgcctccttacggaagacagattctaagggaaagactcctcaagaaagggcacagcaggcaggtgaccctgatctcgcagcttatcttgagtctaggcagaactataaagtgatcggacatgaggatcttgaaactgcggtctag

SEQ ID NO: 290193 - DNA, 3207 bp, Artificial Sequence
  derived and/or modified sequence
atggatgctgctggccggggctgccacctgctgcccctgcctgctgcccggggccctgcccgggccccagctgctgctgctgctgctgctgccagccccccaggcccctgcagcggggccgcctgtgcccccagcgctgctgctggggccggggccatgaaccccagcagcagcgctggggaggagaagggggccaccggcggcagcagcagcagcggcagcggggccggcagctgctgcctgggcgctgagggcggcgctgaccccaggggggccggcagcgctgctgctgctggagctgctgccctggatgagcctgctgctgctggccagaaggagaaggatgaggccctggaggagaagctgaggaacctgaccttcaggaagcaggtgtcctacaggaaggccatcagccgggccggcctgcagcacctggccccagcccaccccctgagcctgcctgtggccaatggacctgccaaggagccccgggccaccctggactggagcgaaaatgctgtgaatggagagcacctgtggctggagaccaacgtgtctggggacctgtgctacctgggggaggagaactgccaggtgcgctttgccaagagcgccctgcggaggaaatgtgctgtgtgcaagatcgtggtgcacacagcctgcatcgagcagctggagaagatcaacttccgctgcaagcccaccttccgggagggcggcagccgcagcccccgggagaactttgtgcgccaccactgggtgcacagaagacggcaggagggcaagtgcaagcagtgtgggaagggcttccagcagaagttctccttccacagcaaggagatcgtggccatcagctgctcctggtgcaagcaggccttccacaacaaggtgacctgcttcatgctgcaccacatcgaggagccctgcagcctgggcgcccatgctgctgtgattgtgccccccacctggatcatcaaggtgaagaagccccagaacagcctgaaggccagcaacaggaagaagaagaggaccagcttcaagaggaaggccagcaagaggggcatggagcaggagaacaagggccggcccttcgtcatcaagcccatcagcagccccctgatgaagcccctgctggtgtttgtgaaccccaagagcggcggcaaccagggcaccaaggtgctgcagatgttcatgtggtacctgaacccccggcaggtgtttgacctgagccaggagggccccaaggatgccctggagctgtacaggaaggtgcccaacctgcgcatcctggcctgtggaggagatggcaccgtgggctggatcctgagcatcctggatgagctgcagctgagcccccagccccctgtgggcgtgctgcccctgggcactggaaatgacctggcccggaccctgaactggggcggcggctacacagatgagcctgtgtccaagatcctgtgccaggtggaggatggcaccgtggtgcagctggaccgctggaacctgcacgtggagaggaacccagacctgcccccagaggagctggaggatggagtgtgcaagctgcccctgaatgtgttcaacaactacttcagcctgggctttgatgcccacgtgaccctggagttccacgagagccgggaggccaaccctgagaagttcaacagccgcttcaggaacaagatgttttatgctggggccgccttcagtgacttcctgcagaggagcagccgggacctgagcaagcacgtgaaggtggtgtgtgatggaacagacctgacccccaagatccaggagctgaagttccagtgcatcgtgttcctgaacatcccccgctactgtgccggcaccatgccctggggcaaccctggggaccaccacgactttgagccccagagacatgatgatggctacattgaagtcatcggcttcaccatggccagcctggccgccctgcaggtgggcggccatggagagcggctgcaccagtgccgggaggtgatgctgctgacctacaagagcatccccatgcaggtggatggagagccctgccgcctggccccagccatgatccgcatcagcctgaggaaccaggccaacatggtgcagaagagcaagaggaggacctccatgcccctgctgaatgacatccaccaggtgcagacagctgacctgcggcgggtgtctgcccctcctggcagcttcaccatcccccagagcgtgcctgaccggctgcgcatccgggtgaacaagatcagcctgcaggactatgagggcttccactatgacaaggagaagctgcgggaggccagcatccccctgggcatcctggtggtgcggggggactgtgacctggagacctgcaggatgtacatcgaccggctgcaggaggacctgcagagcgtgagcagcggcagccagagggtgcactaccaggaccacgagaccagcttcccccgggccctgagcgcccagaggctgagcccccgctggtgcttcctggatgacaggagccaggagcacctgcactttgtgatggagatcagccaggatgagatcttcatcctggaccctgacatggtggtgtcccagcctgctggcaccccacctggcatgccagacctggtggtggagcaggccagcggcatcagtgactggtggaacccagccctgaggaagaggatgctgagtgacagcggcctgggcatgattgccccctactatgaagattctgacctgaaggacctgagccacagccgggtgctgcagagccctgtgtccagtgaagatcatgccatcctgcaggccgtgattgctggggacctgatgaagctgattgagagctacaagaatggaggcagcctgctgatccagggccctgaccactgcagcctgctgcactatgctgccaagacaggaaatggagaaattgtgaagtacatcctggaccacggccccagcgagctgctggacatggctgacagcgagactggagaaacagccctgcacaaggccgcctgccagaggaacagagctgtgtgccagctgctggtggatgctggggccagcctgaggaagacagacagcaagggcaagaccccccaggagcgggcccagcaggccggggaccctgacctggccgcctacctggagagccggcagaactacaaggtgattggacatgaggacctggagacagctgtgtag

SEQ ID NO: 290194 - DNA, 3207 bp, Artificial Sequence
  derived and/or modified sequence
atggacgccgccggccggggctgccacctgctgcccctgcccgccgcccgggggcctgcacgagcccccgccgccgccgccgccgctgccgcctcacctcctgggccatgttccggtgccgcttgcgcaccttccgctgccgccggggcaggggccatgaatccctccagcagcgcaggggaagagaagggcgctacgggcgggagttcatcctctggtagcggggcaggatcctgttgtcttggcgccgagggaggagccgacccccgcggggccggctctgcggccgctgccggcgctgcagccctggatgagcccgcggccgctggccaaaaggaaaaagacgaggcattggaagagaagctacggaatctgaccttccgtaaacaggtgagttaccgtaaggcgatttcaagagccggtctgcaacacctcgcacctgcccaccccctaagcttacctgtagctaacggaccagccaaggagcccagagcgaccctggattggtccgagaacgcagtgaatggcgagcacctgtggcttgaaaccaacgtttccggtgacctgtgctatttaggagaggagaactgtcaagtgaggtttgccaaatcagctctcaggcgaaagtgcgcagtgtgcaaaatcgtggtccatactgcctgcatagaacagctcgaaaagattaacttcagatgcaagcccacattcagggaaggagggtccagaagcccgagagagaacttcgtgagacaccattgggtccaccgaaggcggcaagagggtaagtgtaaacagtgtggcaagggctttcaacagaagttctcatttcacagcaaagagattgtggctatttcttgcagttggtgcaaacaggcctttcataacaaggtgacttgtttcatgctgcatcatatcgaggaaccatgttcgctaggcgcccacgccgctgtcattgtccctcctacatggattataaaagttaagaaacctcagaattctcttaaggcaagcaatcgcaagaagaagaggacgtctttcaaacgaaaagcttctaagcgcgggatggaacaggagaacaaaggtaggccgtttgtgattaaaccgatctcttcccctctcatgaaacccctcctagtctttgtgaatcccaaaagcgggggtaaccagggaaccaaggtgctgcagatgttcatgtggtacctgaacccaagacaggtctttgacctcagccaagagggccccaaagacgctctcgaactatataggaaagtacctaatctgagaatactggcttgtggcggcgatggcaccgttggctggatcctgtcgatcctggacgagctacagctctcaccacagccaccagtcggagtgctgcctctgggaacaggcaatgatctcgccaggactcttaattggggaggtggatataccgatgaaccagtgtcaaaaatattatgccaagtggaagatggcacggtcgtgcaattagatcgttggaatctgcatgtcgagcgtaatcctgacctcccacctgaggagttagaggatggcgtttgtaagctgcccctcaatgttttcaacaattatttctctcttggctttgatgcccacgttacactcgagttccatgagtcaagggaggcaaatcctgaaaaatttaacagtcgatttcgaaataagatgttctacgccggggccgctttcagcgattttctacagcggagtagtcgggacttatccaaacacgttaaggtggtgtgcgatggcacagatcttacacccaagattcaagaactgaaattccaatgcatagtttttctcaacattccccgatattgtgccggcacaatgccgtggggtaatcctggtgaccaccacgactttgagccgcagaggcacgacgatggctatattgaagttatcggattcactatggctagccttgcagccttgcaggtcggcggccacggggagcgattgcaccagtgtcgggaagttatgcttctgacctataaatcaatcccgatgcaggtggatggggagccttgcagattagctcccgcaatgattcgcattagtcttaggaatcaggccaatatggttcagaagtcaaagcggcggactagcatgccccttttgaacgacattcaccaggtccagaccgccgacctgagaagggtgagcgcaccccccggaagcttcactatccctcagagcgtgccagataggttgaggataagagttaataaaatttccttgcaggactatgaggggtttcactatgacaaggaaaaattgcgtgaggccagcataccactcggtattctggtggttcgtggcgactgcgatctggagacttgccgaatgtacattgaccgtctgcaggaagatttgcagtctgtgtcctcagggtctcagcgggttcattatcaagaccacgaaacgtcatttccacgggcgctgtctgctcaaaggttgagtccaagatggtgctttctcgatgaccggagccaggagcaccttcatttcgtaatggaaatcagccaagacgaaatcttcatactagatccggacatggtcgtgagtcagcccgccgggaccccgcccggcatgccagatctggttgtggaacaggctagcggcatatccgactggtggaaccctgctttgcgtaagcgcatgctctccgacagcggattgggaatgatcgcgccttactacgaagactccgatctcaaggacctgtctcattcacgtgtgctccaatccccagtatcaagcgaggaccacgcaatactacaggcagtcatcgcaggagatctcatgaaactcattgaatcttacaagaatggagggtctttgctgatacaggggcctgaccattgtagccttctgcactatgccgctaagacgggcaacggggaaatcgtcaagtacatcttggaccatgggcccagcgaactcctagatatggctgatagcgagactggagagaccgctctgcacaaagccgcctgtcaacgcaacagagcagtgtgccagctgctggtagatgcaggggcttcccttcgcaaaacagattctaaaggaaaaactccacaagagcgagcgcagcaggccggggatcctgacctcgctgcctatctggaatccagacagaattacaaagtcattggacatgaagatctcgagacagctgtgtag

SEQ ID NO: 290195 - DNA, 3207 bp, Artificial Sequence
  derived and/or modified sequence
atggacgcagccggacggggttgccacctactccccttacctgcagcaagagggcctgctcgggcaccagccgcagccgcagctgccgcagcctcccccccagggccttgctccggcgctgcttgcgcgccatccgctgccgcaggtgccggagccatgaaccctagtagtagtgcaggggaggagaagggggctactggaggcagctcatccagtggttctggagctgggagttgctgtttgggggctgagggcggagctgaccccaggggagctggcagcgcggctgcagcgggagcagctgccttggacgaacctgccgcagcgggtcagaaggagaaagacgaagctctcgaggagaaactgagaaacctgaccttcagaaaacaggtgtcttataggaaggccatttcgcgcgctggactacagcacctggcccctgcgcatcccctgagcctacccgtggccaatgggcctgcgaaagagccaagagctacgctcgattggagcgagaatgccgtcaacggggagcacctgtggctcgaaacgaacgtcagcggcgacttgtgctacttaggcgaagagaactgccaggtgaggttcgcaaaaagtgccctcaggagaaaatgtgcagtatgcaagatcgtggttcacacagcatgcattgagcagcttgagaaaatcaacttcaggtgtaagccaacattccgggaaggaggatctcgctcacccagagagaattttgtgcgccaccactgggtgcaccgaaggcgccaggaaggcaagtgtaaacagtgtggtaaggggttccaacagaagttcagcttccactccaaggaaatcgtggcaataagttgttcctggtgcaagcaggctttccataacaaggtcacatgttttatgctgcatcacattgaggagccatgcagccttggggctcatgcagcagtgatcgtgcctcccacatggatcattaaagtcaagaagccgcagaatagtttgaaggcaagtaatcgaaagaagaagagaacatcgtttaaacgcaaagcctctaaaagggggatggagcaggagaacaagggccgtcccttcgtgattaaaccaatttcgagcccacttatgaaaccgctattggtgttcgtcaatccaaagtctggaggaaaccaaggcacgaaggtcttacagatgtttatgtggtatctcaaccctcggcaggtgtttgacctcagccaggaagggccaaaagacgctctggagctgtataggaaggtgcctaatctgcgtatccttgcctgcgggggagatggcacagttggctggatattgtcaatacttgatgagctgcagctctcaccccagccacccgttggagtactgccactaggcacaggcaatgacttggctcgcactctcaattgggggggaggatatacagacgagcccgtgtccaaaatcctgtgccaggtggaggatggcaccgtcgtgcagctggaccggtggaacctgcacgtggaacgtaatccggatctgccaccagaagagcttgaggatggcgtctgtaaacttcctctcaatgtctttaacaactactttagcctgggatttgatgcgcatgtcaccctggaatttcacgagtcccgggaggctaatcctgaaaaattcaatagcagatttagaaacaagatgttctatgctggggctgccttctcagatttcttgcagcgcagttcacgtgatctgagcaagcatgtcaaggtcgtgtgtgatggaacggatctgactcccaagattcaggaactaaaattccaatgtattgtgtttctgaacatacctcgctactgcgcaggaacaatgccgtggggcaatccgggtgaccaccacgactttgagcctcaacgtcacgatgacgggtatatcgaggtgattggctttaccatggcttcacttgcggctctgcaggttggcggacacggtgaaagactgcatcagtgccgagaggttatgctgctcacgtataaatcaatcccgatgcaggtcgacggggagccatgtcgtcttgcacctgctatgatacgcatatctttgaggaatcaggcaaacatggtgcagaagtcgaaacggagaacatccatgccactacttaacgatatccaccaggtacagaccgccgatcttcgacgagtgtcagcacctccaggatcgtttaccatacctcaatccgtccccgaccgcctgaggattcgtgtgaataagatcagcctgcaggattacgaaggctttcactacgataaggaaaagctaagagaggctagtatcccattaggcattctagtggtgagaggtgactgtgaccttgagacttgcaggatgtacatagacagattacaggaggatctccagtctgtctcgagcggaagccagcgggttcactatcaagaccatgaaacctcatttccaagagccctgagcgcacagcgcttaagcccgagatggtgcttcctagatgacagatcacaggagcatctgcactttgtcatggaaatttcacaagacgaaatttttatacttgatcccgacatggtggtgtcacagcctgccggaacccctcctggaatgcctgacctggtcgtggagcaggccagtggaatttccgactggtggaatccagcattgcgaaagcgtatgctgtccgattccgggttgggcatgatagcaccttactacgaggatagcgacctgaaggatctgagccattctcgcgtgttacagagtccagtttcttccgaagaccatgcaattctgcaggcagtaattgcaggagacctgatgaaattaatagagagctataagaatggcggatctctgctgatccaaggacctgatcattgcagtctgctccactatgcagctaagactgggaacggtgaaattgtaaaatatattctggaccacggcccaagcgagctgctagacatggcagattccgagacaggggagactgccttacacaaggcagcctgtcagagaaatagagcagtatgccagctactagtcgacgccggagctagcctgcgcaaaaccgattcaaaaggcaagaccccgcaagagcgtgctcagcaggcaggtgatcccgacctagctgcctacctggagtccagacaaaattataaggttattgggcacgaagatcttgaaacggcggtctag

SEQ ID NO: 290196 - DNA, 3207 bp, Artificial Sequence
  derived and/or modified sequence
atggacgccgccggcagaggctgccacctgctgcccctgcccgccgccagaggccccgccagagcccccgccgccgccgccgccgccgccgccagcccccccggcccctgcagcggcgccgcctgcgcccccagcgccgccgccggcgccggcgccatgaaccccagcagcagcgccggcgaggagaagggcgccaccggcggcagcagcagcagcggcagcggcgccggcagctgctgcctgggcgccgagggcggcgccgaccccagaggcgccggcagcgccgccgccgccggcgccgccgccctggacgagcccgccgccgccggccagaaggagaaggacgaggccctggaggagaagctgagaaacctgaccttcagaaagcaggtgagctacagaaaggccatcagcagagccggcctgcagcacctggcccccgcccaccccctgagcctgcccgtggccaacggccccgccaaggagcccagagccaccctggactggagcgagaacgccgtgaacggcgagcacctgtggctggagaccaacgtgagcggcgacctgtgctacctgggcgaggagaactgccaggtgagattcgccaagagcgccctgagaagaaagtgcgccgtgtgcaagatcgtggtgcacaccgcctgcatcgagcagctggagaagatcaacttcagatgcaagcccaccttcagagagggcggcagcagaagccccagagagaacttcgtgagacaccactgggtgcacagaagaagacaggagggcaagtgcaagcagtgcggcaagggcttccagcagaagttcagcttccacagcaaggagatcgtggccatcagctgcagctggtgcaagcaggccttccacaacaaggtgacctgcttcatgctgcaccacatcgaggagccctgcagcctgggcgcccacgccgccgtgatcgtgccccccacctggatcatcaaggtgaagaagccccagaacagcctgaaggccagcaacagaaagaagaagagaaccagcttcaagagaaaggccagcaagagaggcatggagcaggagaacaagggcagacccttcgtgatcaagcccatcagcagccccctgatgaagcccctgctggtgttcgtgaaccccaagagcggcggcaaccagggcaccaaggtgctgcagatgttcatgtggtacctgaaccccagacaggtgttcgacctgagccaggagggccccaaggacgccctggagctgtacagaaaggtgcccaacctgagaatcctggcctgcggcggcgacggcaccgtgggctggatcctgagcatcctggacgagctgcagctgagcccccagccccccgtgggcgtgctgcccctgggcaccggcaacgacctggccagaaccctgaactggggcggcggctacaccgacgagcccgtgagcaagatcctgtgccaggtggaggacggcaccgtggtgcagctggacagatggaacctgcacgtggagagaaaccccgacctgccccccgaggagctggaggacggcgtgtgcaagctgcccctgaacgtgttcaacaactacttcagcctgggcttcgacgcccacgtgaccctggagttccacgagagcagagaggccaaccccgagaagttcaacagcagattcagaaacaagatgttctacgccggcgccgccttcagcgacttcctgcagagaagcagcagagacctgagcaagcacgtgaaggtggtgtgcgacggcaccgacctgacccccaagatccaggagctgaagttccagtgcatcgtgttcctgaacatccccagatactgcgccggcaccatgccctggggcaaccccggcgaccaccacgacttcgagccccagagacacgacgacggctacatcgaggtgatcggcttcaccatggccagcctggccgccctgcaggtgggcggccacggcgagagactgcaccagtgcagagaggtgatgctgctgacctacaagagcatccccatgcaggtggacggcgagccctgcagactggcccccgccatgatcagaatcagcctgagaaaccaggccaacatggtgcagaagagcaagagaagaaccagcatgcccctgctgaacgacatccaccaggtgcagaccgccgacctgagaagagtgagcgccccccccggcagcttcaccatcccccagagcgtgcccgacagactgagaatcagagtgaacaagatcagcctgcaggactacgagggcttccactacgacaaggagaagctgagagaggccagcatccccctgggcatcctggtggtgagaggcgactgcgacctggagacctgcagaatgtacatcgacagactgcaggaggacctgcagagcgtgagcagcggcagccagagagtgcactaccaggaccacgagaccagcttccccagagccctgagcgcccagagactgagccccagatggtgcttcctggacgacagaagccaggagcacctgcacttcgtgatggagatcagccaggacgagatcttcatcctggaccccgacatggtggtgagccagcccgccggcaccccccccggcatgcccgacctggtggtggagcaggccagcggcatcagcgactggtggaaccccgccctgagaaagagaatgctgagcgacagcggcctgggcatgatcgccccctactacgaggacagcgacctgaaggacctgagccacagcagagtgctgcagagccccgtgagcagcgaggaccacgccatcctgcaggccgtgatcgccggcgacctgatgaagctgatcgagagctacaagaacggcggcagcctgctgatccagggccccgaccactgcagcctgctgcactacgccgccaagaccggcaacggcgagatcgtgaagtacatcctggaccacggccccagcgagctgctggacatggccgacagcgagaccggcgagaccgccctgcacaaggccgcctgccagagaaacagagccgtgtgccagctgctggtggacgccggcgccagcctgagaaagaccgacagcaagggcaagaccccccaggagagagcccagcaggccggcgaccccgacctggccgcctacctggagagcagacagaactacaaggtgatcggccacgaggacctggagaccgccgtgtag

SEQ ID NO: 290197 - DNA, 4133 bp, Artificial Sequence
  derived and/or modified sequence
gggtcgcagcctgtcctcctctctctccccctccgccgcagcccgtcgcctccgggcagagttcatgttcagcttgggctttcgctcgggatttaggaagaggccggcggggctggagggtgcgggccggcgcgggagggcgcgggaggcggggagcggcggcctctgattggccggggcgggggagtgagcggagtttcccacaatgccccggtgcggtgcagccgcggatggatgctgcgggaaggggctgccatttgctgcccctgccagcggcgcgcggacctgcccgcgctcctgcagccgccgccgccgccgccgccagcccgcccggcccctgcagcggcgccgcctgcgctccctccgcggccgccggagcgggcgccatgaaccccagctcctcggcgggagaggagaaaggggcgacgggcggcagcagcagcagcggaagcggcgccgggagctgctgcctgggcgccgagggcggcgcggacccgcggggcgcagggtcagccgcggcggcgggggccgctgccctggacgagcccgcggccgccggccagaaggagaaggacgaagcgctggaggagaagctgaggaacttaactttccggaagcaggtctcgtacaggaaagcaatctcccgggcaggcctccagcatctggctcctgcacatcccctcagccttcctgtggcaaatggtccagccaaggagcccagagcgactttggactggagtgagaatgccgtgaatggagaacacctgtggctggagaccaacgtctcgggagacctctgctaccttggagaggagaactgccaagtcagatttgcaaaatcagctctcaggaggaagtgtgcagtctgtaaaatcgtcgtccacaccgcctgcattgagcagctagaaaagattaatttcagatgtaaaccaacatttcgagaaggaggctcaaggtcaccaagagaaaattttgtacgtcatcactgggtgcacaggcgtcggcaggaggggaaatgtaagcagtgtggtaagggcttccagcaaaagttctccttccacagtaaagagattgtggctatcagctgttcctggtgcaagcaggcgtttcacaataaggtgacctgcttcatgctgcatcacattgaagaaccctgctccctgggggctcatgctgctgttattgtcccgcccacttggatcattaaggtgaagaaacctcagaactccctgaaggcttcaaatcggaagaagaagagaacaagctttaaaagaaaagccagtaaaagagggatggaacaggaaaacaaaggtcgtccttttgtgataaaacccatctcttctcctctcatgaaacccttgcttgtatttgtgaatcccaagagtggaggcaaccagggaaccaaagtcctgcagatgttcatgtggtacctgaatccacggcaagtctttgatctttctcaggaagggccaaaagatgcgcttgaattgtataggaaagtaccaaatctgcgaattctggcctgtggtggggatggaacggtgggctggatcctttccatcctggatgaactgcagctgagccctcagcctcctgtgggggtccttcctctggggactgggaatgacctggctcgaactctcaactggggagggggctacactgatgaacctgtttctaagatcctgtgtcaagtggaagatgggacagttgtacagctagatcgctggaacctccatgtggaaagaaaccccgacttgcctccagaagaacttgaagatggcgtatgtaagctccctctgaatgttttcaataactacttcagccttggatttgatgcccatgtcacactggagttccatgaatccagagaagcaaatccagagaaattcaacagtcgttttcgaaataaaatgttctatgcaggggcagctttttctgacttcctacagagaagttctagagatctatccaaacatgttaaagttgtttgtgatggaacagatctcaccccaaagattcaggaactgaagttccagtgtatagtatttttaaatatacccagatattgtgctggcacaatgccctggggaaacccaggtgatcaccatgatttcgaacctcagcgtcatgatgatggttatattgaagtcattggatttaccatggcctctttggcagccctgcaagttgggggccatggagagaggctacaccagtgtcgagaagtcatgcttctaacttacaaatccatccccatgcaagtggatggggagccctgtaggttggccccagctatgattcggatctccctgaggaatcaggccaacatggtacagaagagcaagaggagaacatccatgcctttactcaatgatattcatcaggtgcaaactgcggacctgcggcgagtgtctgctccccccggctccttcaccattccccagtctgtcccagatcgtctgaggatccgggtgaacaaaatcagtttacaagactatgaaggattccactatgacaaggagaaactccgagaagcttcgatacctctgggtattctagttgtgcgtggagactgtgatttggagacttgccgtatgtacatagaccgcctacaggaggacctacagtcagtttcttctggctcccagagagttcattaccaggaccatgaaacctccttccccagggctctctcagcacagaggctctctcctcggtggtgcttcctagatgacagatctcaggaacatttgcactttgtgatggagatttcccaagatgagatttttattctggacccagatatggtggtgtcacagccggcggggacacctccgggcatgcctgacctggtggtggaacaagcctcggggatctcagactggtggaatcctgccctgcggaaacgcatgctgagtgacagtgggctggggatgatagctccctattatgaggactcagatctgaaagatctcagccactcccgcgtgctacagtcaccagtctcttcagaagatcatgcaattttgcaggcagtaatagctggtgatcttatgaagctaatagaaagctataaaaatggaggcagtctgctaattcagggaccagaccactgttcactccttcactacgcagctaaaaccggcaacggggagattgtgaaatatatccttgaccacggaccttccgagttattggatatggcagacagtgaaacgggtgagactgcactgcacaaggctgcctgccagcggaaccgggctgtgtgccagcttctggtggatgcaggagcatctctgagaaagacggactccaagggtaagacacctcaagaaagagcacagcaggctggggacccagacttggctgcttacctagaaagccgtcagaactataaggtcattggccatgaggacctggaaactgctgtttgaccctggtattcgggcaaagaggacatgagcaagcgtatcacatctgccctccctgcaattgggcagctcccctggaagaagctgatggaattcatatatctgtctctctcctgcaagaatctacctgagaccatgccactagcttttaagggctaccaagatgtacaacagaacatgatagcccattgagaaggaggcaggatacctggagatttgtggaatacagtacgagttccacaaaatttgatccttattgcttccagcaagtagcatgaacttctgtgttcacctgtataatttattttaaagattcaaaggatgttcgtataaatggcactgctccatcctccccctatgcattggtttttttccctgtaccatacaattctactgtaactacccatcaacttaaagaaaaatattatctcttctctttacattcagtcttggaagaccacaagattgtctgaaggccttctaaaaccttctgaatgtcctgcagaaatataactgtaaaaccacttccatttctaagactaaatatatcaagactatttagtgactctctctgcatgtccccctcacccgccaaccctccgtttcattatataggagctgggaagtgccacatggataatgtcaacttgtgtgctatatctctgaggaatggtgaggtggcatgggagatgtctgtgc

SEQ ID NO: 290198 - protein, 1975 aa, Artificial Sequence
  derived and/or modified sequence
MWIPTEHEKYGVVIASFRGTVPYGLSLEIGDTVQILEKCDGWYRGFALKNPNIKGIFPSSYVHLKNACVKNKGQFEMVIPTEDSVITEMTSTLRDWGTMWKQLYVRNEGDLFHRLWHIMNEILDLRRQVLVGHLTHDRMKDVKRHITARLDWGNEQLGLDLVPRKEYAMVDPEDISITELYRLMEHRHRKKDTPVQASSHHLFVQMKSLMCSNLGEELEVIFSLFDSKENRPISERFFLRLNRNGLPKAPDKPERHCSLFVDLGSSELRKDIYITVHIIRIGRMGAGEKKNACSVQYRRPFGCAVLSIADLLTGETKDDLILKVYMCNTESEWYQIHENIIKKLNARYNLTGSNAGLAVSLQLLHGDIEQIRREYSSVFSHGVSITRKLGFSNIIMPGEMRNDLYITIERGEFEKGGKSVARNVEVTMFIVDSSGQTLKDFISFGSGEPPASEYHSFVLYHNNSPRWSELLKLPIPVDKFRGAHIRFEFRHCSTKEKGEKKLFGFSFVPLMQEDGRTLPDGTHELIVHKCEENTNLQDTTRYLKLPFSKGIFLGNNNQAMKATKESFCITSFLCSTKLTQNGDMLDLLKWRTHPDKITGCLSKLKEIDGSEIVKFLQDTLDTLFGILDENSQKYGSKVFDSLVHIINLLQDSKFHHFKPVMDTYIESHFAGALAYRDLIKVLKWYVDRITEAERQEHIQEVLKAQEYIFKYIVQSRRLFSLATGGQNEEEFRCCIQELLMSVRFFLSQESKGSGALSQSQAVFLSSFPAVYSELLKLFDVREVANLVQDTLGSLPTILHVDDSLQAIKLQCIGKTVESQLYTNPDSRYILLPVVLHHLHIHLQEQKDLIMCARILSNVFCLIKKNSSEKSVLEEIDVIVASLLDILLRTILEITSRPQPSSSAMRFQFQDVTGEFVACLLSLLRQMTDRHYQQLLDSFNTKEELRDFLLQIFTVFRILIRPEMFPKDWTVMRLVANNVIITTVLYLSDALRKNFLNENFDYKIWDSYFYLAVIFINQLCLQLEMFTPSKKKKVLEKYGDMRVTMGCEIFSMWQNLGEHKLHFIPALIGPFLEVTLIPQPDLRNVMIPIFHDMMDWEQRRSGNFKQVEAKLIDKLDSLMSEGKGDETYRELFNSIIPLFGPYPSLLKKIERETWRESGVSLIATVTRLMERLLDYRDCMKMGEVDGKKIGCTVSLLNFYKTELNKEEMYIRYIHKLYDLHLKAQNFTEAAYTLLLYDELLEWSDRPLREFLTYPMQTEWQRKEHLHLTIIQNFDRGKCWENGIILCRKIAEQYESYYDYRNLSKMRMMEASLYDKIMDQQRLEPEFFRVGFYGKKFPFFLRNKEFVCRGHDYERLEAFQQRMLNEFPHAIAMQHANQPDETIFQAEAQYLQIYAVTPIPESQEVLQREGVPDNIKSFYKVNHIWKFRYDRPFHKGTKDKENEFKSLWVERTSLYLVQSLPGISRWFEVEKREVVEMSPLENAIEVLENKNQQLKTLISQCQTRQMQNINPLTMCLNGVIDAAVNGGVSRYQEAFFVKEYILSHPEDGEKIARLRELMLEQAQILEFGLAVHEKFVPQDMRPLHKKLVDQFFVMKSSLGIQEFSACMQASPVHFPNGSPRVCRNSAPASVSPDGTRVIPRRSPLSYPAVNRYSSSSLSSQASAEVSNITGQSESSDEVFNMQPSPSTSSLSSTHSASPNVTSSAPSSARASPLLSDKHKHSRENSCLSPRERPCSAIYPTPVEPSQRMLFNHIGDGALPRSDPNLSAPEKAVNPTPSSWSLDSGKEAKNMSDSGKLISPPVPPRPTQTASPARHTTSVSPSPAGRSPLKGSVQSFTPSPVEYHSPGLISNSPVLSGSYSSGISSLSRCSTSETSGFENQVNEQSAPLPVPVPVPVPSYGGEEPVRKESKTPPPYSVYERTLRRPVPLPHSLSIPVTSEPPALPPKPLAARSSHLENGARRTDPGPRPRPLPRKVSQL

SEQ ID NO: 290199 - protein, 849 aa, Artificial Sequence
  derived and/or modified sequence
MKMHSTERIPLFGPYPSLLKKIERETWRESGVSLIATVTRLMERLLDYRDCMKMGEVDGKKIGCTVSLLNFYKTELNKEEMYIRYIHKLYDLHLKAQNFTEAAYTLLLYDELLEWSDRPLREFLTYPMQTEWQRKEHLHLTIIQNFDRGKCWENGIILCRKIAEQYESYYDYRNLSKMRMMEASLYDKIMDQQRLEPEFFRVGFYGKKFPFFLRNKEFVCRGHDYERLEAFQQRMLNEFPHAIAMQHANQPDETIFQAEAQYLQIYAVTPIPESQEVLQREGVPDNIKSFYKVNHIWKFRYDRPFHKGTKDKENEFKSLWVERTSLYLVQSLPGISRWFEVEKREVVEMSPLENAIEVLENKNQQLKTLISQCQTRQMQNINPLTMCLNGVIDAAVNGGVSRYQEAFFVKEYILSHPEDGEKIARLRELMLEQAQILEFGLAVHEKFVPQDMRPLHKKLVDQFFVMKSSLGIQEFSACMQASPVHFPNGSPRVCRNSAPASVSPDGTRVIPRRSPLSYPAVNRYSSSSLSSQASAEVSNITGQSESSDEVFNMQPSPSTSSLSSTHSASPNVTSSAPSSARASPLLSDKHKHSRENSCLSPRERPCSAIYPTPVEPSQRMLFNHIGDGALPRSDPNLSAPEKAVNPTPSSWSLDSGKEAKNMSDSGKLISPPVPPRPTQTASPARHTTSVSPSPAGRSPLKGSVQSFTPSPVEYHSPGLISNSPVLSGSYSSGISSLSRCSTSETSGFENQVNEQSAPLPVPVPVPVPSYGGEEPVRKESKTPPPYSVYERTLRRPVPLPHSLSIPVTSEPPALPPKPLAARSSHLENGARRTDPGPRPRPLPRKVSQL

SEQ ID NO: 290200 - DNA, 5928 bp, Artificial Sequence
  derived and/or modified sequence
atgtggattccgacggaacacgaaaaatacggtgtggtgattgcctcttttcggggcaccgtgccctacggattgagccttgagataggtgataccgtgcagattttggagaaatgcgacgggtggtaccgggggtttgctctgaagaatcctaacatcaagggtatttttccaagctcatatgtccatcttaaaaacgcgtgcgtcaagaacaaaggacaatttgagatggtcattcccaccgaagactctgtgattacagagatgacttctaccctgcgggactggggaacaatgtggaaacagttgtatgttaggaatgagggggatctctttcatagattgtggcatattatgaatgagatactcgatctgagacggcaggtcctggtaggacatctgactcacgatcgcatgaaagacgtgaagagacacatcaccgcccgcctggattggggaaatgagcagctgggcctcgacttagtgccaaggaaagagtatgcaatggtcgatcctgaagatatttctattacagagctgtaccggctaatggagcacagacaccgtaagaaagatacccccgttcaggccagcagccatcacctctttgttcaaatgaagtccctcatgtgctccaacctgggtgaggagcttgaagtgatcttttccctgtttgatagcaaggagaatcgaccaatctcggagcgattttttctgagactcaacaggaacggtctgcccaaggcacctgataaaccagagagacattgttctctctttgtcgatcttggatcttctgaactacggaaagacatttacattactgtgcatataataagaattggccgaatgggggccggtgaaaagaagaatgcttgctccgtgcagtatagacgcccatttggatgtgctgtgctgagtatcgcggatctgcttacaggcgaaacaaaggatgatctgatcctcaaagtgtacatgtgtaataccgagtccgagtggtaccagatccacgaaaacatcatcaaaaaacttaacgccagatataacctgacaggatcgaacgcaggacttgcggtttctttacagctcctgcacggagatattgaacaaattcgcagagaatactcaagtgtcttttcccacggggtttcaatcactaggaagctggggtttagtaatattatcatgcccggcgaaatgaggaatgacctttacattaccatagagcggggggaattcgagaagggcggcaagagcgtggctcgcaatgttgaagtgaccatgtttatcgtcgatagcagcggtcagaccctcaaggacttcatctcatttggctcaggggaaccgccggcatcagaataccatagttttgtattgtatcacaataattcaccccgatggagtgaattactgaagttacccatccctgttgacaagtttcggggcgcccacatccgtttcgagttccgccattgctcaaccaaggagaaaggagaaaaaaagttgttcggctttagctttgtccctctgatgcaagaagacgggagaactctgccagacggcactcatgagctgatagtgcataaatgtgaggagaatacgaatctgcaggacactactaggtacctgaagctgcctttcagtaagggcatctttctcgggaacaataatcaagccatgaaggccacaaaagaaagcttctgtatcacatcattcctgtgctcgaccaaacttacacaaaatggcgatatgttagatcttttgaagtggcggacccatcctgacaaaatcaccggctgcctgagcaaactgaaggaaattgatggttctgagatagtcaagttcctgcaggacactctggacaccctgtttggtatcctggacgagaactctcagaagtatgggtcaaaggtttttgatagccttgtacacattataaacttgctccaggacagcaagttccaccattttaagcccgttatggatacatacattgagtcccatttcgccggagcccttgcttaccgcgacctgatcaaagtgctgaagtggtatgtagatcgaataacggaggccgagcgacaagagcacattcaggaggtcctgaaggcccaagagtatatcttcaaatacatcgtgcagtctcggcgtctcttctccctggccacggggggacagaatgaggaagagttccgctgttgtattcaggagctgctgatgagcgttcggttctttttatctcaggaatccaaaggaagcggtgcgctgtcccagtcgcaagccgtgttcctctcaagcttcccggctgtctactccgagctgcttaagttgttcgacgtgagagaagtggccaatctagtgcaggacactctcggttcactgccgacgattctccatgtagacgactctttgcaagccattaagctgcagtgtatcggcaagactgtggaatcccagctttacacaaacccggatagcaggtacattctgctccctgtcgtgttacatcatttgcacatccatctgcaggagcaaaaggacctcataatgtgcgccaggatcttgtccaatgtcttttgcctgataaagaaaaattcatctgagaagtcggtgcttgaggaaattgatgtaattgtggcttctctgctcgatatcttgctgagaacgatactcgagatcacctccaggccacagccctcgagctcagccatgagatttcagtttcaggacgtgacaggtgaattcgtggcctgcctgctctctctgctgagacagatgaccgatagacattaccagcaactgttggactcattcaacacgaaggaggaattacgggacttcctgctgcagatttttactgttttccggattctgattcggccagaaatgtttcctaaagactggactgtgatgcggctggttgccaacaacgtgattattaccacagttttatatttatcagatgcgctgcgaaaaaatttcctgaatgagaacttcgactataagatctgggacagttacttctacttagcagtgattttcattaaccagctctgcctccagctcgagatgttcacaccttccaagaagaagaaggtgctggagaagtacggggacatgcgcgttacaatgggatgcgagatctttagtatgtggcagaatttgggagaacacaagctgcattttatacccgccctcattgggcccttcctcgaggtcactctaatacctcagccagatctgagaaacgtgatgatcccaatttttcacgacatgatggattgggagcagagacgtagtggaaatttcaaacaggtagaggcaaaacttatcgataagctcgactccctaatgagtgagggcaagggggatgaaacctacagagagctgtttaactctatcattccactcttcggaccataccccagccttcttaagaaaatcgagagggagacttggagggagtctggcgtttccctcattgccaccgtaaccagactcatggaacggctgcttgactatagggattgtatgaagatgggggaagtggatgggaaaaagataggttgtaccgtgtctttgcttaatttttacaagaccgagctcaataaggaagaaatgtacatacggtacatccacaaactgtacgatctgcacctgaaggctcagaatttcactgaagcagcctatacactgctgctgtatgacgaactgctggagtggtccgaccgcccactccgggagttcctgacttaccctatgcagacggaatggcagcgaaaggagcatctgcatctgaccatcattcagaacttcgatagggggaagtgttgggagaacggcataatcctgtgccggaaaatcgccgagcagtatgaatcttattatgactaccgcaatctgagcaagatgaggatgatggaggcttcattgtatgacaagattatggatcagcaacgcctggaaccagagtttttccgcgtgggcttctacggcaagaaattccctttctttttgaggaacaaagaattcgtctgtagaggccacgattatgagcggctggaggccttccaacagaggatgcttaatgagtttcctcacgctatagcgatgcaacatgccaatcagcccgacgaaacgatcttccaggctgaggcccagtatctgcagatatacgcagtcactcctatcccagaatctcaggaagtgctgcagcgggagggggtccctgataacatcaaatcattttacaaggtgaatcatatctggaagttcaggtatgaccgcccgtttcacaagggcaccaaggacaaggagaacgaatttaaatctttatgggtggaacggacgtccctctatcttgtgcagtcgctgcccggcatttcccgctggtttgaggtggaaaagcgcgaggtggtggagatgtctccgctcgagaacgcaatcgaagttctggaaaataaaaaccagcaactgaagacgctaataagccagtgtcagactagacagatgcagaatatcaaccctctgacaatgtgcctgaatggggtgatcgatgccgccgtgaatggcggggttagccgttatcaggaggccttctttgtgaaggaatacattctctcccatcccgaggacggcgaaaagatcgccagacttagagagcttatgctggagcaggcgcagattttagaatttggactagccgttcatgagaaattcgtccctcaggacatgcgacctttgcacaagaaactcgttgaccagttctttgttatgaaatcatccttagggatacaggaattttctgcatgcatgcaagctagtccagtccattttccgaatgggtctccacgggtgtgtcgtaatagtgcaccagctagtgtttctcccgacggcacgcgggttattcccagacgatccccactgagttatccagccgttaatagatacagttcaagttcactctcctctcaggcttcggcggaggtgtccaatatcactggacagtctgaatccagtgacgaagtatttaatatgcaaccctctccctcaactagcagcctgtcctctactcacagtgcttccccgaacgtcacgagtagtgcacccagctccgcacgtgcctctcctttgttgtcagataaacacaagcactcacgggagaattcctgcctcagtcctcgcgagagaccatgtagcgctatctaccctactcctgtcgagccaagccaacggatgttatttaaccacatcggcgacggggcccttccgaggtccgatccgaacttgtccgcaccagagaaagctgtcaacccaactcctagcagttggtcactcgattccgggaaggaggccaagaatatgtccgattccgggaaacttatttccccccctgtcccgcccagacccacacagaccgcctcgcctgctcgccatactacctctgtgtctccatctccagcggggaggagccccctaaagggctccgttcagagctttacacccagccccgtggagtaccattcgccaggtctcatctcaaattcgcctgtgctcagtgggagctactcttcaggcatcagcagcctgtcacggtgctcgactagcgagacctccggcttcgaaaaccaggttaatgaacagtctgccccattgccggtccctgtgccagtgccagtccctagctacggaggggaagaacccgtccgaaaagaatcgaagactcctcccccatattcagtgtacgagcgaacattgagacgccccgtgcccttaccacactcacttagcatccctgtgacaagtgaacccccggccttaccaccgaaaccccttgctgcacgttcttcccatttggaaaacggggcccgtagaactgaccctgggccaaggccaaggcctctgcccagaaaggtgtcacagctatag

SEQ ID NO: 290201 - DNA, 2550 bp, Artificial Sequence
  derived and/or modified sequence
atgaaaatgcacagcacggagagaatccctctgttcggcccttacccatcgctgctcaagaaaattgagcgggagacctggcgagagtcaggggtttccctgatagccacggtcaccaggcttatggaacgcttactggattaccgggactgtatgaaaatgggtgaagtcgatggcaagaagataggctgtaccgtgtccttactcaatttttacaaaacagaactgaataaagaggaaatgtatatcagatatatacataagctgtatgacctccatttgaaggctcagaacttcaccgaggctgcttataccctgctcttgtacgacgaacttctggagtggagtgatcgccctctgagagagtttctcacgtatcctatgcaaacggaatggcaaagaaaggaacatttgcatttgaccatcatccagaactttgatagaggcaaatgctgggagaacggcattatcttgtgccggaagattgcagagcagtacgaatcctattacgactataggaacctgtcaaaaatgcgcatgatggaagctagtctgtacgataagattatggaccagcagcgcctcgagcctgagttttttcgcgtcggcttctacggcaagaagtttccgttcttccttcgtaacaaagagttcgtctgccgaggtcatgattatgagaggctggaggctttccaacagagaatgctgaatgagttcccccatgctattgcaatgcagcatgccaaccaaccagacgaaacaatctttcaggcagaggcccaatatctgcaaatctatgccgtgactcccatccccgagagccaagaagtcctccagcgggagggtgtaccagataatataaagtccttttacaaagtaaaccatatctggaagttccggtatgaccggcccttccataaaggcacaaaagataaagaaaatgagttcaagtccctctgggtcgagagaacgagtctgtatttggtgcagagcctgcccggtattagcagatggttcgaagtggaaaaaagagaggtcgtggagatgtccccactggaaaatgctattgaggttctggagaacaagaaccaacagctgaaaactctcatttctcagtgtcagaccagacaaatgcaaaatatcaacccactgactatgtgtctgaatggggtgattgacgcggctgttaacggcggcgtgagcagatatcaggaggccttttttgtgaaggaatatatcctgagccaccccgaggacggcgagaagatcgctcggctccgggaactcatgctggagcaggcccagattctagaatttggcctggctgtccatgaaaaatttgtcccacaggacatgcgccctctccataagaagcttgtagaccagtttttcgtgatgaagagcagtctgggtatccaggagtttagcgcctgtatgcaggcctcccccgtccacttcccgaacggctcccctagagtgtgcagaaactccgcacccgctagtgtgtcacccgacggcacccgagtaataccacggcgatcaccactgagttaccccgcggtaaatcgctattcctctagctcactgagtagccaggcatccgctgaggtgtccaacatcaccggccaatcagagagttccgatgaagtctttaacatgcagccttcaccaagtacctcttcattgtcctcaacacacagcgcttcaccaaacgtcaccagcagcgccccgtctagtgcccgggcatctcccctgctgtcagacaaacacaaacacagcagagagaattcctgcctctccccaagggagcggccatgttctgccatttatcccactccagttgagcctagccagcggatgctgttcaaccatattggcgacggtgccctgcctcgcagcgacccaaatctgtctgcaccagagaaggctgtgaatccaactccttcttcctggagcctggattccggcaaagaggctaaaaatatgtccgatagcggcaagctcatatcaccacccgttcccccccgcccaactcagacggccagccctgcaaggcatacgacaagcgtgtctccctcaccggcaggccgtagccccttgaagggtagcgttcagagcttcacaccatctcccgtggagtaccatagcccagggctgatctctaatagtccagtgttaagcgggtcctattccagcggcatctcttctctgagccggtgcagcacctctgagacatcaggttttgaaaaccaggtcaatgagcaaagtgcacccttgccagttcctgtccctgtgcctgtgccctcttatggcggcgaagaacctgtgcgtaaggagagcaagacacccccaccttacagcgtttacgaaaggactctgcgccgtcccgtgcctcttccccactcactgagtattcccgtcacctcggagcctccggccctccctccaaagccattagcggccagatcttcccatcttgagaatggagccagacggactgacccagggccccggcctcgacccttgccacggaaagtgtcgcagctctag

SEQ ID NO: 290202 - DNA, 5928 bp, Artificial Sequence
  derived and/or modified sequence
atgtggatccccacagaacatgagaagtatggagtggtgattgccagcttccggggcaccgtgccctacggcctgagcctggagattggagacacagtgcagatcctggagaagtgtgatggctggtaccggggctttgccctgaagaaccccaacatcaagggcatcttccccagcagctatgtgcacctgaagaatgcctgtgtgaagaacaagggccagtttgagatggtgatccccacagaggacagcgtcatcacagagatgaccagcaccctgcgggactggggcaccatgtggaagcagctgtatgtgagaaatgaaggagacctcttccaccggctgtggcacatcatgaatgagatcctggacctgcggcggcaggtgctggtgggccacctgacccatgacaggatgaaggatgtgaagaggcacatcacagcccggctggactggggcaatgagcagctgggcctggacctggtgcccaggaaggagtatgccatggtggaccctgaggacatcagcatcacagagctgtaccgcctgatggagcaccgccacaggaagaaggacacccctgtgcaggccagcagccaccacctgtttgtgcagatgaagagcctgatgtgcagcaacctgggggaggagctggaggtgatcttcagcctgtttgacagcaaagaaaatcggcccatcagcgagcgcttcttcctgcggctgaacagaaatggcctgcccaaggccccagacaagccagagcggcactgcagcctgtttgtggacctgggcagcagcgagctgaggaaggacatctacatcaccgtgcacatcatcagaattggaaggatgggcgctggggagaagaagaatgcctgcagcgtgcagtaccgccggcccttcggctgtgctgtgctgagcattgctgacctgctgactggagagaccaaggatgacctgatcctgaaggtgtacatgtgcaacacagaaagtgagtggtaccagatccacgagaacatcatcaagaagctgaatgcccgctacaacctgaccggcagcaatgccggcctggccgtgtccctgcagctgctgcatggagacatcgagcagatccggcgggagtacagctctgtgttcagccatggagtgtccatcaccaggaagctgggcttcagcaacatcatcatgcctggagagatgagaaatgacctgtacatcaccatcgagcggggggagtttgagaagggcggcaagtctgtggccagaaatgtggaggtgaccatgttcatcgtggacagcagcggccagaccctgaaggacttcatcagctttggcagcggggagcccccagccagcgagtaccacagctttgtgctgtaccacaacaacagcccccgctggagcgagctgctgaagctgcccatccctgtggacaagttccggggggcccacatccgctttgagttccgccactgcagcaccaaggagaagggggagaagaagctgtttggcttctcctttgtgcccctgatgcaggaggatggccgcaccctgcctgatggcacccatgagctgattgtgcacaagtgtgaggagaacaccaacctgcaggacaccacccgctacctgaagctgcccttcagcaagggcatcttcctgggcaacaacaaccaggccatgaaggccaccaaggagagcttctgcatcaccagcttcctgtgcagcaccaagctgacccagaatggagacatgctggacctgctgaagtggaggacccacccagacaagatcaccggctgcctgagcaagctgaaggagattgatggcagcgagatcgtgaagttcctgcaggacaccctggacaccctgtttggcatcctggatgagaacagccagaagtatggcagcaaggtgtttgacagcctggtgcacatcatcaacctgctgcaggacagcaagttccaccacttcaagcctgtgatggacacctacatcgagagccactttgctggggccctggcctacagagacctgatcaaggtgctgaagtggtacgtggaccgcatcacagaggccgagcggcaggagcacatccaggaggtgctgaaggcccaggagtacatcttcaagtacatcgtgcagagccggcggctcttcagcctggccactggaggccagaatgaggaggagttccgctgctgcatccaggagctgctgatgtctgtgcgcttcttcctgagccaggagagcaaaggaagtggggccctgagccagagccaggccgtgttcctgagcagcttccctgctgtgtacagcgagctgctgaagctgtttgatgtgcgggaggtggccaacctggtgcaggacaccctgggcagcctgcccaccatcctgcacgtggatgacagcctgcaggccatcaagctgcagtgcatcggcaagacagtggagagccagctgtacaccaacccagacagccgctacatcctgctgcctgtggtgctgcaccacctgcacatccacctgcaggagcagaaggacctgatcatgtgtgcccgcatcctgagcaatgtgttctgcctgatcaagaagaacagcagcgagaagtctgtgctggaggagattgatgtgattgtggccagcctgctggacatcctgctgcggaccatcctggagatcaccagccggccccagcccagcagcagcgccatgaggttccagttccaggatgtgactggagaatttgtggcctgcctgctgagcctgctgcggcagatgacagacagacactaccagcagctgctggacagcttcaacaccaaggaggagctgcgggacttcctgctgcagatcttcaccgtcttccgcatcctgatccggcctgagatgttccccaaggactggacagtgatgaggctggtggccaacaacgtcatcatcaccaccgtgctgtacctgagtgatgccctgaggaagaacttcctgaatgaaaattttgactacaagatctgggacagctacttctacctggccgtcatcttcatcaaccagctgtgcctgcagctggagatgttcacccccagcaagaagaagaaggtgctggagaagtatggagacatgagggtgaccatgggctgtgagatcttctccatgtggcagaacctgggggagcacaagctgcacttcatcccagccctgattggccccttcctggaggtgaccctcatcccccagcctgacctgagaaatgtgatgatccccatcttccatgacatgatggactgggagcagaggaggagcggcaacttcaagcaggtggaggccaagctgattgacaagctggacagcctgatgtctgagggcaaaggagatgagacctaccgggagctgttcaacagcatcatccccctgtttggcccctaccccagcctgctgaagaagattgaaagagagacctggagggagagcggcgtgtccctgattgccaccgtgacccggctgatggagcggctgctggactacagagactgcatgaagatgggagaggtggatggcaagaagattggctgcaccgtgtccctgctgaacttctacaagacagagctgaacaaggaggagatgtacatccgctacatccacaagctgtatgacctgcacctgaaggcccagaacttcacagaggccgcctacaccctgctgctgtatgatgagctgctggagtggagcgaccggcccctgcgggagttcctgacctaccccatgcagacagagtggcagaggaaggagcacctgcacctgaccatcatccagaactttgaccggggcaagtgctgggagaatggcatcatcctgtgcaggaagattgctgagcagtatgagagctactatgactacagaaacctgagcaagatgaggatgatggaggccagcctgtatgacaagatcatggaccagcagaggctggagcctgagttcttccgggtgggcttctacggcaagaagttccccttcttcctgaggaacaaggagtttgtgtgccggggccatgactatgagcggctggaggccttccagcagaggatgctgaatgagttcccccacgccatcgccatgcagcacgccaaccagccagatgagaccatcttccaggccgaggcccagtacctgcagatctatgctgtgacccccatccctgagagccaggaggtgctgcagcgggagggcgtgcctgacaacatcaagagcttctacaaggtgaaccacatctggaagttccgctatgaccggcccttccacaagggcaccaaggacaaggaaaatgagttcaagagcctgtgggtggagaggaccagcctgtacctggtgcagagcctgcccggcatcagccgctggtttgaggtggagaagcgggaggtggtggagatgagccccctggagaatgccatcgaggtgctggagaacaagaaccagcagctgaagaccctcatcagccagtgccagacccggcagatgcagaacatcaaccccctgaccatgtgcctgaatggagtgattgatgctgctgtgaatggaggagtgagccgctaccaggaggccttctttgtgaaggagtacatcctgagccacccagaagatggagagaagatcgcccggctgcgggagctgatgctggagcaggcccagatcctggagtttggcctggccgtgcatgagaagtttgtgccccaggacatgaggcccctgcacaagaagctggtggaccagttctttgtgatgaagagcagcctgggcatccaggagttcagcgcctgcatgcaggccagccctgtgcacttccccaacggcagcccccgggtgtgcagaaattctgccccagcctctgtgtccccagatggcaccagggtcatcccccggcgcagccccctgagctacccagctgtgaaccgctacagcagcagcagcctgagcagccaggccagcgctgaggtgagcaacatcaccggccagagcgagagcagtgatgaggtgttcaacatgcagcccagccccagcaccagcagcctgagcagcacccacagcgccagccccaacgtgaccagcagcgcccccagcagcgcccgggccagccccctgctgagtgacaagcacaagcacagccgggagaacagctgcctgagcccccgggagcggccctgcagcgccatctaccccacccctgtggagcccagccagaggatgctgttcaaccacatcggagatggagccctgcccaggagtgaccccaacctgagcgcccctgagaaggctgtgaaccccacccccagctcctggagcctggacagcggcaaggaggccaagaacatgtctgattctgggaagctgatcagcccccctgtgcccccccggcccacccagacagccagccctgcccggcacaccacctctgtgagccccagccctgctggccgcagccccctgaagggctctgtgcagagcttcacccccagccctgtggagtaccacagccctggcctcatcagcaacagccctgtgctgagcggcagctacagcagcggcatcagcagcctgagccgctgcagcaccagcgagaccagcggctttgagaaccaggtgaatgagcagagcgcccccctgcctgtgcctgtgcctgtgcctgtgcccagctatggaggagaggagcctgtgaggaaggagagcaagaccccaccaccctacagcgtgtatgaaagaaccctgcggcggcctgtgcccctgccccacagcctgagcatccctgtgaccagcgagcccccagccctgccccccaagcccctggccgcccggagcagccacctggagaatggagccaggagaacagatcctggcccccggccccggcccctgcccaggaaggtgtcccagctgtag

SEQ ID NO: 290203 - DNA, 2550 bp, Artificial Sequence
  derived and/or modified sequence
atgaagatgcacagcacagagcgcatccccctgtttggcccctaccccagcctgctgaagaagattgaaagagagacctggagggagagcggcgtgtccctgattgccaccgtgacccggctgatggagcggctgctggactacagagactgcatgaagatgggagaggtggatggcaagaagattggctgcaccgtgtccctgctgaacttctacaagacagagctgaacaaggaggagatgtacatccgctacatccacaagctgtatgacctgcacctgaaggcccagaacttcacagaggccgcctacaccctgctgctgtatgatgagctgctggagtggagcgaccggcccctgcgggagttcctgacctaccccatgcagacagagtggcagaggaaggagcacctgcacctgaccatcatccagaactttgaccggggcaagtgctgggagaatggcatcatcctgtgcaggaagattgctgagcagtatgagagctactatgactacagaaacctgagcaagatgaggatgatggaggccagcctgtatgacaagatcatggaccagcagaggctggagcctgagttcttccgggtgggcttctacggcaagaagttccccttcttcctgaggaacaaggagtttgtgtgccggggccatgactatgagcggctggaggccttccagcagaggatgctgaatgagttcccccacgccatcgccatgcagcacgccaaccagccagatgagaccatcttccaggccgaggcccagtacctgcagatctatgctgtgacccccatccctgagagccaggaggtgctgcagcgggagggcgtgcctgacaacatcaagagcttctacaaggtgaaccacatctggaagttccgctatgaccggcccttccacaagggcaccaaggacaaggaaaatgagttcaagagcctgtgggtggagaggaccagcctgtacctggtgcagagcctgcccggcatcagccgctggtttgaggtggagaagcgggaggtggtggagatgagccccctggagaatgccatcgaggtgctggagaacaagaaccagcagctgaagaccctcatcagccagtgccagacccggcagatgcagaacatcaaccccctgaccatgtgcctgaatggagtgattgatgctgctgtgaatggaggagtgagccgctaccaggaggccttctttgtgaaggagtacatcctgagccacccagaagatggagagaagatcgcccggctgcgggagctgatgctggagcaggcccagatcctggagtttggcctggccgtgcatgagaagtttgtgccccaggacatgaggcccctgcacaagaagctggtggaccagttctttgtgatgaagagcagcctgggcatccaggagttcagcgcctgcatgcaggccagccctgtgcacttccccaacggcagcccccgggtgtgcagaaattctgccccagcctctgtgtccccagatggcaccagggtcatcccccggcgcagccccctgagctacccagctgtgaaccgctacagcagcagcagcctgagcagccaggccagcgctgaggtgagcaacatcaccggccagagcgagagcagtgatgaggtgttcaacatgcagcccagccccagcaccagcagcctgagcagcacccacagcgccagccccaacgtgaccagcagcgcccccagcagcgcccgggccagccccctgctgagtgacaagcacaagcacagccgggagaacagctgcctgagcccccgggagcggccctgcagcgccatctaccccacccctgtggagcccagccagaggatgctgttcaaccacatcggagatggagccctgcccaggagtgaccccaacctgagcgcccctgagaaggctgtgaaccccacccccagctcctggagcctggacagcggcaaggaggccaagaacatgtctgattctgggaagctgatcagcccccctgtgcccccccggcccacccagacagccagccctgcccggcacaccacctctgtgagccccagccctgctggccgcagccccctgaagggctctgtgcagagcttcacccccagccctgtggagtaccacagccctggcctcatcagcaacagccctgtgctgagcggcagctacagcagcggcatcagcagcctgagccgctgcagcaccagcgagaccagcggctttgagaaccaggtgaatgagcagagcgcccccctgcctgtgcctgtgcctgtgcctgtgcccagctatggaggagaggagcctgtgaggaaggagagcaagaccccaccaccctacagcgtgtatgaaagaaccctgcggcggcctgtgcccctgccccacagcctgagcatccctgtgaccagcgagcccccagccctgccccccaagcccctggccgcccggagcagccacctggagaatggagccaggagaacagatcctggcccccggccccggcccctgcccaggaaggtgtcccagctgtag

SEQ ID NO: 290204 - DNA, 5928 bp, Artificial Sequence
  derived and/or modified sequence
atgtggatccccaccgagcacgagaagtacggcgtggtgatcgccagctttcgcgggacggttccatacgggctgagtctggaaataggtgacacggtacagattcttgagaaatgcgatggctggtatcgggggtttgcactgaagaaccctaacatcaaggggatcttcccaagctcttatgtgcacctgaaaaatgcctgcgtcaagaataagggacagtttgaaatggtgattcctactgaagattcagtgatcacggaaatgacttcaactctccgtgattggggcacaatgtggaaacagctctatgtcaggaatgagggcgatctctttcataggttgtggcacattatgaatgagattctggatctgaggcgtcaagtgctggttggacatttgactcacgaccggatgaaggatgtcaaaagacacatcaccgcccgcctcgactggggaaatgagcagttgggtctggatttggtgcccagaaaagagtacgccatggtcgacccagaagatatatcaataactgaactgtatcgcctgatggagcatcggcatcgtaaaaaagacacacctgtccaggcgtctagtcaccatctgttcgtgcaaatgaaatctttaatgtgttccaacctgggcgaagagctcgaagtgatcttttccttgttcgatagcaaggagaaccgtcctatctccgagagattctttctccggctgaataggaacggcctgcccaaagctcccgataaaccggagaggcattgctcgttattcgtggatttgggtagctcagagttgcgaaaagacatatacataaccgtgcatataatcagaatagggcgaatgggtgccggcgaaaagaaaaacgcctgttcggtgcagtatcggagaccctttgggtgtgcggtgctttccatcgccgacttactgaccggggaaacgaaggatgatctgattttgaaagtatatatgtgcaatacagagtccgagtggtaccagattcatgaaaacatcattaagaaattgaatgcacgctacaatcttacaggctccaacgcaggcctcgcagtgagcttgcaattattgcatggagatatcgagcagatccgccgcgagtacagctcagtattctcccacggagtttctatcaccaggaagttggggttcagcaacattatcatgcccggtgagatgagaaatgacctctacatcacaattgaaaggggtgaatttgagaaaggcgggaagagtgttgcccgtaacgtggaggttaccatgttcatagtggattcttcaggacagacccttaaggatttcatctcttttggaagtggagagcctcctgcctccgagtatcattcattcgtgctctaccacaacaactcccctagatggtcagaactgctcaagctacccatccccgtagacaagttcaggggtgctcatatccgctttgagtttcggcattgtagcacgaaggaaaaaggggagaaaaagttgttcggattttcatttgtgcccttgatgcaggaagatgggaggacactcccggatgggactcacgaactgatcgtacataagtgcgaagaaaacaccaacctccaggacactactaggtacctgaaacttcccttcagcaagggcatatttctgggaaataataaccaagctatgaaagcaacaaaagagtccttttgtatcacaagctttttgtgttccacaaagctgactcaaaacggcgatatgctcgatctgcttaaatggcgcacgcatccagataagataactgggtgcttgtctaagctgaaggagatcgacgggtctgagatcgtcaagttccttcaggacactctggacaccctctttggcatcctcgatgagaattcgcagaagtatgggtctaaagttttcgattcacttgtacacataatcaacctgctgcaggactccaagttccaccactttaaacccgttatggatacctacatcgagtcacatttcgccggcgcgctggcctatagggaccttattaaggtgctgaagtggtacgtggacaggatcacagaggcggaacggcaggaacacatccaggaagtgttaaaagcacaggaatacatttttaagtacatcgttcagtccaggcgactcttttctttagccacaggcgggcaaaacgaggaggagtttcgctgctgcatccaggaactgctgatgagcgtaaggttcttcctctcacaggagagcaagggctctggtgcactcagtcagtcccaggccgtgttcttgtcttcttttcccgcggtgtactctgaactgcttaagcttttcgacgtgagagaagtcgccaacttggtgcaggacacactcggaagcctccctaccatccttcacgtggacgactccctgcaggcgatcaagttacaatgtattgggaaaactgtggaatcgcaattgtacaccaatccggacagtagatacattctgctgcccgttgtgctgcatcacctgcatatccatctgcaggaacaaaaggaccttattatgtgtgctcgcatcctcagtaatgttttttgcttgatcaaaaaaaactcatcagaaaagtccgtcttagaggaaatcgatgtgatcgtcgcatcactcctggatatactgttgagaacgattctagagataacttcccgtccccagccgtcttcttccgcaatgcgtttccagttccaggatgtgaccggtgaattcgtggcctgtctgctcagtcttctgaggcaaatgacagatcgccactatcagcagctcctggattcattcaacactaaagaagaactgcgggactttctgctccaaatcttcacagttttcagaattctgataagacccgagatgtttccgaaggactggacagtcatgcgccttgtggccaacaatgtaatcataacaacagtcctgtatctgtctgatgctctacggaagaactttctgaatgagaacttcgattataaaatttgggactcttacttttacttggccgtgatcttcatcaaccagttgtgtttgcagctagaaatgttcactccatccaaaaagaagaaagtgctagaaaaatatggcgacatgagagtcaccatggggtgtgaaatctttagcatgtggcagaacctcggcgaacataaattacatttcattcctgcactgatcgggcctttcttagaggttacgcttattccgcagcctgacctacgcaacgttatgattccaatttttcatgatatgatggattgggagcagagacgttctggcaacttcaagcaggttgaagccaaactgatcgacaaactggacagtctcatgagtgaaggcaaaggcgacgaaacctaccgcgaactgttcaactccataatcccacttttcggaccttacccaagcctgctgaagaaaatcgagcgggagacctggagggagagcggtgtgtccctcatagccactgtgacgcggctgatggaaagactcttggactaccgcgactgtatgaaaatgggcgaggttgatggcaagaagatcgggtgtacggtttccctattgaacttttacaagacagaattaaacaaggaggaaatgtacatacggtacattcataagctgtacgacctgcacctgaaagcccagaacttcacagaggcggcctataccttgctgctttatgacgagctgctcgagtggtctgacaggccattaagagagttcttgacataccctatgcagacggaatggcaaaggaaagagcacttgcacctcaccataattcaaaacttcgaccgaggcaaatgttgggaaaatggaatcatactttgtaggaagattgccgagcagtacgaatcctactacgactacaggaatctaagcaagatgcgcatgatggaggcttctctgtacgataaaattatggatcagcagcggctggaacccgagttcttccgcgtaggcttttatggaaagaaattcccttttttcttacgaaataaggagtttgtttgccgtggtcatgactacgaaagactcgaggcttttcagcagagaatgttgaatgagttcccacacgcgatcgctatgcagcacgcaaatcagccggacgaaaccatcttccaggccgaggctcagtatctgcagatctatgctgtgaccccgattccagagagtcaagaggtactgcagcgggagggagtccccgataacataaagtccttctacaaggtcaaccatatttggaagttcagatatgaccggcctttccacaagggtaccaaagacaaagagaacgaattcaaatctctgtgggtggagcgcactagcttgtaccttgtgcagtctctgcctggaattagtagatggtttgaggtcgaaaagcgcgaggtggtggaaatgtccccattagagaacgcaatcgaagtcctggagaacaagaatcaacagctgaaaacattgatctcacagtgccaaactagacagatgcagaacatcaaccccctgaccatgtgcttgaacggcgtgatcgatgccgctgtcaacgggggggtgtcccgttaccaggaggcattcttcgtcaaggaatatatactaagccatcccgaggatggagaaaaaatcgctagattgcgggagctcatgctggaacaggctcagatattagagttcggacttgccgtgcatgagaagtttgttccccaagatatgcgtccactgcacaaaaagctcgtcgaccagtttttcgtgatgaaatcttcattggggatccaggaatttagcgcctgcatgcaggcctcgcccgtacattttccgaacggtagtccaagggtgtgtagaaactcagccccagccagcgtgagccccgatggaacccgagtgattcctagacgcagtccactgtcctatcctgcagtaaaccgttacagctcatcgtccctgtcttctcaagcttccgctgaagtgagcaatattacagggcagagcgagtcttccgatgaggtatttaacatgcagcccagtccttccacttcgtcattgtcttccacacactcggcgtctccaaacgtgactagctctgcccccagttccgctagagcgagcccactgctctcagataaacataaacacagtagggagaattcctgcctgagtccgcgtgaaaggccgtgctctgccatctatcctacccctgtggaaccatctcagaggatgctgtttaaccacattggggatggtgcgctcccccgctcagacccgaatctgagcgccccagagaaagctgttaatcccaccccctcatcgtggtctctagatagcggaaaagaggccaaaaacatgtctgactccgggaaacttataagtcctcccgtgcctccaagacccactcagactgccagtccagcccgccacacaacgagtgtgtccccatccccggccggtcggagccccctgaaaggctccgtgcagtctttcaccccttctcctgtcgagtatcatagtcccggactgatttcaaactctcccgtactgtcaggcagctatagctccggcatcagctctttatcccggtgctccacgtcagagaccagcggctttgaaaaccaggtcaatgagcagagtgctcccttaccagtgcctgtgcccgtgcccgtgccatcctatggcggggaagagcctgtgcgcaaggaaagtaagacaccgccgccctacagcgtgtatgaacggactcttcggaggcctgtaccactccctcactctttaagcattccagttacttctgaacctcccgccctcccccctaaacctctcgctgcccgctctagccatcttgaaaatggcgcccgcagaactgatccagggccgaggccccggcccctgccccggaaggtttcacagctgtag

SEQ ID NO: 290205 - DNA, 2550 bp, Artificial Sequence
  derived and/or modified sequence
atgaagatgcacagcaccgagcggatccccctgttcggcccctacccatctctgttaaagaagattgaaagggagacatggagggagagcggagtgtctctcatagccacggtgacccggcttatggagaggctgttagactatagagattgtatgaaaatgggggaggtggacggtaagaaaattggttgtacggtatctctgctgaatttttataaaaccgagctgaacaaagaagagatgtacatccgctacattcataagctctacgacctgcatctgaaagcacaaaacttcacggaagccgcgtatactttgctgttgtatgacgaactgctggagtggagcgaccgcccccttcgggagttcctgacataccccatgcagactgagtggcaacgtaaggaacatttgcacctcaccatcattcaaaattttgaccgcgggaagtgctgggaaaatgggataattctgtgccgtaaaattgcggaacagtacgagagctattacgattatagaaacttatcaaagatgcgcatgatggaggcttcattatacgacaaaatcatggaccagcaacggcttgagcccgagttcttcagagtgggattctatggaaagaaattcccttttttcctgagaaacaaggaatttgtgtgtagaggacatgactatgaaaggctagaggctttccagcagcgtatgctgaacgaattcccgcatgctatcgctatgcagcacgcaaaccagccagatgagactattttccaggccgaggcgcaatatctccaaatttatgccgtcacacctatacctgaatctcaggaagttctgcaacgggaaggcgtgcctgacaacattaagtcattctataaagttaaccatatatggaagtttaggtacgatcggcctttccacaaggggaccaaggacaaagagaacgagttcaaatccctctgggtggaaagaactagcctttacctggttcagagcctccccggcataagtcgctggtttgaggtggaaaagcgcgaagtcgtggagatgtcccctctggagaatgcgatagaggtgctggagaacaagaatcagcagctgaaaacactaattagccagtgtcaaacaagacagatgcagaatattaatcctctgactatgtgtctaaatggcgtcatcgatgcagctgtgaacggaggggtaagcagatatcaggaagcattctttgtgaaggaatacatcctgtcccacccagaggatggcgagaagatcgcccggttacgggagctcatgctagagcaggctcagatcctggagtttggactcgccgtacacgagaaattcgtgccccaggatatgaggcctctgcacaaaaaactggttgaccagttcttcgttatgaagtctagcttggggatccaggagttctcagcttgcatgcaggcatcaccagtccactttcccaacgggtctccaagggtgtgtcggaattctgcaccagcctccgtctctcccgatggcacacgcgtaattccgcgtcggagcccactatcatatccagctgtcaaccgctattcttcttccagcctgtcctctcaggcaagcgcggaagtgtccaacatcactgggcagagtgaaagtagcgatgaggtcttcaacatgcagccctcacccagtaccagctctctgtcaagcactcacagcgcgagccctaacgtgacatcctcagcaccgtcttctgctagagcaagtcccttgttatcggacaaacacaaacattcccgggaaaactcttgtctgtcaccaagagagaggccgtgtagtgccatctatcccacccccgtggagcccagccagcgaatgctgtttaatcatatcggtgatggagccctgccaaggtctgaccctaatctgagtgcgccagaaaaggcagttaatcccacaccaagctcctggtctctggactccggtaaggaagccaagaatatgtccgactcaggaaagctgatcagccccccggtgccaccgcgccccacacagaccgcgagtcctgcaagacacactacctccgtgagtccatcccccgccgggagatcgccccttaaagggagtgtgcagtcctttaccccgtcgccagtagaataccacagccccgggctaatcagcaacagccccgtattgtcaggcagttattcttctggcatctcatctttaagtcgatgcagcacatcggaaacctcgggtttcgaaaaccaggtgaatgagcagagcgctccactgcccgtgcctgtgcccgtccccgtaccatcctacggcggggaagagcctgtcaggaaagagagcaagacgccccctccctacagtgtgtatgagcgaacactacgacgccctgtgcccctaccgcatagcttgtccatcccggttacctcagagcctcccgctttaccccccaaacctcttgccgcccgctcaagtcatctggaaaatggagccagacgaactgaccccgggccccgacccaggcctctacccaggaaggtgagtcagctttag

SEQ ID NO: 290206 - DNA, 5927 bp, Artificial Sequence
  derived and/or modified sequence
atgtggatacccaccgagcatgaaaaatacggcgtggtgatcgccagttttcggggtactgttccttatggactttccctcgaaataggcgatacagttcagattctggagaaatgtgatggctggtaccgcggattcgcattaaaaaaccccaacatcaagggcatcttcccgagttcctacgtgcacctcaagaacgcatgcgttaagaacaaagggcaattcgagatggtgattcctacagaggatagtgtgattactgaaatgacatctacgctgcgggactggggaaccatgtggaaacagctctatgttcggaacgagggcgacctgttccaccggctctggcacatcatgaacgaaatcctagacctccgtcgtcaggtcttggtcggccatctgactcatgatcgtatgaaagacgtcaaacgacacattacggcgcgactggattggggcaacgaacaattagggttagacctggtgcctcggaaggagtatgctatggtggatcctgaggacatatcgatcacagagctctatcggctcatggaacaccggcataggaagaaggacactccagtgcaggcctcctctcaccatctctttgtgcagatgaagtctttaatgtgcagcaacctgggtgaggagctggaagtcatttttagcttattcgattccaaagagaatcgccctatctcagaaagatttttcctgcgactgaatagaaacggcctcccgaaggccccagacaagccggagcggcactgttccctgttcgtggatctcgggtcctctgagctgagaaaggacatctacataacggtgcatatcataaggatcggtaggatgggagcaggtgagaaaaaaaatgcatgtagcgttcagtaccggaggccattcggctgcgccgtgctgtccatcgcagatctgctgactggtgaaaccaaagatgatctcatcctaaaggtgtacatgtgcaatacagagtctgagtggtatcagattcatgagaatattattaagaaacttaacgccaggtacaacctgacaggctctaatgcgggtctggccgtgtcactgcagttattacacggggatattgagcagattcgtcgggaatactcatcagtgttcagtcacggagtgagcattacaagaaaactcgggttctcaaacatcataatgccgggtgaaatgaggaacgatctatacattaccatcgaaaggggcgagttcgaaaaaggcggtaaatccgtggctagaaatgtagaggtcacaatgtttatagtggacagttcagggcagaccctgaaagactttatcagttttggttccggagaaccacccgcttccgaatatcactccttcgtcctgtaccataacaatagtcctaggtggtcagaactcctgaaattgccaatccccgtggataagtttcgcggagcccacataagattcgagttccggcactgctccacaaaggaaaaaggcgagaaaaaactgttcgggttctcatttgttcctctgatgcaagaagatggacggacactgccagatggcacacacgaactgatcgtccacaagtgtgaggaaaacacgaacctccaggatacaacccgatatctgaaactcccatttagtaagggaattttcctgggaaataataaccaggccatgaaggctaccaaggaaagtttttgtataaccagcttcctgtgctctaccaaactcacccagaacggcgacatgctggaccttctgaaatggcgtactcaccctgacaaaattactgggtgcctatcaaaattgaaagagattgatggcagtgagatcgtgaaattcctccaggacactctcgataccctgttcgggattttagacgaaaattcacagaaatacggtagcaaggtgtttgacagtctggtgcatatcatcaatctgctccaagatagcaagtttcatcactttaaaccagtcatggacacttacattgaaagccacttcgcaggtgccctcgcctaccgggacctgattaaggtgctgaaatggtatgtcgacaggattactgaggcagagagacaggaacacattcaggaggtcctgaaagcgcaggaatatatcttcaagtacatcgtgcagtctcgcaggctcttctcgctcgctaccggagggcagaacgaagaagagttcaggtgttgtatccaggagctgttgatgtctgtcaggtttttcctgagtcaggagagcaagggcagtggcgcattgtctcaatctcaggcagttttcctgtcatcctttccggctgtgtactcagagctgctcaaactattcgacgtgagagaagttgccaacctagttcaggataccctcggctccctccccaccatactacacgtggatgattccctgcaagctattaagctgcagtgtatcggcaaaacggtggaaagtcagctatatacaaatcctgactctaggtacattcttctaccagtggtactgcaccacctgcacattcatctgcaggagcagaaagatctgattatgtgcgccagaatcctttccaacgtgttttgtctgatcaaaaaaaactcttctgagaagagcgtcttggaggaaattgacgtaattgtggccagtctgctggatatcttgttaaggacaatcctagaaatcactagccggcctcagccttctagcagcgctatgcgctttcagtttcaggacgttaccggggagttcgtggcttgtctcctgagccttcttcgccaaatgactgatcgccattatcaacaactgttagacagtttcaacacaaaggaggaactgagagactttctgctgcaaattttcactgttttccgaatactgatcaggccggaaatgttccccaaagattggacagtgatgcggcttgtagccaacaacgtgataatcaccaccgtgctgtacttgtccgatgctctgagaaaaaattttctgaacgagaacttcgattataagatctgggatagttacttctatctcgccgtgatttttatcaatcagttatgtctccaactggaaatgttcaccccatcaaaaaagaagaaggttctggagaaatatggcgacatgcgggtgacaatgggctgtgaaatattttctatgtggcaaaatctgggcgagcacaagttacatttcatccccgcactgattggaccgtttctcgaagtcaccctgattccccaacctgatctgagaaacgtcatgatcccaatcttccacgacatgatggattgggagcaaagaaggtccggcaatttcaagcaggttgaggctaagttaatcgacaagctggacagtttgatgtcagagggaaagggagacgagacatatcgtgagctttttaacagtatcattcctctgtttggcccatacccttcactgttgaaaaaaattgaaagggagacatggcgtgaaagtggcgtgtcactgattgccacggtgacccggttgatggaaaggttactcgactatagagattgcatgaaaatgggtgaggtggatggaaagaaaataggctgtacagtgtcgttgttgaacttctacaaaacggagctgaataaagaagagatgtacattcgttacattcacaaactctatgatcttcatttaaaggcccaaaatttcacagaagctgcatatacactgcttctttacgatgaattgctcgagtggagtgatcgccctctgagagaatttctcacatatcctatgcaaaccgagtggcagagaaaggagcatctccatctgaccattatccagaacttcgataggggaaagtgctgggagaatggtatcatcctgtgccgaaagatagctgaacaatacgaaagctattacgattatcgcaatctgagtaagatgcggatgatggaagcttctctatatgacaaaatcatggatcaacagagactggagccagagtttttccgcgttgggttctacggaaagaaattccccttctttttgcgaaataaggaattcgtgtgccggggacatgactacgagcgcctggaagccttccaacagcgtatgctcaatgagtttcctcacgccatcgccatgcagcacgccaaccagccagatgagactatatttcaagcagaggcccagtacctgcaaatctacgcagtaacccccatccctgaaagtcaggaagttcttcagagggagggcgtccccgacaacataaaatcattctacaaagtaaaccatatctggaaattcagatacgaccgaccctttcacaaaggaactaaggacaaggagaatgaatttaagtcgctctgggtggagaggaccagcttgtatctggttcagagcctccccggtatcagccggtggttcgaggtggagaagagggaagtcgttgagatgagcccactggaaaacgcgatcgaggtcctggagaacaaaaaccagcagctgaaaactttgatctcacagtgtcagacccgccaaatgcagaatataaaccctctcacaatgtgtcttaacggagtaattgacgcagctgtgaacggaggagtaagccggtaccaagaggccttttttgtcaaggagtatatactgtctcacccagaggatggtgaaaaaattgctcggttgagggaacttatgctagagcaagcacagatactggaattcggactggctgttcatgaaaagtttgtgccccaggacatgaggccactgcataaaaagctagtggatcagttcttcgtcatgaaatccagtttagggattcaggagttttcagcctgcatgcaggcttctcccgtacacttccctaatgggagcccaagggtctgtcggaacagcgcccctgcaagcgtgagccctgacgggacgagagtgatccccagacggtctcccctgtcctatccagccgttaataggtattcctcatccagcttatcaagccaggcatctgctgaagtctcaaatattactggtcagtccgagtcctcagatgaggtttttaatatgcagccttctccctccaccagcagcttgtcttcaactcacagcgctagccctaatgtcacttcctccgccccatcatcggcaagagctagccccttactctctgataagcacaagcacagcagggagaactcgtgtctgtcccctcgtgagaggccgtgctcagcaatttaccccacacccgtggaaccttcccagagaatgctctttaatcacatcggcgacggagctttgcctaggtctgatcctaacctgtctgctccggagaaggcagtgaatcctacgccctcatcttggtccctagactctggcaaagaggctaaaaatatgagcgacagcggaaagctaatatcccccccagtcccgcctcgccctacccaaacagcctctccagcacggcatacaacctctgtatctccctctcccgctggaagatctccactgaaaggctctgtgcaatctttcacaccatcaccagtcgaataccatagccctggcctcatctccaatagccccgtgctgtccgggtcatacagcagtggcatatcctccctgtcacggtgcagcacgtctgagaccagtggtttcgaaaaccaagtcaatgaacagtccgctccactgccagtgcctgtgcccgtgcccgtgcctagctacggcggtgaggaacctgtgcggaaagaaagcaaaactccccctccttactcggtatacgaacgcaccctgagacgccctgtaccattgccacattccctgtctatccccgtcacatcagaacctcccgctctgcctcccaagcccctcgcagccagaagtagtcacttggaaaacggagccagacggactgacccgggtccacgccctcggccactgccccgtaaggtgtcccagctgta

SEQ ID NO: 290207 - DNA, 2550 bp, Artificial Sequence
  derived and/or modified sequence
atgaagatgcacagtaccgaaaggattccactctttggaccttatccttctctactgaagaagatagaaagggagacctggcgcgaaagcggagtgtcacttatcgccaccgtgactcggctgatggaaaggcttttggattacagagactgtatgaagatgggcgaggtggacggaaagaagattggatgcaccgttagcctgctgaacttttataaaaccgaattgaataaggaggaaatgtacatcaggtatattcacaaattatacgacctgcatctgaaagcccagaactttactgaagccgcttataccttactcctgtatgacgagctcctggaatggtccgaccggccattgcgggaattcctcacataccccatgcagaccgaatggcagaggaaagagcatctgcatctaacaattattcaaaactttgaccgcggaaaatgctgggagaatgggattatcctgtgtaggaaaattgccgaacagtatgaaagttattacgactatcgtaatctgagtaaaatgcgcatgatggaggctagtctgtatgataagattatggaccagcagcggctagaaccagagttctttagagttggattttacggaaaaaaattccccttctttctcagaaacaaggagttcgtgtgcagggggcacgactacgaacgccttgaggccttccagcagcggatgctcaatgagtttccccatgccatcgccatgcagcatgcgaaccagccggacgagactatttttcaagcagaggcccagtacctgcagatctatgctgtgacaccaataccagaaagccaggaagttctacagagggagggggtgccggataatattaagtctttctataaggtgaaccatatatggaaattcagatatgatagaccgttccataaaggtaccaaagacaaagagaacgaattcaagagcctttgggtcgaacgcacatcattgtatcttgtccaatccctccctggtatttcgagatggttcgaggtggagaaacgggaggtggttgagatgtcaccactggaaaacgctatcgaggtcctcgaaaataagaaccagcagctcaagacactgattagtcagtgtcaaactagacagatgcagaacatcaatcccctcactatgtgtctaaacggggtcatcgatgctgctgttaacggcggagtgtccagatatcaggaggctttctttgttaaggagtacatcctctcacatcccgaagatggagaaaaaatcgcaagactgagggagctaatgctggagcaggcccagatactcgagtttggactcgcagtccatgaaaagttcgtaccacaggatatgaggcccctgcacaaaaaactggtcgaccaattctttgtaatgaaatcttctctcggtattcaggagttttccgcatgtatgcaggccagcccagtccatttccctaatggcagccctcgcgtctgccgtaatagtgcacccgcaagcgtgtccccagatgggacccgcgtgattccgaggaggagtcccctgagctacccagccgttaacagatacagctcatcatctttgtcctcacaggcgtccgcagaggtttccaacatcacagggcaatcggaaagttccgacgaagtgttcaacatgcagcctagccccagcacctcaagcctatcctcgactcacagtgcaagtcccaacgtcacatcatctgcaccttcttccgccagggctagccctctgttatccgataagcacaaacatagccgggagaactcctgcttgagtccacgggaacgtccatgttctgccatctatccgactcctgttgagccaagccagagaatgctgttcaaccacatcggtgacggtgccttaccacgcagtgatcccaacctgtctgcacccgagaaggccgtaaaccccaccccaagcagttggtctcttgactcagggaaggaagccaaaaacatgtccgactctggcaaactcatttctccccctgtccctccacgacccactcagactgcttcccccgctaggcatactaccagtgtctctccgtcgccagcagggaggtcccccttgaaggggagtgtgcagtcctttactccaagcccagtcgaatatcatagccctggtttgatctcaaactcacctgtgctgtctggctcttactcctctggcatttctagcctgtcccggtgcagcactagcgagacaagtgggttcgaaaaccaagtgaacgagcaatcagctcccctaccagtccccgttcctgtgcccgtgccgagttatggcggtgaagagcccgttcggaaggaatcaaagaccccacccccttactcggtgtatgaacgcaccctgcgaaggcccgtaccgctgccccacagtctgtccatccccgtcacgagtgaacccccagctttgcccccaaaacccttagcagctcgctcgagtcatttggagaatggcgctaggcgaaccgatcccggtccgaggcccagaccactgcccagaaaagtaagtcagctttag

SEQ ID NO: 290208 - DNA, 5928 bp, Artificial Sequence
  derived and/or modified sequence
atgtggatccccaccgagcacgagaagtacggcgtggtgatcgccagcttcagaggcaccgtgccctacggcctgagcctggagatcggcgacaccgtgcagatcctggagaagtgcgacggctggtacagaggcttcgccctgaagaaccccaacatcaagggcatcttccccagcagctacgtgcacctgaagaacgcctgcgtgaagaacaagggccagttcgagatggtgatccccaccgaggacagcgtgatcaccgagatgaccagcaccctgagagactggggcaccatgtggaagcagctgtacgtgagaaacgagggcgacctgttccacagactgtggcacatcatgaacgagatcctggacctgagaagacaggtgctggtgggccacctgacccacgacagaatgaaggacgtgaagagacacatcaccgccagactggactggggcaacgagcagctgggcctggacctggtgcccagaaaggagtacgccatggtggaccccgaggacatcagcatcaccgagctgtacagactgatggagcacagacacagaaagaaggacacccccgtgcaggccagcagccaccacctgttcgtgcagatgaagagcctgatgtgcagcaacctgggcgaggagctggaggtgatcttcagcctgttcgacagcaaggagaacagacccatcagcgagagattcttcctgagactgaacagaaacggcctgcccaaggcccccgacaagcccgagagacactgcagcctgttcgtggacctgggcagcagcgagctgagaaaggacatctacatcaccgtgcacatcatcagaatcggcagaatgggcgccggcgagaagaagaacgcctgcagcgtgcagtacagaagacccttcggctgcgccgtgctgagcatcgccgacctgctgaccggcgagaccaaggacgacctgatcctgaaggtgtacatgtgcaacaccgagagcgagtggtaccagatccacgagaacatcatcaagaagctgaacgccagatacaacctgaccggcagcaacgccggcctggccgtgagcctgcagctgctgcacggcgacatcgagcagatcagaagagagtacagcagcgtgttcagccacggcgtgagcatcaccagaaagctgggcttcagcaacatcatcatgcccggcgagatgagaaacgacctgtacatcaccatcgagagaggcgagttcgagaagggcggcaagagcgtggccagaaacgtggaggtgaccatgttcatcgtggacagcagcggccagaccctgaaggacttcatcagcttcggcagcggcgagccccccgccagcgagtaccacagcttcgtgctgtaccacaacaacagccccagatggagcgagctgctgaagctgcccatccccgtggacaagttcagaggcgcccacatcagattcgagttcagacactgcagcaccaaggagaagggcgagaagaagctgttcggcttcagcttcgtgcccctgatgcaggaggacggcagaaccctgcccgacggcacccacgagctgatcgtgcacaagtgcgaggagaacaccaacctgcaggacaccaccagatacctgaagctgcccttcagcaagggcatcttcctgggcaacaacaaccaggccatgaaggccaccaaggagagcttctgcatcaccagcttcctgtgcagcaccaagctgacccagaacggcgacatgctggacctgctgaagtggagaacccaccccgacaagatcaccggctgcctgagcaagctgaaggagatcgacggcagcgagatcgtgaagttcctgcaggacaccctggacaccctgttcggcatcctggacgagaacagccagaagtacggcagcaaggtgttcgacagcctggtgcacatcatcaacctgctgcaggacagcaagttccaccacttcaagcccgtgatggacacctacatcgagagccacttcgccggcgccctggcctacagagacctgatcaaggtgctgaagtggtacgtggacagaatcaccgaggccgagagacaggagcacatccaggaggtgctgaaggcccaggagtacatcttcaagtacatcgtgcagagcagaagactgttcagcctggccaccggcggccagaacgaggaggagttcagatgctgcatccaggagctgctgatgagcgtgagattcttcctgagccaggagagcaagggcagcggcgccctgagccagagccaggccgtgttcctgagcagcttccccgccgtgtacagcgagctgctgaagctgttcgacgtgagagaggtggccaacctggtgcaggacaccctgggcagcctgcccaccatcctgcacgtggacgacagcctgcaggccatcaagctgcagtgcatcggcaagaccgtggagagccagctgtacaccaaccccgacagcagatacatcctgctgcccgtggtgctgcaccacctgcacatccacctgcaggagcagaaggacctgatcatgtgcgccagaatcctgagcaacgtgttctgcctgatcaagaagaacagcagcgagaagagcgtgctggaggagatcgacgtgatcgtggccagcctgctggacatcctgctgagaaccatcctggagatcaccagcagaccccagcccagcagcagcgccatgagattccagttccaggacgtgaccggcgagttcgtggcctgcctgctgagcctgctgagacagatgaccgacagacactaccagcagctgctggacagcttcaacaccaaggaggagctgagagacttcctgctgcagatcttcaccgtgttcagaatcctgatcagacccgagatgttccccaaggactggaccgtgatgagactggtggccaacaacgtgatcatcaccaccgtgctgtacctgagcgacgccctgagaaagaacttcctgaacgagaacttcgactacaagatctgggacagctacttctacctggccgtgatcttcatcaaccagctgtgcctgcagctggagatgttcacccccagcaagaagaagaaggtgctggagaagtacggcgacatgagagtgaccatgggctgcgagatcttcagcatgtggcagaacctgggcgagcacaagctgcacttcatccccgccctgatcggccccttcctggaggtgaccctgatcccccagcccgacctgagaaacgtgatgatccccatcttccacgacatgatggactgggagcagagaagaagcggcaacttcaagcaggtggaggccaagctgatcgacaagctggacagcctgatgagcgagggcaagggcgacgagacctacagagagctgttcaacagcatcatccccctgttcggcccctaccccagcctgctgaagaagatcgagagagagacctggagagagagcggcgtgagcctgatcgccaccgtgaccagactgatggagagactgctggactacagagactgcatgaagatgggcgaggtggacggcaagaagatcggctgcaccgtgagcctgctgaacttctacaagaccgagctgaacaaggaggagatgtacatcagatacatccacaagctgtacgacctgcacctgaaggcccagaacttcaccgaggccgcctacaccctgctgctgtacgacgagctgctggagtggagcgacagacccctgagagagttcctgacctaccccatgcagaccgagtggcagagaaaggagcacctgcacctgaccatcatccagaacttcgacagaggcaagtgctgggagaacggcatcatcctgtgcagaaagatcgccgagcagtacgagagctactacgactacagaaacctgagcaagatgagaatgatggaggccagcctgtacgacaagatcatggaccagcagagactggagcccgagttcttcagagtgggcttctacggcaagaagttccccttcttcctgagaaacaaggagttcgtgtgcagaggccacgactacgagagactggaggccttccagcagagaatgctgaacgagttcccccacgccatcgccatgcagcacgccaaccagcccgacgagaccatcttccaggccgaggcccagtacctgcagatctacgccgtgacccccatccccgagagccaggaggtgctgcagagagagggcgtgcccgacaacatcaagagcttctacaaggtgaaccacatctggaagttcagatacgacagacccttccacaagggcaccaaggacaaggagaacgagttcaagagcctgtgggtggagagaaccagcctgtacctggtgcagagcctgcccggcatcagcagatggttcgaggtggagaagagagaggtggtggagatgagccccctggagaacgccatcgaggtgctggagaacaagaaccagcagctgaagaccctgatcagccagtgccagaccagacagatgcagaacatcaaccccctgaccatgtgcctgaacggcgtgatcgacgccgccgtgaacggcggcgtgagcagataccaggaggccttcttcgtgaaggagtacatcctgagccaccccgaggacggcgagaagatcgccagactgagagagctgatgctggagcaggcccagatcctggagttcggcctggccgtgcacgagaagttcgtgccccaggacatgagacccctgcacaagaagctggtggaccagttcttcgtgatgaagagcagcctgggcatccaggagttcagcgcctgcatgcaggccagccccgtgcacttccccaacggcagccccagagtgtgcagaaacagcgcccccgccagcgtgagccccgacggcaccagagtgatccccagaagaagccccctgagctaccccgccgtgaacagatacagcagcagcagcctgagcagccaggccagcgccgaggtgagcaacatcaccggccagagcgagagcagcgacgaggtgttcaacatgcagcccagccccagcaccagcagcctgagcagcacccacagcgccagccccaacgtgaccagcagcgcccccagcagcgccagagccagccccctgctgagcgacaagcacaagcacagcagagagaacagctgcctgagccccagagagagaccctgcagcgccatctaccccacccccgtggagcccagccagagaatgctgttcaaccacatcggcgacggcgccctgcccagaagcgaccccaacctgagcgcccccgagaaggccgtgaaccccacccccagcagctggagcctggacagcggcaaggaggccaagaacatgagcgacagcggcaagctgatcagcccccccgtgccccccagacccacccagaccgccagccccgccagacacaccaccagcgtgagccccagccccgccggcagaagccccctgaagggcagcgtgcagagcttcacccccagccccgtggagtaccacagccccggcctgatcagcaacagccccgtgctgagcggcagctacagcagcggcatcagcagcctgagcagatgcagcaccagcgagaccagcggcttcgagaaccaggtgaacgagcagagcgcccccctgcccgtgcccgtgcccgtgcccgtgcccagctacggcggcgaggagcccgtgagaaaggagagcaagaccccccccccctacagcgtgtacgagagaaccctgagaagacccgtgcccctgccccacagcctgagcatccccgtgaccagcgagccccccgccctgccccccaagcccctggccgccagaagcagccacctggagaacggcgccagaagaaccgaccccggccccagacccagacccctgcccagaaaggtgagccagctgtag

SEQ ID NO: 290209 - DNA, 2550 bp, Artificial Sequence
  derived and/or modified sequence
atgaagatgcacagcaccgagagaatccccctgttcggcccctaccccagcctgctgaagaagatcgagagagagacctggagagagagcggcgtgagcctgatcgccaccgtgaccagactgatggagagactgctggactacagagactgcatgaagatgggcgaggtggacggcaagaagatcggctgcaccgtgagcctgctgaacttctacaagaccgagctgaacaaggaggagatgtacatcagatacatccacaagctgtacgacctgcacctgaaggcccagaacttcaccgaggccgcctacaccctgctgctgtacgacgagctgctggagtggagcgacagacccctgagagagttcctgacctaccccatgcagaccgagtggcagagaaaggagcacctgcacctgaccatcatccagaacttcgacagaggcaagtgctgggagaacggcatcatcctgtgcagaaagatcgccgagcagtacgagagctactacgactacagaaacctgagcaagatgagaatgatggaggccagcctgtacgacaagatcatggaccagcagagactggagcccgagttcttcagagtgggcttctacggcaagaagttccccttcttcctgagaaacaaggagttcgtgtgcagaggccacgactacgagagactggaggccttccagcagagaatgctgaacgagttcccccacgccatcgccatgcagcacgccaaccagcccgacgagaccatcttccaggccgaggcccagtacctgcagatctacgccgtgacccccatccccgagagccaggaggtgctgcagagagagggcgtgcccgacaacatcaagagcttctacaaggtgaaccacatctggaagttcagatacgacagacccttccacaagggcaccaaggacaaggagaacgagttcaagagcctgtgggtggagagaaccagcctgtacctggtgcagagcctgcccggcatcagcagatggttcgaggtggagaagagagaggtggtggagatgagccccctggagaacgccatcgaggtgctggagaacaagaaccagcagctgaagaccctgatcagccagtgccagaccagacagatgcagaacatcaaccccctgaccatgtgcctgaacggcgtgatcgacgccgccgtgaacggcggcgtgagcagataccaggaggccttcttcgtgaaggagtacatcctgagccaccccgaggacggcgagaagatcgccagactgagagagctgatgctggagcaggcccagatcctggagttcggcctggccgtgcacgagaagttcgtgccccaggacatgagacccctgcacaagaagctggtggaccagttcttcgtgatgaagagcagcctgggcatccaggagttcagcgcctgcatgcaggccagccccgtgcacttccccaacggcagccccagagtgtgcagaaacagcgcccccgccagcgtgagccccgacggcaccagagtgatccccagaagaagccccctgagctaccccgccgtgaacagatacagcagcagcagcctgagcagccaggccagcgccgaggtgagcaacatcaccggccagagcgagagcagcgacgaggtgttcaacatgcagcccagccccagcaccagcagcctgagcagcacccacagcgccagccccaacgtgaccagcagcgcccccagcagcgccagagccagccccctgctgagcgacaagcacaagcacagcagagagaacagctgcctgagccccagagagagaccctgcagcgccatctaccccacccccgtggagcccagccagagaatgctgttcaaccacatcggcgacggcgccctgcccagaagcgaccccaacctgagcgcccccgagaaggccgtgaaccccacccccagcagctggagcctggacagcggcaaggaggccaagaacatgagcgacagcggcaagctgatcagcccccccgtgccccccagacccacccagaccgccagccccgccagacacaccaccagcgtgagccccagccccgccggcagaagccccctgaagggcagcgtgcagagcttcacccccagccccgtggagtaccacagccccggcctgatcagcaacagccccgtgctgagcggcagctacagcagcggcatcagcagcctgagcagatgcagcaccagcgagaccagcggcttcgagaaccaggtgaacgagcagagcgcccccctgcccgtgcccgtgcccgtgcccgtgcccagctacggcggcgaggagcccgtgagaaaggagagcaagaccccccccccctacagcgtgtacgagagaaccctgagaagacccgtgcccctgccccacagcctgagcatccccgtgaccagcgagccccccgccctgccccccaagcccctggccgccagaagcagccacctggagaacggcgccagaagaaccgaccccggccccagacccagacccctgcccagaaaggtgagccagctgtag

SEQ ID NO: 290210 - DNA, 7997 bp, Artificial Sequence
  derived and/or modified sequence
gcttagttcagtgaatcagaacaatgactgcgccgccgggtacccgggagcgcgtcggaggactgtgagcagccgccgccgggagagctgcgggcggcgcagtgtcaacgctgggctcgggagcctccagcgcagatcctgcccagcgcccgcagcccgcgcgaagccgctgggctccggcactgcagcgctgctcggggactgtgcattgttgtgagccggagaaggggcgcggggattacaaagcctgaagaccccggagcccctttagccatgtggatacctacggagcacgagaaatacggcgtggttattgccagtttccgaggaaccgttccatatggcctgtcattggaaattggagatacagttcagatcctggagaagtgtgatggctggtacagaggatttgccttaaaaaacccaaatatcaagggtatatttccttccagctacgttcacttgaaaaatgcctgtgtaaagaacaaaggacaatttgaaatggttattcccactgaagactctgttatcacagaaatgacatcaacattaagagactggggaaccatgtggaaacaactctatgtgcgtaatgaaggcgatctcttccaccggctgtggcacatcatgaatgaaatcctggacctgaggcggcaggtgctggtgggccacctcacccacgaccggatgaaggacgtgaagcgccacattactgcccggcttgactggggcaatgaacaactgggactggacctggtgcctaggaaagagtacgcaatggtggatccggaagacatcagcattactgagctctaccgattgatggaacatcgacatcggaagaaagacaccccggtgcaggccagcagtcaccacctctttgtccagatgaagagcctcatgtgttccaacctgggagaggagctggaggtcatcttctcactctttgacagtaaagagaaccggccaatcagtgagagatttttcttgaggctgaatagaaacgggcttcccaaagcccctgataaaccggaacgacattgctccctctttgtggatttgggcagcagtgagctaagaaaggacatttatatcaccgtgcacattatccgaatcggtcgaatgggagcaggagaaaaaaagaatgcctgtagtgtccagtaccgacgaccctttggctgtgcagttcttagcatcgctgacctgctaacaggagagacaaaggatgacctcattctgaaagtatacatgtgtaacacagagagtgagtggtaccaaatccatgagaacatcatcaaaaagctgaatgcacgttataacttgactggctccaatgcaggtttagcagtttccttacagctattgcacggagacattgaacaaatcagaagggaatattcatcagtattttctcatggagtatccataacaaggaagctgggattttcaaatattattatgcctggtgaaatgaggaatgatttatatatcactattgaaaggggagaatttgagaaaggagggaagagcgtggccagaaatgtggaagttacgatgttcattgtagacagtagtggccaaaccctgaaggattttatctccttcggctctggggagccaccagccagtgagtaccactcctttgtgctttaccataacaacagtcccaggtggtctgaactgctgaaacttcccattcctgtggataaattccggggtgcacacatccgcttcgagtttcggcattgttccacaaaggagaaaggagagaagaagttgtttgggttttcttttgtccctctgatgcaagaagatggtaggactcttccagatggcactcatgagctcatcgtgcataagtgtgaagaaaacacaaatcttcaggatactacccgctacctcaaacttcccttttccaagggcattttccttgggaataataatcaagccatgaaggccacaaaggagtccttttgtattacatcttttctctgttccacaaaactcacacaaaatggtgatatgcttgatcttttgaaatggagaacccacccagacaagatcactggctgtctctctaaattaaaagaaattgatggctcagagatagtaaagtttctgcaggatacactggataccttatttggaattttagatgaaaattcccaaaaatatgggtctaaagtgtttgattctttggttcacataataaatttgctgcaagatagcaaatttcatcattttaaacctgtaatggacacttacattgagagtcattttgctggggcacttgcatacagagatctcatcaaagtgctcaaatggtacgtggaccggatcacagaagcagagcggcaagagcatatccaggaggtgctgaaggcacaagaatacatttttaagtatatagttcaatctcgaaggctgttttcccttgccactggtgggcaaaacgaagaggagttccgctgctgcattcaggagcttctcatgtcagtccgtttctttctttcgcaagagagcaaagggtctggagcattatctcagtcacaggctgtgtttctgagctctttccctgccgtgtactcagaactgttgaagctctttgatgtccgggaagtagccaacttggtccaggacaccctgggcagtctgccgaccatcctgcatgtggatgattccctgcaggccatcaaactgcagtgcattggcaaaaccgtggaaagccagctttataccaacccagattcccgatacattcttctgcctgtcgtgttacatcacctccacattcacttgcaagaacagaaggacctgatcatgtgtgcacgtatccttagcaacgtattttgtcttatcaagaaaaatagctcagaaaaatctgtgctggaggaaatagatgtgatagtggccagcttgctggatattctgctgaggaccatattggagatcaccagccgacctcagccatccagctcagcaatgcggttccagttccaggatgtcactggggagtttgttgcttgtctcctgtccctattacgacaaatgacagatagacattatcaacagcttcttgatagttttaatacaaaggaagaactaagggatttcctgctgcagatatttactgtgttccgaatattgatacgcccggagatgtttccaaaggactggactgttatgcgcttggttgctaacaatgttattattacaacagttctatacctctcagatgcacttcgtaagaacttcttaaatgaaaactttgattataagatctgggattcctacttttacctcgcagtcatttttataaaccagttgtgtctgcagttggagatgttcacaccttccaagaagaaaaaggtgttagaaaagtatggtgacatgcgggtaacaatgggttgtgaaattttcagcatgtggcaaaacctaggagagcacaagcttcattttatccctgccctgattggccccttcctagaagtgaccttgataccccagccagatcttcggaatgtcatgattccaatttttcatgatatgatggactgggagcagaggcggagtggcaactttaaacaggtggaagccaagctaattgacaaactggatagcctgatgtcagaaggcaaaggtgacgaaacataccgcgagctcttcaacagtataattccactatttggtccctatcctagtctactaaagaaaattgagcgggaaacatggcgggaaagtggcgtttcattaattgctactgtaactcgtctaatggagaggttgttagattacagggactgcatgaaaatgggagaggtagatggcaaaaagattggctgcacagttagccttctgaacttctataagactgaactgaacaaggaggagatgtatatacgctacattcacaaactctatgatctgcatctcaaagcacagaactttacagaagctgcatataccctcctcttatatgacgagctactggaatggtctgatcggcccctcagggagttcctgacctaccccatgcaaacagaatggcagcgcaaagagcacctgcacctcaccatcatccagaactttgacagaggcaaatgttgggagaatggcattatcttgtgccggaagattgcagagcagtatgagagttattatgactacagaaacctgagcaagatgcggatgatggaagcctctttgtatgacaaaattatggaccagcaacgtcttgaaccagagttcttcagagttggattttatggaaaaaaatttccatttttcttaagaaataaggagtttgtgtgtcgagggcatgactacgagaggctggaagccttccaacagagaatgctgaacgagttcccccatgccatcgccatgcagcacgccaaccagcccgatgagaccatcttccaggcagaagctcagtatttgcagatatatgctgtgactcccattccagagagccaggaggtcctgcagagagagggtgttccggacaacatcaaaagcttctataaagtgaatcacatctggaaattccgctatgaccgaccatttcacaaaggcacaaaagataaagagaatgaattcaagagtctctgggtggagagaacgtcattatacttggtgcagagtttgcctggcatctctcgctggtttgaagtggaaaagcgtgaagtggtagaaatgagtcctctggaaaatgcaattgaagtgctagaaaataagaatcagcagctgaagactctgattagtcagtgtcagacaagacagatgcagaatattaatcccctgactatgtgcctgaatggagttatagatgctgcagttaatggtggcgtttccaggtatcaagaggcattctttgtcaaagaatatatcttaagtcaccctgaagatggggagaaaattgcacgattaagagagctgatgcttgagcaggcacagattctggaatttggtttggccgtgcatgagaagtttgtacctcaagatatgagaccccttcacaaaaagctggttgaccaattctttgtgatgaagtcgagcttagggatacaggagttctctgcttgtatgcaagccagtcctgtccattttcctaatggaagccctcgtgtgtgtagaaactcagcacctgcttctgtgagcccagatggtaccagggtaattcctagacgcagcccgttaagttacccagctgtcaaccgatattcttcctcctcactgtcctcacaagcttctgctgaagtaagcaatattacagggcaatcagaaagctctgatgaagtctttaacatgcagccaagtccatctacctcaagcttgagttctactcactcggcttcacctaatgtgacaagttctgctccatcgagtgccagagcttctcctttgttgtctgacaaacacaaacattcccgagaaaactcttgcctgtcaccaagagagagaccatgcagtgccatctatccaacacctgtggagccttcgcagaggatgctgtttaatcatattggagacggggccttgccacgcagtgacccaaatctctctgcacctgaaaaagctgtgaaccccacccctagcagctggagcctggacagtgggaaggaagccaagaacatgtcggatagtgggaaacttatctctccccctgtccctccaagacccacacagactgcttcaccagcaagacacacgacatcagtatccccctcgcctgccgggcgatctccattgaagggctctgtgcagtctttcaccccctctccagtggagtaccactcgccaggactcatctccaactcccctgtcttgtcgggcagctacagcagtgggatttcttctctcagccggtgcagcacgtcggaaacctcaggctttgaaaatcaggtgaatgaacagtcggcccccctgccggtgccagtgccggtgcccgtgccgagctacggcggggaggagccagtgcgcaaggagagcaagactccgcccccgtacagcgtctacgagcggactctgcggcgccccgtcccgctacctcacagcctctccatccccgtcacgtcggagccgcccgcgctgccccccaagcctctggcagcgcgatccagccacctggagaatggggcccggaggactgaccccggcccgcggcccaggcccctgccccgcaaggtctctcagttataagtcacttttctatgtacctgcgatgcattctttgcccgtttacaaaataagaagtatgatgagaagacatttagtgtaggcactttaataacttactcagctccttcgatgaatggaattaaaacttgcttattaaatatcatgttgcacaatattaaaagttgctgatctaaaacgccagatgttaaatgaagtatggctgaatttcattaaaacgtttctcatttggaagtggtaaatagtgataaagactccttttgtacctttttatgttcacttttttttatatagtttaatcttaaaaccaatacgatattgtcaaacgatacaatgtgtgacaatgttgtatcgtttttactgaatacttgatacttggagaaagcttattaagtcagtgcacatcctaacacagtggtccttattttagaagacttctgtaaataaggcaaggtttatcagtgcagatcatcagaattaaagttcaagcaggcgagcaagacagtatacttaaggggttgcaaagcttgggactggaaattgttttgttcttgaaacaaaatacttctttaaggttgcttttgctgtttgactgctgtctacattcgtaaaattctattttgtgaattggtagctaaatcccttactaccctgacaccgtggtatctactgtatttcttttcaaggtgcaatttgcttcagagttccaatcagctagattaagcaagaggctccagaagaaatgtttacttgaattttgcgcttcctttcttgatagtttcctatataaaatttgtcattgaacaagagcaaatgctgaagtattaatgaggcacaaatgactgtgccccattagcaagaattcaggaatcaatacagacagtattaaattaatagcttaagtgaagaaaaaaaaaacttagtgaaaatgtattagcacgattaaatggcaaaaggacttataaaaggcaagggcattaactttcagtcctgcacaaaataaaaaattcctcacgactctccacttttaccagtggagtttgtcttagctgacctgtcgtctttctcttgaaggaggattgctgtagacttctctagcttgaatattgcaacatagcatcttaggtctagatagggatgctaatgccagttgtagaagtgtgaaaaaagcaccttgtatgtagtaatgtattttatatctttgttttttcttttactgactgtttataacactcaattgacaatagatatgaactgtattttaaatcatactgttaaatattttccctcttttgttgggaagctcattttagtttaaccatgtttgttttgttggtagcttacctggaaggcagtgaccacttttttatattctcttaatgaaaccattcagcaggtatatgctgttgaggctggttatagaggttttctataataaatgttcaagtatttttgtatataactggttaattttaataagagataccattatgtgtaaaaaaaagtaaaaataaacgcaaacagttgttgatgcagtatgattgttataattatgccaaatactttacgtatggaaaaagaatatttgtacatatgtgcttttaacaattctgccatattgactttacaattttgaatgtcggaaaaattaatatatgttaaatatttatgtttagtgaaagtgttcataattgagaaaaggaacatatgcattttagctttgtatcttgcaagttttgcagtcagaaattttttgaactagcttttgcttttgataacacttcgtgtttgtaaccaca

SEQ ID NO: 290211 - DNA, 2857 bp, Artificial Sequence
  derived and/or modified sequence
aaggaaaaaacgcaaaacgtcataccagctgtacaaggattttcctgtagcagttgcattgcagtaaaattgcttggatgaagatgcattccactgagagaattccactatttggtccctatcctagtctactaaagaaaattgagcgggaaacatggcgggaaagtggcgtttcattaattgctactgtaactcgtctaatggagaggttgttagattacagggactgcatgaaaatgggagaggtagatggcaaaaagattggctgcacagttagccttctgaacttctataagactgaactgaacaaggaggagatgtatatacgctacattcacaaactctatgatctgcatctcaaagcacagaactttacagaagctgcatataccctcctcttatatgacgagctactggaatggtctgatcggcccctcagggagttcctgacctaccccatgcaaacagaatggcagcgcaaagagcacctgcacctcaccatcatccagaactttgacagaggcaaatgttgggagaatggcattatcttgtgccggaagattgcagagcagtatgagagttattatgactacagaaacctgagcaagatgcggatgatggaagcctctttgtatgacaaaattatggaccagcaacgtcttgaaccagagttcttcagagttggattttatggaaaaaaatttccatttttcttaagaaataaggagtttgtgtgtcgagggcatgactacgagaggctggaagccttccaacagagaatgctgaacgagttcccccatgccatcgccatgcagcacgccaaccagcccgatgagaccatcttccaggcagaagctcagtatttgcagatatatgctgtgactcccattccagagagccaggaggtcctgcagagagagggtgttccggacaacatcaaaagcttctataaagtgaatcacatctggaaattccgctatgaccgaccatttcacaaaggcacaaaagataaagagaatgaattcaagagtctctgggtggagagaacgtcattatacttggtgcagagtttgcctggcatctctcgctggtttgaagtggaaaagcgtgaagtggtagaaatgagtcctctggaaaatgcaattgaagtgctagaaaataagaatcagcagctgaagactctgattagtcagtgtcagacaagacagatgcagaatattaatcccctgactatgtgcctgaatggagttatagatgctgcagttaatggtggcgtttccaggtatcaagaggcattctttgtcaaagaatatatcttaagtcaccctgaagatggggagaaaattgcacgattaagagagctgatgcttgagcaggcacagattctggaatttggtttggccgtgcatgagaagtttgtacctcaagatatgagaccccttcacaaaaagctggttgaccaattctttgtgatgaagtcgagcttagggatacaggagttctctgcttgtatgcaagccagtcctgtccattttcctaatggaagccctcgtgtgtgtagaaactcagcacctgcttctgtgagcccagatggtaccagggtaattcctagacgcagcccgttaagttacccagctgtcaaccgatattcttcctcctcactgtcctcacaagcttctgctgaagtaagcaatattacagggcaatcagaaagctctgatgaagtctttaacatgcagccaagtccatctacctcaagcttgagttctactcactcggcttcacctaatgtgacaagttctgctccatcgagtgccagagcttctcctttgttgtctgacaaacacaaacattcccgagaaaactcttgcctgtcaccaagagagagaccatgcagtgccatctatccaacacctgtggagccttcgcagaggatgctgtttaatcatattggagacggggccttgccacgcagtgacccaaatctctctgcacctgaaaaagctgtgaaccccacccctagcagctggagcctggacagtgggaaggaagccaagaacatgtcggatagtgggaaacttatctctccccctgtccctccaagacccacacagactgcttcaccagcaagacacacgacatcagtatccccctcgcctgccgggcgatctccattgaagggctctgtgcagtctttcaccccctctccagtggagtaccactcgccaggactcatctccaactcccctgtcttgtcgggcagctacagcagtgggatttcttctctcagccggtgcagcacgtcggaaacctcaggctttgaaaatcaggtgaatgaacagtcggcccccctgccggtgccagtgccggtgcccgtgccgagctacggcggggaggagccagtgcgcaaggagagcaagactccgcccccgtacagcgtctacgagcggactctgcggcgccccgtcccgctacctcacagcctctccatccccgtcacgtcggagccgcccgcgctgccccccaagcctctggcagcgcgatccagccacctggagaatggggcccggaggactgaccccggcccgcggcccaggcccctgccccgcaaggtctctcagttataagtcacttttctatgtacctgcgatgcattctttgcccgtttacaaaataagaagtatgatgagaagacatttagtgtaggcactttaataacttactcagctccttcgatgaatggaattaaaacttgcttattaaatatcatgttgcacaatattaaaagttgctgatctaaaacgccagatgttaaatgaagtatggctgaatttcattaaaacgtttctcatttgga

SEQ ID NO: 290212 - protein, 1925 aa, Artificial Sequence
  derived and/or modified sequence
VIASFRGTVPYGLSLEIGDTVQILEKCDGWYRGFALKNPNIKGIFPSSYVHLKNACVKNKGQFEMVIPTEDSVITEMTSTLRDWGTMWKQLYVRNEGDLFHRLWHIMNEILDLRRQVLVGHLTHDRMKDVKRHITARLDWGNEQLGLDLVPRKEYAMVDPEDISITELYRLMEHRHRKKDTPVQASSHHLFVQMKSLMCSNLGEELEVIFSLFDSKENRPISERFFLRLNRNGLPKAPDKPERHCSLFVDLGSSELRKDIYITVHIIRIGRMGAGEKKNACSVQYRRPFGCAVLSIADLLTGETKDDLILKVYMCNTESEWYQIHENIIKKLNARYNLTGSNAGLAVSLQLLHGDIEQIRREYSSVFSHGVSITRKLGFSNIIMPGEMRNDLYITIERGEFEKGGKSVARNVEVTMFIVDSSGQTLKDFISFGSGEPPASEYHSFVLYHNNSPRWSELLKLPIPVDKFRGAHIRFEFRHCSTKEKGEKKLFGFSFVPLMQEDGRTLPDGTHELIVHKCEENTNLQDTTRYLKLPFSKGIFLGNNNQAMKATKESFCITSFLCSTKLTQNGDMLDLLKWRTHPDKITGCLSKLKEIDGSEIVKFLQDTLDTLFGILDENSQKYGSKVFDSLVHIINLLQDSKFHHFKPVMDTYIESHFAGALAYRDLIKVLKWYVDRITEAERQEHIQEVLKAQEYIFKYIVQSRRLFSLATGGQNEEEFRCCIQELLMSVRFFLSQESKGSGALSQSQAVFLSSFPAVYSELLKLFDVREVANLVQDTLGSLPTILHVDDSLQAIKLQCIGKTVESQLYTNPDSRYILLPVVLHHLHIHLQEQKDLIMCARILSNVFCLIKKNSSEKSVLEEIDVIVASLLDILLRTILEITSRPQPSSSAMRFQFQDVTGEFVACLLSLLRQMTDRHYQQLLDSFNTKEELRDFLLQIFTVFRILIRPEMFPKDWTVMRLVANNVIITTVLYLSDALRKNFLNENFDYKIWDSYFYLAVIFINQLCLQLEMFTPSKKKKVLEKYGDMRVTMGCEIFSMWQNLGEHKLHFIPALIGPFLEVTLIPQPDLRNVMIPIFHDMMDWEQRRSGNFKQVEAKLIDKLDSLMSEGKGDETYRELFNSIIPLFGPYPSLLKKIERETWRESGVSLIATVTRLMERLLDYRDCMKMGEVDGKKIGCTVSLLNFYKTELNKEEMYIRYIHKLYDLHLKAQNFTEAAYTLLLYDELLEWSDRPLREFLTYPMQTEWQRKEHLHLTIIQNFDRGKCWENGIILCRKIAEQYESYYDYRNLSKMRMMEASLYDKIMDQQRLEPEFFRVGFYGKKFPFFLRNKEFVCRGHDYERLEAFQQRMLNEFPHAIAMQHANQPDETIFQAEAQYLQIYAVTPIPESQEVLQREGVPDNIKSFYKVNHIWKFRYDRPFHKGTKDKENEFKSLWVERTSLYLVQSLPGISRWFEVEKREVVEMSPLENAIEVLENKNQQLKTLISQCQTRQMQNINPLTMCLNGVIDAAVNGGVSRYQEAFFVKEYILSHPEDGEKIARLRELMLEQAQILEFGLAVHEKFVPQDMRPLHKKLVDQFFVMKSSLGIQEFSACMQASPVHFPNGSPRVCRNSAPASVSPDGTRVIPRRSPLSYPAVNRYSSSSLSSQASAEVSNITGQSESSDEVFNMQPSPSTSSLSSTHSASPNVTSSAPSSARASPLLSDKHKHSRENSCLSPRERPCSAIYPTPVEPSQRMLFNHIGDGALPRSDPNLSAPEKASPARHTTSVSPSPAGRSPLKGSVQSFTPSPVEYHSPGLISNSPVLSGSYSSGISSLSRCSTSETSGFENQVNEQSAPLPVPVPVPVPSYGGEEPVRKESKTPPPYSVYERTLRRPVPLPHSLSIPVTSEPPALPPKPLAARSSHLENGARRTDPGPRPRPLPRKVSQL

SEQ ID NO: 290213 - DNA, 5778 bp, Artificial Sequence
  derived and/or modified sequence
gtcatcgccagtttccgcgggacggtcccatacggcctgagtcttgagataggtgataccgtgcagatacttgagaagtgtgacgggtggtatagagggtttgctctgaagaacccaaatatcaaggggatcttcccatcatcctatgtgcatttaaagaatgcctgtgtcaaaaataaggggcaatttgagatggtcattcccacagaggactctgtgattaccgagatgacatctaccttgcgcgattggggcactatgtggaaacagttgtacgtcaggaatgaaggcgatctgttccatagactctggcatattatgaacgaaatacttgatcttaggaggcaggtgttagtggggcacctgacccatgatagaatgaaagacgtgaagcgacatatcactgcaaggctcgattggggcaacgaacagctaggcctcgatctggtaccacgaaaagagtacgctatggtggaccccgaagatatatccatcactgaactgtatcgtctcatggagcaccggcaccgcaagaaagacacacccgtccaggcatcctctcaccacctctttgtgcagatgaagtctctcatgtgttccaacctgggtgaagaactggaggtaatcttcagccttttcgactctaaggagaataggcctatatctgaaagattctttttgcggctcaacagaaacggactccctaaagctcccgacaagcccgaacgccactgctccctgttcgtggatctggggagctctgagcttagaaaagacatctacatcactgttcatattattcgcatcggccgcatgggggctggtgagaaaaagaacgcttgcagtgtccaatataggcgacccttcgggtgtgctgtcctgtcgatcgccgacttgctgaccggggagactaaagatgatttaatccttaaagtgtatatgtgtaacaccgagtctgaatggtatcagatccacgaaaacataatcaagaagctcaacgccaggtacaacctcactgggtcaaacgcagggttggctgtgagcctacagctgcttcacggtgacattgagcagattagaagggagtatagtagcgtattcagccacggcgtgagtatcacgaggaaattgggtttctcgaacattattatgcccggcgaaatgcgtaatgacctttacatcacgatagagcggggtgagttcgaaaaaggcggcaaatctgtggcccgcaatgtggaggtgacaatgtttattgtggattccagcggtcagacactaaaggatttcatttcttttggatctggcgagcctcccgccagtgagtaccactcttttgtgctttatcataataactccccaagatggagtgagctgcttaagctgcccattcctgtggataaattcaggggggcccatattagatttgaattccggcattgctccacgaaagagaagggcgagaagaaactttttggctttagcttcgtcccactaatgcaggaagacggacgaaccctgcccgatggaacacatgaactcatagtgcataagtgtgaggagaatacgaacttgcaggacaccaccaggtatctgaaactgccattctccaagggcattttcctcggcaataataaccaggcaatgaaagctacgaaagaatctttctgcatcacgtcattcctatgctcaacaaagctgacacaaaacggggatatgttggatctcctgaagtggcgcacccatcccgataagatcaccgggtgtcttagcaagcttaaggagattgacggatctgaaattgttaaattcctgcaggataccttggacactctgtttggaatattggacgagaattcacagaagtatggctctaaggtgttcgattcactggttcacattattaacctcctccaggattccaagttccaccactttaagcccgtgatggatacgtatatagaaagtcacttcgccggggccctggcctatcgggatttaattaaggttctcaagtggtacgtggacagaatcacggaggccgagcggcaggagcatatacaggaagttctgaaggcgcaggagtacattttcaaatatatcgtgcagtctcggcggcttttctccttggccaccggcggacagaacgaagaggagtttcgctgttgtatccaggaactgcttatgagcgttagatttttcctctcccaggagtccaaaggatctggagcattgagccaaagtcaagccgtgtttctcagctcctttcctgctgtctatagcgagctgctcaagctgtttgatgttcgtgaagttgccaatttagtgcaggatactctggggtctctgcccacgattctgcacgtggacgactccctccaggctattaaactccagtgcattggaaagaccgtagagtcacagttatataccaaccccgactcccgttacattctgctgcctgtggtacttcaccacctccacatccatctgcaggaacagaaagatctgatcatgtgtgctcgaatcctgagcaatgtgttttgtttgattaaaaagaattctagcgagaagtctgtcctggaagaaattgacgttatagtagcttcccttttagacatcttactcaggaccattctcgagataacgagtcggccacaaccctcttcaagtgctatgagattccaatttcaggacgtaactggggagttcgtggcgtgcctactgagcctgctgaggcagatgactgaccgccattaccagcagttgctggattcattcaacaccaaggaagaattgcgcgacttcctgctgcaaatcttcaccgtcttcaggatactgattaggcccgaaatgtttccaaaggattggaccgttatgagattggtagccaataatgtgatcatcaccaccgtgctgtacctaagcgacgctctgcggaagaatttcttaaacgagaactttgactataagatatgggattcatacttctacctggcggtaatcttcataaatcagttgtgcctccaattggaaatgttcacgccttctaagaagaagaaggtgctggaaaaatacggcgacatgagggtgaccatgggctgtgaaattttttccatgtggcagaatctcggcgaacacaaactacactttattccggccctgattggaccttttctggaggtgacccttatcccccagcctgatctccggaacgttatgatcccgatatttcacgacatgatggattgggagcagaggaggtccggtaattttaagcaggtggaagccaagcttattgacaaactagattcgctgatgtctgagggcaaaggggatgaaacctaccgcgagctttttaattccattattcccctgttcgggccttatccatctcttctgaagaaaatagaaagggagacgtggcgggaatccggagttagcttaattgcgaccgttactaggctcatggagcggttgctcgattaccgggactgcatgaagatgggagaggtagacggcaagaagatcgggtgcaccgtgtcactgttgaacttctataaaactgaacttaataaagaggaaatgtacatccggtacatccacaagctgtacgaccttcacctgaaagcacagaattttactgaggccgcatacaccttgttactttatgatgaattgctggaatggtccgatcggcctttgcgggagttcctgacgtaccccatgcaaaccgagtggcagaggaaggaacatctgcatcttactataatccagaattttgacaggggcaaatgctgggaaaacggcataatcctgtgccgtaagatagctgagcagtacgagtcgtattatgactacagaaacctgagcaaaatgcgtatgatggaagcctctctctacgataagattatggaccagcagcgtcttgaacccgagtttttcagggtgggattctatggcaagaaatttccattttttctgcgcaacaaggaattcgtgtgtcgcggtcacgactatgagcgcctggaagccttccagcagaggatgctgaacgagtttccccacgcgatagccatgcagcacgcaaaccaacccgatgaaactatatttcaagctgaggctcagtatctacaaatctacgctgtcacaccgataccagaatcgcaagaagttttgcagagggagggagtccctgataacattaagagtttctacaaagtgaaccacatctggaagttccgctacgatagaccctttcataagggcaccaaagacaaggagaatgagtttaagtcgttatgggtggagagaacaagtctgtatctggttcagagtcttcccggcatctcaaggtggttcgaagtcgaaaaaagggaagtcgtggagatgagtcccttagagaatgcaatcgaggtactggagaataagaaccaacagttgaaaacacttatttcccaatgtcagactcgccagatgcaaaatattaaccccttaacaatgtgtctcaacggagtgatcgacgctgccgtcaacgggggcgtatctcgctatcaggaggcctttttcgtgaaggaatacatcctaagccatcccgaggatggtgaaaagatagctcgcctcagggagcttatgctggagcaggcccagattctcgagtttgggctggcggtgcatgaaaaattcgtccctcaggacatgcgacctttgcacaagaagctagtggaccagttcttcgttatgaagagttctcttggaatccaggagttcagcgcatgcatgcaggcttccccagttcattttcctaatggcagcccccgtgtttgccggaattctgcacccgctagtgtgagtcctgacggaacaagggtcatacccaggagatcgccgctgtcatacccggctgttaaccgctattcaagctcatccctcagctcacaggcttctgccgaagtgagcaatatcacagggcagtccgaatcatctgacgaggtattcaacatgcagccaagtccatccacgtcatctctcagttctacgcacagcgcttccccgaatgtcacatcctcagccccatcatcagcacgggcttcacctttattgagtgataaacacaaacacagccgcgaaaattcctgtctgtcaccacgggagagaccttgcagcgcgatttatcccacccccgtggagccttctcagcggatgctgttcaaccacatcggcgacggtgccctgccaaggtccgatccgaacttgtccgcgccggaaaaagcctctcctgcgaggcataccacctccgtgtcacctagtcccgccggtagatcaccgctgaagggctccgtgcagtcatttacaccatccccagttgaataccactccccgggtctgatttcaaatagtccggtgttgtccggttcttactcatcgggcatctccagcctgtcaaggtgtagcaccagtgagaccagcgggttcgagaatcaggtgaacgagcaatcagctccactgcccgtccccgtgcccgtccccgttccgtcctacggaggtgaggagcctgtgaggaaggagtctaaaacccctccaccgtattccgtttatgagcggacgcttaggaggccagtgcctctgccacacagcctgagcatcccagtgactagcgaacccccagctttacctcccaaaccactcgcagctagatcatctcacctggagaacggcgctcgcaggacggatcccggtccccgccccaggcccttgcctcgaaaagtgtcccagctttag

SEQ ID NO: 290214 - DNA, 5778 bp, Artificial Sequence
  derived and/or modified sequence
gtcatcgccagcttccggggcaccgtgccctacggcctgagcctggagattggagacacagtgcagatcctggagaagtgtgatggctggtaccggggctttgccctgaagaaccccaacatcaagggcatcttccccagcagctatgtgcacctgaagaatgcctgtgtgaagaacaagggccagtttgagatggtgatccccacagaggacagcgtcatcacagagatgaccagcaccctgcgggactggggcaccatgtggaagcagctgtatgtgagaaatgaaggagacctcttccaccggctgtggcacatcatgaatgagatcctggacctgcggcggcaggtgctggtgggccacctgacccatgacaggatgaaggatgtgaagaggcacatcacagcccggctggactggggcaatgagcagctgggcctggacctggtgcccaggaaggagtatgccatggtggaccctgaggacatcagcatcacagagctgtaccgcctgatggagcaccgccacaggaagaaggacacccctgtgcaggccagcagccaccacctgtttgtgcagatgaagagcctgatgtgcagcaacctgggggaggagctggaggtgatcttcagcctgtttgacagcaaagaaaatcggcccatcagcgagcgcttcttcctgcggctgaacagaaatggcctgcccaaggccccagacaagccagagcggcactgcagcctgtttgtggacctgggcagcagcgagctgaggaaggacatctacatcaccgtgcacatcatcagaattggaaggatgggcgctggggagaagaagaatgcctgcagcgtgcagtaccgccggcccttcggctgtgctgtgctgagcattgctgacctgctgactggagagaccaaggatgacctgatcctgaaggtgtacatgtgcaacacagaaagtgagtggtaccagatccacgagaacatcatcaagaagctgaatgcccgctacaacctgaccggcagcaatgccggcctggccgtgtccctgcagctgctgcatggagacatcgagcagatccggcgggagtacagctctgtgttcagccatggagtgtccatcaccaggaagctgggcttcagcaacatcatcatgcctggagagatgagaaatgacctgtacatcaccatcgagcggggggagtttgagaagggcggcaagtctgtggccagaaatgtggaggtgaccatgttcatcgtggacagcagcggccagaccctgaaggacttcatcagctttggcagcggggagcccccagccagcgagtaccacagctttgtgctgtaccacaacaacagcccccgctggagcgagctgctgaagctgcccatccctgtggacaagttccggggggcccacatccgctttgagttccgccactgcagcaccaaggagaagggggagaagaagctgtttggcttctcctttgtgcccctgatgcaggaggatggccgcaccctgcctgatggcacccatgagctgattgtgcacaagtgtgaggagaacaccaacctgcaggacaccacccgctacctgaagctgcccttcagcaagggcatcttcctgggcaacaacaaccaggccatgaaggccaccaaggagagcttctgcatcaccagcttcctgtgcagcaccaagctgacccagaatggagacatgctggacctgctgaagtggaggacccacccagacaagatcaccggctgcctgagcaagctgaaggagattgatggcagcgagatcgtgaagttcctgcaggacaccctggacaccctgtttggcatcctggatgagaacagccagaagtatggcagcaaggtgtttgacagcctggtgcacatcatcaacctgctgcaggacagcaagttccaccacttcaagcctgtgatggacacctacatcgagagccactttgctggggccctggcctacagagacctgatcaaggtgctgaagtggtacgtggaccgcatcacagaggccgagcggcaggagcacatccaggaggtgctgaaggcccaggagtacatcttcaagtacatcgtgcagagccggcggctcttcagcctggccactggaggccagaatgaggaggagttccgctgctgcatccaggagctgctgatgtctgtgcgcttcttcctgagccaggagagcaaaggaagtggggccctgagccagagccaggccgtgttcctgagcagcttccctgctgtgtacagcgagctgctgaagctgtttgatgtgcgggaggtggccaacctggtgcaggacaccctgggcagcctgcccaccatcctgcacgtggatgacagcctgcaggccatcaagctgcagtgcatcggcaagacagtggagagccagctgtacaccaacccagacagccgctacatcctgctgcctgtggtgctgcaccacctgcacatccacctgcaggagcagaaggacctgatcatgtgtgcccgcatcctgagcaatgtgttctgcctgatcaagaagaacagcagcgagaagtctgtgctggaggagattgatgtgattgtggccagcctgctggacatcctgctgcggaccatcctggagatcaccagccggccccagcccagcagcagcgccatgaggttccagttccaggatgtgactggagaatttgtggcctgcctgctgagcctgctgcggcagatgacagacagacactaccagcagctgctggacagcttcaacaccaaggaggagctgcgggacttcctgctgcagatcttcaccgtcttccgcatcctgatccggcctgagatgttccccaaggactggacagtgatgaggctggtggccaacaacgtcatcatcaccaccgtgctgtacctgagtgatgccctgaggaagaacttcctgaatgaaaattttgactacaagatctgggacagctacttctacctggccgtcatcttcatcaaccagctgtgcctgcagctggagatgttcacccccagcaagaagaagaaggtgctggagaagtatggagacatgagggtgaccatgggctgtgagatcttctccatgtggcagaacctgggggagcacaagctgcacttcatcccagccctgattggccccttcctggaggtgaccctcatcccccagcctgacctgagaaatgtgatgatccccatcttccatgacatgatggactgggagcagaggaggagcggcaacttcaagcaggtggaggccaagctgattgacaagctggacagcctgatgtctgagggcaaaggagatgagacctaccgggagctgttcaacagcatcatccccctgtttggcccctaccccagcctgctgaagaagattgaaagagagacctggagggagagcggcgtgtccctgattgccaccgtgacccggctgatggagcggctgctggactacagagactgcatgaagatgggagaggtggatggcaagaagattggctgcaccgtgtccctgctgaacttctacaagacagagctgaacaaggaggagatgtacatccgctacatccacaagctgtatgacctgcacctgaaggcccagaacttcacagaggccgcctacaccctgctgctgtatgatgagctgctggagtggagcgaccggcccctgcgggagttcctgacctaccccatgcagacagagtggcagaggaaggagcacctgcacctgaccatcatccagaactttgaccggggcaagtgctgggagaatggcatcatcctgtgcaggaagattgctgagcagtatgagagctactatgactacagaaacctgagcaagatgaggatgatggaggccagcctgtatgacaagatcatggaccagcagaggctggagcctgagttcttccgggtgggcttctacggcaagaagttccccttcttcctgaggaacaaggagtttgtgtgccggggccatgactatgagcggctggaggccttccagcagaggatgctgaatgagttcccccacgccatcgccatgcagcacgccaaccagccagatgagaccatcttccaggccgaggcccagtacctgcagatctatgctgtgacccccatccctgagagccaggaggtgctgcagcgggagggcgtgcctgacaacatcaagagcttctacaaggtgaaccacatctggaagttccgctatgaccggcccttccacaagggcaccaaggacaaggaaaatgagttcaagagcctgtgggtggagaggaccagcctgtacctggtgcagagcctgcccggcatcagccgctggtttgaggtggagaagcgggaggtggtggagatgagccccctggagaatgccatcgaggtgctggagaacaagaaccagcagctgaagaccctcatcagccagtgccagacccggcagatgcagaacatcaaccccctgaccatgtgcctgaatggagtgattgatgctgctgtgaatggaggagtgagccgctaccaggaggccttctttgtgaaggagtacatcctgagccacccagaagatggagagaagatcgcccggctgcgggagctgatgctggagcaggcccagatcctggagtttggcctggccgtgcatgagaagtttgtgccccaggacatgaggcccctgcacaagaagctggtggaccagttctttgtgatgaagagcagcctgggcatccaggagttcagcgcctgcatgcaggccagccctgtgcacttccccaacggcagcccccgggtgtgcagaaattctgccccagcctctgtgtccccagatggcaccagggtcatcccccggcgcagccccctgagctacccagctgtgaaccgctacagcagcagcagcctgagcagccaggccagcgctgaggtgagcaacatcaccggccagagcgagagcagtgatgaggtgttcaacatgcagcccagccccagcaccagcagcctgagcagcacccacagcgccagccccaacgtgaccagcagcgcccccagcagcgcccgggccagccccctgctgagtgacaagcacaagcacagccgggagaacagctgcctgagcccccgggagcggccctgcagcgccatctaccccacccctgtggagcccagccagaggatgctgttcaaccacatcggagatggagccctgcccaggagtgaccccaacctgagcgcccctgagaaggccagccctgcccggcacaccacctctgtgagccccagccctgctggccgcagccccctgaagggctctgtgcagagcttcacccccagccctgtggagtaccacagccctggcctcatcagcaacagccctgtgctgagcggcagctacagcagcggcatcagcagcctgagccgctgcagcaccagcgagaccagcggctttgagaaccaggtgaatgagcagagcgcccccctgcctgtgcctgtgcctgtgcctgtgcccagctatggaggagaggagcctgtgaggaaggagagcaagaccccaccaccctacagcgtgtatgaaagaaccctgcggcggcctgtgcccctgccccacagcctgagcatccctgtgaccagcgagcccccagccctgccccccaagcccctggccgcccggagcagccacctggagaatggagccaggagaacagatcctggcccccggccccggcccctgcccaggaaggtgtcccagctgtag

SEQ ID NO: 290215 - DNA, 5778 bp, Artificial Sequence
  derived and/or modified sequence
gtgatcgccagcttccggggcaccgtgccctacggcctgagcctggaaatcggagatacagtgcagatcctggaaaaatgcgacggctggtacagagggtttgccctcaagaacccaaacatcaaaggcatctttccaagttcttacgtgcacctaaaaaacgcttgtgtcaagaataaagggcagttcgaaatggtcatcccgaccgaggattccgtaatcaccgaaatgacaagcacccttcgggattgggggacaatgtggaagcagctctacgtgagaaacgaaggggacttgttccaccgattgtggcatataatgaacgagattctcgacttacgacggcaggtgctcgtggggcatctgacacatgatcgtatgaaggacgttaagcgacacattacagctagactcgactgggggaatgaacagttgggattggacctggtgccgcgcaaagagtacgcgatggtagatccagaagatatctcaattaccgaactctaccggctaatggagcaccgccaccgcaagaaagacaccccagttcaggcctcttcacaccacctgttcgtccagatgaagagcctgatgtgtagtaacctgggcgaggaactggaggtaatattttcactatttgactcaaaggagaatcgtcctatttcggagaggttcttcttacgactgaacaggaacggactgcccaaagcccccgacaagcccgaaagacactgcagtctgttcgtcgacttaggatcgtctgagttgagaaaggatatctatattacagtgcacatcatccggatcggacggatgggtgccggggagaaaaaaaacgcctgctcggttcagtatagaagaccttttggctgcgcagtgctgtcaatcgccgatctcctgactggggagacaaaagatgatctgatccttaaggtatatatgtgcaacaccgagtcggagtggtaccagattcacgaaaacatcattaaaaagctgaatgccagatacaacctgaccggcagcaacgccggacttgctgtctctctccagctactacatggtgatattgaacagatccgtagagagtactctagtgtgttctcccatggagtgtccatcacacgcaaactcggtttttcgaatattattatgccaggcgagatgcgaaacgatttgtatattacaatagaaagaggggagtttgaaaaggggggaaagtcagttgcgcgcaatgtggaagtgaccatgttcatcgtggacagtagtggtcagactctgaaagatttcatttcctttgggtctggggaaccccccgcctccgagtaccactctttcgtgttgtaccataacaattcaccacggtggagcgagctgttgaagctgccaattccagttgacaagtttcggggcgcccacatccgttttgagtttaggcactgctccactaaggaaaaaggggaaaagaagctatttggtttctcatttgtgccgctgatgcaagaggacggtcggacactgcctgatggcactcacgagctaattgtgcataaatgcgaggaaaataccaatctgcaggatacgactaggtacctgaaactgcccttttccaagggcattttcctggggaataataatcaggccatgaaggcaaccaaagagagcttttgcattacatcgttcctgtgctccacaaagctcactcagaacggcgatatgctggatctgctcaaatggcggactcatcccgataagattacaggctgcttatccaagctgaaagaaattgacggatctgagattgtgaagtttctccaagatactctagatacactgtttggcatactggacgaaaattcccaaaaatatggcagcaaggttttcgatagcctcgtacacataatcaacctcctccaagattctaagttccatcacttcaaaccagttatggacacctacatagaatcgcacttcgctggtgctctcgcgtaccgggatctcatcaaggttcttaagtggtatgtggaccggattacagaggcagagaggcaagagcatatccaagaggtgctcaaggcacaggaatacatcttcaaatatatagtgcagtcccggcgtctctttagccttgccactggtggccagaatgaggaggagttccgttgttgtatccaggagcttttgatgagcgtccggttttttctgtcccaggagagtaagggcagtggcgccctgagtcagtctcaggccgtgtttctctccagcttcccggccgtctactccgaattgctgaaactatttgatgttagggaggtggcaaacctggtgcaggatacccttggatcgctgcccacaattttgcatgtggacgacagtttgcaggccattaagctgcagtgcatcggcaaaaccgtcgaatctcagctgtatacaaatcccgattcccgatatattctcctgccggtggtcttgcatcatttacacatccatttacaggaacagaaagacttgattatgtgtgctcggatcttgtcaaacgtcttctgccttatcaagaaaaactcttctgaaaagtcagtgttggaagagattgatgtgattgtggcgtcactgctcgatatccttctgcgcaccattctggagatcacgtcacggcctcagccgtccagttctgccatgcgctttcagtttcaagatgtcacgggggagttcgtagcatgcctactgagcctgctgcgccagatgactgaccggcattatcagcagctgctggacagtttcaatacaaaggaagagttacgggatttcttgctccagatcttcacagtattccgaattctgatcaggcctgaaatgtttcctaaagattggaccgtcatgcggttggtcgcaaataatgttatcatcaccacagtgctgtacctatctgatgccctgagaaaaaacttcctgaatgaaaacttcgactacaaaatctgggattcttatttctatctggctgtgattttcatcaaccagctgtgtctccagttggagatgttcaccccttccaaaaaaaaaaaggtactggaaaagtacggggacatgcgagttaccatgggctgtgagatatttagtatgtggcagaatctcggggagcacaaattgcactttatccctgctttgatcggtccatttctagaggtcaccctcatcccccaacctgacctgcgcaatgtgatgatccccatctttcatgatatgatggattgggaacaaaggcgatcgggcaatttcaaacaagtcgaagctaagctgatcgataaactggactcattgatgtcagaagggaaaggcgatgaaacctatagggagctgtttaacagcataattcccctcttcggcccttaccccagcctgcttaaaaaaatcgaacgcgagacttggagagaaagtggcgtgagcctgatcgcaacggtaacaaggcttatggagaggctgctggactatcgggactgcatgaaaatgggcgaagttgacggaaagaagattggctgtaccgtgtcgttgctgaatttttataagacagagttgaacaaggaggagatgtatattcgatacattcataaactgtatgatctgcacttaaaggcacaaaattttaccgaggccgcatacaccctgttgctgtatgacgaactgttggagtggagcgacaggccactcagggagttcttgacctatccaatgcagaccgaatggcaacgcaaggaacacctgcacttgactatcatccaaaattttgatcgaggcaaatgttgggagaacggcatcattctttgcaggaagatcgctgagcagtacgagtcatattatgactaccggaacttgtcaaagatgcgcatgatggaggcttccctgtacgataaaatcatggaccagcaacggctggagcccgaattttttagagtgggattttacggaaagaaatttccatttttccttcggaacaaggagtttgtctgccgcgggcacgattacgagagactcgaagcatttcagcagcgaatgctcaatgaatttccccatgccattgccatgcaacacgccaaccaaccggacgaaactatttttcaggccgaggctcaatacttacagatatatgcggtgactcccatcccagagtctcaggaggtactgcagcgggagggggttccagacaatatcaaatctttttataaagtgaaccatatatggaaatttcggtacgaccgtcccttccacaaggggacaaaggacaaagaaaacgagtttaaatcattgtgggtcgaaaggacctctttatacctcgtgcagtccctcccagggatcagccgttggttcgaggtcgagaagcgtgaggtggtggagatgtctccactggagaatgctatcgaagttctcgaaaataagaaccagcagttgaagacattaataagtcagtgccaaacaagacagatgcaaaacattaaccccctcacaatgtgtctcaatggcgtgattgacgccgcagtaaatgggggcgtgagtaggtaccaagaggcattttttgtgaaggagtacatcctgagccaccctgaagacggggagaaaatcgcccggttaagggaactcatgctagagcaagcacaaatactcgagtttggcttggcagttcatgagaaattcgtgcctcaggatatgaggcctctgcataaaaaactggtcgatcaattttttgtgatgaagtcgtccctgggaatccaggaattcagtgcttgcatgcaagcgagccctgttcactttcccaacggtagcccaagagtctgtaggaactctgcccccgcatccgtcagcccagacggcacccgggtaattcccaggagaagcccactatcatatcctgccgtgaatagatactcctcttcatccctgtcttcacaggcctccgcggaggtatccaatataacaggacaaagcgaatctagcgacgaagtgtttaacatgcagccatccccttcaacatccagtctgagtagcactcacagcgcttctcccaacgtcacttccagtgcccctagttcagctcgcgctagcccactgttgagtgacaagcacaagcactctagagaaaacagctgcctctctccccgcgagcggccctgctctgccatataccccacacctgtggaacctagtcagagaatgttatttaaccacatcggtgacggggccctgcccagatccgatcccaatttgagtgcaccggaaaaagcaagccccgctagacacactacgtctgtttctcctagtccagctgggagaagcccattaaaaggttccgtgcagtcatttaccccctctccagtcgaataccacagccctgggttaatttccaattcaccagtactgagcggatcgtacagtagcgggattagttcactgagtaggtgttcaactagcgagacaagcgggtttgagaatcaagtcaatgagcagagtgccccccttcctgtaccggttcctgtacccgttcctagctatggcggcgaggaaccagtgagaaaggagtcaaagacacctccgccttattcggtgtacgaaagaacgctccgccggccagtgcctcttcctcattccctgagcatcccggtgactagtgagccacctgccctgccacctaaaccattggctgcgagaagcagtcacctggagaatggcgcccgcaggacggatccaggaccacgcccgcggcccctgccccgcaaagtgtcccagctctag

SEQ ID NO: 290216 - DNA, 5777 bp, Artificial Sequence
  derived and/or modified sequence
gtgattgcttctttccgaggcactgtcccatatggtctttctctggaaattggagacacagtccaaatcctggagaagtgcgacggatggtatagaggattcgccctgaaaaatcctaacataaaaggtatcttcccttctagctacgtgcacctgaagaacgcttgcgttaaaaacaagggtcagttcgagatggtgattcccactgaagatagtgtgattactgagatgacttcaacactaagagactggggcacaatgtggaaacagttgtacgtgcgtaacgagggtgacctatttcacagactgtggcacatcatgaacgaaatcctagatctgagaaggcaggtgctcgttggccacctgacgcatgacaggatgaaggatgtgaagcgtcatatcacagccaggctcgactggggaaacgaacagctcggcctcgatctggtgcctcgcaaagaatacgccatggtggacccagaagatatcagcatcacggagctgtatcgcctaatggagcatcgacatagaaagaaggatacacccgtgcaggcctcctcccaccacttgtttgtacagatgaaaagtctcatgtgctctaatctcggtgaagaactggaggtcatctttagtctgttcgactccaaagaaaataggcccatttcagaaaggttcttcctccggctcaacagaaatggcctgccgaaagccccagacaagccagagcgacattgcagtctgttcgtggatctggggagcagtgaactgcgcaaagatatctatattaccgtccatattatccgcattggccgaatgggggcaggcgaaaaaaaaaacgcttgctccgtgcagtataggcggccttttggatgtgctgtgctttcaatagcggacctcctgacgggagagacaaaagatgatttaatcctgaaagtgtacatgtgcaatacggaaagcgagtggtaccagatccatgagaatatcattaagaagctcaacgcacgctataatttgacaggcagtaacgccggactggctgtctccctgcagttgctgcatggagatatagagcagattcgaagggagtattctagcgtgtttagtcatggcgtgagcatcactcgtaagttaggttttagcaacatcattatgcctggcgaaatgcgcaacgatttatacattaccattgaaagaggcgagttcgaaaaaggcggaaaatcagtggcacgtaacgtcgaagtcacaatgtttattgttgatagtagtggccagaccctcaaggattttatcagctttggttctggagagcctcccgcttccgaataccactctttcgtactttatcataacaatagcccaaggtggtccgagctcctcaagttgccaataccagtcgacaagttcagaggtgcacacatcaggttcgagttcaggcactgttcgacgaaggagaaaggagagaaaaagctcttcggttttagttttgtgcctctgatgcaagaagacggcaggaccttgccggatggcacccatgaactgatcgtgcacaaatgcgaagagaatacaaacctccaggacactactaggtatcttaaactgcccttttctaaaggaatctttctcgggaataacaatcaagccatgaaagcgaccaaagagagcttctgcattacgtcatttttatgtagtacgaagctcacgcaaaatggagatatgttggatttattgaaatggagaactcatccagataaaataacgggttgcctgtccaagctgaaagaaattgacggatcagagatagtgaagtttctccaagatacattagacacccttttcggaattctggacgaaaacagtcagaaatacggatcaaaggtattcgactcgcttgtgcacatcataaatctcctgcaggacagcaaattccaccactttaaaccagttatggacacatacatcgagtcccacttcgcaggcgctcttgcgtacagggatttgatcaaggttctgaagtggtacgtggatcggatcaccgaggccgaacgacaagaacacattcaggaggtgctgaaggctcaggaatacatattcaagtacatcgtccaaagcaggcgtttgtttagcctggcaacagggggtcaaaacgaggaagaattccgttgctgcatccaagaacttcttatgtctgtccgctttttcctctcacaggagtctaagggttcaggagcgctttctcagtctcaggcggtgttcctgagctcctttccagcagtgtactcagagttacttaagttgtttgatgtacgggaggtagcgaatctggttcaagacactctggggtctctgccgacgattctgcacgttgacgactccttacaagcaataaaattacagtgcattgggaaaacagtggagagtcaactctacaccaaccctgacagtcggtatatcctcctccccgtggttctccatcacttgcacatccacctgcaagaacagaaagatctcataatgtgtgcacggattctgagtaacgtattctgccttattaaaaagaattcaagcgaaaagagcgtcttagaggaaattgatgtgatagtcgcgagcctgctggacatactgttgagaacaattttggagataacatcccgtcctcagcctagctccagcgccatgcgcttccagtttcaagatgtgaccggcgagtttgtggcatgtctgcttagtcttctgagacagatgacggacaggcattatcagcagttattagactcgtttaacacaaaggaagaactcagggatttcctgttgcaaatattcacggtattccggatcttaattcggccagaaatgttccccaaggactggactgttatgcgcctagtcgcaaacaacgtgatcatcacaacagtgctatacctgtccgacgcactgagaaagaatttccttaatgagaacttcgactacaaaatctgggattcttacttttatctggcggtaattttcattaatcagttatgcctccagctcgaaatgtttactcccagtaagaagaagaaagtgttggaaaaatacggcgatatgcgcgtcactatgggctgcgaaatcttcagtatgtggcagaacctgggtgagcacaagctccattttatacctgcccttatcggcccttttctggaagtaacacttatacctcagcccgacctccgcaacgtcatgatcccgatattccacgacatgatggattgggaacagagacgcagcgggaattttaaacaagtggaagctaaactgattgataagctggacagtctgatgagcgagggcaagggcgacgaaacctaccgggaactctttaattcaattataccattgttcgggccatatccctccctgctgaaaaagattgagcgggaaacttggcgcgagtctggcgtaagtctgatagccactgtgacccgacttatggagcgtctcctggattaccgagattgtatgaagatgggggaggttgacggcaagaagatcggttgtacggtaagcctgcttaacttctacaagaccgagctaaacaaggaggagatgtacatccggtatatccataagctttacgacctgcacctgaaagcacagaattttaccgaggccgcatacacactcctactgtatgacgagctgctggaatggtctgatcggccactgcgcgaattcttgacctaccccatgcagaccgaatggcagcgtaaagagcaccttcacctcactattatacaaaacttcgatcgcggtaaatgctgggagaacggaataattttgtgcagaaagatcgccgaacagtacgagagttattacgattaccgaaacttgtccaaaatgcggatgatggaggcaagcctgtacgacaaaatcatggatcagcagcggctggaaccggagtttttcagagtggggttctacggaaagaagttccccttctttctacgaaataaggagttcgtgtgtaggggtcacgattacgagaggttggaggccttccagcaacggatgctcaatgaattccctcatgccattgccatgcagcatgctaatcagcccgacgagactatcttccaggctgaagctcaatatcttcagatctatgcggtcaccccaatccccgagagtcaagaagtgttacagagagagggagtcccggataacattaagtcattttacaaagtgaaccacatctggaagtttagatacgacaggcccttccataaggggacaaaggacaaggagaatgagtttaaaagcctctgggtagagcggacatccctctacctcgtccaaagtctgccgggtatatcgaggtggttcgaggttgaaaagagggaggtggtggaaatgtctcccctagagaatgcaatagaggttctagaaaacaaaaatcagcagctgaagacactgatatcccagtgccagactcgccagatgcagaacatcaatccactcactatgtgtttgaacggtgtcattgacgccgcagtgaacggcggtgtttcccggtatcaggaagcctttttcgtgaaggagtatatcctctctcaccctgaggatggggagaaaatcgcacggctcagagagttgatgcttgaacaggcgcagattctggagtttggacttgccgtgcatgagaagttcgtgccacaagacatgagaccactacacaagaagctcgtggatcagttttttgttatgaagtcgtctctcgggatccaggagttttctgcatgcatgcaagcaagtcccgtccacttcccaaatggtagccccagagtttgtaggaactcggccccagccagcgttagtcccgatggtacacgtgtcatcccaagacggtcccccctgtcttatcccgctgtgaacagatactcatcctcttctctttcctcccaggcttcagccgaggtcagcaatattaccggacaatcagagtcttcggacgaggtgttcaacatgcagccctctccctcgacctcctcactttcctcaacgcactccgcctcaccgaacgttaccagttccgcccctagttcggctcgtgcctccccactgctttctgataagcataagcactcgcgagagaacagttgtctttccccaagagaaaggccttgtagcgctatttatcctaccccagttgagcccagccagagaatgctatttaatcatattggggatggagctctgcctcgctcagatcccaacctgtcagcccctgagaaagcctccccagccaggcataccactagtgtctcaccatctccggctgggaggagccccttaaaaggtagcgtccagtcttttacccccagcccggtggagtatcattcccctgggctgattagcaactcaccagtgctgtccggttcatattcctcaggaataagttcgctgtcccgctgctccacatcggagaccagcggctttgagaatcaagttaacgagcaaagtgctcccctccccgtccccgtgccagtgcctgtgccgtcctatggtggtgaggaacctgtgaggaaagagagcaaaactcctccaccatacagtgtgtacgagcgcaccctccgacggcctgttccactgcctcactcactttcgatccctgtaactagcgaaccacctgccttacccccaaagccactagccgcaagatcatcacatcttgagaatggtgcaaggcgcacagatccaggtccgagaccgcgaccactgcctcgcaaggtctcccaactcta

SEQ ID NO: 290217 - DNA, 5778 bp, Artificial Sequence
  derived and/or modified sequence
gtgatcgccagcttcagaggcaccgtgccctacggcctgagcctggagatcggcgacaccgtgcagatcctggagaagtgcgacggctggtacagaggcttcgccctgaagaaccccaacatcaagggcatcttccccagcagctacgtgcacctgaagaacgcctgcgtgaagaacaagggccagttcgagatggtgatccccaccgaggacagcgtgatcaccgagatgaccagcaccctgagagactggggcaccatgtggaagcagctgtacgtgagaaacgagggcgacctgttccacagactgtggcacatcatgaacgagatcctggacctgagaagacaggtgctggtgggccacctgacccacgacagaatgaaggacgtgaagagacacatcaccgccagactggactggggcaacgagcagctgggcctggacctggtgcccagaaaggagtacgccatggtggaccccgaggacatcagcatcaccgagctgtacagactgatggagcacagacacagaaagaaggacacccccgtgcaggccagcagccaccacctgttcgtgcagatgaagagcctgatgtgcagcaacctgggcgaggagctggaggtgatcttcagcctgttcgacagcaaggagaacagacccatcagcgagagattcttcctgagactgaacagaaacggcctgcccaaggcccccgacaagcccgagagacactgcagcctgttcgtggacctgggcagcagcgagctgagaaaggacatctacatcaccgtgcacatcatcagaatcggcagaatgggcgccggcgagaagaagaacgcctgcagcgtgcagtacagaagacccttcggctgcgccgtgctgagcatcgccgacctgctgaccggcgagaccaaggacgacctgatcctgaaggtgtacatgtgcaacaccgagagcgagtggtaccagatccacgagaacatcatcaagaagctgaacgccagatacaacctgaccggcagcaacgccggcctggccgtgagcctgcagctgctgcacggcgacatcgagcagatcagaagagagtacagcagcgtgttcagccacggcgtgagcatcaccagaaagctgggcttcagcaacatcatcatgcccggcgagatgagaaacgacctgtacatcaccatcgagagaggcgagttcgagaagggcggcaagagcgtggccagaaacgtggaggtgaccatgttcatcgtggacagcagcggccagaccctgaaggacttcatcagcttcggcagcggcgagccccccgccagcgagtaccacagcttcgtgctgtaccacaacaacagccccagatggagcgagctgctgaagctgcccatccccgtggacaagttcagaggcgcccacatcagattcgagttcagacactgcagcaccaaggagaagggcgagaagaagctgttcggcttcagcttcgtgcccctgatgcaggaggacggcagaaccctgcccgacggcacccacgagctgatcgtgcacaagtgcgaggagaacaccaacctgcaggacaccaccagatacctgaagctgcccttcagcaagggcatcttcctgggcaacaacaaccaggccatgaaggccaccaaggagagcttctgcatcaccagcttcctgtgcagcaccaagctgacccagaacggcgacatgctggacctgctgaagtggagaacccaccccgacaagatcaccggctgcctgagcaagctgaaggagatcgacggcagcgagatcgtgaagttcctgcaggacaccctggacaccctgttcggcatcctggacgagaacagccagaagtacggcagcaaggtgttcgacagcctggtgcacatcatcaacctgctgcaggacagcaagttccaccacttcaagcccgtgatggacacctacatcgagagccacttcgccggcgccctggcctacagagacctgatcaaggtgctgaagtggtacgtggacagaatcaccgaggccgagagacaggagcacatccaggaggtgctgaaggcccaggagtacatcttcaagtacatcgtgcagagcagaagactgttcagcctggccaccggcggccagaacgaggaggagttcagatgctgcatccaggagctgctgatgagcgtgagattcttcctgagccaggagagcaagggcagcggcgccctgagccagagccaggccgtgttcctgagcagcttccccgccgtgtacagcgagctgctgaagctgttcgacgtgagagaggtggccaacctggtgcaggacaccctgggcagcctgcccaccatcctgcacgtggacgacagcctgcaggccatcaagctgcagtgcatcggcaagaccgtggagagccagctgtacaccaaccccgacagcagatacatcctgctgcccgtggtgctgcaccacctgcacatccacctgcaggagcagaaggacctgatcatgtgcgccagaatcctgagcaacgtgttctgcctgatcaagaagaacagcagcgagaagagcgtgctggaggagatcgacgtgatcgtggccagcctgctggacatcctgctgagaaccatcctggagatcaccagcagaccccagcccagcagcagcgccatgagattccagttccaggacgtgaccggcgagttcgtggcctgcctgctgagcctgctgagacagatgaccgacagacactaccagcagctgctggacagcttcaacaccaaggaggagctgagagacttcctgctgcagatcttcaccgtgttcagaatcctgatcagacccgagatgttccccaaggactggaccgtgatgagactggtggccaacaacgtgatcatcaccaccgtgctgtacctgagcgacgccctgagaaagaacttcctgaacgagaacttcgactacaagatctgggacagctacttctacctggccgtgatcttcatcaaccagctgtgcctgcagctggagatgttcacccccagcaagaagaagaaggtgctggagaagtacggcgacatgagagtgaccatgggctgcgagatcttcagcatgtggcagaacctgggcgagcacaagctgcacttcatccccgccctgatcggccccttcctggaggtgaccctgatcccccagcccgacctgagaaacgtgatgatccccatcttccacgacatgatggactgggagcagagaagaagcggcaacttcaagcaggtggaggccaagctgatcgacaagctggacagcctgatgagcgagggcaagggcgacgagacctacagagagctgttcaacagcatcatccccctgttcggcccctaccccagcctgctgaagaagatcgagagagagacctggagagagagcggcgtgagcctgatcgccaccgtgaccagactgatggagagactgctggactacagagactgcatgaagatgggcgaggtggacggcaagaagatcggctgcaccgtgagcctgctgaacttctacaagaccgagctgaacaaggaggagatgtacatcagatacatccacaagctgtacgacctgcacctgaaggcccagaacttcaccgaggccgcctacaccctgctgctgtacgacgagctgctggagtggagcgacagacccctgagagagttcctgacctaccccatgcagaccgagtggcagagaaaggagcacctgcacctgaccatcatccagaacttcgacagaggcaagtgctgggagaacggcatcatcctgtgcagaaagatcgccgagcagtacgagagctactacgactacagaaacctgagcaagatgagaatgatggaggccagcctgtacgacaagatcatggaccagcagagactggagcccgagttcttcagagtgggcttctacggcaagaagttccccttcttcctgagaaacaaggagttcgtgtgcagaggccacgactacgagagactggaggccttccagcagagaatgctgaacgagttcccccacgccatcgccatgcagcacgccaaccagcccgacgagaccatcttccaggccgaggcccagtacctgcagatctacgccgtgacccccatccccgagagccaggaggtgctgcagagagagggcgtgcccgacaacatcaagagcttctacaaggtgaaccacatctggaagttcagatacgacagacccttccacaagggcaccaaggacaaggagaacgagttcaagagcctgtgggtggagagaaccagcctgtacctggtgcagagcctgcccggcatcagcagatggttcgaggtggagaagagagaggtggtggagatgagccccctggagaacgccatcgaggtgctggagaacaagaaccagcagctgaagaccctgatcagccagtgccagaccagacagatgcagaacatcaaccccctgaccatgtgcctgaacggcgtgatcgacgccgccgtgaacggcggcgtgagcagataccaggaggccttcttcgtgaaggagtacatcctgagccaccccgaggacggcgagaagatcgccagactgagagagctgatgctggagcaggcccagatcctggagttcggcctggccgtgcacgagaagttcgtgccccaggacatgagacccctgcacaagaagctggtggaccagttcttcgtgatgaagagcagcctgggcatccaggagttcagcgcctgcatgcaggccagccccgtgcacttccccaacggcagccccagagtgtgcagaaacagcgcccccgccagcgtgagccccgacggcaccagagtgatccccagaagaagccccctgagctaccccgccgtgaacagatacagcagcagcagcctgagcagccaggccagcgccgaggtgagcaacatcaccggccagagcgagagcagcgacgaggtgttcaacatgcagcccagccccagcaccagcagcctgagcagcacccacagcgccagccccaacgtgaccagcagcgcccccagcagcgccagagccagccccctgctgagcgacaagcacaagcacagcagagagaacagctgcctgagccccagagagagaccctgcagcgccatctaccccacccccgtggagcccagccagagaatgctgttcaaccacatcggcgacggcgccctgcccagaagcgaccccaacctgagcgcccccgagaaggccagccccgccagacacaccaccagcgtgagccccagccccgccggcagaagccccctgaagggcagcgtgcagagcttcacccccagccccgtggagtaccacagccccggcctgatcagcaacagccccgtgctgagcggcagctacagcagcggcatcagcagcctgagcagatgcagcaccagcgagaccagcggcttcgagaaccaggtgaacgagcagagcgcccccctgcccgtgcccgtgcccgtgcccgtgcccagctacggcggcgaggagcccgtgagaaaggagagcaagaccccccccccctacagcgtgtacgagagaaccctgagaagacccgtgcccctgccccacagcctgagcatccccgtgaccagcgagccccccgccctgccccccaagcccctggccgccagaagcagccacctggagaacggcgccagaagaaccgaccccggccccagacccagacccctgcccagaaaggtgagccagctgtag

SEQ ID NO: 290218 - DNA, 5778 bp, Artificial Sequence
  derived and/or modified sequence
gttattgccagtttccgaggaaccgttccatatggcctgtcattggaaattggagatacagttcagatcctggagaagtgtgatggctggtacagaggatttgccttaaaaaacccaaatatcaagggtatatttccttccagctacgttcacttgaaaaatgcctgtgtaaagaacaaaggacaatttgaaatggttattcccactgaagactctgttatcacagaaatgacatcaacattaagagactggggaaccatgtggaaacaactctatgtgcgtaatgaaggcgatctcttccaccggctgtggcacatcatgaatgaaatcctggacctgaggcggcaggtgctggtgggccacctcacccacgaccggatgaaggacgtgaagcgccacattactgcccggcttgactggggcaatgaacaactgggactggacctggtgcctaggaaagagtacgcaatggtggatccggaagacatcagcattactgagctctaccgattgatggaacatcgacatcggaagaaagacaccccggtgcaggccagcagtcaccacctctttgtccagatgaagagcctcatgtgttccaacctgggagaggagctggaggtcatcttctcactctttgacagtaaagagaaccggccaatcagtgagagatttttcttgaggctgaatagaaacgggcttcccaaagcccctgataaaccggaacgacattgctccctctttgtggatttgggcagcagtgagctaagaaaggacatttatatcaccgtgcacattatccgaatcggtcgaatgggagcaggagaaaaaaagaatgcctgtagtgtccagtaccgacgaccctttggctgtgcagttcttagcatcgctgacctgctaacaggagagacaaaggatgacctcattctgaaagtatacatgtgtaacacagagagtgagtggtaccaaatccatgagaacatcatcaaaaagctgaatgcacgttataacttgactggctccaatgcaggtttagcagtttccttacagctattgcacggagacattgaacaaatcagaagggaatattcatcagtattttctcatggagtatccataacaaggaagctgggattttcaaatattattatgcctggtgaaatgaggaatgatttatatatcactattgaaaggggagaatttgagaaaggagggaagagcgtggccagaaatgtggaagttacgatgttcattgtagacagtagtggccaaaccctgaaggattttatctccttcggctctggggagccaccagccagtgagtaccactcctttgtgctttaccataacaacagtcccaggtggtctgaactgctgaaacttcccattcctgtggataaattccggggtgcacacatccgcttcgagtttcggcattgttccacaaaggagaaaggagagaagaagttgtttgggttttcttttgtccctctgatgcaagaagatggtaggactcttccagatggcactcatgagctcatcgtgcataagtgtgaagaaaacacaaatcttcaggatactacccgctacctcaaacttcccttttccaagggcattttccttgggaataataatcaagccatgaaggccacaaaggagtccttttgtattacatcttttctctgttccacaaaactcacacaaaatggtgatatgcttgatcttttgaaatggagaacccacccagacaagatcactggctgtctctctaaattaaaagaaattgatggctcagagatagtaaagtttctgcaggatacactggataccttatttggaattttagatgaaaattcccaaaaatatgggtctaaagtgtttgattctttggttcacataataaatttgctgcaagatagcaaatttcatcattttaaacctgtaatggacacttacattgagagtcattttgctggggcacttgcatacagagatctcatcaaagtgctcaaatggtacgtggaccggatcacagaagcagagcggcaagagcatatccaggaggtgctgaaggcacaagaatacatttttaagtatatagttcaatctcgaaggctgttttcccttgccactggtgggcaaaacgaagaggagttccgctgctgcattcaggagcttctcatgtcagtccgtttctttctttcgcaagagagcaaagggtctggagcattatctcagtcacaggctgtgtttctgagctctttccctgccgtgtactcagaactgttgaagctctttgatgtccgggaagtagccaacttggtccaggacaccctgggcagtctgccgaccatcctgcatgtggatgattccctgcaggccatcaaactgcagtgcattggcaaaaccgtggaaagccagctttataccaacccagattcccgatacattcttctgcctgtcgtgttacatcacctccacattcacttgcaagaacagaaggacctgatcatgtgtgcacgtatccttagcaacgtattttgtcttatcaagaaaaatagctcagaaaaatctgtgctggaggaaatagatgtgatagtggccagcttgctggatattctgctgaggaccatattggagatcaccagccgacctcagccatccagctcagcaatgcggttccagttccaggatgtcactggggagtttgttgcttgtctcctgtccctattacgacaaatgacagatagacattatcaacagcttcttgatagttttaatacaaaggaagaactaagggatttcctgctgcagatatttactgtgttccgaatattgatacgcccggagatgtttccaaaggactggactgttatgcgcttggttgctaacaatgttattattacaacagttctatacctctcagatgcacttcgtaagaacttcttaaatgaaaactttgattataagatctgggattcctacttttacctcgcagtcatttttataaaccagttgtgtctgcagttggagatgttcacaccttccaagaagaaaaaggtgttagaaaagtatggtgacatgcgggtaacaatgggttgtgaaattttcagcatgtggcaaaacctaggagagcacaagcttcattttatccctgccctgattggccccttcctagaagtgaccttgataccccagccagatcttcggaatgtcatgattccaatttttcatgatatgatggactgggagcagaggcggagtggcaactttaaacaggtggaagccaagctaattgacaaactggatagcctgatgtcagaaggcaaaggtgacgaaacataccgcgagctcttcaacagtataattccactatttggtccctatcctagtctactaaagaaaattgagcgggaaacatggcgggaaagtggcgtttcattaattgctactgtaactcgtctaatggagaggttgttagattacagggactgcatgaaaatgggagaggtagatggcaaaaagattggctgcacagttagccttctgaacttctataagactgaactgaacaaggaggagatgtatatacgctacattcacaaactctatgatctgcatctcaaagcacagaactttacagaagctgcatataccctcctcttatatgacgagctactggaatggtctgatcggcccctcagggagttcctgacctaccccatgcaaacagaatggcagcgcaaagagcacctgcacctcaccatcatccagaactttgacagaggcaaatgttgggagaatggcattatcttgtgccggaagattgcagagcagtatgagagttattatgactacagaaacctgagcaagatgcggatgatggaagcctctttgtatgacaaaattatggaccagcaacgtcttgaaccagagttcttcagagttggattttatggaaaaaaatttccatttttcttaagaaataaggagtttgtgtgtcgagggcatgactacgagaggctggaagccttccaacagagaatgctgaacgagttcccccatgccatcgccatgcagcacgccaaccagcccgatgagaccatcttccaggcagaagctcagtatttgcagatatatgctgtgactcccattccagagagccaggaggtcctgcagagagagggtgttccggacaacatcaaaagcttctataaagtgaatcacatctggaaattccgctatgaccgaccatttcacaaaggcacaaaagataaagagaatgaattcaagagtctctgggtggagagaacgtcattatacttggtgcagagtttgcctggcatctctcgctggtttgaagtggaaaagcgtgaagtggtagaaatgagtcctctggaaaatgcaattgaagtgctagaaaataagaatcagcagctgaagactctgattagtcagtgtcagacaagacagatgcagaatattaatcccctgactatgtgcctgaatggagttatagatgctgcagttaatggtggcgtttccaggtatcaagaggcattctttgtcaaagaatatatcttaagtcaccctgaagatggggagaaaattgcacgattaagagagctgatgcttgagcaggcacagattctggaatttggtttggccgtgcatgagaagtttgtacctcaagatatgagaccccttcacaaaaagctggttgaccaattctttgtgatgaagtcgagcttagggatacaggagttctctgcttgtatgcaagccagtcctgtccattttcctaatggaagccctcgtgtgtgtagaaactcagcacctgcttctgtgagcccagatggtaccagggtaattcctagacgcagcccgttaagttacccagctgtcaaccgatattcttcctcctcactgtcctcacaagcttctgctgaagtaagcaatattacagggcaatcagaaagctctgatgaagtctttaacatgcagccaagtccatctacctcaagcttgagttctactcactcggcttcacctaatgtgacaagttctgctccatcgagtgccagagcttctcctttgttgtctgacaaacacaaacattcccgagaaaactcttgcctgtcaccaagagagagaccatgcagtgccatctatccaacacctgtggagccttcgcagaggatgctgtttaatcatattggagacggggccttgccacgcagtgacccaaatctctctgcacctgaaaaagcttcaccagcaagacacacgacatcagtatccccctcgcctgccgggcgatctccattgaagggctctgtgcagtctttcaccccctctccagtggagtaccactcgccaggactcatctccaactcccctgtcttgtcgggcagctacagcagtgggatttcttctctcagccggtgcagcacgtcggaaacctcaggctttgaaaatcaggtgaatgaacagtcggcccccctgccggtgccagtgccggtgcccgtgccgagctacggcggggaggagccagtgcgcaaggagagcaagactccgcccccgtacagcgtctacgagcggactctgcggcgccccgtcccgctacctcacagcctctccatccccgtcacgtcggagccgcccgcgctgccccccaagcctctggcagcgcgatccagccacctggagaatggggcccggaggactgaccccggcccgcggcccaggcccctgccccgcaaggtctctcagttataa

SEQ ID NO: 290219 - protein, 185 aa, Artificial Sequence
  derived and/or modified sequence
MWKLGRGRVLLDEPPEEEDGLRGGPPPAAAAAAQAQVQGASFRGWKEVTSLFNKDDEQHLLERCKSPKSKGTNLRLKEELKAEKKSGFWDNLVLKQNIQSKKPDEIEGWEPPKLALEDISADPEDTVGGHPSWSGWEDDAKGSTKYTSLASSANSSRWSLRAAGRLVSIRRQSKGHLTDSPEEAE

SEQ ID NO: 290220 - DNA, 558 bp, Artificial Sequence
  derived and/or modified sequence
atgtggaagctgggcagaggcagagtgctgctggacgagccccccgaggaggaggacggcctgagaggcggccccccccccgccgccgccgccgccgcccaggcccaggtgcagggcgccagcttcagaggctggaaggaggtgaccagcctgttcaacaaggacgacgagcagcacctgctggagagatgcaagagccccaagagcaagggcaccaacctgagactgaaggaggagctgaaggccgagaagaagagcggcttctgggacaacctggtgctgaagcagaacatccagagcaagaagcccgacgagatcgagggctgggagccccccaagctggccctggaggacatcagcgccgaccccgaggacaccgtgggcggccaccccagctggagcggctgggaggacgacgccaagggcagcaccaagtacaccagcctggccagcagcgccaacagcagcagatggagcctgagagccgccggcagactggtgagcatcagaagacagagcaagggccacctgaccgacagccccgaggaggccgagtag

SEQ ID NO: 290221 - DNA, 3395 bp, Artificial Sequence
  derived and/or modified sequence
cttggagcgggcctggttctggggatggtttgggggcgggccgggtcctggggagggtttggggcgggcctggtggggagggggcgggcctagttctgggggtgccccgcccccgcctagccccgcccggcccactgggcccgcgtcccgcaggagccgcaggcagagcgtccggcggccgggagggacgcggagccacagcccgacgcacggacggagggacgccggagcccgcctgaccatgtggaagctgggccggggccgagtgctgctggacgagccccccgaggaggaggacggcctgcgtggggggccgccaccggccgccgccgccgccgcccaggcgcaggttcagggagcaagtttccgaggttggaaagaagtgacttcactgtttaacaaagatgatgagcagcatctcctggaaagatgtaaatctcccaagtccaaaggaactaacttacgattaaaagaagagttgaaggcagagaagaaatctggattttgggacaatttggttttaaaacagaatatacagtctaaaaaaccagatgaaattgaaggttgggagcctccaaaacttgctcttgaagacatatcggctgaccctgaggacaccgtgggtggccacccatcctggtcaggctgggaggatgacgccaagggctcgaccaagtacaccagcctggccagctctgccaacagctccaggtggagcctgcgcgcggcagggaggctggtgagcatccgacggcagagtaaaggccacctgacagatagcccggaggaggcggagtgaggggggctgcgtggcaagtgtgccccgacatggtggccttttatgagtataccatgtagttgttgagtcttttccgcgttagaaagaatagagagtctactttttgcctatatttgatatttggacctctgtttctttatttaatgaactctcacacacactgtgactccttggtgaacacgtgcagggattgtacatttgattgccttattgcagaaatattcacctatcagtccatgttttgcagaaactggagatgtgaatttatgatgctctcccataatacagcagtaatgatttgcagtttctcacaaaatgattttcatgctgctctgtgttgtagttctgtttcagaacttccgtacctttttcttgtatgtagcacgtataaatgcagctgtcatgcagttcttttcttttgctagaaaattagtcaggaggtaagatgaatcttccaaagttatgttaaattttgtttaacttgacaaattaaactttgttcttattaaacaaatacgtaaacaaatactggaaaagcaaagcttatatttgggagtaaaatgtatcttaaaatgcatgttcatcttttgctgagggaggaatagcttcttgtatgtccactggatagtaacagtggttcttttttggaattttatttttacctcttttgaacttctaaatcggtccctttattttcttaaaacatttgctctcttttttgtttacagattaaagaagtatggatcaattttagtcagttgataatttcatttaggaaacattgtcttgctcattatagagagttaagactgtgcataaaatactgaagtgcctcttttttattaggctcatatgtttgttcttgcaaagcgagatgcctattgtgattggtgttagatctgtaagaagctgtgttttttccacaagaataatcgacgaccggtttgagagcatctctcgcgttctttttctgtctgcttactgtccttgacaatgtgatcctgcacagtatcaggtgccagttatgcgtccctggaaggttggctcttatcagcaagtcctgcagatatctcttagataaaagtggtttgaaagaaaaggtatatttttcttttttgtttaaaagtaaaataaaacctccagttacactgtgcattcccctcacgtaaaaacaagacaaaaaccctttcctgagttgctcggcatgcactcctgtgctgtttcatgcatgtggatgttccttccgtttgttcctgtggaataactgagtgtgcctgatggcagaacacactgcagtgttatcagtgtctgcatgttttttaatagaacaggtttacttgatctgtcatctgttatgcaaaaaacagcaattacttttgcatccatctagctaaatctataatctgtgtcaatcacttatacctatcaatcatccgtatctattcacctgtcctctatgtctgtcttctctcagtctacatccatctagccttctgtcaatcatctacttttttttttaatagaacaagaagtttacttatcaagtcttgaaagggggacatgtttcaattggtgttcaaacaaaaattccagcttgtattagaaccttgaaatggtgaagttgtggaggttttctttgttccataatacagagacaagttcataatttttagtataacagctaagttgacaaattctaagtttcctcaggtaaatagtcataactgtccttttccctagagaagtgcttgctgggatagtaaaaacatacaccatttcatgacttctgcaaatactttccagcggaagtcagtgtaggtttgtttttggctaacatggtcttgctgcgcaggaatgtaaacactgtgtttgaaactctggaaatcacgtgtgtggggagatggggacgcttcccatgttgtggggagctctgtggctgtgatggctgcagttgccgtgcctctgttggaacgctaagtgcctgcaactcacgtcaatcatagaattgtgacgcacagttggcaaaatagttctttatgctatttctcaaaatttgaggacaaacccagattgggattggaatatgcactgtaaatcaaatttttcttatctacaaagactaatgtaaaaatgattttttcttctgtgcctgattaaattaactgtggtttttaatataaatatttattggtgtgctttgggagaaaaattatcttttcttgaaagaagttatcaaagcaaatttattatcttcacaagttaatgggagaatgtggttttgattctgggtgtttgaattgtgtaaacacacagcttccttgtgtgaagagagttgtcctgtgctccttctactgtactttttttattttttaataggaaagtgatgtgcttcagagaagggttcctccttaatgttgaggttttttaaaaataaaaatactgtttttaagctctttccttattggtttgcatgattattggcatctgcttacgatggctttaatcactcagagctaatggcacctttcctatttagcctcattttagaatgcagtcaacacatgtagacttttcacaaataaatgaacaacttcaa

SEQ ID NO: 290222 - DNA, 558 bp, Artificial Sequence
  derived and/or modified sequence
atgtggaagttaggtagaggtcgtgtcctattggacgaacctccggaggaggaagatgggcttcgcggcggacctccccccgctgctgctgcggccgcacaggcgcaagttcaaggtgcgagcttccgaggctggaaggaggttacctctctgtttaacaaggacgacgaacagcacctccttgagcgttgcaagtcacccaaaagtaaagggaccaacctgagacttaaggaagagttgaaggccgagaagaagtcaggattttgggacaatctagttttgaaacagaacatacagtcaaaaaaaccagacgagatcgagggctgggagcctccgaagcttgctctcgaagacatcagtgcagatcccgaggacacagtgggcggccaccctagctggtccggttgggaagacgatgccaaaggatctaccaagtatacgtccttggcctcatccgccaattccagccgttggagtcttagagccgccgggcgactggtctctatccgtagacaaagcaaggggcacttgactgatagccctgaggaggcagagtag

SEQ ID NO: 290223 - DNA, 558 bp, Artificial Sequence
  derived and/or modified sequence
atgtggaagctgggccggggccgggtgctgctggatgagcccccagaggaggaggatggcctgcggggcggccccccacctgctgctgctgctgctgcccaggcccaggtgcagggcgccagcttccggggctggaaggaggtgaccagcctcttcaacaaggatgatgagcagcacctgctggagcgctgcaagagccccaagagcaagggcaccaacctgcggctgaaggaggagctgaaggccgagaagaagagcggcttctgggacaacctggtgctgaagcagaacatccagagcaagaagccagatgaaattgagggctgggagccccccaagctggccctggaggacatctctgctgaccctgaggacacagtgggcggccaccccagctggagcggctgggaggatgatgccaagggcagcaccaagtacaccagcctggccagcagcgccaacagcagccgctggagcctgcgggctgctggccgcctggtgtccatccggcggcagagcaagggccacctgacagacagccctgaggaggccgagtag

SEQ ID NO: 290224 - DNA, 558 bp, Artificial Sequence
  derived and/or modified sequence
atgtggaagctgggccggggccgggtgctgctggacgagccccccgaggaggaggacggtctccgaggaggccctcctccagcagccgccgccgccgcccaggcccaggtccagggagcctcatttaggggttggaaggaggtgacctcgctctttaacaaagatgatgagcaacacctgctggagcggtgcaaatctcccaaatccaaaggcaccaacctccgccttaaagaggaactgaaggctgagaagaagagcggattctgggacaaccttgttttgaagcagaacattcagtctaaaaagcctgatgaaatcgaggggtgggagccgcccaaactggcccttgaggatatcagtgccgaccctgaagatacagttggcggtcacccatcatggtcagggtgggaagatgacgctaaaggatctacaaaatacactagcttggcctcaagcgccaatagtagccgctggtcacttagggctgccggccgcttggtgtctattaggcgtcaatctaaggggcatctcactgacagccctgaagaggcagaatag

SEQ ID NO: 290225 - DNA, 558 bp, Artificial Sequence
  derived and/or modified sequence
atgtggaagttagggagaggcagagtcctgctggacgagcctccagaggaagaggatgggctgcgaggaggaccacctcccgctgcagccgcagcagcccaagcacaggtgcagggggcttctttccgtggatggaaagaggtcaccagcctgtttaacaaagacgatgaacagcatctattagagaggtgtaagtccccaaagagcaagggtacgaacttgaggctcaaggaggagctgaaagccgaaaagaagtcgggcttctgggataatctcgtgcttaaacagaacatccagtctaaaaagccagatgaaatagagggttgggagccccctaaattagctttagaagatatatcagctgatccggaagacacagtgggaggccatcccagctggagcgggtgggaagatgatgccaaaggctcaacaaagtatacaagcctggcatcatccgccaattcctctagatggtcactccgggcagcagggcgacttgtgtctatccgacggcagagcaaaggccatcttacagacagcccagaagaggctgagtag

SEQ ID NO: 290226 - protein, 329 aa, Artificial Sequence
  derived and/or modified sequence
MADGGSPFLGRRDFVYPSSTRDPSASNGGGSPARREEKKRKAARLKFDFQAQSPKELTLQKGDIVYIHKEVDKNWLEGEHHGRLGIFPANYVEVLPADEIPKPIKPPTYQVLEYGEAVAQYTFKGDLEVELSFRKGEHICLIRKVNENWYEGRITGTGRQGIFPASYVQVSREPRLRLCDDGPQLPTSPRLTAAARSARHPSSPSALRSPADPIDLGGQTSPRRTGFSFPTQEPRPQTQNLGTPGPALSHSRGPSHPLDLGTSSPNTSQIHWTPYRAMYQYRPQNEDELELREGDRVDVMQQCDDGWFVGVSRRTQKFGTFPGNYVAPV

SEQ ID NO: 290227 - DNA, 2039 bp, Artificial Sequence
  derived and/or modified sequence
cccgccccgctcccgggatcggccgcgcgggcgcctctaggaccccgcgtcccgcccgctctcctcccctcccgagccgcgaacttttccggaggcggcggcctcggctgccgctgggtcccggggtcgcgggccctgattgcgccgtttccccgcgcagagctcgccggcgccccgacgggccccggagcagcggcccccggccggcccggcctcagcctggagctccagctacccacatgcaccttacctgggttccgcccggtccctgagtccccacaaaatggctgatggaggaagccccttcctaggtcggagggactttgtctacccttcctcaacccgagaccctagtgcctctaacggagggggcagcccagccaggagggaagagaagaagagaaaggccgccaggctcaagtttgacttccaggcgcagtcccccaaggagctgactctgcagaagggtgacattgtctacatccacaaggaggtggacaagaactggctggagggagagcaccacggccgcctgggcatcttccctgctaattatgtggaggtgctgcccgcagatgagatccctaagcccatcaagcccccgacctaccaggtgctggagtatggagaggctgtggcccagtacaccttcaagggggacctggaggtggagctgtccttccgcaagggagagcacatctgcctgatccgcaaggtgaacgagaactggtacgagggacgcatcacgggcacggggcgccaaggcatattccctgccagctacgtgcaggtgtctcgtgaaccccggctccggctctgtgacgacggcccccagctccccacgtctccccgcctgaccgctgccgcccgctcagcccgtcaccccagctccccctcagccctgcgcagcccagctgaccccatcgacttggggggacagacctccccccgtcgcactggcttctccttccccacccaggagcctagaccccagacccagaatcttggcacccctggtccagctctgtcccactctcgaggtcccagccatcccctggacctggggacctcctctcctaacacctctcagatacactggaccccgtaccgggcgatgtaccagtacaggccccagaacgaagacgagctggagctgcgcgagggggacagggtggatgtcatgcagcagtgtgacgatggctggtttgtgggtgtctcccggaggacccagaaattcggaacgttccctggaaattacgttgccccggtgtgagtggtctccatggcaacttggagccagccaggatggggtggggagcggtggcactcgtgggagggagaggacccccgcccacatcctccttccccaggacctgagctcccagcatctgcagacgacccccgcagcctttccctcggacccccctcgaagccccctggactgattcccacccacgactcacaggcattcctcccacagccctttcatttcctccccaccccactccccaaatacagaggtctgctttgaagcggagaccatttccaggccttattgagaccagaccccaagtcccccacccccatcctgctccagcgtttcctctaacagggaccagctctccgctttgcccccacggggttcctctaaccagaaccagcttcctagcctcgtagagaccaaaggccgcccccgcctgctggggttcctcccagcaccccagcttgctggctgccctctttgccttctggcctccagctgggtgtgggggggcggagcaaggcgggggacagacgcagcaccttcttagcgatctaggcctggcaagagctctggccccaaggcctcctcttcccaggggctgccaagtcctggccctggccctggcatatcaccccgcactgtggggccaggcaccactagcctggctcaaatattccccagggagactgctgtgtgctgcccgcctgcctgctggctctcccccagccccacatcccctctggaagagaatgtaaaataaacctggacacaaggg

SEQ ID NO: 290228 - protein, 204 aa, Artificial Sequence
  derived and/or modified sequence
MMKTLLLFVGLLLTWESGQVLGDQTVSDNELQEMSNQGSKYVNKEIQNAVNGVKQIKTLIEKTNEERKTLLSNLEEAKKKKEDALNETRESETKLKELPGVCNETMMALWEECKPCLKQTCMKFYARVCRSGSGLVGRQLEEFLNQSSPFYFWMNGDRIDSLLENDRQQTHMLDVMQDHFSRASSIIDELFQDRFFTREPQDTY

SEQ ID NO: 290229 - protein, 460 aa, Artificial Sequence
  derived and/or modified sequence
MEACKDSRIGGMMKTLLLFVGLLLTWESGQVLGDQTVSDNELQEMSNQGSKYVNKEIQNAVNGVKQIKTLIEKTNEERKTLLSNLEEAKKKKEDALNETRESETKLKELPGVCNETMMALWEECKPCLKQTCMKFYARVCRSGSGLVGRQLEEFLNQSSPFYFWMNGDRIDSLLENDRQQTHMLDVMQDHFSRASSIIDELFQDRFFTREPQDTYHYLPFSLPHRRPHFFFPKSRIVRSLMPFSPYEPLNFHAMFQPFLEMIHEAQQAMDIHFHSPAFQHPPTEFIREGDDDRTVCREIRHNSTGCLRMKDQCDKCREILSVDCSTNNPSQAKLRRELDESLQVAERLTRKYNELLKSYQWKMLNTSSLLEQLNEQFNWVSRLANLTQGEDQYYLRVTTVASHTSDSDVPSGVTEVVVKLFDSDPITVTVPVEVSRKNPKFMETVAEKALQEYRKKHREE

SEQ ID NO: 290230 - protein, 501 aa, Artificial Sequence
  derived and/or modified sequence
MQVCSQPQRGCVREQSAINTAPPSAHNAASPGGARGHRVPLTEACKDSRIGGMMKTLLLFVGLLLTWESGQVLGDQTVSDNELQEMSNQGSKYVNKEIQNAVNGVKQIKTLIEKTNEERKTLLSNLEEAKKKKEDALNETRESETKLKELPGVCNETMMALWEECKPCLKQTCMKFYARVCRSGSGLVGRQLEEFLNQSSPFYFWMNGDRIDSLLENDRQQTHMLDVMQDHFSRASSIIDELFQDRFFTREPQDTYHYLPFSLPHRRPHFFFPKSRIVRSLMPFSPYEPLNFHAMFQPFLEMIHEAQQAMDIHFHSPAFQHPPTEFIREGDDDRTVCREIRHNSTGCLRMKDQCDKCREILSVDCSTNNPSQAKLRRELDESLQVAERLTRKYNELLKSYQWKMLNTSSLLEQLNEQFNWVSRLANLTQGEDQYYLRVTTVASHTSDSDVPSGVTEVVVKLFDSDPITVTVPVEVSRKNPKFMETVAEKALQEYRKKHREE

SEQ ID NO: 290231 - protein, 297 aa, Artificial Sequence
  derived and/or modified sequence
MEACKDSRIGGMMKTLLLFVGLLLTWESGQVLGDQTVSDNELQEMSNQGSKYVNKEIQNAVNGVKQIKTLIEKTNEERKTLLSNLEEAKKKKEDALNETRESETKLKELPGVCNETMMALWEECKPCLKQTCMKFYARVCRSGSGLVGRQLEEFLNQSSPFYFWMNGDRIDSLLENDRQQTHMLDVMQDHFSRASSIIDELFQDRFFTREPQDTYHYLPFSLPHRRPHFFFPKSRIVRSLMPFSPYEPLNFHAMFQPFLEMIHEAQQAMDIHFHSPAFQHPPTEFIREGDDDRTVCR

SEQ ID NO: 290232 - DNA, 1383 bp, Artificial Sequence
  derived and/or modified sequence
atggaggcctgtaaggatagcaggataggggggatgatgaaaacactgctcttattcgtcggtctgcttctgacctgggagagtggacaggtgcttggtgatcaaaccgtgagcgacaatgaactgcaggagatgtccaaccaggggtcgaagtatgtgaacaaggaaatccagaatgctgttaatggcgtcaagcagatcaagacgctgatcgaaaagacaaatgaggagcgtaaaacccttctttctaatctggaagaggccaagaaaaaaaaagaagacgctctgaacgagacccgggagagcgagactaagctcaaagaattgcctggggtgtgtaatgaaacgatgatggcactgtgggaggagtgcaaaccttgcttaaagcaaacttgtatgaagttttacgcgcgggtctgtagatcggggagcgggctcgttggtcggcaattggaggagttcttgaatcaatcctcccccttctacttctggatgaatggagacaggatcgatagccttctggagaacgacagacaacagacccatatgttagacgtcatgcaggaccattttagcagagccagcagcatcattgatgaactctttcaggacagattctttactagggagcctcaagatacatatcactacttgcctttttcccttccgcatcgcaggccccactttttctttccaaagagccggattgtcagaagcttgatgcctttctcaccatacgaaccactgaatttccatgccatgttccaaccgttcttggagatgattcacgaagctcagcaggctatggatatccactttcattcccccgcatttcagcatcctcctacagagttcatacgtgagggtgacgacgatcggacagtctgccgcgagatccggcacaactccaccggttgtctgcggatgaaggaccagtgtgacaaatgtagagaaatcctctcagttgattgttccactaataacccctcacaggcgaaactgaggagggagctcgacgaatcacttcaggtggctgagcgcctgactagaaagtacaacgaattactaaagagctatcagtggaagatgctcaatactagttccttgctggaacagctgaacgagcagtttaattgggttagtcgcctggctaatcttactcaaggagaggatcagtactaccttcgtgtcaccaccgtcgcatcacacacctcagactctgacgtacccagtggtgttacagaggtggtagtgaaactgttcgattccgaccccatcacagtcactgtccctgtcgaagtctccaggaagaatcctaagttcatggagaccgtcgcagagaaagccttgcaggaatatcgcaagaagcaccgagaggaatag

SEQ ID NO: 290233 - DNA, 1506 bp, Artificial Sequence
  derived and/or modified sequence
atgcaggtctgttcacagcctcagagaggctgcgtacgtgagcagtcggcaatcaatacagcacctcccagcgctcacaacgccgcaagccctgggggcgcccggggccacagggttccactgactgaagcatgtaaggattctagaatcggcggcatgatgaagacgctgttgctctttgtgggactcctgctgacttgggagtccggccaagtcctgggggatcaaacagtgtccgataacgagctgcaggagatgtccaaccaggggagcaagtatgttaacaaggaaatccagaacgccgtgaacggggtcaaacagatcaaaaccctcatcgaaaagactaatgaagagaggaaaacactgctgagtaaccttgaggaggccaaaaaaaagaaggaggacgccttaaacgaaacacgggaatccgagactaagctcaaagaactgccgggcgtatgtaacgagacaatgatggccctgtgggaggagtgcaagccctgtctcaagcagacttgcatgaagttctatgcacgggtgtgccgcagcggttcagggctcgttggccgccagctcgaggagttcctgaatcaatccagccccttctacttttggatgaatggggacagaatcgattcattacttgagaatgaccgacagcaaacacacatgctagacgtgatgcaggatcattttagccgggctagtagcatcattgatgagctgtttcaggatagattctttactagagagccccaggacacgtatcactacctgccattcagcctgccacaccgccggccccactttttcttcccaaagtcacgaattgtgaggagcctcatgcccttcagcccgtacgagcctctcaatttccacgccatgttccagccatttctggagatgatccacgaggcgcaacaggcaatggatattcactttcattctcccgcctttcagcatccgcctactgagtttattagagaaggagatgatgaccgcacggtctgtcgggagattcgccacaatagcaccggatgtctgcgcatgaaggatcaatgtgataaatgcagagagatcttaagcgtggattgtagcactaataatccttcccaggcaaagctaaggcgggagcttgacgagtcactgcaagtggctgagcgtttgacacggaagtataatgagctgctgaaatcctatcaatggaaaatgcttaacaccagcagtttgctcgaacagctgaacgaacagtttaactgggtctccagattggccaaccttacccaaggggaggaccagtattatctgcgggtgactacagtagcttcccacacctcagacagcgatgtcccctctggcgtgaccgaggtggtggtcaaactatttgatagcgaccctattacagtgacagtaccagtggaagtctccagaaagaatccaaaattcatggagacagtcgccgaaaaagccctgcaggagtatcggaagaagcacagggaggagtag

SEQ ID NO: 290234 - DNA, 894 bp, Artificial Sequence
  derived and/or modified sequence
atggaagcatgcaaggactctcgaatcggcggaatgatgaaaaccctgctgcttttcgtgggactgctcttgacctgggaatctgggcaggtgttgggcgatcagaccgtgagcgataacgaacttcaggaaatgtcgaaccaggggagtaaatacgtgaacaaagagattcagaacgccgtaaacggggtgaaacagattaaaacattaatcgagaagaccaacgaagagcgaaaaaccttgctcagcaaccttgaggaggctaaaaagaaaaaagaggacgctctaaatgaaacacgggagtccgaaactaagttgaaagaactgccaggggtttgtaatgaaacaatgatggccctgtgggaggaatgtaaaccctgcctgaaacaaacgtgtatgaaattttatgctcgcgtgtgccggtccggcagcgggctggtggggcgccaactcgaagagttcctgaatcagtcctcacccttttatttttggatgaatggcgatagaatcgacagtttactagaaaatgataggcagcaaactcacatgctcgacgtcatgcaggaccacttctcccgggcgagttccatcatcgatgaactgttccaggaccggttctttaccagagaaccgcaggatacttatcactatctgccatttagtttgccacaccggcgcccccactttttcttccctaagagtcgcatcgtccggtccttgatgcctttttctccatacgagccccttaatttccatgcaatgtttcaaccattcttggaaatgatccatgaagcgcagcaagccatggatatacatttccattctccagcatttcagcatccgccaacggagtttatccgagagggagacgatgaccgcacagtgtgtcgatag

SEQ ID NO: 290235 - DNA, 1383 bp, Artificial Sequence
  derived and/or modified sequence
atggaggcctgcaaggacagcagaattggaggcatgatgaagaccctgctgctgtttgtgggcctgctgctgacctgggagagcggccaggtgctgggggaccagacagtgtctgacaatgagctgcaggagatgagcaaccagggcagcaaatatgtgaacaaggagatccagaatgctgtgaatggagtgaagcagatcaagaccctgattgagaagaccaatgaggagaggaagaccctgctgagcaacctggaggaggccaagaagaagaaggaggatgccctgaatgagacccgggagagcgagaccaagctgaaggagctgcccggggtgtgcaatgagaccatgatggccctgtgggaggagtgcaagccctgcctgaagcagacctgcatgaagttctacgcccgggtgtgccgcagcggcagcggcctggtgggccggcagctggaggagttcctgaaccagagcagccccttctacttctggatgaatggagacagaattgacagcctgctggagaatgaccggcagcagacccacatgctggatgtgatgcaggaccacttcagccgggccagcagcatcattgatgagctgttccaggaccgcttcttcacccgggagccccaggacacctaccactacctgcccttcagcctgccccacagaagaccccacttcttcttccccaagagccgcatcgtgcgcagcctgatgcccttcagcccctatgagcccctgaacttccacgccatgttccagcccttcctggagatgattcatgaggcccagcaggccatggacatccacttccacagccctgccttccagcaccccccaacagagttcatccgggagggagatgatgacagaacagtgtgccgggagatccgccacaacagcacaggctgcctgaggatgaaggaccagtgtgacaagtgccgggagatcctgtctgtggactgcagcaccaacaaccccagccaggccaagctgcggcgggagctggatgagagcctgcaggtggccgagcggctgaccaggaagtacaatgagctgctgaagagctaccagtggaagatgctgaacaccagcagcctgctggagcagctgaatgagcagttcaactgggtgtcccggctggccaacctgacccagggcgaggaccagtactacctgcgggtgaccaccgtggccagccacaccagtgacagtgatgtgcccagcggcgtgacagaggtggtggtgaagctgtttgacagcgaccccatcaccgtgacagtgcctgtggaggtgtccaggaagaaccccaagttcatggagaccgtggccgagaaggccctgcaggagtacaggaagaagcaccgggaggagtag

SEQ ID NO: 290236 - DNA, 1506 bp, Artificial Sequence
  derived and/or modified sequence
atgcaggtgtgcagccagccccagaggggctgtgtgcgggagcagagcgccatcaacacagccccacccagcgcccacaatgctgccagccctggaggagcccggggccaccgggtgcccctgacagaggcctgcaaggacagccgcatcggcggcatgatgaagaccctgctgctgtttgtgggcctgctgctgacctgggagagcggccaggtgctgggggaccagacagtgtctgacaatgagctgcaggagatgagcaaccagggcagcaaatatgtgaacaaggagatccagaatgctgtgaatggagtgaagcagatcaagaccctcatcgagaagaccaatgaggagaggaagaccctgctgagcaacctggaggaggccaagaagaagaaggaggatgccctgaatgagacccgggagagcgagaccaagctgaaggagctgcccggggtgtgcaatgagaccatgatggccctgtgggaggagtgcaagccctgcctgaagcagacctgcatgaagttctacgcccgggtgtgccgcagcggcagcggcctggtgggccggcagctggaggagttcctgaaccagagcagccccttctacttctggatgaatggagacagaattgacagcctgctggagaatgaccggcagcagacccacatgctggatgtgatgcaggaccacttcagccgggccagcagcatcattgatgagctgttccaggaccgcttcttcacccgggagccccaggacacctaccactacctgcccttcagcctgccccaccggcggccccacttcttcttccccaagagcagaattgtgcgcagcctgatgcccttcagcccctatgagcccctgaacttccacgccatgttccagcccttcctggagatgatccacgaggcccagcaggccatggacatccacttccacagccctgccttccagcaccccccaacagagttcatccgggagggagatgatgacagaacagtgtgccgggagatccgccacaacagcacaggctgcctgaggatgaaggaccagtgtgacaagtgccgggagatcctgtctgtggactgcagcaccaacaaccccagccaggccaagctgcggcgggagctggatgagagcctgcaggtggccgagcggctgaccaggaagtacaatgagctgctgaagagctaccagtggaagatgctgaacaccagcagcctgctggagcagctgaatgagcagttcaactgggtgtcccggctggccaacctgacccagggcgaggaccagtactacctgcgggtgaccaccgtggccagccacaccagtgacagtgatgtgcccagcggcgtgacagaggtggtggtgaagctgtttgacagcgaccccatcaccgtgacagtgcctgtggaggtgtccaggaagaaccccaagttcatggagaccgtggccgagaaggccctgcaggagtacaggaagaagcaccgggaggagtag

SEQ ID NO: 290237 - DNA, 894 bp, Artificial Sequence
  derived and/or modified sequence
atggaggcctgcaaggacagcagaattggaggcatgatgaagaccctgctgctgtttgtgggcctgctgctgacctgggagagcggccaggtgctgggggaccagacagtgtctgacaatgagctgcaggagatgagcaaccagggcagcaaatatgtgaacaaggagatccagaatgctgtgaatggagtgaagcagatcaagaccctgattgagaagaccaatgaggagaggaagaccctgctgagcaacctggaggaggccaagaagaagaaggaggatgccctgaatgagacccgggagagcgagaccaagctgaaggagctgcccggggtgtgcaatgagaccatgatggccctgtgggaggagtgcaagccctgcctgaagcagacctgcatgaagttctacgcccgggtgtgccgcagcggcagcggcctggtgggccggcagctggaggagttcctgaaccagagcagccccttctacttctggatgaatggagacagaattgacagcctgctggagaatgaccggcagcagacccacatgctggatgtgatgcaggaccacttcagccgggccagcagcatcattgatgagctgttccaggaccgcttcttcacccgggagccccaggacacctaccactacctgcccttcagcctgccccacagaagaccccacttcttcttccccaagagccgcatcgtgcgcagcctgatgcccttcagcccctatgagcccctgaacttccacgccatgttccagcccttcctggagatgattcatgaggcccagcaggccatggacatccacttccacagccctgccttccagcaccccccaacagagttcatccgggagggagatgatgacagaacagtgtgcaggtag

SEQ ID NO: 290238 - DNA, 1383 bp, Artificial Sequence
  derived and/or modified sequence
atggaggcctgcaaggacagccggatcggcggcatgatgaagaccctattactctttgtgggtttgctgctaacctgggagagtggtcaggtccttggagaccagacagtgtccgataacgagctacaagagatgtctaatcagggaagcaaatatgtcaacaaggaaattcagaatgcagttaatggagtcaaacagatcaaaactctgatcgagaaaactaacgaggagaggaagaccctgctctctaaccttgaggaagccaaaaaaaagaaagaggatgccctgaacgaaacaagggaatccgagaccaagctgaaggagctgccaggggtgtgtaatgaaacgatgatggccctttgggaggagtgcaaaccctgtttaaagcagacatgcatgaagttctatgcacgagtgtgtcggtctgggagcggcttggttgggaggcagctggaagaatttctgaaccaatcctccccattttacttttggatgaatggtgataggatcgatagtttgcttgagaatgaccgtcagcaaacgcatatgctggacgtgatgcaagatcatttttctcgggcctctagcatcatcgacgaactgtttcaagatagattcttcaccagagagccacaggacacctatcactacctgcctttcagtttgccgcatagacgtccccacttttttttccccaagtcccgaattgtaaggtcccttatgccattttccccgtacgaacctctaaactttcacgcaatgttccagccttttctggaaatgattcatgaagcccagcaggccatggatattcatttccatagtcctgcctttcaacatccgcccacagagttcattagagaaggagatgacgacaggaccgtctgtcgggaaatccgccacaactccacaggatgcctgcgtatgaaggatcagtgcgataaatgccgggaaatcctgtccgtggactgctccaccaataaccccagccaagccaagctgaggcgagagctggatgagtcgctgcaggtggcagagcgcctcactcgcaaatataacgagctcctcaagtcctatcagtggaaaatgctgaacacctctagcctcttagagcagcttaacgagcagtttaactgggtgtctaggctggccaaccttacccagggggaagaccagtactatctccgggtgaccacagttgcatcgcacacatccgacagcgacgtaccttccggagtgacggaggtggtcgtgaaactattcgatagcgacccaatcacagtcaccgtgcctgtggaggtaagccggaaaaatcccaaattcatggaaactgttgcagaaaaggccctgcaagaatatagaaagaagcatagggaggaatag

SEQ ID NO: 290239 - DNA, 1506 bp, Artificial Sequence
  derived and/or modified sequence
atgcaggtgtgcagccagccccagcggggctgcgtgcgggagcagtccgccattaatacggcgcccccctctgctcataacgctgcttcgccaggaggcgcccgcgggcatcgagttcccttgactgaagcatgcaaggatagccggatcggtgggatgatgaagacactcttgctttttgtgggtctgctgctgacatgggagtccgggcaggttttgggggatcagacagtatctgacaacgagttacaggaaatgagtaaccaggggagcaagtacgtgaataaagagatccagaacgccgttaacggggtgaaacagataaaaactctgatcgagaaaaccaacgaagaacgcaaaacactgctcagtaatcttgaggaagccaagaagaagaaagaggatgctcttaatgagacccgagagtcagagacaaaactcaaggagctgcctggagtgtgcaatgaaacgatgatggcactgtgggaagaatgtaagccttgcctcaaacaaacttgcatgaagttctacgctagagtttgcagatctgggtcgggcctggtaggccgtcaactcgaggagtttctgaatcagtcttctcctttctatttttggatgaacggcgaccgcattgactccttgctggagaacgaccgtcaacagacacacatgctggacgtgatgcaggaccacttctctcgcgcgagctctatcattgacgagttgttccaagaccgcttctttaccagggagccccaggatacatatcactatcttcctttctcacttccccataggagaccccattttttcttcccaaaatcccgcattgtgagatcgttaatgcccttttcaccctacgagcctctcaactttcatgcaatgttccagccctttctggaaatgatccacgaagcacagcaagctatggacattcactttcatagtcccgcctttcagcatccgccgaccgagttcatacgagagggtgacgacgacagaaccgtgtgccgggagatcagacataattctacaggctgcctgaggatgaaggaccaatgcgacaaatgccgagagatcctgtccgtcgactgttcaaccaacaacccttcacaggccaagctgagacgggagctggacgaaagtctgcaagtggctgagcgattaacccgaaagtacaatgagttactgaaatcctaccaatggaaaatgctcaacacctctagtctgctggagcagctgaatgagcagtttaattgggtgtcccggcttgccaaccttacccagggcgaagatcagtactacttgcgcgtcacaacagtcgcaagtcatacgagtgactccgatgtgccttcaggggtcaccgaggtagtggtgaaactgttcgattcagatcccataacagtaacggttcctgtggaggtgtcccgcaagaaccctaaattcatggaaaccgtcgcagagaaggcgttacaggagtaccgcaagaagcaccgggaggagtag

SEQ ID NO: 290240 - DNA, 894 bp, Artificial Sequence
  derived and/or modified sequence
atggaggcctgcaaggacagccggatcggcggcatgatgaagaccctgctgttgtttgtcggtctccttcttacctgggagtcaggacaagtgctcggcgatcaaacagtcagtgacaacgagctgcaggagatgagcaatcagggctctaagtatgtgaacaaagaaattcagaacgccgtgaatggcgttaagcagattaagaccctgattgaaaagaccaacgaggagagaaagacattgctgtctaacttagaagaagccaagaagaagaaggaagacgcgctgaacgagacacgggagtccgagactaagttgaaggaattaccgggggtatgcaatgagactatgatggcactttgggaagaatgtaagccatgtctgaaacagacctgcatgaaattttacgcaagagtctgcaggagtggctcaggtctcgtgggacggcagctggaggaattcctcaaccagtccagccctttttatttctggatgaatggtgacaggattgatagcctccttgagaacgatcggcagcagacgcatatgcttgacgttatgcaggaccacttttcacgtgcttcatcgatcatcgacgaattgttccaggacagattttttacccgcgaaccccaggatacatatcactacttgcctttttccctcccacacagacgtccacatttttttttccccaaaagtagaattgttaggtccctgatgcctttttctccatatgagcctttgaacttccatgctatgtttcaacctttcttggagatgattcacgaagcgcaacaggccatggacatccactttcactcccccgcatttcagcaccccccaactgagtttattcgggaaggtgatgatgaccgaacggtgtgccgctag

SEQ ID NO: 290241 - DNA, 1383 bp, Artificial Sequence
  derived and/or modified sequence
atggaagcctgcaaggattcccggatcgggggtatgatgaaaaccttactgctgttcgtagggctgctcctcacatgggagtccgggcaggtcttgggagaccagaccgtgagtgataatgaactgcaagagatgtccaatcaggggtccaagtatgtaaataaggagatccaaaatgctgttaatggcgtgaagcaaatcaaaacacttattgagaagaccaacgaggaacgaaaaacactcctttccaacctggaggaggcaaaaaaaaaaaaggaggacgccctgaacgagacacgcgagtctgagaccaagctgaaggagttacctggggtatgtaacgagactatgatggccctgtgggaggagtgtaaaccttgcctcaagcaaacctgcatgaagttctacgccagagtgtgtagatccggttctggcctggtgggacgtcaactggaagaatttttgaatcagtcttcccccttttacttctggatgaacggggacagaattgactctctcttggagaacgataggcaacagactcacatgttggatgttatgcaggaccacttctccagagccagtagtattatcgatgagctgtttcaagaccggttttttactcgggaacctcaggatacctatcactatctcccattttccctgcctcatagacgacctcactttttttttccaaagtcacggattgtgaggagtctcatgccgttctcaccatatgagccgctgaactttcatgcaatgttccaaccgtttctagaaatgatccacgaggcccagcaggccatggatatccacttccattccccagcttttcagcacccccctactgagttcattagggaaggagacgacgaccgcactgtgtgtcgcgaaatcaggcataatagcactgggtgtctccgcatgaaggatcagtgtgacaagtgccgtgagatactcagcgtggactgttctacaaacaatcccagtcaagccaaactgagacgcgaactagacgagtccctgcaggtggccgagaggctaactcggaagtacaacgagctccttaagtcttatcagtggaagatgctgaacacaagtagccttttagagcagctgaacgagcagttcaattgggtaagccgactcgctaacctaacccaaggtgaagaccagtactacctccgggttacaacggttgcctctcatacaagcgacagtgatgtaccctctggggtgacagaggtggttgtcaagttattcgatagcgacccaatcactgtaacagtgcccgtcgaagtgtcacggaagaaccctaaatttatggagactgttgctgaaaaggcactccaagaatacaggaaaaagcacagggaggaatag

SEQ ID NO: 290242 - DNA, 1506 bp, Artificial Sequence
  derived and/or modified sequence
atgcaagtctgtagccagccccaaagaggatgcgtgcgcgaacagagcgccattaacaccgctcctccatctgcacacaatgccgcttctcctggcggagcgagaggccaccgagtccccctgaccgaggcatgtaaagactcaaggataggaggcatgatgaagactcttctcctgttcgtcgggctcctgctcacatgggaatctggtcaggtcttgggtgaccaaactgtgtctgacaacgagctgcaggagatgagcaaccaggggtccaaatatgtaaataaggagatccagaatgccgtaaacggagttaagcagattaagaccctgatcgaaaagactaatgaggagagaaaaaccctgctttctaatctcgaagaggcaaagaaaaagaaagaagacgctttaaatgaaacgagagagtctgaaaccaagcttaaggaactgccaggagtctgcaacgagaccatgatggccctctgggaagagtgcaaaccttgcctaaagcagacatgcatgaaattttacgcaagggtttgcagatcaggttccgggttagtaggacggcagcttgaggaatttcttaaccagagctcacctttctacttttggatgaacggcgaccgaatcgattcattactggaaaatgaccgtcagcagactcatatgctcgacgtcatgcaagatcacttctctcgcgcatcttcaattatcgacgaattatttcaggacagatttttcacccgcgagcctcaagacacctaccactacctgccattctcccttccccatcggaggccacatttttttttccctaagtctcgcattgttcggtcactcatgccattttcgccatacgaacctcttaattttcacgccatgttccagccattcctggaaatgatacatgaagcccagcaagccatggacatccactttcattcccctgcttttcaacaccctccaactgaattcattcgcgaaggagatgacgatcggacagtgtgtagagagattcggcacaattccactggatgtcttaggatgaaagaccagtgcgacaagtgccgcgagattcttagtgttgactgctcgaccaacaatcccagccaagccaaactgaggcgggagctcgacgagtccctgcaggtagccgaacgtctcacccggaagtataatgaactgctgaagagctaccaatggaagatgctgaatacatcttcactgctggaacagttgaatgaacagttcaattgggtctcaagactggccaacctcacacagggtgaagaccagtattacctgcgcgtgaccactgtagccagtcataccagcgatagtgatgtgccctccggggtcaccgaggtcgtggtgaaactctttgactccgatcctataaccgttacggtgccagtagaagtctcccgtaaaaatccaaaatttatggagacagtggcagagaaggccctacaagaatataggaagaagcaccgggaagagtag

SEQ ID NO: 290243 - DNA, 894 bp, Artificial Sequence
  derived and/or modified sequence
atggaggcctgcaaagatagccggattggtgggatgatgaaaaccctcctgctgttcgtggggttactccttacctgggaatccggccaagtgctcggggatcagaccgtgagtgataacgagctgcaggaaatgtccaatcaggggtctaaatatgtcaacaaagaaatacagaacgctgtgaacggtgtgaaacaaatcaagactctgatcgagaagacaaacgaagaacgtaaaacgctgctgtctaacctcgaggaggctaagaagaagaaggaggatgccttaaacgaaacacgcgaatctgagacaaaactcaaagaacttcctggcgtctgcaatgaaacaatgatggcactctgggaagaatgcaaaccatgtctcaagcagacttgtatgaaattctatgccagagtctgcagaagtggcagtggactggtgggacggcaactggaggaattcctcaaccagtcaagtcctttctacttttggatgaatggcgacagaatagacagcctcctcgaaaacgatcgacagcagacccacatgctggacgtgatgcaagatcatttcagccgagcctcaagtatcattgacgagttatttcaagaccgattcttcacacgggagccacaggacacttaccattatcttccattcagtctcccccacagaaggccgcacttttttttccctaagtcgcgtattgttagaagcctaatgccctttagcccatatgaaccccttaattttcatgccatgttccagcccttcttggagatgatccacgaggctcaacaggctatggacatccattttcattcgcccgcatttcagcatcccccaactgagtttatcagggaaggcgacgacgaccgcaccgtctgcagatag

SEQ ID NO: 290244 - DNA, 1383 bp, Artificial Sequence
  derived and/or modified sequence
atggaggcatgcaaagattcacgcataggcggtatgatgaagacactgctcttgttcgtgggactcctgttgacctgggagtcaggccaagttttgggcgatcagaccgtgtctgataatgagttgcaagagatgtctaatcaagggagtaagtatgtgaataaggagatccaaaacgcagtgaatggagtgaaacaaataaaaacacttatcgagaagaccaacgaagagcgcaaaaccttactgtcaaacttggaggaggcaaaaaaaaaaaaagaggatgcattgaatgaaacaagggaaagtgagacaaagctgaaagagctccccggagtttgtaacgagacaatgatggcactgtgggaagaatgcaagccctgcctcaagcagacctgtatgaagttttatgcccgggtgtgccggagcggaagtggactggtgggtcgccagttggaagaatttcttaaccagtcgtcacctttttacttctggatgaatggcgatcgcattgacagcctgctggaaaacgaccggcaacagactcatatgctggatgtgatgcaggatcattttagtcgggcttcttccatcatagacgaactgtttcaagaccgcttctttacacgtgagccacaagacacctaccactatctgccattctcgctgcctcaccgccgaccacattttttcttcccgaagtctcgaatcgttaggagtttaatgcctttctctccttatgagcctctgaatttccatgcaatgttccagcccttcctggaaatgatccatgaggcacaacaagccatggatatacactttcatagtccagcattccagcatcctcctaccgagttcatccgcgagggtgacgatgacagaacagtttgtagagaaattcgccacaactcaactggatgccttcggatgaaagaccagtgtgataaatgtagagagattctgagcgttgattgttccactaataatccttcacaggctaaattgcgacgggagctagatgagagtctccaggtggcagagagactcaccaggaaatacaacgagttacttaagagttatcagtggaagatgctaaacacaagttcgctccttgagcagctgaatgagcagtttaattgggtgtctcgtttagccaaccttacccagggtgaggaccaatactacctgcgcgtgaccactgtcgccagccacacttcggattctgatgttccttccggcgtgaccgaagtggtcgttaaactgttcgatagtgaccctatcaccgttactgtcccagttgaagtgtctcgcaaaaacccaaagtttatggaaaccgtcgcggagaaagcattacaggagtaccgaaaaaaacaccgcgaagaatag

SEQ ID NO: 290245 - DNA, 1506 bp, Artificial Sequence
  derived and/or modified sequence
atgcaggtgtgcagccaaccacagcgcggatgcgtacgagagcagtccgcaatcaatacggccccaccaagcgcccataacgctgcctctccagggggtgcccgaggccatcgagtgcctctgacagaagcttgtaaggacagccggatagggggcatgatgaagacactactgttatttgtgggactcctgctgacatgggagtcaggccaggtgcttggggatcagacagtctctgataatgaattgcaggaaatgtccaatcagggaagcaaatacgtgaataaggagatacagaatgccgtgaatggtgtgaagcagatcaagactcttattgagaaaacaaacgaggaacggaagactctgctgtccaacctcgaggaagccaaaaaaaagaaggaagacgccctaaacgagactcgcgagagtgaaacaaagctgaaggaactgcccggcgtgtgcaatgagacaatgatggctctgtgggaagagtgtaaaccctgtttaaaacagacttgtatgaaattttacgcccgggtgtgccgaagcggtagcggactggttgggagacagctggaagagttccttaaccagtcatcccccttttatttctggatgaatggcgatagaatcgatagtctcctggagaacgatcggcagcaaacccatatgctcgacgttatgcaagaccacttctctcgagccagtagcatcattgacgagctttttcaagatagattctttacaagggagcctcaggatacctatcattacttgcccttttcactcccacacaggaggccccactttttcttccccaaatcccggatcgtccgcagccttatgccttttagcccgtatgagcctctgaattttcatgctatgttccagccctttctcgagatgatacatgaggcccagcaagcaatggacattcatttccacagccccgcgttccagcacccgcccaccgagttcatcagggaaggcgatgatgacagaaccgtttgccgagaaatcagacacaacagtacaggttgtctgcgaatgaaagatcaatgcgacaagtgcagagagatactatcagtcgattgctctactaataacccttctcaggccaaacttcgccgcgaactcgatgagagtctacaggtggcagaaagactcaccaggaagtacaatgaacttcttaagtcctaccagtggaaaatgctgaacacatcatcattgctggaacaattaaatgagcagtttaactgggtatcacgtctggccaacttgacccagggagaggatcagtattacttgagagtgaccaccgtcgccagccacactagcgatagcgacgttcctagcggggtcactgaggtagtggttaagttgtttgatagcgacccgattacagtcacagtgcccgtggaggtcagccggaaaaatcccaaatttatggagaccgttgcggaaaaagcattgcaagaataccgaaaaaagcacagagaagaatag

SEQ ID NO: 290246 - DNA, 894 bp, Artificial Sequence
  derived and/or modified sequence
atggaagcatgcaaggattccagaatcggtggcatgatgaagacgctgctgctcttcgtgggtttattgctaacttgggaaagtggacaagtgctcggtgaccaaaccgtctctgataacgagctacaagaaatgtctaatcagggatctaaatacgtgaataaggaaatccagaacgccgtgaatggggtaaagcaaataaagaccctgatcgaaaaaacgaacgaagaaagaaagaccttactgtcgaacctcgaagaggccaagaaaaaaaaagaagatgcactgaacgaaactagggagagcgagactaagttaaaagaattaccaggggtctgcaacgaaactatgatggctctatgggaggagtgcaaaccctgtcttaaacagacgtgcatgaagttctacgcgagggtctgtcggtcgggttctggtttggtggggcggcagctcgaagaattccttaatcaaagtagtcccttctacttttggatgaacggagacagaatagacagtctcttggaaaatgacaggcagcaaacacatatgctggacgtcatgcaggaccatttcagtagggctagcagcataattgatgagctatttcaggacagattctttacgcgtgagccacaggatacctaccactatctgcccttcagcttgccgcaccgccggccccatttcttttttcctaaatccagaatcgtgagatcattaatgccattctccccctacgaacccctgaactttcatgctatgttccagccctttctggaaatgatacatgaagcccagcaagccatggacattcacttccactctccagctttccaacacccacccactgaattcatcagagagggagatgatgataggacggtgtgcagatag

SEQ ID NO: 290247 - DNA, 1383 bp, Artificial Sequence
  derived and/or modified sequence
atggaagcatgcaaagacagccgaatcggtggaatgatgaagaccttgcttttgttcgtgggactgcttctcacttgggaatcgggtcaggtactcggcgatcagactgtgtccgacaacgaactccaagagatgtccaaccagggcagtaagtatgtcaataaggagatacagaatgctgtgaatggcgtgaaacagattaagaccctgatcgaaaagacaaatgaagagcgtaaaacactcctatccaatctagaggaagctaagaagaagaaggaagatgccctaaatgaaacgcgggagtcagaaactaagctaaaagaactgcccggggtgtgcaacgagacaatgatggctttatgggaagaatgtaaaccatgcctgaagcagacatgtatgaaattctacgcacgcgtgtgccgcagcggctcgggtcttgtgggccgacaattggaagagttcctgaatcagtccagccccttttatttctggatgaacggcgaccgcattgactcactcttagagaacgaccgacaacagacccacatgctcgacgtgatgcaagatcacttctcccgcgcctcttccattatcgatgaacttttccaagaccggtttttcactcgggagccacaggacacctaccactacttgcccttttccttgcctcataggagaccacacttttttttccccaagtctcggatcgtgcgatccctcatgcccttttctccttacgagcctctcaattttcacgcaatgtttcagcctttcttagagatgattcacgaagcccagcaggctatggacatccacttccactccccagccttccagcaccccccaaccgaattcatccgcgaaggtgatgacgataggaccgtctgccgtgaaatcaggcacaattcaaccggctgcctgcgtatgaaggatcagtgcgataaatgtagagaaatcctgtctgttgactgtagtactaacaatcctagtcaggcgaaactgaggagagagctcgatgagtcccttcaagttgctgaacggctcacaagaaagtataacgaacttttgaagtcctaccaatggaaaatgctcaatactagctccttattagaacaactcaacgagcagttcaactgggttagtaggctcgctaatctcacgcagggcgaagaccagtactacctcagggttaccaccgtcgcttcccatacgagcgactcagacgtgccatctggtgtgaccgaagtagtggtgaaattatttgacagtgatcccataactgtcaccgtgccagtagaggtgagcaggaaaaaccccaagtttatggagaccgtggcagagaaggccctgcaggagtacagaaaaaaacacagagaggagtag

SEQ ID NO: 290248 - DNA, 1506 bp, Artificial Sequence
  derived and/or modified sequence
atgcaggtgtgctctcagccgcagcggggatgcgtcagagaacaatcagccatcaataccgcccccccaagtgctcataacgcagcttctcctggaggcgcgagagggcaccgagtccctctgaccgaggcatgcaaagattcccgcattggaggtatgatgaaaacgctgctcctcttcgtgggactgctgttgacatgggagagtggtcaggttctaggtgaccaaactgtgtctgataacgagctgcaggagatgtctaaccagggcagcaagtatgttaataaagaaatccagaatgccgtgaatggagtgaaacagatcaaaactcttattgaaaaaaccaatgaggaaagaaaaacgctactgagcaatctggaagaggcaaaaaaaaagaaagaagatgccctcaatgaaactcgtgagtccgagaccaaactgaaagaactccctggagtctgcaatgaaaccatgatggcactgtgggaggagtgtaagccctgtctcaaacagacctgcatgaaattttacgctagagtatgccgaagtggttccggcctcgtggggagacagctggaagagtttctgaaccagtcatctccattttacttctggatgaacggtgaccgaatcgacagtctactggaaaatgacagacaacagacccacatgctcgacgtcatgcaagaccacttctcccgggcatcttcgatcatagacgagctgtttcaggaccgatttttcacgcgggaaccccaagatacctaccattatcttcctttttctcttcctcatcgacgtccacactttttctttccaaaatcgaggatcgttcgtagcctcatgcctttttctccctatgaacctttaaacttccatgccatgttccaacccttcttggaaatgatccacgaggctcaacaggcaatggacatccacttccactcccccgcattccagcatccccccacagagtttattagagagggcgacgacgaccggacagtttgcagggaaataagacataactctacaggctgtctgagaatgaaggaccaatgcgacaaatgcagagagatcttgtcagtagactgcagcactaataatcccagccaagccaaacttcggagagagctggatgagtccctacaggtagcagagagactcacgcgcaaatataacgagctgctcaaaagttaccagtggaaaatgttgaacacaagttctcttctggagcaactgaatgagcaatttaactgggtgagcaggctggccaacctaacgcagggcgaggaccaatactaccttcgcgtgaccactgtggcaagccatacctccgactcagacgtaccatccggagtaactgaggttgtggtgaagttgtttgactccgacccaatcaccgtaacagtgccagtcgaggtatccaggaaaaatcctaaattcatggagaccgtggccgagaaagctctccaggaatatcgaaaaaagcatagagaggagtag

SEQ ID NO: 290249 - DNA, 894 bp, Artificial Sequence
  derived and/or modified sequence
atggaagcatgcaaggattccagaatcggtggcatgatgaagacgctgctgctcttcgtgggtttattgctaacttgggaaagtggacaagtgctcggtgaccaaaccgtctctgataacgagctacaagaaatgtctaatcagggatctaaatacgtgaataaggaaatccagaacgccgtgaatggggtaaagcaaataaagaccctgatcgaaaaaacgaacgaagaaagaaagaccttactgtcgaacctcgaagaggccaagaaaaaaaaagaagatgcactgaacgaaactagggagagcgagactaagttgaaggaactgcccggggtctgtaacgagacaatgatggccctctgggaagagtgtaaaccgtgcctgaagcaaacttgcatgaaattttatgctcgagtctgtagaagtggcagtggccttgttggcaggcagcttgaagaatttctaaaccagagcagccccttctacttttggatgaacggagatcgcattgacagcctgcttgaaaatgatcgccaacaaactcacatgcttgacgtgatgcaagaccatttttctagagcaagtagcatcatagatgaactgtttcaggatcgattcttcacaagagagccccaggacacctatcactacttacctttctcactaccccaccgccgcccccacttcttcttccctaagagtagaattgtcagatcgctgatgcctttttctccctatgagccactgaactttcacgccatgtttcagccattcctcgagatgattcacgaagctcagcaagcgatggatattcattttcactcacccgcttttcagcacccacctaccgagtttattagagaaggggatgacgaccggacagtctgtagatag

SEQ ID NO: 290250 - DNA, 3080 bp, Artificial Sequence
  derived and/or modified sequence
tgtgtcttggactgggacagacagccgggctaaccgcgtgagaggggctcccagatgggcacgcgagttcaggctcttccctactggaagcgccgagcggccgcacctcagggtctctcctggagccagcacagctattcgtggtgatgatgcgccccccggcgcccccagcccggtgctgcaccggcccccacctcccggcttccagaaagctccccttgctttccgcggcattctttgggcgtgagtcatgcaggtttgcagccagccccaaagggggtgtgtgcgcgagcagagcgctataaatacggcgcctcccagtgcccacaacgcggcgtcgccaggaggagcgcgcgggcacagggtgccgctgaccgaggcgtgcaaagactccagaattggaggcatgatgaagactctgctgctgtttgtggggctgctgctgacctgggagagtgggcaggtcctgggggaccagacggtctcagacaatgagctccaggaaatgtccaatcagggaagtaagtacgtcaataaggaaattcaaaatgctgtcaacggggtgaaacagataaagactctcatagaaaaaacaaacgaagagcgcaagacactgctcagcaacctagaagaagccaagaagaagaaagaggatgccctaaatgagaccagggaatcagagacaaagctgaaggagctcccaggagtgtgcaatgagaccatgatggccctctgggaagagtgtaagccctgcctgaaacagacctgcatgaagttctacgcacgcgtctgcagaagtggctcaggcctggttggccgccagcttgaggagttcctgaaccagagctcgcccttctacttctggatgaatggtgaccgcatcgactccctgctggagaacgaccggcagcagacgcacatgctggatgtcatgcaggaccacttcagccgcgcgtccagcatcatagacgagctcttccaggacaggttcttcacccgggagccccaggatacctaccactacctgcccttcagcctgccccaccggaggcctcacttcttctttcccaagtcccgcatcgtccgcagcttgatgcccttctctccgtacgagcccctgaacttccacgccatgttccagcccttccttgagatgatacacgaggctcagcaggccatggacatccacttccatagcccggccttccagcacccgccaacagaattcatacgagaaggcgacgatgaccggactgtgtgccgggagatccgccacaactccacgggctgcctgcggatgaaggaccagtgtgacaagtgccgggagatcttgtctgtggactgttccaccaacaacccctcccaggctaagctgcggcgggagctcgacgaatccctccaggtcgctgagaggttgaccaggaaatacaacgagctgctaaagtcctaccagtggaagatgctcaacacctcctccttgctggagcagctgaacgagcagtttaactgggtgtcccggctggcaaacctcacgcaaggcgaagaccagtactatctgcgggtcaccacggtggcttcccacacttctgactcggacgttccttccggtgtcactgaggtggtcgtgaagctctttgactctgatcccatcactgtgacggtccctgtagaagtctccaggaagaaccctaaatttatggagaccgtggcggagaaagcgctgcaggaataccgcaaaaagcaccgggaggagtgagatgtggatgttgcttttgcacctacgggggcatctgagtccagctccccccaagatgagctgcagccccccagagagagctctgcacgtcaccaagtaaccaggccccagcctccaggcccccaactccgcccagcctctccccgctctggatcctgcactctaacactcgactctgctgctcatgggaagaacagaattgctcctgcatgcaactaattcaataaaactgtcttgtgagctgatcgcttggagggtcctctttttatgttgagttgctgcttcccggcatgccttcattttgctatggggggcaggcaggggggatggaaaataagtagaaacaaaaaagcagtggctaagatggtatagggactgtcataccagtgaagaataaaagggtgaagaataaaagggatatgatgacaaggttgatccacttcaagaattgcttgctttcaggaagagagatgtgtttcaacaagccaactaaaatatattgctgcaaatggaagcttttctgttctattataaaactgtcgatgtattctgaccaaggtgcgacaatctcctaaaggaatacactgaaagttaaggagaagaatcagtaagtgtaaggtgtacttggtattataatgcataattgatgttttcgttatgaaaacatttggtgcccagaagtccaaattatcagttttatttgtaagagctattgcttttgcagcggttttatttgtaaaagctgttgatttcgagttgtaagagctcagcatcccaggggcatcttcttgactgtggcatttcctgtccaccgccggtttatatgatcttcatacctttccctggaccacaggcgtttctcggcttttagtctgaaccatagctgggctgcagtaccctacgctgccagcaggtggccatgactacccgtggtaccaatctcagtcttaaagctcaggcttttcgttcattaacattctctgatagaattctggtcatcagatgtactgcaatggaacaaaactcatctggctgcatcccaggtgtgtagcaaagtccacatgtaaatttatagcttagaatattcttaagtcactgtcccttgtctctctttgaagttataaacaacaaacttaaagcttagcttatgtccaaggtaagtattttagcatggctgtcaaggaaattcagagtaaagtcagtgtgattcacttaatgatatacattaattagaattatggggtcagaggtatttgcttaagtgatcataattgtaaagtatatgtcacattgtcacattaatgtcacactgtttcaaaagtta

SEQ ID NO: 290251 - DNA, 1530 bp, Artificial Sequence
  derived and/or modified sequence
aacgcggcgtcgccaggaggagcgcgcgggcacagggtgccgctgaccgaggcgtgcaaagactccagaattggaggcatgatgaagactctgctgctgtttgtggggctgctgctgacctgggagagtgggcaggtcctgggggaccagacggtctcagacaatgagctccaggaaatgtccaatcagggaagtaagtacgtcaataaggaaattcaaaatgctgtcaacggggtgaaacagataaagactctcatagaaaaaacaaacgaagagcgcaagacactgctcagcaacctagaagaagccaagaagaagaaagaggatgccctaaatgagaccagggaatcagagacaaagctgaaggagctcccaggagtgtgcaatgagaccatgatggccctctgggaagagtgtaagccctgcctgaaacagagctcgcccttctacttctggatgtcatgcaggaccacttcagccgcgcgtccagcatcatagacgagctcttccaggacaggttcttcacccgggagccccaggatacctaccactacctgcccttcagcctgccccaccggaggcctcacttcttctttcccaagtcccgcatcgtccgcagcttgatgcccttctctccgtacgagcccctgaacttccacgccatgttccagcccttccttgagatgatacacgaggctcagcaggccatggacatccacttccatagcccggccttccagcacccgccaacagaattcatacgagaaggcgacgatgaccggactgtgtgccgggagatccgccacaactccacgggctgcctgcggatgaaggaccagtgtgacaagtgccgggagatcttgtctgtggactgttccaccaacaacccctcccaggctaagctgcggcgggagctcgacgaatccctccaggtcgctgagaggttgaccaggaaatacaacgagctgctaaagtcctaccagtggaagatgctcaacacctcctccttgctggagcagctgaacgagcagtttaactgggtgtcccggctggcaaacctcacgcaaggcgaagaccagtactatctgcgggtcaccacggtggcttcccacacttctgactcggacgttccttccggtgtcactgaggtggtcgtgaagctctttgactctgatcccatcactgtgacggtccctgtagaagtctccaggaagaaccctaaatttatggagaccgtggcggagaaagcgctgcaggaataccgcaaaaagcaccgggaggagtgagatgtggatgttgcttttgcacctacgggggcatctgagtccagctccccccaagatgagctgcagccccccagagagagctctgcacgtcaccaagtaaccaggccccagcctccaggcccccaactccgcccagcctctccccgctctggatcctgcactctaacactcgactctgctgctcatgggaagaacagaattgctcctgcatgcaactaattcaataaaactgtcttgtgagctg

SEQ ID NO: 290252 - DNA, 2098 bp, Artificial Sequence
  derived and/or modified sequence
aacactggcagggcagcctgctgtcggcttagaggggatgggcagtgtggagggcctggcagagcaagaggactcatccttccaaagggactttctctgggaagcctgctcctcgggccactgcgaaccctctctactctccgaagggaattgtccttcctggcttccactacttccacccctgaatgcacaggcagcccggcccaagtctcccactagggatgcagatggattcggtgtgaagggctggctgctgttgcctccggctcttgaaagtcaagttcagaggcgtgcaaagactccagaattggaggcatgatgaagactctgctgctgtttgtggggctgctgctgacctgggagagtgggcaggtcctgggggaccagacggtctcagacaatgagctccaggaaatgtccaatcagggaagtaagtacgtcaataaggaaattcaaaatgctgtcaacggggtgaaacagataaagactctcatagaaaaaacaaacgaagagcgcaagacactgctcagcaacctagaagaagccaagaagaagaaagaggatgccctaaatgagaccagggaatcagagacaaagctgaaggagctcccaggagtgtgcaatgagaccatgatggccctctgggaagagtgtaagccctgcctgaaacagacctgcatgaagttctacgcacgcgtctgcagaagtggctcaggcctggttggccgccagcttgaggagttcctgaaccagagctcgcccttctacttctggatgaatggtgaccgcatcgactccctgctggagaacgaccggcagcagacgcacatgctggatgtcatgcaggaccacttcagccgcgcgtccagcatcatagacgagctcttccaggacaggttcttcacccgggagccccaggatacctaccactacctgcccttcagcctgccccaccggaggcctcacttcttctttcccaagtcccgcatcgtccgcagcttgatgcccttctctccgtacgagcccctgaacttccacgccatgttccagcccttccttgagatgatacacgaggctcagcaggccatggacatccacttccatagcccggccttccagcacccgccaacagaattcatacgagaaggcgacgatgaccggactgtgtgccgggagatccgccacaactccacgggctgcctgcggatgaaggaccagtgtgacaagtgccgggagatcttgtctgtggactgttccaccaacaacccctcccaggctaagctgcggcgggagctcgacgaatccctccaggtcgctgagaggttgaccaggaaatacaacgagctgctaaagtcctaccagtggaagatgctcaacacctcctccttgctggagcagctgaacgagcagtttaactgggtgtcccggctggcaaacctcacgcaaggcgaagaccagtactatctgcgggtcaccacggtggcttcccacacttctgactcggacgttccttccggtgtcactgaggtggtcgtgaagctctttgactctgatcccatcactgtgacggtccctgtagaagtctccaggaagaaccctaaatttatggagaccgtggcggagaaagcgctgcaggaataccgcaaaaagcaccgggaggagtgagatgtggatgttgcttttgcacctacgggggcatctgagtccagctccccccaagatgagctgcagccccccagagagagctctgcacgtcaccaagtaaccaggccccagcctccaggcccccaactccgcccagcctctccccgctctggatcctgcactctaacactcgactctgctgctcatgggaagaacagaattgctcctgcatgcaactaattcaataaaactgtcttgtgagctgatcgcttggagggtcctctttttatgttgagttgctgcttcccggcatgccttcattttgctatggggggcaggcaggggggatggaaaataagtagaaacaaaaaagcagtggctaagatggtatagggactgtcataccagtgaagaataaaagggtgaagaataaaagggatatgatgacaaggtt

SEQ ID NO: 290253 - DNA, 737 bp, Artificial Sequence
  derived and/or modified sequence
gatggattcggtgtgaagggctggctgctgttgcctccggctcttgaaagtcaagttcaggtggtgctgagactccctgggggctgcagcgctgtgaggcgtgcaaagactccagaattggaggcatgatgaagactctgctgctgtttgtggggctgctgctgacctgggagagtgggcaggtcctgggggaccagacggtctcagacaatgagctccaggaaatgtccaatcagggaagtaagtacgtcaataaggaaattcaaaatgctgtcaacggggtgaaacagataaagactctcatagaaaaaacaaacgaagagcgcaagacactgctcagcaacctagaagaagccaagaagaagaaagaggatgccctaaatgagaccagggaatcagagacaaagctgaaggagctcccaggagtgtgcaatgagaccatgatggccctctgggaagagtgtaagccctgcctgaaacagacctgcatgaagttctacgcacgcgtctgcagaagtggctcaggcctggttggccgccagcttgaggagttcctgaaccagagctcgcccttctacttctggatgaatggtgaccgcatcgactccctgctggagaacgaccggcagcagacgcacatgctggatgtcatgcaggaccacttcagccgcgcgtccagcatcatagacgagctcttccaggacaggttcttcacccgggagccccaggatacctac

SEQ ID NO: 290254 - DNA, 2381 bp, Artificial Sequence
  derived and/or modified sequence
catccttccaaagggactttctctgggaagcctgctcctcgggccactgcgaaccctctctactctccgaagggaattgtccttcctggcttccactacttccacccctgaatgcacaggcagcccggcccaagtctcccactagggatgcagatggattcggtgtgaagggctggctgctgttgcctccggctcttgaaagtcaagttcaggtggtgctgagactccctgggggctgcagcgctgtggtgaatggggagcgtctgctggggtgaaggtttaggtgcacattgcagaggacgtggctggtctctgggatgcagtccctctgtggaggtggcatggggagggacggatgcatgacctaaggggggtattttcagtgtctgacatgatcgataccactctggacaaggaggccaggatgcagaaagcctgtgtgcctcgctgattgtcggggaggatgtggcttggacaagagcctggttcctccgatgccagggttcttgtttcttccactcaacattgctgtcctgcagtccctccctccctgcacctcctgccttcgctttcattcgaggtgtccatggcaagtctggtcatttccccccatttcctcaggaataaaagtgcagcagtgcctgctgtggggacagctgagggcagtgaggccctggggagctgctgcaggcagcaggtgggcgggacgccagcaggctgtctagctgttcccatgatggtctcctgttctctgcagaggcgtgcaaagactccagaattggaggcatgatgaagactctgctgctgtttgtggggctgctgctgacctgggagagtgggcaggtcctgggggaccagacggtctcagacaatgagctccaggaaatgtccaatcagggaagtaagtacgtcaataaggaaattcaaaatgctgtcaacggggtgaaacagataaagactctcatagaaaaaacaaacgaagagcgcaagacactgctcagcaacctagaagaagccaagaagaagaaagaggatgccctaaatgagaccagggaatcagagacaaagctgaaggagctcccaggagtgtgcaatgagaccatgatggccctctgggaagagtgtaagccctgcctgaaacagacctgcatgaagttctacgcacgcgtctgcagaagtggctcaggcctggttggccgccagcttgaggagttcctgaaccagagctcgcccttctacttctggatgaatggtgaccgcatcgactccctgctggagaacgaccggcagcagacgcacatgctggatgtcatgcaggaccacttcagccgcgcgtccagcatcatagacgagctcttccaggacaggttcttcacccgggagccccaggatacctaccactacctgcccttcagcctgccccaccggaggcctcacttcttctttcccaagtcccgcatcgtccgcagcttgatgcccttctctccgtacgagcccctgaacttccacgccatgttccagcccttccttgagatgatacacgaggctcagcaggccatggacatccacttccatagcccggccttccagcacccgccaacagaattcatacgagaaggcgacgatgaccggactgtgtgccgggagatccgccacaactccacgggctgcctgcggatgaaggaccagtgtgacaagtgccgggagatcttgtctgtggactgttccaccaacaacccctcccaggctaagctgcggcgggagctcgacgaatccctccaggtcgctgagaggttgaccaggaaatacaacgagctgctaaagtcctaccagtggaagatgctcaacacctcctccttgctggagcagctgaacgagcagtttaactgggtgtcccggctggcaaacctcacgcaaggcgaagaccagtactatctgcgggtcaccacggtggcttcccacacttctgactcggacgttccttccggtgtcactgaggtggtcgtgaagctctttgactctgatcccatcactgtgacggtccctgtagaagtctccaggaagaaccctaaatttatggagaccgtggcggagaaagcgctgcaggaataccgcaaaaagcaccgggaggagtgagatgtggatgttgcttttgcacctacgggggcatctgagtccagctccccccaagatgagctgcagccccccagagagagctctgcacgtcaccaagtaaccaggccccagcctccaggcccccaactccgcccagcctctccccgctctggatcctgcactctaacactcgactctgctgctcatgggaagaacagaattgctcctgcatgcaactaattcaataaaactgtcttgtgagctga

SEQ ID NO: 290255 - DNA, 878 bp, Artificial Sequence
  derived and/or modified sequence
caggaggagcgcgcgggcacagggtgccgctgaccgaggcgtgcaaagactccagaattggaggcatgatgaagactctgctgctgtttgtggggctgctgctgacctgggagagtgggcaggtcctgggggaccagacggtctcagacaatgagctccaggaaatgtccaatcagggaagtaagtacgtcaataaggaaattcaaaatgctgtcaacggggtgaaacagataaagactctcatagaaaaaacaaacgaagagcgcaagacactgctcagcaacctagaagaagccaagaagaagaaagaggatgccctaaatgagaccagggaatcagagacaaagctgaaggagctcccaggagtgtgcaatgagaccatgatggccctctgggaagagtgtaagccctgcctgaaacagacctgcatgaagttctacgcacgcgtctgcagaagtggctcaggcctggttggccgccagcttgaggagttcctgaaccagagctcgcccttctacttctggatgaatggtgaccgcatcgactccctgctggagaacgaccggcagcagacgcacatgctggatgtcatgcaggaccacttcagccgcgcgtccagcatcatagacgagctcttccaggacagcttgatgcccttctctccgtacgagcccctgaacttccacgccatgttccagcccttccttgagatgatacacgaggctcagcaggccatggacatccacttccatagcccggccttccagcacccgccaacagaattcatacgagaaggcgacgatgaccggactgtgtgccgggagatccgccacaactccacgggctgcctgcggatgaaggaccagtgtgacaagtgc

SEQ ID NO: 290256 - DNA, 2836 bp, Artificial Sequence
  derived and/or modified sequence
tctttgcgcctgattacttctcatgagaggcactccttgttaatgtgctactgagtgtccagatgggcctgctgggctgagcgggctttggatgtgaaccatttcaggaaggggaaccccatcgtcctgttggttctgtgatggcaaatggaggcgtgcaaagactccagaattggaggcatgatgaagactctgctgctgtttgtggggctgctgctgacctgggagagtgggcaggtcctgggggaccagacggtctcagacaatgagctccaggaaatgtccaatcagggaagtaagtacgtcaataaggaaattcaaaatgctgtcaacggggtgaaacagataaagactctcatagaaaaaacaaacgaagagcgcaagacactgctcagcaacctagaagaagccaagaagaagaaagaggatgccctaaatgagaccagggaatcagagacaaagctgaaggagctcccaggagtgtgcaatgagaccatgatggccctctgggaagagtgtaagccctgcctgaaacagacctgcatgaagttctacgcacgcgtctgcagaagtggctcaggcctggttggccgccagcttgaggagttcctgaaccagagctcgcccttctacttctggatgaatggtgaccgcatcgactccctgctggagaacgaccggcagcagacgcacatgctggatgtcatgcaggaccacttcagccgcgcgtccagcatcatagacgagctcttccaggacaggttcttcacccgggagccccaggatacctaccactacctgcccttcagcctgccccaccggaggcctcacttcttctttcccaagtcccgcatcgtccgcagcttgatgcccttctctccgtacgagcccctgaacttccacgccatgttccagcccttccttgagatgatacacgaggctcagcaggccatggacatccacttccatagcccggccttccagcacccgccaacagaattcatacgagaaggcgacgatgaccggactgtgtgccgggagatccgccacaactccacgggctgcctgcggatgaaggaccagtgtgacaagtgccgggagatcttgtctgtggactgttccaccaacaacccctcccaggctaagctgcggcgggagctcgacgaatccctccaggtcgctgagaggttgaccaggaaatacaacgagctgctaaagtcctaccagtggaagatgctcaacacctcctccttgctggagcagctgaacgagcagtttaactgggtgtcccggctggcaaacctcacgcaaggcgaagaccagtactatctgcgggtcaccacggtggcttcccacacttctgactcggacgttccttccggtgtcactgaggtggtcgtgaagctctttgactctgatcccatcactgtgacggtccctgtagaagtctccaggaagaaccctaaatttatggagaccgtggcggagaaagcgctgcaggaataccgcaaaaagcaccgggaggagtgagatgtggatgttgcttttgcacctacgggggcatctgagtccagctccccccaagatgagctgcagccccccagagagagctctgcacgtcaccaagtaaccaggccccagcctccaggcccccaactccgcccagcctctccccgctctggatcctgcactctaacactcgactctgctgctcatgggaagaacagaattgctcctgcatgcaactaattcaataaaactgtcttgtgagctgatcgcttggagggtcctctttttatgttgagttgctgcttcccggcatgccttcattttgctatggggggcaggcaggggggatggaaaataagtagaaacaaaaaagcagtggctaagatggtatagggactgtcataccagtgaagaataaaagggtgaagaataaaagggatatgatgacaaggttgatccacttcaagaattgcttgctttcaggaagagagatgtgtttcaacaagccaactaaaatatattgctgcaaatggaagcttttctgttctattataaaactgtcgatgtattctgaccaaggtgcgacaatctcctaaaggaatacactgaaagttaaggagaagaatcagtaagtgtaaggtgtacttggtattataatgcataattgatgttttcgttatgaaaacatttggtgcccagaagtccaaattatcagttttatttgtaagagctattgcttttgcagcggttttatttgtaaaagctgttgatttcgagttgtaagagctcagcatcccaggggcatcttcttgactgtggcatttcctgtccaccgccggtttatatgatcttcatacctttccctggaccacaggcgtttctcggcttttagtctgaaccatagctgggctgcagtaccctacgctgccagcaggtggccatgactacccgtggtaccaatctcagtcttaaagctcaggcttttcgttcattaacattctctgatagaattctggtcatcagatgtactgcaatggaacaaaactcatctggctgcatcccaggtgtgtagcaaagtccacatgtaaatttatagcttagaatattcttaagtcactgtcccttgtctctctttgaagttataaacaacaaacttaaagcttagcttatgtccaaggtaagtattttagcatggctgtcaaggaaattcagagtaaagtcagtgtgattcacttaatgatatacattaattagaattatggggtcagaggtatttgcttaagtgatcataattgtaaagtatatgtcacattgtcacattaatgtc

SEQ ID NO: 290257 - DNA, 2841 bp, Artificial Sequence
  derived and/or modified sequence
ctttccgcggcattctttgggcgtgagtcatgcaggtttgcagccagccccaaagggggtgtgtgcgcgagcagagcgctataaatacggcgcctcccagtgcccacaacgcggcgtcgccaggaggagcgcgcgggcacagggtgccgctgaccgaggcgtgcaaagactccagaattggaggcatgatgaagactctgctgctgtttgtggggctgctgctgacctgggagagtgggcaggtcctgggggaccagacggtctcagacaatgagctccaggaaatgtccaatcagggaagtaagtacgtcaataaggaaattcaaaatgctgtcaacggggtgaaacagataaagactctcatagaaaaaacaaacgaagagcgcaagacactgctcagcaacctagaagaagccaagaagaagaaagaggatgccctaaatgagaccagggaatcagagacaaagctgaaggagctcccaggagtgtgcaatgagaccatgatggccctctgggaagagtgtaagccctgcctgaaacagacctgcatgaagttctacgcacgcgtctgcagaagtggctcaggcctggttggccgccagcttgaggagttcctgaaccagagctcgcccttctacttctggatgaatggtgaccgcatcgactccctgctggagaacgaccggcagcagacgcacatgctggatgtcatgcaggaccacttcagccgcgcgtccagcatcatagacgagctcttccaggacaggttcttcacccgggagccccaggatacctaccactacctgcccttcagcctgccccaccggaggcctcacttcttctttcccaagtcccgcatcgtccgcagcttgatgcccttctctccgtacgagcccctgaacttccacgccatgttccagcccttccttgagatgatacacgaggctcagcaggccatggacatccacttccatagcccggccttccagcacccgccaacagaattcatacgagaaggcgacgatgaccggactgtgtgccgggagatccgccacaactccacgggctgcctgcggatgaaggaccagtgtgacaagtgccgggagatcttgtctgtggactgttccaccaacaacccctcccaggctaagctgcggcgggagctcgacgaatccctccaggtcgctgagaggttgaccaggaaatacaacgagctgctaaagtcctaccagtggaagatgctcaacacctcctccttgctggagcagctgaacgagcagtttaactgggtgtcccggctggcaaacctcacgcaaggcgaagaccagtactatctgcgggtcaccacggtggcttcccacacttctgactcggacgttccttccggtgtcactgaggtggtcgtgaagctctttgactctgatcccatcactgtgacggtccctgtagaagtctccaggaagaaccctaaatttatggagaccgtggcggagaaagcgctgcaggaataccgcaaaaagcaccgggaggagtgagatgtggatgttgcttttgcacctacgggggcatctgagtccagctccccccaagatgagctgcagccccccagagagagctctgcacgtcaccaagtaaccaggccccagcctccaggcccccaactccgcccagcctctccccgctctggatcctgcactctaacactcgactctgctgctcatgggaagaacagaattgctcctgcatgcaactaattcaataaaactgtcttgtgagctgatcgcttggagggtcctctttttatgttgagttgctgcttcccggcatgccttcattttgctatggggggcaggcaggggggatggaaaataagtagaaacaaaaaagcagtggctaagatggtatagggactgtcataccagtgaagaataaaagggtgaagaataaaagggatatgatgacaaggttgatccacttcaagaattgcttgctttcaggaagagagatgtgtttcaacaagccaactaaaatatattgctgcaaatggaagcttttctgttctattataaaactgtcgatgtattctgaccaaggtgcgacaatctcctaaaggaatacactgaaagttaaggagaagaatcagtaagtgtaaggtgtacttggtattataatgcataattgatgttttcgttatgaaaacatttggtgcccagaagtccaaattatcagttttatttgtaagagctattgcttttgcagcggttttatttgtaaaagctgttgatttcgagttgtaagagctcagcatcccaggggcatcttcttgactgtggcatttcctgtccaccgccggtttatatgatcttcatacctttccctggaccacaggcgtttctcggcttttagtctgaaccatagctgggctgcagtaccctacgctgccagcaggtggccatgactacccgtggtaccaatctcagtcttaaagctcaggcttttcgttcattaacattctctgatagaattctggtcatcagatgtactgcaatggaacaaaactcatctggctgcatcccaggtgtgtagcaaagtccacatgtaaatttatagcttagaatattcttaagtcactgtcccttgtctctctttgaagttataaacaacaaacttaaagcttagcttatgtccaaggtaagtattttagcatggctgtcaaggaaattcagagtaaagtcagtgtgattcacttaatgatatacattaattagaattatggggtcagaggtatttgcttaagtgatcataattgtaaagtatatgtcacattgtcacattaatgtc

SEQ ID NO: 290258 - DNA, 1039 bp, Artificial Sequence
  derived and/or modified sequence
tctttgcgcctgattacttctcatgagaggcactccttgttaatgtgctactgagtgtccagatgggcctgctgggctgagcgggctttggatgtgaaccatttcaggaaggggaaccccatcgtcctgttggttctgtgatggcaaatggaggcgtgcaaagactccagaattggaggcatgatgaagactctgctgctgtttgtggggctgctgctgacctgggagagtgggcaggtcctgggggaccagacggtctcagacaatgagctccaggaaatgtccaatcagggaagtaagtacgtcaataaggaaattcaaaatgctgtcaacggggtgaaacagataaagactctcatagaaaaaacaaacgaagagcgcaagacactgctcagcaacctagaagaagccaagaagaagaaagaggatgccctaaatgagaccagggaatcagagacaaagctgaaggagctcccaggagtgtgcaatgagaccatgatggccctctgggaagagtgtaagccctgcctgaaacagacctgcatgaagttctacgcacgcgtctgcagaagtggctcaggcctggttggccgccagcttgaggagttcctgaaccagagctcgcccttctacttctggatgaatggtgaccgcatcgactccctgctggagaacgaccggcagcagacgcacatgctggatgtcatgcaggaccacttcagccgcgcgtccagcatcatagacgagctcttccaggacaggttcttcacccgggagccccaggatacctaccactacctgcccttcagcctgccccaccggaggcctcacttcttctttcccaagtcccgcatcgtccgcagcttgatgcccttctctccgtacgagcccctgaacttccacgccatgttccagcccttccttgagatgatacacgaggctcagcaggccatggacatccacttccatagcccggccttccagcacccgccaacagaattcatacgagaaggcgacgatgaccggactgtgtgccggg

SEQ ID NO: 290259 - DNA, 1383 bp, Artificial Sequence
  derived and/or modified sequence
atggaggcctgcaaggacagcagaatcggcggcatgatgaagaccctgctgctgttcgtgggcctgctgctgacctgggagagcggccaggtgctgggcgaccagaccgtgagcgacaacgagctgcaggagatgagcaaccagggcagcaagtacgtgaacaaggagatccagaacgccgtgaacggcgtgaagcagatcaagaccctgatcgagaagaccaacgaggagagaaagaccctgctgagcaacctggaggaggccaagaagaagaaggaggacgccctgaacgagaccagagagagcgagaccaagctgaaggagctgcccggcgtgtgcaacgagaccatgatggccctgtgggaggagtgcaagccctgcctgaagcagacctgcatgaagttctacgccagagtgtgcagaagcggcagcggcctggtgggcagacagctggaggagttcctgaaccagagcagccccttctacttctggatgaacggcgacagaatcgacagcctgctggagaacgacagacagcagacccacatgctggacgtgatgcaggaccacttcagcagagccagcagcatcatcgacgagctgttccaggacagattcttcaccagagagccccaggacacctaccactacctgcccttcagcctgccccacagaagaccccacttcttcttccccaagagcagaatcgtgagaagcctgatgcccttcagcccctacgagcccctgaacttccacgccatgttccagcccttcctggagatgatccacgaggcccagcaggccatggacatccacttccacagccccgccttccagcacccccccaccgagttcatcagagagggcgacgacgacagaaccgtgtgcagagagatcagacacaacagcaccggctgcctgagaatgaaggaccagtgcgacaagtgcagagagatcctgagcgtggactgcagcaccaacaaccccagccaggccaagctgagaagagagctggacgagagcctgcaggtggccgagagactgaccagaaagtacaacgagctgctgaagagctaccagtggaagatgctgaacaccagcagcctgctggagcagctgaacgagcagttcaactgggtgagcagactggccaacctgacccagggcgaggaccagtactacctgagagtgaccaccgtggccagccacaccagcgacagcgacgtgcccagcggcgtgaccgaggtggtggtgaagctgttcgacagcgaccccatcaccgtgaccgtgcccgtggaggtgagcagaaagaaccccaagttcatggagaccgtggccgagaaggccctgcaggagtacagaaagaagcacagagaggagtag

SEQ ID NO: 290260 - DNA, 1506 bp, Artificial Sequence
  derived and/or modified sequence
atgcaggtgtgcagccagccccagagaggctgcgtgagagagcagagcgccatcaacaccgccccccccagcgcccacaacgccgccagccccggcggcgccagaggccacagagtgcccctgaccgaggcctgcaaggacagcagaatcggcggcatgatgaagaccctgctgctgttcgtgggcctgctgctgacctgggagagcggccaggtgctgggcgaccagaccgtgagcgacaacgagctgcaggagatgagcaaccagggcagcaagtacgtgaacaaggagatccagaacgccgtgaacggcgtgaagcagatcaagaccctgatcgagaagaccaacgaggagagaaagaccctgctgagcaacctggaggaggccaagaagaagaaggaggacgccctgaacgagaccagagagagcgagaccaagctgaaggagctgcccggcgtgtgcaacgagaccatgatggccctgtgggaggagtgcaagccctgcctgaagcagacctgcatgaagttctacgccagagtgtgcagaagcggcagcggcctggtgggcagacagctggaggagttcctgaaccagagcagccccttctacttctggatgaacggcgacagaatcgacagcctgctggagaacgacagacagcagacccacatgctggacgtgatgcaggaccacttcagcagagccagcagcatcatcgacgagctgttccaggacagattcttcaccagagagccccaggacacctaccactacctgcccttcagcctgccccacagaagaccccacttcttcttccccaagagcagaatcgtgagaagcctgatgcccttcagcccctacgagcccctgaacttccacgccatgttccagcccttcctggagatgatccacgaggcccagcaggccatggacatccacttccacagccccgccttccagcacccccccaccgagttcatcagagagggcgacgacgacagaaccgtgtgcagagagatcagacacaacagcaccggctgcctgagaatgaaggaccagtgcgacaagtgcagagagatcctgagcgtggactgcagcaccaacaaccccagccaggccaagctgagaagagagctggacgagagcctgcaggtggccgagagactgaccagaaagtacaacgagctgctgaagagctaccagtggaagatgctgaacaccagcagcctgctggagcagctgaacgagcagttcaactgggtgagcagactggccaacctgacccagggcgaggaccagtactacctgagagtgaccaccgtggccagccacaccagcgacagcgacgtgcccagcggcgtgaccgaggtggtggtgaagctgttcgacagcgaccccatcaccgtgaccgtgcccgtggaggtgagcagaaagaaccccaagttcatggagaccgtggccgagaaggccctgcaggagtacagaaagaagcacagagaggagtag

SEQ ID NO: 290261 - DNA, 894 bp, Artificial Sequence
  derived and/or modified sequence
atggaggcctgcaaggacagcagaatcggcggcatgatgaagaccctgctgctgttcgtgggcctgctgctgacctgggagagcggccaggtgctgggcgaccagaccgtgagcgacaacgagctgcaggagatgagcaaccagggcagcaagtacgtgaacaaggagatccagaacgccgtgaacggcgtgaagcagatcaagaccctgatcgagaagaccaacgaggagagaaagaccctgctgagcaacctggaggaggccaagaagaagaaggaggacgccctgaacgagaccagagagagcgagaccaagctgaaggagctgcccggcgtgtgcaacgagaccatgatggccctgtgggaggagtgcaagccctgcctgaagcagacctgcatgaagttctacgccagagtgtgcagaagcggcagcggcctggtgggcagacagctggaggagttcctgaaccagagcagccccttctacttctggatgaacggcgacagaatcgacagcctgctggagaacgacagacagcagacccacatgctggacgtgatgcaggaccacttcagcagagccagcagcatcatcgacgagctgttccaggacagattcttcaccagagagccccaggacacctaccactacctgcccttcagcctgccccacagaagaccccacttcttcttccccaagagcagaatcgtgagaagcctgatgcccttcagcccctacgagcccctgaacttccacgccatgttccagcccttcctggagatgatccacgaggcccagcaggccatggacatccacttccacagccccgccttccagcacccccccaccgagttcatcagagagggcgacgacgacagaaccgtgtgcagatag

SEQ ID NO: 290262 - protein, 185 aa, Artificial Sequence
  derived and/or modified sequence
MSWLFPLTKSASSSAAGSPGGLTSLQQQKQRLIESLRNSHSSIAEIQKDVEYRLPFTINNLTININILLPPQFPQEKPVISVYPPIRHHLMDKQGVYVTSPLVNNFTMHSDLGKIIQSLLDEFWKNPPVLAPTSTAFPYQLEIRWHHPHCLEISLARSSNSLGFSISSSISSTRSKQEYHFFICC

SEQ ID NO: 290263 - DNA, 558 bp, Artificial Sequence
  derived and/or modified sequence
atgagctggctgttccccctgaccaagagcgccagcagcagcgccgccggcagccccggcggcctgaccagcctgcagcagcagaagcagagactgatcgagagcctgagaaacagccacagcagcatcgccgagatccagaaggacgtggagtacagactgcccttcaccatcaacaacctgaccatcaacatcaacatcctgctgcccccccagttcccccaggagaagcccgtgatcagcgtgtacccccccatcagacaccacctgatggacaagcagggcgtgtacgtgaccagccccctggtgaacaacttcaccatgcacagcgacctgggcaagatcatccagagcctgctggacgagttctggaagaacccccccgtgctggcccccaccagcaccgccttcccctaccagctggagatcagatggcaccacccccactgcctggagatcagcctggccagaagcagcaacagcctgggcttcagcatcagcagcagcatcagcagcaccagaagcaagcaggagtaccacttcttcatctgctgctag

SEQ ID NO: 290264 - DNA, 558 bp, Artificial Sequence
  derived and/or modified sequence
atgtcctggctgtttcctctcactaagagcgcctcgagttctgctgcaggtagcccaggcggtctcacctcactgcaacagcagaagcagcgcctgatcgagagtctgagaaacagccatagctccattgccgagatacagaaggacgttgagtaccgacttcccttcacgatcaataatctaactattaatattaatattctgctgccccctcagtttccccaagaaaagcccgtaatatctgtgtacccccctatccgacatcatctcatggacaaacagggggtctatgtgacctccccactggtgaacaattttaccatgcacagcgatctgggcaaaatcatccagagtttgttggatgaattttggaaaaatccacctgtgctagcccccacttccaccgccttcccgtatcagttagaaattagatggcaccacccccactgcctggagatctccctggcacgatcaagcaatagtcttggtttctctattagtagcagtatctcgtctacaagatccaagcaggagtaccactttttcatatgctgctag

SEQ ID NO: 290265 - DNA, 558 bp, Artificial Sequence
  derived and/or modified sequence
atgtcctggctgttccccctgaccaagagcgccagcagcagcgctgctggcagccctgggggcctgaccagcctgcagcagcagaagcagaggctgattgagagcctgaggaacagccacagcagcattgctgagatccagaaggatgtggagtaccgcctgcccttcaccatcaacaacctgaccatcaacatcaacatcctgctgcccccccagttcccccaggagaagcctgtgatctctgtgtacccacccatccgccaccacctgatggacaagcagggcgtgtatgtgaccagccccctggtgaacaacttcaccatgcacagcgacctgggcaagatcatccagagcctgctggatgagttctggaagaacccccctgtgctggcccccaccagcacagccttcccctaccagctggagatccgctggcaccacccccactgcctggagatcagcctggcccggagcagcaacagcctgggcttcagcatcagcagcagcatcagcagcaccaggagcaagcaggagtaccacttcttcatctgctgctag

SEQ ID NO: 290266 - DNA, 558 bp, Artificial Sequence
  derived and/or modified sequence
atgagctggctgttccccctgaccaagagcgccagcagcagcgccgccgggtctcccggcggactgacatccctccagcagcagaagcaaagactgattgaaagtctgcgtaactctcattctagcatagcggaaattcagaaggatgtcgagtaccggctgcccttcactattaacaatcttactatcaacattaatattttactacctccccagttcccgcaggagaagccggttatctctgtctaccctcccatacggcatcatctgatggataaacagggcgtctacgtgacgtcccccttagtaaataatttcactatgcacagtgacctcggcaagattattcagagtctgctcgacgagttttggaagaacccacctgtcctggccccaacctcaacagcatttccctatcagctggaaatccgttggcaccacccccattgcctcgaaatttccctggcccgctctagcaatagtttggggttttccattagcagcagtatttcatcgaccaggtccaaacaggaatatcacttcttcatatgctgctag

SEQ ID NO: 290267 - DNA, 558 bp, Artificial Sequence
  derived and/or modified sequence
atgtcatggctcttccccctgactaagagcgcttcttcatccgctgctggtagccccggtggactcacttctttgcaacagcaaaaacaacgcctgattgagagtctacgcaactcccattcctccattgcagaaattcaaaaagacgtggaatatcgtctgccattcaccattaataacctgaccatcaacataaatattctcctgccaccccagtttccacaagagaaaccggtgattagcgtctacccccctatcaggcaccacctaatggataaacagggggtgtacgtaacgtcacctctggttaataactttacaatgcactctgacctaggcaaaatcattcagtcactcctagacgagttttggaaaaacccgccagttctggcccctacctccacagctttcccctatcagctagagataagatggcaccacccacattgtcttgaaatctctctggcgaggtccagcaattcactggggttttccatctcaagttcaattagttcaaccagaagcaagcaggaatatcatttctttatctgctgctag

SEQ ID NO: 290268 - DNA, 911 bp, Artificial Sequence
  derived and/or modified sequence
gcagagggggcggagagcgcccccgggggcggggcacgcaagtgacggcggcgcgggtggtggagcgctgggcggccaggctccctggctggccggtttgggcgtctgggccgtgaaggtgggacctcctgttccgggccgcaagtttccctctccagccgcccgccgttcgtagcatgtcccccagaactcggggagcgcaggcaggacaggcttagagaagacgcggtccccagcgcttgggccacggacgtcccaccccgctcctctgtcgctggagaaccgccgggccgagccactgggagaagcaggccagagccttccagggcctccggcccgtggacccgaggaggatgagctggctttttcccctgaccaagagcgcctcctcctccgcggctgggtcccccggtggcctcaccagcctccagcagcagaagcagcgcctgatcgagtccctccggaactcacactccagtatagccgaaatacagaaagatgtggaatacagattgccattcaccataaacaacctgacaattaacattaatatattgcttcctccacagtttcctcaggaaaaaccagtgatcagtgtttatccaccaatacgacatcacttaatggataaacaaggagtgtatgttacctctccattagtaaacaattttacaatgcactcagatcttggaaaaattattcagagtctgttggatgagttttggaagaatcctccagttttagctcctacttcaacagcatttccttaccagctagaaatcaggtggcaccatccgcactgcctggaaatctccttagctagatcatccaattcactagggttttccatttcttcctccatatcctccacaagaagcaaacaggagtatcacttctttatctgttgctga

SEQ ID NO: 290269 - DNA, 1989 bp, Artificial Sequence
  derived and/or modified sequence
atgtggagctggaaatgtctgctgttctgggcggtcttggtgaccgctacactctgtaccgctcgacccagccctacgttgcccgaacaggctcagccgtggggtgcccccgttgaggtcgagagttttctggttcatcctggggatctcctgcaactgcgatgtcgcctgcgtgacgatgtccagtctatcaattggctcagagacggggtgcagttggccgaaagtaatcggacgagaatcacaggggaagaggtcgaggtgcaggattcagtgccagcagactcaggcctgtacgcatgcgtgacaagttctcccagtgggtctgatactacatacttctccgtgaacgttagcgacgcacttccatcttctgaggacgatgatgatgatgacgatagcagctcggaagagaaggaaaccgacaacaccaaacccaataggatgcctgttgccccctactggacaagtcccgagaagatggagaagaaactgcacgcggtccccgcagccaaaaccgtgaagtttaagtgtccctcgagtggcacacctaatcctaccctccgatggctgaagaatgggaaagaattcaagcccgatcaccgcatcgggggctacaaagtgagatacgccacttggtctatcataatggattcagttgtgccctcagataaagggaactacacatgtatcgtggagaatgagtatgggtctattaatcatacataccagcttgacgtggtcgaacggtccccccatcgcccgatcctgcaggcgggattgccggccaataagaccgtggccctgggaagcaacgtagaatttatgtgcaaggtttatagcgatccccagcctcacatccagtggctgaagcatattgaagtaaacggctccaaaatcggcccggataatctgccttatgtacagatcctgaaaaccgcgggggtgaacacgactgacaaagaaatggaagttctacatttgcggaatgtctcgttcgaggacgctggcgagtatacttgtctagcagggaacagtatcggcctctcccaccactcggcgtggctcactgtgctagaagcccttgaggagaggcctgccgtcatgacatcaccactttatctggaaatcatcatctactgcaccggggccttccttatcagttgcatggttggatctgttattgtgtacaaaatgaaaagcggcaccaagaagagcgacttccacagccagatggccgttcacaaacttgctaagtcgatcccccttagacgccaggtaaccgtctcagccgactcatctgcatcaatgaactccggagtcttgcttgtccggccatcgagactgtcgtctagtggaactccaatgctggccggtgtgtccgagtatgaactgcctgaggatccccggtgggaactgcctagagatcgcctggtcctcggcaaacctctgggcgaaggctgtttcggccaggtcgttctcgctgaggcaataggcctggacaaggacaagcctaaccgcgtaacgaaagtcgcggtcaaaatgttgaagtccgatgccactgaaaaagacctgagcgacttgatcagcgaaatggagatgatgaagatgatcggcaaacacaaaaatatcattaacctcctcggggcttgtacccaggacggccctctttatgtgattgttgaatatgctagcaagggtaaccttagagaataccttcaggccagacgaccacctgggctggagtactgctataatccttcgcacaacccagaggagcaactctcctcaaaagatttggtatcttgcgcataccaggttgcaagagggatggagtatctggcgagcaaaaaagtttggaaccttaaggcgcctttggtccacaccccaaggccaggttcccaggagtgtccaggcgatcgcggtcagtgtgacgaagactcacgactgtggccaagaactggccacagcccccaccggctgttgtag

SEQ ID NO: 290270 - DNA, 1989 bp, Artificial Sequence
  derived and/or modified sequence
atgtggagctggaagtgcctgctcttctgggccgtgctggtgacagccaccctgtgcacagcccggcccagccccaccctgcctgagcaggcccagccctggggcgcccctgtggaggtggagagcttcctggtgcaccctggggacctgctgcagctgcgctgccgcctgagagatgatgtgcagagcatcaactggctgagagatggagtgcagctggccgagagcaacagaacccgcatcaccggggaggaggtggaggtgcaggacagcgtgcctgctgacagcggcctgtatgcctgtgtgaccagcagccccagcggcagtgacaccacctacttctctgtgaatgtgtctgatgccctgcccagcagtgaagatgatgatgatgatgatgacagcagcagcgaggagaaggagacagacaacaccaagcccaacaggatgcctgtggccccctactggaccagccctgagaagatggagaagaagctgcatgctgtgcctgctgccaagacagtgaagttcaagtgccccagcagcggcacccccaaccccaccctgcgctggctgaagaatggcaaggagttcaagccagaccacagaattggaggctacaaggtgcgctatgccacctggagcatcatcatggattctgtggtgcccagcgacaagggcaactacacctgcatcgtggagaatgaatatggcagcatcaaccacacctaccagctggatgtggtggagaggagcccccaccggcccatcctgcaggccggcctgcctgccaacaagacagtggccctgggcagcaatgtggagttcatgtgcaaggtgtacagcgacccccagccccacatccagtggctgaagcacatcgaggtgaatggcagcaagattggccctgacaacctgccctacgtgcagatcctgaagacagctggggtgaacaccacagacaaggagatggaggtgctgcacctgagaaatgtgtcctttgaagatgctggggagtacacctgcctggccggcaacagcatcggcctgagccaccacagcgcctggctgactgtgctggaggccctggaggagaggcctgctgtgatgaccagccccctgtacctggagatcatcatctactgcaccggggccttcctgatcagctgcatggtgggctctgtgattgtgtacaagatgaagagcggcaccaagaagagtgacttccacagccagatggctgtgcacaagctggccaagagcatccccctgcggcggcaggtgacagtgtctgctgacagcagcgcctccatgaacagcggcgtgctgctggtgcggcccagccggctgagcagcagcggcacccccatgctggccggcgtgtctgaatatgagctgcctgaggacccccgctgggagctgccccgggaccggctggtgctgggcaagcccctgggggagggctgcttcggccaggtggtgctggccgaggccatcggcctggacaaggacaagcccaacagagtgaccaaggtggccgtgaagatgctgaagagtgatgccacagagaaggacctgagtgacctgatcagcgagatggagatgatgaagatgattggcaagcacaagaacatcatcaacctgctgggcgcctgcacccaggacggccccctgtatgtgattgtggagtatgccagcaagggcaacctgcgggagtacctgcaggcccggcggcccccaggcctggagtactgctacaaccccagccacaaccctgaggagcagctgagcagcaaggacctggtgtcctgtgcctaccaggtggcccggggcatggagtacctggccagcaagaaggtgtggaacctgaaggcccccctggtgcacaccccccggcccggcagccaggagtgccctggggaccggggccagtgtgatgaggacagccggctgtggcccaggacaggccacagcccccaccggctgctgtag

SEQ ID NO: 290271 - DNA, 1989 bp, Artificial Sequence
  derived and/or modified sequence
atgtggagctggaagtgcctgctgttctgggccgtgctggtgaccgccaccttatgcaccgcccgaccctcccctacactcccagaacaggcccagccatggggggctccagtggaagttgagtctttcctggtccaccctggcgatctgctccaattacgctgccgcctgcgggatgatgtgcagagcattaactggctgcgcgacggcgtccagctggctgaatcgaaccgaactcggattactggagaggaggtggaggtgcaggacagcgttccagccgactccgggctgtacgcatgcgtaacatctagcccgagtggcagtgatacgacatacttcagtgtgaatgtcagcgatgcccttccctcttcggaagatgacgatgacgatgatgacagtagttccgaggagaaggagaccgacaacacaaagcccaaccgtatgccagttgccccttactggacctctcctgaaaagatggagaaaaaactccacgccgtacccgctgcaaagaccgttaaatttaagtgtcccagcagtggaaccccgaaccctacattacggtggcttaagaatggcaaagagtttaagccggaccataggatcggtggatataaagtgcgctacgcaacgtggagcattattatggactccgtagtaccttccgacaaagggaattacacatgtatcgtggagaacgagtatggctccatcaatcacacgtatcagctcgatgtagttgagagaagtccgcatagacccattctgcaggctggactgcctgctaataagaccgtcgcgctgggcagcaacgtggagtttatgtgtaaagtgtacagtgatccgcaaccgcatatccagtggctgaagcacattgaagttaacggctccaagatcggacctgataatctaccctatgtgcaaatactcaaaaccgctggcgttaacacaacagataaggaaatggaagtgctgcatctgcgaaatgtctcattcgaagatgcaggggagtacacttgcctggctgggaatagtatcggactgagtcaccactctgcatggctgaccgtactggaggcgctggaggaacggccagcagtgatgacgtcgcccttgtatcttgagattataatttactgtaccggggcatttctcattagctgcatggtcggaagcgttattgtctacaagatgaagtccgggacaaagaagtccgatttccacagtcagatggccgtgcataaactggcaaagagcatcccgctgaggaggcaggtgacagtttctgcggatagctctgcctccatgaactcaggagttctcttggtgcgtccctcaaggctgtcgtccagcgggacgcctatgttggcaggcgtcagcgagtacgagctccctgaggaccctaggtgggaattgccccgcgatcgcctggttctggggaaaccactgggggaagggtgcttcgggcaggtagtcctggctgaggccattggattagacaaagacaagccaaatagggtcaccaaggtggcagtgaaaatgttaaagtcagacgcgaccgaaaaagacctgtcggatctgataagcgagatggaaatgatgaagatgatcggaaagcataagaatatcattaacctgctgggtgcatgtacgcaggatggccccttgtacgtgatagttgagtacgcatccaaaggaaatctccgggaatatctccaagcacgtcggcctccaggcttagagtactgctacaatcctagtcacaatcctgaggagcaactttcttccaaagatctcgtgtcgtgtgcttaccaggtggctcgggggatggagtatctggcgtcaaagaaagtttggaaccttaaagctccccttgtacacacccctaggcccggatcccaggagtgtcctggcgatcgtggccagtgtgacgaagattcccggttgtggccgaggactgggcatagccctcataggctactatag

SEQ ID NO: 290272 - DNA, 1989 bp, Artificial Sequence
  derived and/or modified sequence
atgtggagctggaaatgcctgctattctgggctgtccttgttaccgccacactgtgcaccgctcgcccaagtcccacactgccggaacaggcccagccttggggagccccagtggaggtggaatcatttctggtccatccgggagaccttctgcagctccgctgtcgtctccgggacgatgtgcagtccataaactggctaagggacggagtgcagttagctgagtctaatcggacgcgaattactggggaagaagtggaagttcaagactccgtgccggctgactccggtctgtacgcatgtgttactagtagcccctcagggtccgatactacttacttttcagtcaacgtgtccgacgccctgccatcttctgaggacgatgatgacgatgacgacagtagcagcgaggagaaggagaccgataacacgaagcccaatcggatgcctgtggccccatactggacatcacccgagaagatggagaagaagctgcacgccgtacccgctgccaagactgtcaagtttaaatgcccatcttccggaactcctaaccccacactgagatggctgaaaaatggtaaagagttcaagcctgatcatcggatcggcggttataaggtgagatatgccacttggagcataattatggacagtgttgtcccctcagacaaaggcaactacacatgcatagtggaaaatgaatatggaagtatcaaccacacgtaccagctggacgttgtggagcgttctccacacagaccaattctgcaggctggcttgcctgcgaataaaactgtggcacttgggtctaacgttgagttcatgtgtaaagtctatagcgatcctcagccccacatccagtggcttaagcacatcgaggttaacggttcaaagatcggccctgataacttaccgtacgttcagattttgaaaaccgctggtgttaatactaccgataaagagatggaagtgcttcatttgagaaacgtaagcttcgaggatgccggtgagtatacctgtctagccggaaacagcattgggcttagccatcacagcgcatggttgactgttttagaagccttggaggaacgcccagccgtcatgacatcacctttgtatttagagataataatttactgcacaggcgcttttctgatatcctgcatggtaggatctgtgatcgtgtataaaatgaagtcaggcacgaaaaaaagcgacttccactcccagatggccgtccataaacttgccaaatccattccgttgcgccgacaggttaccgtgtctgctgactcgtccgcttctatgaacagcggagtcctgctcgtacggccttccaggctctcttccagtgggactccaatgctcgccggagtaagcgagtacgagctgcctgaggatcctaggtgggaactccctagagatcgcctggtactgggcaagcccctgggagaaggctgtttcggacaggtggttctggctgaagctataggcctcgacaaggacaagccaaaccgggtcaccaaagtcgcggtcaagatgctgaagtctgatgccacagagaaggatttaagcgacctaatcagcgaaatggagatgatgaagatgatagggaagcacaagaacatcataaacctactcggagcctgcacacaggacggccctctgtatgttatcgtggaatatgcaagtaagggcaacctccgtgaatatctgcaggcccgacgccctccaggactcgagtactgctacaatccatctcacaatcctgaggagcaactttctagtaaagatttagtgtcttgcgcttatcaggttgcacgaggaatggaatatctggccagtaagaaagtgtggaatcttaaggcacctttagtacacaccccaagacccggatctcaggaatgtccgggtgatcgaggtcagtgcgatgaggactcccggctgtggcctcgaacagggcatagcccacatagactgctgtag

SEQ ID NO: 290273 - DNA, 1989 bp, Artificial Sequence
  derived and/or modified sequence
atgtggagctggaagtgcctgctgttctgggccgtgctggtgaccgccaccctgtgcaccgccagacccagccccaccctgcccgagcaggcccagccctggggcgcccccgtggaggtggagagcttcctggtgcaccccggcgacctgctgcagctgagatgcagactgagagacgacgtgcagagcatcaactggctgagagacggcgtgcagctggccgagagcaacagaaccagaatcaccggcgaggaggtggaggtgcaggacagcgtgcccgccgacagcggcctgtacgcctgcgtgaccagcagccccagcggcagcgacaccacctacttcagcgtgaacgtgagcgacgccctgcccagcagcgaggacgacgacgacgacgacgacagcagcagcgaggagaaggagaccgacaacaccaagcccaacagaatgcccgtggccccctactggaccagccccgagaagatggagaagaagctgcacgccgtgcccgccgccaagaccgtgaagttcaagtgccccagcagcggcacccccaaccccaccctgagatggctgaagaacggcaaggagttcaagcccgaccacagaatcggcggctacaaggtgagatacgccacctggagcatcatcatggacagcgtggtgcccagcgacaagggcaactacacctgcatcgtggagaacgagtacggcagcatcaaccacacctaccagctggacgtggtggagagaagcccccacagacccatcctgcaggccggcctgcccgccaacaagaccgtggccctgggcagcaacgtggagttcatgtgcaaggtgtacagcgacccccagccccacatccagtggctgaagcacatcgaggtgaacggcagcaagatcggccccgacaacctgccctacgtgcagatcctgaagaccgccggcgtgaacaccaccgacaaggagatggaggtgctgcacctgagaaacgtgagcttcgaggacgccggcgagtacacctgcctggccggcaacagcatcggcctgagccaccacagcgcctggctgaccgtgctggaggccctggaggagagacccgccgtgatgaccagccccctgtacctggagatcatcatctactgcaccggcgccttcctgatcagctgcatggtgggcagcgtgatcgtgtacaagatgaagagcggcaccaagaagagcgacttccacagccagatggccgtgcacaagctggccaagagcatccccctgagaagacaggtgaccgtgagcgccgacagcagcgccagcatgaacagcggcgtgctgctggtgagacccagcagactgagcagcagcggcacccccatgctggccggcgtgagcgagtacgagctgcccgaggaccccagatgggagctgcccagagacagactggtgctgggcaagcccctgggcgagggctgcttcggccaggtggtgctggccgaggccatcggcctggacaaggacaagcccaacagagtgaccaaggtggccgtgaagatgctgaagagcgacgccaccgagaaggacctgagcgacctgatcagcgagatggagatgatgaagatgatcggcaagcacaagaacatcatcaacctgctgggcgcctgcacccaggacggccccctgtacgtgatcgtggagtacgccagcaagggcaacctgagagagtacctgcaggccagaagaccccccggcctggagtactgctacaaccccagccacaaccccgaggagcagctgagcagcaaggacctggtgagctgcgcctaccaggtggccagaggcatggagtacctggccagcaagaaggtgtggaacctgaaggcccccctggtgcacacccccagacccggcagccaggagtgccccggcgacagaggccagtgcgacgaggacagcagactgtggcccagaaccggccacagcccccacagactgctgtag

SEQ ID NO: 290274 - DNA, 1323 bp, Artificial Sequence
  derived and/or modified sequence
atgacctggccagtcaaggacttcaactactccgacccagtcaacgacaacgacatcttgtacttgagaatcccacaaaacaagttgatcaccaccccagtcaaggctttcatgatcacccagaacacctgggttatcccagagagattctcctccgacaccaacccatccctgtccaagccaccaagaccaacctccaagtaccagtcttactacgacccatcttacttgtctaccgacgagcaaaaggacaccttcttgaagggtattatcaagctgttcaagagaatcaacgagagagacatcggtaagaagttgatcaactacttggtcgttggttccccattcatgggtgactcctctaccccagaggacaccttcgacttcaccagacacaccaccaacattgccgtcgagaagttcgagaacggttcctggaaggtcaccaacatcatcaccccatctgttttgatcttcggtccattgccaaacatcttggactacaccgcctccctgaccttgcaaggtcagcaatccaacccatccttcgagggtttcggtaccctgtctattttgaaggtcgctccagagttcttgttgaccttctccgacgtcacctccaaccaatcctccgccgtcttgggtaagtccatcttctgtatggacccagtcatcgctttgatgcacgagttgacccactccctgcaccagttgtacggtattaacatcccatctgacaagagaatcagaccacaggtctctgagggtttcttctcccaagacggtccaaacgttcagttcgaggagttgtacaccttcggtggtttggacgtcgagattatccaaattgagagatcccaattgagagagaaggctttgggtcactacaaggacatcgccaagagactgaacaacatcaacaagaccattccatcttcctggatctccaacattgacaagtacaagaagattttctccgagaagtacaacttcgacaaggacaacaccggtaacttcgtcgttaacatcgacaagttcaactctttgtactccgacttgaccaacgttatgtctgaggttgtctactcctcccaatacaacgtcaagaacagaacccactacttctccagacactacttgccagttttcgctaacatcttggacgacaacatttacaccatcagagacggtttcaacttgaccaacaagggtttcaacatcgagaactccggtcaaaacatcgagagaaacccagccctgcaaaagctgtcctccgagtctgtcgtcgacttgttcaccaaggtctgtttgagattgaccaag

SEQ ID NO: 290275 - protein, 764 aa, Artificial Sequence
  derived and/or modified sequence
  misc_feature (1)..(1): Xaa can be any naturally occurring amino acid
XKASAQASLASKDKTPKSKSKKRNSTQLKSRVKNIRYESASMSSTCEPCKSRNRHSAQTEEPVQAKVFSRKNHEQLEKIIKCNRSTEISSAHARRILQQSNRNACNEAPETGSDFSMFEALRDTIYSEVATLISQNESRPHFLIELFHELQLLNTDYLRQRALYALQDIVSRHISESHEKGENVKSVNSGTWIASNSELTPSESLATTDDETFEKNFERETHKISEQNDADNASVLSVSSNFEPFATDDLGNTVIHLDQALARMREYERMKTEAESNSNMRCTCRIIEDGDGAGAGTTVNNLEETPVIENRSSQQPVSEVSTIPCPRIDTQQLDRQIKAIMKEVIPFLKEHMDEVCSSQLLTSVRRMVLTLTQQNDESKEFVKFFHKQLGSILQDSLAKFAGRKLKDCGEDLLVEISEVLFNELAFFKLMQDLDNNSITVKQRCKRKIEATGVIQSCAKEAKRILEDHGSPAGEIDDEDKDKDETETVKQTQTSEVYDGPKNVRSDISDQEEDEESEGCPVSINLSKAETQALTNYGSGEDENEDEEMEEFEEGPVDVQTSLQANTEATEENEHDEQVLQRDFKKTAESKNVPLEREATSKNDQNNCPVKPCYLNILEDEQPLNSAAHKESPPTVDSTQQPNPLPLRLPEMEPLVPRVKEVKSAQETPESSLAGSPDTESPVLVNDYEAESGNISQKSDEEDFVKVEDLPLKLTIYSEADLRKKMVEEEQKNHLSGEICEMQTEELAGNSETLKEPETVGAQSI

SEQ ID NO: 290276 - DNA, 2172 bp, Artificial Sequence
  derived and/or modified sequence
atgagcagcacatgtgaaccctgcaaatcacgcaacaggcactcagctcagacagaggaaccagttcaggccaaagttttttctagaaagaatcacgaacagcttgagaaaattatcaaatgcaaccggagtacagaaatcagcagtgcacacgctcgcagaattcttcaacagtctaatagaaatgcgtgcaatgaggctcctgagacaggctctgatttctcaatgtttgaggcactccgtgacactatctattccgaagtagctactttgatttcccagaacgagagcaggccccacttcctgattgagctattccacgaattgcagcttttgaatactgattacctacggcagcgagctctgtatgcactgcaggatattgtgagcaggcacatctccgaaagtcacgagaagggagaaaatgtgaagagcgtaaatagcggaacatggattgccagcaactctgaactgacgccaagtgagtcactggccaccactgacgacgagacattcgagaagaactttgagagagaaacccataaaattagtgaacagaacgacgccgacaatgcatctgtgctcagtgtctcatcaaatttcgaaccgtttgcaaccgacgatctaggaaacacagtgatacacttggaccaggcacttgcacgaatgcgggaatacgaacgcatgaaaacagaggcagaatctaactccaatatgcgttgcacttgtaggatcatcgaggatggcgatggtgccggagctggaactaccgttaacaatctcgaggaaactccggtcattgagaatcgtagcagtcagcagcccgtttctgaggtcagcaccatcccctgtccgcggattgatacccagcaactggacagacagatcaaagccatcatgaaggaggttattccattcttgaaggagcatatggatgaagtgtgtagcagccaactccttacttctgtgagacggatggttctgaccctgactcagcagaatgatgaaagcaaggagtttgtgaagttctttcacaaacagctgggaagcatcttacaggatagcctggcaaaatttgctggccggaagctgaaggattgtggtgaggacctgctggtcgaaatcagcgaggtgctcttcaacgaactagcattcttcaagctgatgcaagacctggataataactctattacagtaaagcagcgttgcaaaagaaagattgaggcaacaggcgtgatccagtcttgcgcaaaggaggctaagcgaattttggaggatcatggctcccccgccggcgaaatcgacgatgaagacaaagacaaagatgagactgagaccgtgaagcagactcaaacctctgaggtgtacgacggaccgaaaaacgtgagaagcgacatatccgatcaagaggaagacgaagagagcgagggctgcccagtgtccatcaatttatccaaggccgagactcaggcacttaccaattacgggagcggcgaggacgagaatgaggatgaggaaatggaagaattcgaggaaggccctgtcgacgttcaaactagtcttcaggctaataccgaggctacagaggagaatgagcacgacgaacaggtgctgcaacgggattttaaaaagactgccgagagtaaaaacgtccctcttgagcgcgaggcgacctccaagaacgaccaaaacaattgtcctgtcaaaccctgctatctgaacatactggaggacgaacagcccctgaactccgcagcccataaggaaagtcctcctactgttgatagtactcagcagcctaaccccctgccccttcggctgccagagatggagcccctcgtgcctcgcgtgaaggaggtgaaaagcgcccaggagacgcccgagtcgtcactcgcaggatccccggacactgaatcaccagttctggtcaacgactacgaggccgagagtggtaacatcagccaaaagtccgacgaggaagacttcgtgaaagttgaggacctgcccctcaaactcacaatttatagtgaggccgatcttcgaaaaaaaatggtggaggaagaacagaagaaccacttgtcgggcgaaatttgcgagatgcagaccgaggagctggccggtaacagtgagacactgaaagagccagaaacagtaggagcgcaatccatttag

SEQ ID NO: 290277 - DNA, 2295 bp, Artificial Sequence
  derived and/or modified sequence
tagaaagcttccgcccaggcctctctcgcatccaaggataaaactcccaagtccaaatcaaaaaaaagaaattctacacagctcaagtccagagttaagaatatcaggtatgagtccgcctctatgagctccacttgtgaaccatgcaaaagcagaaatcggcacagcgcgcagaccgaagagccagttcaggcgaaagtgttttcccggaagaaccacgaacaactggagaaaattattaagtgcaatagaagcaccgagatttcatcagcccatgcccgacgcatcctacagcagtcaaatcgaaacgcatgcaacgaagcacccgagaccgggagcgactttagtatgttcgaggctttgagagataccatctactctgaagttgctactctgatttcacagaatgagagtcggccacactttctaatagagttgtttcacgagcttcagcttctgaataccgattatctgagacagagagcattatatgcccttcaggatattgtatccaggcacattagcgaaagtcacgaaaagggcgaaaatgtgaaatctgtgaattccggcacatggatcgcttccaactcagagttaactcccagtgaatccctggccacgacagatgacgaaactttcgagaaaaattttgagagggaaacccacaaaatcagtgagcaaaatgatgcagacaatgcatccgtgctgtccgtgtcgtctaactttgaaccctttgctacggatgacctcggaaacaccgtcatccacctcgaccaggcacttgcacgcatgagggagtatgagcggatgaagacagaagcagagagcaactcgaacatgagatgcacctgccgcatcattgaggatggagacggcgctggcgccggtactactgtgaataaccttgaagaaacccccgtcattgaaaaccgaagcagccagcagcccgttagcgaggtttcaaccattccctgtccaagaattgatacccaacagctagacaggcagatcaaggcaattatgaaggaagtaatacctttccttaaggagcacatggatgaggtgtgctcttctcaactgttgaccagcgtgcggcggatggtactgacactgacccagcaaaatgacgagtcaaaggaattcgtgaaattctttcacaagcagctcggaagcatcctccaggacagtctggcaaaatttgctgggcggaaactgaaggactgtggggaagatttgcttgtggagatctcagaagttctgttcaatgaattagcattctttaaacttatgcaggatctcgataataatagcattacagtgaagcaaagatgcaagcggaagattgaggccaccggagttattcagtcctgcgccaaagaggcaaaaagaattttggaggatcatggatcacccgctggtgagattgatgatgaggacaaggataaggacgaaacagagactgtgaaacaaacacagacctctgaagtgtacgatggccccaagaatgtacgtagcgacatttccgaccaggaagaggatgaggaatcagagggatgtcccgtttcaatcaatctctcaaaagctgagacacaggccttgacgaattacggctctggagaagacgagaatgaggacgaggagatggaagaattcgaggaggggcctgtagatgtgcaaacaagcctacaagctaacaccgaggctaccgaggagaacgagcatgatgaacaggttttacaaagagactttaaaaagaccgctgagtcgaaaaatgttccgctggaacgagaggcaaccagcaagaacgaccagaacaattgccctgtgaaaccatgctacctgaatatcttggaggacgaacaaccgctcaattctgccgctcacaaggaatcaccccccacagtggacagtacgcagcagcccaaccccctgcccttgcgcctccctgaaatggaacccctggtgcctcgcgtgaaggaggtgaaatccgcccaagagactcctgagagtagcctggcaggatcacccgacacggaatctcctgtgctcgttaatgactacgaggcggaaagcggaaacatcagtcagaagtcagatgaagaggattttgtcaaggtggaggacctgcccctcaagctaacaatctactcagaagcggatctgcggaagaaaatggtggaagaggaacagaaaaatcatctgtccggtgaaatctgcgagatgcagaccgaggagctggctggaaattctgaaactctcaaagagcccgagacggtgggggctcagtccatttag

SEQ ID NO: 290278 - DNA, 2172 bp, Artificial Sequence
  derived and/or modified sequence
atgagcagcacctgtgagccctgcaagagcaggaacagacattctgcccagacagaggagcctgtgcaggccaaggtgttcagcaggaagaaccacgagcagctggagaagatcatcaagtgcaacagaagcacagagatcagcagcgcccacgcccggcgcatcctgcagcagagcaacagaaatgcctgcaatgaggcccctgagaccggcagtgacttctccatgtttgaggccctgcgggacaccatctacagcgaggtggccaccctcatcagccagaatgaaagccggccccacttcctgattgagctgttccacgagctgcagctgctgaacacagactacctgcggcagagggccctgtatgccctgcaggacatcgtgagccgccacatcagcgagagccatgagaagggagaaaatgtgaagtctgtgaacagcggcacctggatcgccagcaacagcgagctgaccccatctgagagcctggccaccacagatgatgagacctttgagaagaactttgagcgggagacccacaagatcagcgagcagaatgatgctgacaatgcctctgtgctgtctgtgagcagcaactttgagccctttgccacagatgacctgggcaacacagtcatccacctggaccaggccctggccaggatgagagaatatgaaagaatgaagacagaagctgagagcaacagcaacatgcgctgcacctgccgcatcattgaagatggagatggagctggggccggcaccaccgtgaacaacctggaggagacccctgtgattgagaacagaagcagccagcagcctgtgtctgaggtgtccaccatcccctgccccagaattgacacccagcagctggaccggcagatcaaggccatcatgaaggaggtgatccccttcctgaaggagcacatggatgaggtgtgcagcagccagctgctgacctctgtgcggaggatggtgctgaccctgacccagcagaatgatgagagcaaggagtttgtgaagttcttccacaagcagctgggcagcatcctgcaggacagcctggccaagtttgctggcaggaagctgaaggactgtggggaggacctgctggtggagatcagcgaggtgctcttcaatgagctggccttcttcaagctgatgcaggacctggacaacaacagcatcaccgtgaagcagcgctgcaagaggaagattgaggccaccggggtcatccagagctgtgccaaggaggccaagaggatcctggaggaccacggcagccctgctggggagattgatgatgaggacaaggacaaggatgaaacagagaccgtgaagcagacccagaccagcgaggtgtatgatggccccaagaatgtgcggagtgacatcagtgaccaggaggaggatgaggagagcgagggctgccctgtgtccatcaacctgagcaaggccgagacccaggccctgaccaactacggcagcggagaagatgaaaatgaagatgaggagatggaggagtttgaggagggccctgtggatgtgcagaccagcctgcaggccaacacagaggccacagaggagaatgaacatgatgagcaggtgctgcagagggacttcaagaagacagctgagagcaagaatgtgcccctggagcgggaggccaccagcaagaatgaccagaacaactgccctgtgaagccctgctacctgaacatcctggaggatgagcagcccctgaacagcgctgcccacaaggagagccccccaacagtggacagcacccagcagcccaaccccctgcccctgcggctgcctgagatggagcccctggtgccccgggtgaaggaggtgaagagcgcccaggagaccccagagagcagcctggccggcagcccagacacagagagccctgtgctggtgaatgactatgaggccgagagcggcaacatcagccagaagagtgatgaggaggactttgtgaaggtggaggacctgcccctgaagctgaccatctacagcgaggccgacctgaggaagaagatggtggaggaggagcagaagaaccacctgagcggggagatctgtgagatgcagacagaggagctggccggcaacagcgagaccctgaaggagcctgagaccgtgggcgcccagagcatctag

SEQ ID NO: 290279 - DNA, 2295 bp, Artificial Sequence
  derived and/or modified sequence
tgaaaagccagcgcccaggccagcctggccagcaaggacaagacccccaagagcaagagcaagaagaggaacagcacccagctgaagagccgggtgaagaacatccgctatgaaagtgcctccatgagcagcacctgtgagccctgcaagagcaggaacagacacagcgcccagacagaggagcctgtgcaggccaaggtgttcagcaggaagaaccacgagcagctggagaagatcatcaagtgcaacagaagcacagagatcagcagcgcccacgcccggcgcatcctgcagcagagcaacagaaatgcctgcaatgaggcccctgagactggaagtgacttctccatgtttgaggccctgcgggacaccatctacagcgaggtggccaccctcatcagccagaatgaaagccggccccacttcctgattgagctgttccacgagctgcagctgctgaacacagactacctgcggcagagggccctgtatgccctgcaggacatcgtgagccgccacatcagcgagagccatgagaagggggagaatgtgaagtctgtgaacagcggcacctggatcgccagcaacagcgagctgacccccagcgagagcctggccaccacagatgatgagacctttgagaagaactttgagcgggagacccacaagatcagcgagcagaatgatgctgacaatgcctctgtgctgtctgtgagcagcaactttgagccctttgccacagatgacctgggcaacacagtcatccacctggaccaggccctggccaggatgagagaatatgaaagaatgaagacagaggccgagagcaacagcaacatgcgctgcacctgccgcatcattgaagatggagatggagctggagctggcaccaccgtgaacaacctggaggagacccctgtgattgaaaatagaagcagccagcagcctgtgtctgaggtgtccaccatcccctgccccagaattgacacccagcagctggaccggcagatcaaggccatcatgaaggaggtgatccccttcctgaaggagcacatggatgaggtgtgcagcagccagctgctgacctctgtgcggaggatggtgctgaccctgacccagcagaatgatgagagcaaggagtttgtgaagttcttccacaagcagctgggcagcatcctgcaggacagcctggccaagtttgctggcaggaagctgaaggactgtggggaggacctgctggtggagatcagcgaggtgctcttcaatgagctggccttcttcaagctgatgcaggacctggacaacaacagcatcaccgtgaagcagcgctgcaagaggaagattgaggccactggagtcatccagagctgtgccaaggaggccaagaggatcctggaggaccacggcagccctgctggggagattgatgatgaggacaaggacaaggatgaaacagaaacagtgaagcagacccagaccagcgaggtgtatgatggccccaagaatgtgcggagtgacatcagtgaccaggaggaggatgaggagagcgagggctgccctgtgtccatcaacctgagcaaggccgagacccaggccctgaccaactacggcagcggggaggatgaaaatgaagatgaggagatggaggagtttgaggagggccctgtggatgtgcagaccagcctgcaggccaacacagaggccacagaagaaaatgaacatgatgagcaggtgctgcagagggacttcaagaagacagctgagagcaagaatgtgcccctggagcgggaggccaccagcaagaatgaccagaacaactgccctgtgaagccctgctacctgaacatcctggaggatgagcagcccctgaacagcgctgcccacaaggagagcccccccaccgtggacagcacccagcagcccaaccccctgcccctgcggctgcctgagatggagcccctggtgccccgggtgaaggaggtgaagagcgcccaggagaccccagagagcagcctggccggcagcccagacacagagagccctgtgctggtgaatgactatgaagctgagagcggcaacatcagccagaagagtgatgaagaagattttgtgaaggtggaggacctgcccctgaagctgaccatctacagcgaggccgacctgaggaagaagatggtggaggaggagcagaagaaccacctgtctggagagatctgtgagatgcagacagaggagctggccggcaacagcgagaccctgaaggagcctgagaccgtgggcgcccagagcatctag

SEQ ID NO: 290280 - DNA, 2172 bp, Artificial Sequence
  derived and/or modified sequence
atgagcagcacctgcgagccctgcaagagccggaaccggcacagcgcccaaacagaggagcctgtgcaggctaaggtattcagcagaaagaaccatgagcagctggaaaaaataattaaatgtaacagatctaccgaaatcagtagcgctcatgcgcgtaggattcttcagcagtccaatcgaaacgcctgcaacgaagcccccgagaccggcagtgatttcagcatgtttgaagcattgcgagatactatatatagcgaggtggccacactgatctctcagaacgaatctaggcctcattttctgatcgaactgtttcatgaactccagctgctcaacacagattacttaagacaaagggccctgtacgccctccaagacattgtgagccggcatataagtgagtcacacgagaagggcgagaacgttaagagcgttaattctgggacttggatcgcaagcaattctgaactaacaccctccgaatctctggccaccaccgacgacgagacatttgagaaaaattttgaacgggagacccacaagataagcgaacaaaacgacgcggacaatgcatctgtcttatccgtctcatcaaatttcgagcctttcgcgaccgatgatctgggcaacactgtaattcacctggaccaggccctcgctagaatgagagagtacgagcgaatgaaaacagaggccgagtccaattcgaacatgcggtgcacctgccgcatcattgaagacggcgatggcgccggtgctgggacgacagtgaacaatctggaggagactccagtcatcgaaaaccgatccagccagcagcctgttagtgaagtgtctacaatcccctgtcctcgtatagatacccaacagctcgaccggcagataaaagccataatgaaagaagtgattccgttcctaaaggaacatatggacgaggtgtgctcctctcaactgctaacatcagtgcggcggatggtgcttactctcacccagcaaaatgatgaaagcaaagagtttgtgaaattctttcacaaacagctcggctcaattttacaggattccctggctaaatttgctggacggaagctgaaagactgcggcgaagatttgctagttgagatcagtgaggtgcttttcaatgagttagcctttttcaagctcatgcaggaccttgataataattcaattaccgtaaaacagcgttgcaaaagaaaaatcgaggctacaggagtaattcagtcctgcgccaaagaggcaaagcgaatcctggaggaccacggatcccctgcaggcgagattgacgacgaggataaggacaaggacgagacagagacagttaagcagactcagacatccgaagtttacgatggccccaaaaacgtgcgctcagacatctcagaccaggaagaggacgaagaatctgaaggatgccccgtttctattaacctttccaaggctgaaacacaggctctgaccaattacgggagcggcgaggacgaaaatgaagacgaagaaatggaggaattcgaggagggtcccgtcgatgtgcagaccagcctgcaggcaaatactgaagcaaccgaggagaacgaacatgatgagcaagtattgcagagggacttcaagaaaacagccgaatcaaaaaatgtgcctctggaacgggaggcgacatcgaagaatgatcagaacaattgcccagtaaagccgtgttatttgaatatcctggaagacgagcagccgctgaattcagccgcccacaaggaaagcccaccaacggtggactccactcagcagcccaatccgctacctcttcgcctccctgaaatggagcccctggttcctcgcgtgaaagaagtcaaaagtgcgcaggagacaccagagtcatccctggctggatcccctgatacggaaagcccggtacttgtgaatgattacgaagcagaaagtggcaacatatctcagaagtccgatgaggaggactttgtgaaggtggaggacctgcccttgaaactgacaatatattctgaggccgatctgaggaagaagatggtggaggaagagcagaagaaccacctcagcggagaaatctgtgagatgcagaccgaggagcttgccggcaatagcgaaacactgaaggaaccagagacagtgggcgcccagagtatttag

SEQ ID NO: 290281 - DNA, 2295 bp, Artificial Sequence
  derived and/or modified sequence
tgaaaggccagcgcccaggccagcctggccagcaaggacaagacccccaagtcaaaatcaaaaaagagaaactcgactcagttgaagtcccgcgtcaagaacataagatatgaatcagcaagcatgtctagtacttgtgagccttgtaaaagcaggaacaggcacagcgcccagactgaggagccagtgcaggctaaagtctttagccggaaaaatcacgagcagctggagaaaattatcaaatgtaacaggtcaacagagatttccagcgcccatgccaggcggatcctacagcagagcaaccgcaacgcatgcaatgaggcacctgagaccggttccgacttttcaatgttcgaggcactcagggacaccatctattcagaggtcgcaaccctcatctctcagaatgagtcgcggcctcattttttgattgaactgttccatgaattacaactcctcaacactgattatttgagacaaagagccctgtacgcccttcaggacattgtcagccgtcatatttctgagtcacatgaaaagggtgagaatgttaagagtgtaaatagcggtacctggattgccagcaattctgaactgacccccagcgaatctctcgccaccactgatgacgagaccttcgagaagaacttcgagcgggagactcacaaaatcagcgaacagaacgatgcagacaacgcctctgttctgtcagtctcctctaatttcgaaccattcgctacggacgacctcggaaatacggtgatccacctcgatcaggcactcgccagaatgcgcgagtacgaacgcatgaagacagaggccgaatctaactccaacatgcgttgtacctgcaggattatcgaggatggtgacggtgctggggccggtacaacggtgaataatctggaagagactccagtgatcgaaaacaggtccagtcagcaacccgttagtgaagtcagcactatcccctgtccaagaatagatacacaacagctggaccgacaaattaaggctatcatgaaggaagtcatcccttttcttaaagagcatatggacgaggtgtgtagcagccagttacttaccagcgtgcggagaatggtcctgacactgacacaacagaatgacgaatcaaaagaattcgttaagttctttcacaagcagttggggtctatccttcaagactccttggcgaagtttgccggtcgcaagctcaaggactgtggggaggatcttctcgttgagatatccgaggttttgttcaatgagctcgccttttttaaactgatgcaagatctggacaataactcaattacggttaaacaaaggtgcaagcggaagatagaagcaacaggcgtcatccagtcatgcgctaaggaggcgaagagaatcctagaagaccatggctccccagccggagagatcgatgatgaagataaggacaaagatgaaaccgaaaccgtcaaacagactcaaaccagtgaggtctacgacggccccaagaatgtacggtctgacattagtgaccaggaagaggatgaggagagcgaaggctgtccggtgagcataaatctgagcaaagctgaaactcaggcgctgactaactatggatccggggaagatgaaaatgaagacgaggaaatggaggagttcgaggagggccccgtggacgtacagaccagcctgcaggctaacaccgaagccacagaagaaaatgagcacgatgaacaggttttgcagagggattttaagaaaacggcggagtctaagaatgtaccattggaacgtgaggccacttcaaaaaacgatcagaataattgccctgtgaagccatgttatctcaacatcctggaagacgagcagccattgaactccgcggctcacaaagagagcccgcccacggtcgactctactcagcagcccaatccactcccactcaggctccctgaaatggagccactggtgccaagagtcaaagaggtgaagagcgcgcaggagacccctgagagctctctggcgggatcccctgatacagagagtccggttctggttaacgactacgaggcggaatcaggcaacatatcacagaaaagcgacgaagaggacttcgtcaaggtcgaagatctccccctcaaactgacaatctattccgaagccgacctcaggaagaaaatggtcgaagaagaacagaagaaccatctttccggcgagatctgtgaaatgcagacggaggagctggcaggcaactcagaaacgctgaaggaacccgaaacagtgggcgcccagtccatctag

SEQ ID NO: 290282 - DNA, 2379 bp, Artificial Sequence
  derived and/or modified sequence
gaaaagcgtctgcacaggccagcctggcatctaaagataaaactcccaagtcaaaaagtaagaagaggaattctactcagctgaaaagcagagttaaaaacatcaggtatgaaagtgccagtatgtctagcacatgtgaaccttgcaaaagtaggaacagacattcagcccagactgaagagcctgttcaagcaaaagtattcagcagaaagaatcatgagcaactggaaaaaataataaaatgtaataggtctacagaaatatcttcagcacatgctaggagaatactacagcagtctaacagaaatgcatgcaatgaagcgccagaaactgggagtgatttttccatgtttgaagctttgcgagatactatttattctgaagtagctacattaatttctcaaaatgaatctcgtccacattttcttattgaactcttccatgagctgcagctactaaacacagactacttgagacagagggctttatatgcattgcaggacatagtatccagacatatttctgagagccatgaaaaaggagaaaatgtaaagtcagtaaactctggtacttggatagcatcaaactcagaacttactcctagtgagagccttgctactactgatgatgaaacttttgagaagaactttgaaagagaaacccataaaataagtgagcaaaatgatgctgataatgctagtgtcctgtctgtatcatcaaattttgagccttttgcaacagatgatctaggtaacaccgtgattcacttagatcaagcattagccagaatgagagaatatgagcgtatgaagactgaggctgaaagtaactcaaatatgagatgcacctgcaggattattgaggatggagatggtgctggtgcaggtactacagttaataatttagaagaaactcccgttattgaaaatcgtagttcacaacaacctgtaagtgaagtttctaccatcccatgtcctagaattgatactcagcagctggaccggcaaattaaagcaattatgaaagaagtcattccttttttgaaggagcacatggatgaagtatgctcctcgcagcttctaacttcagtaaggcgcatggttttgacccttacccagcaaaatgatgagagcaaagagtttgtaaagttctttcataaacaacttggaagtatattacaggattcactggcaaaatttgctggcagaaaactgaaagactgtggagaagatcttcttgtagagatatctgaagtgttgttcaatgaattggctttctttaagcttatgcaagatttggataataatagtataactgttaaacagagatgcaaaaggaaaatagaagcaactggagtgatacaatcttgtgccaaagaggctaaaaggattcttgaagatcatggctcacctgctggagagattgatgatgaagacaaagacaaggatgaaactgaaacagttaagcagactcaaacatctgaggtgtatgatggtcccaaaaatgtaagatctgatatttctgatcaagaggaagatgaagaaagtgaaggatgtccagtgtctattaatttgtctaaagctgaaactcaggctttaactaattatggaagtggagaagatgaaaatgaggatgaagaaatggaagaatttgaagaaggccctgtggatgtccagacttccctccaggctaacactgaagctactgaagaaaatgaacatgatgaacaggtcctacaacgtgactttaaaaagacagcagaaagcaaaaatgtcccattggaacgagaagccactagtaaaaatgaccaaaataactgtcctgtgaaaccctgttacctcaatatcttggaagatgagcaacctttaaatagtgctgcccataaggagtcacctcctactgttgattcaactcaacagcctaaccctttgccgttacgtttacctgaaatggaacccttagtgcctagagtcaaagaagttaaatctgctcaggaaactcctgaaagctctctggctggaagtcctgatactgaatctccagtgttagtgaatgactatgaagcagaatctggtaatataagtcaaaagtctgatgaagaagattttgtaaaagttgaagatttaccactgaaactgacaatatattcagaggcagatctaagaaagaaaatggtagaagaagaacagaaaaaccatttatctggtgaaatatgtgaaatgcagaccgaagaattagctggaaattctgagacactaaaagaacctgaaacggtgggagcccagagtatatgagatgtcttcagaggctcatctaactctgtccttacatactcaatgcatatatgaaaacaatactaaataaacatctgatctgtat

SEQ ID NO: 290283 - DNA, 2172 bp, Artificial Sequence
  derived and/or modified sequence
atgagctctacatgtgaaccctgtaagagtagaaatagacatagtgcccagactgaggaaccagttcaagcgaaagtcttcagcagaaaaaatcatgaacaattggaaaagatcatcaaatgtaaccggtcaacggagatcagtagcgctcacgccaggagaatcctgcaacagagtaaccgcaacgcctgtaatgaagcccctgagacaggaagtgacttttctatgtttgaagcacttcgcgatactatctactcggaagtagccaccctcattagtcagaacgagagccgtccccattttttgatagaactgtttcatgagctgcaactcttaaatacagactacctgagacagagagccctttacgccctgcaggacatcgtgtcaagacacatttcggagtcccatgagaagggcgagaacgtgaaatcagtcaattcaggtacctggattgcctcaaattccgaactgactccatcagaatctctggcgaccacagatgacgaaacattcgagaaaaatttcgaaagggaaacacacaaaattagcgaacagaacgacgccgacaatgccagcgtgttgagcgtatcttccaattttgaaccgtttgctactgatgatctggggaatacagtcattcacttagaccaggccctcgcacggatgcgagaatacgagagaatgaaaacggaagcagaaagcaactctaatatgagatgtacctgccgcattatcgaggatggtgacggggctggggcaggcaccacagtgaacaacctagaggaaacccccgtgatagagaataggagctctcagcagcccgtgtctgaggtcagcactatcccctgtccacgcatagacacacaacaactggacagacagatcaaagccatcatgaaagaggtgatcccttttctgaaagagcatatggatgaagtctgttcttctcagttgctgacctctgtgcggagaatggtcctgactcttacgcagcaaaatgacgagtctaaagaatttgtgaaattcttccacaagcagctcggatcaatcctgcaagactccctggccaaattcgcgggacgcaagttgaaggactgtggagaagacctcctggtggaaattagcgaggtcctcttcaacgaactagcttttttcaagctgatgcaggatctcgacaacaatagcatcactgtgaaacagaggtgcaaacggaaaatagaggcgaccggagtgatccaatcatgtgctaaggaagctaaacggatcctcgaagaccacggcagtcctgcaggggaaattgacgatgaggacaaagataaggacgagaccgagaccgtcaagcagacacagacaagcgaggtatatgacggccctaagaacgtgaggtctgatatctccgatcaagaggaagacgaagaatctgagggttgccccgtgtctattaatctgtccaaggctgagacccaggccctgaccaattacgggagtggtgaggacgaaaacgaggatgaagagatggaagaattcgaagagggcccagtggacgtccagacatccctacaggcaaataccgaagctactgaggaaaacgaacatgacgaacaggtacttcagcgtgatttcaagaaaaccgccgaatccaagaacgttcctctcgagcgtgaggcaacctctaaaaacgaccagaacaattgtcctgtgaaaccctgttatctcaatatccttgaagatgaacaacctctgaacagtgccgcacataaggagtcccctcctacagtggacagcacacagcagcccaatcccctacccctcagactgccagaaatggagcctctcgtgcctagagtgaaagaggtgaagagtgcccaggagaccccagagtcatcactggccggtagccctgacacagagagccctgtgctggtgaacgactatgaagccgaatctggcaatatctcccaaaaatcagatgaggaagactttgtgaaagtggaggacctgcccctaaaactcacgatctatagcgaagctgatctccggaagaagatggttgaggaggaacagaagaaccatttatccggcgagatttgtgagatgcagactgaggaactggcagggaactccgaaaccctgaaggagcctgagacagtcggggctcagtccatctag

SEQ ID NO: 290284 - DNA, 2295 bp, Artificial Sequence
  derived and/or modified sequence
taaaaggctagtgcacaggcaagtctcgcatctaaggacaagacgcccaagagcaagagcaagaaaaggaattctacgcagcttaaatcgcgcgtgaagaatatacgatatgagagtgcctccatgtctagcacctgcgaaccctgtaaatctagaaataggcacagcgcccagactgaggaacctgtgcaggccaaggtgtttagcaggaagaaccatgaacaactagaaaagattatcaagtgtaacagatcaactgagatttcatcagcacacgccagaaggattctccagcagtctaaccggaacgcatgtaacgaagcccctgagactgggagcgatttctctatgtttgaggccttgcgagataccatttactctgaggtggcaaccctcatctcccagaacgaatctcggccacacttcctgatagagctgtttcacgagcttcagctgctcaacactgactatctcagacaacgagcgctgtacgcgttgcaagacatcgtgtctaggcatatcagtgaatcccatgagaagggggagaacgtgaaatccgtcaactcaggcacttggatagcgtccaactctgagttaaccccctctgagtccctggccaccacggatgacgagactttcgaaaaaaacttcgaacgcgagacccacaagatatcagaacagaatgacgcggacaacgcaagcgttctgtccgtttctagcaacttcgaacctttcgcgactgatgacctcggcaatacagttatacacctggatcaagcacttgcacggatgcgggagtatgaacggatgaagaccgaagccgagagtaactctaatatgcgctgcacttgcaggatcattgaagacggggatggggctggggcaggcaccacagtaaacaacctggaggaaacacccgtgatcgagaaccggtcgagccagcagcctgtatccgaagtgtctactattccgtgtcctagaattgatacccagcagttggacagacagattaaggctatcatgaaagaagttattccttttctcaaagaacacatggacgaggtatgctcctcacagttactgacctctgtgaggaggatggttcttacactgacccagcagaatgacgagtccaaggaattcgtgaagtttttccataaacagctgggctccattttgcaagactcccttgcgaagttcgcaggaagaaagctgaaagattgtggagaagatttattggttgagatatccgaagtcttgtttaacgagctcgcattcttcaagctgatgcaggatctggataataactcaataacagttaaacagagatgtaaaagaaaaattgaggctacaggagtgattcagtcctgtgctaaggaagccaagaggattctggaggatcacggctctccagctggagagatcgatgacgaggacaaggataaagacgagaccgaaacggtgaaacagacgcagacctccgaagtctacgatgggccaaagaacgtccggagcgatattagcgatcaggaagaagatgaggagtcagaaggctgtcctgtcagcattaacctcagcaaggctgagactcaggctcttactaactatggtagcggcgaggacgaaaatgaggatgaagaaatggaggagttcgaggagggccctgtcgatgtccagactagcttgcaggcaaacacggaagccacagaagaaaacgaacatgacgaacaagtcctgcagagagacttcaagaaaacagcagagagtaaaaatgtgccactggagagggaggctaccagtaaaaacgaccagaataactgtcccgttaagccctgttacctgaatatccttgaagacgagcagcctttgaacagcgctgcccacaaagaaagccctcctactgtggacagtacgcagcaaccgaacccactcccactccgcttgcctgagatggaacctctagtgcccagggttaaagaggtcaagtccgcccaagagactcctgagtcatccctggccggttcacccgacacggagtctcccgtgctcgtcaatgattacgaagccgaatcaggaaatatctcgcaaaagagcgatgaagaggattttgtcaaggttgaggacctgcctctgaagctgaccatctacagtgaagccgatttacgtaaaaaaatggtggaagaagaacaaaaaaatcacctgtctggcgaaatctgtgagatgcaaaccgaggaattggccggaaatagcgaaacacttaaggagcccgaaacggtgggagctcagagtatctag

SEQ ID NO: 290285 - DNA, 2172 bp, Artificial Sequence
  derived and/or modified sequence
atgagcagcacctgcgagccctgcaagagcagaaacagacacagcgcccagaccgaggagcccgtgcaggccaaggtgttcagcagaaagaaccacgagcagctggagaagatcatcaagtgcaacagaagcaccgagatcagcagcgcccacgccagaagaatcctgcagcagagcaacagaaacgcctgcaacgaggcccccgagaccggcagcgacttcagcatgttcgaggccctgagagacaccatctacagcgaggtggccaccctgatcagccagaacgagagcagaccccacttcctgatcgagctgttccacgagctgcagctgctgaacaccgactacctgagacagagagccctgtacgccctgcaggacatcgtgagcagacacatcagcgagagccacgagaagggcgagaacgtgaagagcgtgaacagcggcacctggatcgccagcaacagcgagctgacccccagcgagagcctggccaccaccgacgacgagaccttcgagaagaacttcgagagagagacccacaagatcagcgagcagaacgacgccgacaacgccagcgtgctgagcgtgagcagcaacttcgagcccttcgccaccgacgacctgggcaacaccgtgatccacctggaccaggccctggccagaatgagagagtacgagagaatgaagaccgaggccgagagcaacagcaacatgagatgcacctgcagaatcatcgaggacggcgacggcgccggcgccggcaccaccgtgaacaacctggaggagacccccgtgatcgagaacagaagcagccagcagcccgtgagcgaggtgagcaccatcccctgccccagaatcgacacccagcagctggacagacagatcaaggccatcatgaaggaggtgatccccttcctgaaggagcacatggacgaggtgtgcagcagccagctgctgaccagcgtgagaagaatggtgctgaccctgacccagcagaacgacgagagcaaggagttcgtgaagttcttccacaagcagctgggcagcatcctgcaggacagcctggccaagttcgccggcagaaagctgaaggactgcggcgaggacctgctggtggagatcagcgaggtgctgttcaacgagctggccttcttcaagctgatgcaggacctggacaacaacagcatcaccgtgaagcagagatgcaagagaaagatcgaggccaccggcgtgatccagagctgcgccaaggaggccaagagaatcctggaggaccacggcagccccgccggcgagatcgacgacgaggacaaggacaaggacgagaccgagaccgtgaagcagacccagaccagcgaggtgtacgacggccccaagaacgtgagaagcgacatcagcgaccaggaggaggacgaggagagcgagggctgccccgtgagcatcaacctgagcaaggccgagacccaggccctgaccaactacggcagcggcgaggacgagaacgaggacgaggagatggaggagttcgaggagggccccgtggacgtgcagaccagcctgcaggccaacaccgaggccaccgaggagaacgagcacgacgagcaggtgctgcagagagacttcaagaagaccgccgagagcaagaacgtgcccctggagagagaggccaccagcaagaacgaccagaacaactgccccgtgaagccctgctacctgaacatcctggaggacgagcagcccctgaacagcgccgcccacaaggagagcccccccaccgtggacagcacccagcagcccaaccccctgcccctgagactgcccgagatggagcccctggtgcccagagtgaaggaggtgaagagcgcccaggagacccccgagagcagcctggccggcagccccgacaccgagagccccgtgctggtgaacgactacgaggccgagagcggcaacatcagccagaagagcgacgaggaggacttcgtgaaggtggaggacctgcccctgaagctgaccatctacagcgaggccgacctgagaaagaagatggtggaggaggagcagaagaaccacctgagcggcgagatctgcgagatgcagaccgaggagctggccggcaacagcgagaccctgaaggagcccgagaccgtgggcgcccagagcatctag

SEQ ID NO: 290286 - DNA, 2295 bp, Artificial Sequence
  derived and/or modified sequence
tgaaaggccagcgcccaggccagcctggccagcaaggacaagacccccaagagcaagagcaagaagagaaacagcacccagctgaagagcagagtgaagaacatcagatacgagagcgccagcatgagcagcacctgcgagccctgcaagagcagaaacagacacagcgcccagaccgaggagcccgtgcaggccaaggtgttcagcagaaagaaccacgagcagctggagaagatcatcaagtgcaacagaagcaccgagatcagcagcgcccacgccagaagaatcctgcagcagagcaacagaaacgcctgcaacgaggcccccgagaccggcagcgacttcagcatgttcgaggccctgagagacaccatctacagcgaggtggccaccctgatcagccagaacgagagcagaccccacttcctgatcgagctgttccacgagctgcagctgctgaacaccgactacctgagacagagagccctgtacgccctgcaggacatcgtgagcagacacatcagcgagagccacgagaagggcgagaacgtgaagagcgtgaacagcggcacctggatcgccagcaacagcgagctgacccccagcgagagcctggccaccaccgacgacgagaccttcgagaagaacttcgagagagagacccacaagatcagcgagcagaacgacgccgacaacgccagcgtgctgagcgtgagcagcaacttcgagcccttcgccaccgacgacctgggcaacaccgtgatccacctggaccaggccctggccagaatgagagagtacgagagaatgaagaccgaggccgagagcaacagcaacatgagatgcacctgcagaatcatcgaggacggcgacggcgccggcgccggcaccaccgtgaacaacctggaggagacccccgtgatcgagaacagaagcagccagcagcccgtgagcgaggtgagcaccatcccctgccccagaatcgacacccagcagctggacagacagatcaaggccatcatgaaggaggtgatccccttcctgaaggagcacatggacgaggtgtgcagcagccagctgctgaccagcgtgagaagaatggtgctgaccctgacccagcagaacgacgagagcaaggagttcgtgaagttcttccacaagcagctgggcagcatcctgcaggacagcctggccaagttcgccggcagaaagctgaaggactgcggcgaggacctgctggtggagatcagcgaggtgctgttcaacgagctggccttcttcaagctgatgcaggacctggacaacaacagcatcaccgtgaagcagagatgcaagagaaagatcgaggccaccggcgtgatccagagctgcgccaaggaggccaagagaatcctggaggaccacggcagccccgccggcgagatcgacgacgaggacaaggacaaggacgagaccgagaccgtgaagcagacccagaccagcgaggtgtacgacggccccaagaacgtgagaagcgacatcagcgaccaggaggaggacgaggagagcgagggctgccccgtgagcatcaacctgagcaaggccgagacccaggccctgaccaactacggcagcggcgaggacgagaacgaggacgaggagatggaggagttcgaggagggccccgtggacgtgcagaccagcctgcaggccaacaccgaggccaccgaggagaacgagcacgacgagcaggtgctgcagagagacttcaagaagaccgccgagagcaagaacgtgcccctggagagagaggccaccagcaagaacgaccagaacaactgccccgtgaagccctgctacctgaacatcctggaggacgagcagcccctgaacagcgccgcccacaaggagagcccccccaccgtggacagcacccagcagcccaaccccctgcccctgagactgcccgagatggagcccctggtgcccagagtgaaggaggtgaagagcgcccaggagacccccgagagcagcctggccggcagccccgacaccgagagccccgtgctggtgaacgactacgaggccgagagcggcaacatcagccagaagagcgacgaggaggacttcgtgaaggtggaggacctgcccctgaagctgaccatctacagcgaggccgacctgagaaagaagatggtggaggaggagcagaagaaccacctgagcggcgagatctgcgagatgcagaccgaggagctggccggcaacagcgagaccctgaaggagcccgagaccgtgggcgcccagagcatctag

SEQ ID NO: 290287 - protein, 428 aa, Artificial Sequence
  derived and/or modified sequence
MSTHQFYRKYMCPTSMRAIRARYDPFLQTRHRIEQLKQLGHSVDKVEFIVMGGTFMALPEEYRDYFIRNLHDALSGHTSNNIYEAVKYSERSLTKCIGITIETRPDYCMKRHLSDMLTYGCTRLEIGVQSVYEDVARDTNRGHTVKAVCESFHLAKDSGFKVVAHMMPDLPNVGLERDIEQFTEFFENPAFRPDGLKLYPTLVIRGTGLYELWKSGRYKSYSPSDLVELVARILALVPPWTRVYRVQRDIPMPLVSSGVEHGNLRELALARMKDLGIQCRDVRTREVGIQEIHHKVRPYQVELVRRDYVANGGWETFLSYEDPDQDILIGLLRLRKCSEETFRFELGGGVSIVRELHVYGSVVPVSSRDPTKFQHQGFGMLLMEEAERIAREEHGSGKIAVISGVGTRNYYRKIGYRLQGPYMVKMLK

SEQ ID NO: 290288 - protein, 418 aa, Artificial Sequence
  derived and/or modified sequence
MCPTSMRAIRARYDPFLQTRHRIEQLKQLGHSVDKVEFIVMGGTFMALPEEYRDYFIRNLHDALSGHTSNNIYEAVKYSERSLTKCIGITIETRPDYCMKRHLSDMLTYGCTRLEIGVQSVYEDVARDTNRGHTVKAVCESFHLAKDSGFKVVAHMMPDLPNVGLERDIEQFTEFFENPAFRPDGLKLYPTLVIRGTGLYELWKSGRYKSYSPSDLVELVARILALVPPWTRVYRVQRDIPMPLVSSGVEHGNLRELALARMKDLGIQCRDVRTREVGIQEIHHKVRPYQVELVRRDYVANGGWETFLSYEDPDQDILIGLLRLRKCSEETFRFELGGGVSIVRELHVYGSVVPVSSRDPTKFQHQGFGMLLMEEAERIAREEHGSGKIAVISGVGTRNYYRKIGYRLQGPYMVKMLK

SEQ ID NO: 290289 - DNA, 1287 bp, Artificial Sequence
  derived and/or modified sequence
atgagtacacatcaattctatcgcaaatatatgtgccccacaagcatgagagccatcagagccagatatgatccctttcttcagacaaggcacaggattgagcagctcaagcaactgggccattccgtagataaagtggaatttatcgtgatgggcggcacttttatggctctacctgaagagtaccgagattattttatacgcaacttacacgacgccctgagtggccatacttcaaacaacatctatgaggcagtgaaatatagtgagcggtctctgactaaatgtatagggattaccattgaaacaaggcctgattactgcatgaagcgacacctctcagatatgcttacttatggttgtacccgtctggaaattggtgtccaaagcgtatacgaagacgtggctcgggacacaaatcgcggccacaccgtgaaggccgtctgcgagagctttcatctggccaaggattccgggttcaaagttgttgctcatatgatgccagacctgcccaacgtcgggctcgaacgcgatatagaacaattcacagagttctttgagaatccggccttccgccccgatgggctgaagctgtatccaaccctggtgattaggggcactggtctttacgaactgtggaagtcaggtaggtacaagtcttactcaccctctgacctggtggaactggtggcaagaatattggctttagtccccccttggacacgcgtgtatcgtgtacagcgcgacataccaatgccactggtttcttccggggtggaacacggcaacctgcgggagctcgccctcgccagaatgaaggatcttgggattcagtgtcgggatgtgcgcacgcgcgaggtgggaattcaggagatccaccacaaagtccgaccataccaggttgagctggtcaggagagattacgtcgcaaatggaggctgggagaccttcttatcctatgaagatcctgaccaggatattctcatcggcttgctgcgcctacggaaatgttcagaagagaccttccgcttcgaacttggcgggggggtgagtattgtgcgcgagctacacgtatatgggagcgtggttcctgtcagctcacgtgaccccaccaagtttcagcatcagggattcggaatgttactgatggaagaagcggagaggatagctagggaggaacacggcagcggcaaaatcgctgtcataagtggcgttggcacgcgcaactactatcgcaagataggctaccgcttacaggggccttatatggtgaaaatgctgaaatag

SEQ ID NO: 290290 - DNA, 1257 bp, Artificial Sequence
  derived and/or modified sequence
atgtgtcctacttcaatgagagcaatcagggccaggtacgatcccttcttacagactagacatagaatcgagcagcttaagcagttgggacactcagtcgataaagtcgagtttatagtcatgggcggcaccttcatggctcttcctgaggagtaccgtgactacttcatcaggaacctacatgatgcgctgagcgggcatacctcaaataatatctacgaggctgtgaagtactcagaaagaagcctcaccaaatgcatcgggatcactatagagacacgccctgactactgtatgaagagacacctgtccgacatgctgacttacggttgtacccggctagagattggcgtgcagtccgtgtacgaggatgttgcgcgagatacaaaccgggggcacacagtgaaagcagtgtgtgaaagcttccacttagctaaagacagtgggtttaaagtcgtcgcccatatgatgcccgacctgcctaatgtagggctggagcgggatatcgagcagttcacggagtttttcgagaaccccgccttcagacctgatgggctcaagctgtatccaactttagttattcgcgggacaggactctacgagttatggaagtctggaagatataagtcctactccccttctgatttagtggagctagtggccagaatcctcgccctagtcccaccctggactagggtctatagagtgcaaagagacattcctatgcctctggtatcctctggggttgaacacggcaacctccgagagctggctctagccagaatgaaggacctgggaatccagtgtcgcgacgttagaaccagagaggtgggcatccaagagattcaccataaagttcgtccctatcaggtcgagctggtccggcgagactatgtggccaatggtggctgggagaccttcctctcgtatgaggatcccgaccaagatatacttatcggccttttacgactgaggaagtgctccgaagagactttcaggttcgaattgggagggggggtgagcattgtgcgggagttgcatgtttacggctcagttgtgcccgtcagctctagagaccctactaagtttcagcaccaaggttttggaatgcttctgatggaagaggcagaacggatagcaagagaggagcatggcagcggcaagattgcagtgatatccggcgtgggcacccggaactactaccggaaaattggttacagactgcagggcccatacatggtgaaaatgcttaaatag

SEQ ID NO: 290291 - DNA, 1287 bp, Artificial Sequence
  derived and/or modified sequence
atgagcacccaccagttctacaggaagtacatgtgccccacctccatgagggccatccgggcccgctatgaccccttcctgcagaccaggcacagaattgagcagctgaagcagctgggccacagcgtggacaaggtggagttcatcgtgatgggcggcaccttcatggccctgcctgaggagtacagagactacttcatccggaacctgcatgatgccctgagcggccacaccagcaacaacatctatgaagctgtgaagtacagcgagaggagcctgaccaagtgcatcggcatcaccatcgagaccaggccagactactgcatgaagaggcacctgagtgacatgctgacctacggctgcacccggctggagattggagtgcagagcgtgtatgaagatgtggcccgggacaccaacagaggccacacagtgaaggctgtgtgtgagagcttccacctggccaaggacagcggcttcaaggtggtggcccacatgatgccagacctgcccaacgtgggcctggagcgggacatcgagcagttcacagagttctttgaaaatcctgccttccggccagatggcctgaagctgtaccccaccctggtgatccggggcaccggcctgtatgagctgtggaagagcggccgctacaagagctacagccccagcgacctggtggagctggtggcccgcatcctggccctggtgcccccctggaccagggtgtacagagtgcagagggacatccccatgcccctggtgtcctctggagtggagcacggcaacctgcgggagctggccctggccaggatgaaggacctgggcatccagtgcagagatgtgaggacccgggaggtgggcatccaggagatccaccacaaggtgcggccctaccaggtggagctggtgagaagagattatgtggccaatggaggctgggagaccttcctgtcctatgaagatcctgaccaggacatcctgattggcctgctgcggctgaggaagtgcagcgaggagaccttccgctttgagctgggcggcggcgtgtccatcgtgcgggagctgcacgtgtatggctctgtggtgcctgtgagcagccgggaccccaccaagttccagcaccagggcttcggcatgctgctgatggaggaggccgagagaattgcccgggaggagcacggcagcggcaagattgctgtgatctctggagtgggcaccaggaactactacaggaagattggctaccgcctgcagggcccctacatggtgaagatgctgaagtag

SEQ ID NO: 290292 - DNA, 1257 bp, Artificial Sequence
  derived and/or modified sequence
atgtgccccacctccatgagggccatccgggcccgctatgaccccttcctgcagaccaggcacagaattgagcagctgaagcagctgggccacagcgtggacaaggtggagttcatcgtgatgggcggcaccttcatggccctgcctgaggagtacagagactacttcatccggaacctgcatgatgccctgagcggccacaccagcaacaacatctatgaagctgtgaagtacagcgagaggagcctgaccaagtgcatcggcatcaccatcgagaccaggccagactactgcatgaagaggcacctgagtgacatgctgacctacggctgcacccggctggagattggagtgcagagcgtgtatgaagatgtggcccgggacaccaacagaggccacacagtgaaggctgtgtgtgagagcttccacctggccaaggacagcggcttcaaggtggtggcccacatgatgccagacctgcccaacgtgggcctggagcgggacatcgagcagttcacagagttctttgaaaatcctgccttccggccagatggcctgaagctgtaccccaccctggtgatccggggcaccggcctgtatgagctgtggaagagcggccgctacaagagctacagccccagcgacctggtggagctggtggcccgcatcctggccctggtgcccccctggaccagggtgtacagagtgcagagggacatccccatgcccctggtgtcctctggagtggagcacggcaacctgcgggagctggccctggccaggatgaaggacctgggcatccagtgcagagatgtgaggacccgggaggtgggcatccaggagatccaccacaaggtgcggccctaccaggtggagctggtgagaagagattatgtggccaatggaggctgggagaccttcctgtcctatgaagatcctgaccaggacatcctgattggcctgctgcggctgaggaagtgcagcgaggagaccttccgctttgagctgggcggcggcgtgtccatcgtgcgggagctgcacgtgtatggctctgtggtgcctgtgagcagccgggaccccaccaagttccagcaccagggcttcggcatgctgctgatggaggaggccgagagaattgcccgggaggagcacggcagcggcaagattgctgtgatctctggagtgggcaccaggaactactacaggaagattggctaccgcctgcagggcccctacatggtgaagatgctgaagtag

SEQ ID NO: 290293 - DNA, 1287 bp, Artificial Sequence
  derived and/or modified sequence
atgagcacccaccagttctaccggaagtacatgtgccccaccagcatgagagccattagagcacgctacgacccattcttacaaacccgccatcgaatcgaacagctgaaacagctgggacattcggtggataaggtggagttcattgttatgggaggaactttcatggctctgcctgaggagtacagagactatttcatccgcaatctacacgatgctctgtcaggacatacgtctaacaacatctacgaggccgtgaaatatagcgagcggtcgttgacaaagtgcatcgggatcaccatcgaaactcgtccagactattgtatgaagcggcacctgagtgacatgctcacctacgggtgtactcggctggaaatcggggtgcagtctgtttacgaggatgtggctcgtgacaccaacagagggcacactgttaaggctgtgtgcgagagctttcatttggctaaggattcggggtttaaggtggttgcgcacatgatgcccgatctgcctaacgtggggctggaaagggatatagagcagtttacagaattttttgagaatcctgcctttaggcccgacggactgaagctctacccgactctcgtaattcgcggcaccggcctatacgaactatggaagtctggtcggtacaagagttactcaccttccgacttagtggagttggtcgccaggatcttggccttagtgcctccatggactcgtgtatatagagtccagcgcgatatccctatgcctctggtgtcatccggcgttgaacacggcaatctgagagaacttgcactggcccgtatgaaggacctaggcattcagtgcagagacgtgcgaaccagagaggtaggaatccaggaaatacaccataaagtcagaccttaccaggtggagttggtgcgccgagattacgtcgccaatggaggatgggaaacattcctgagctatgaagaccccgatcaggatattctgattggactgctccggctgcggaaatgctcagaggagacttttcgcttcgagctcggtggtggcgtgtcaatagttcgtgagctgcacgtgtacggttcagtcgtccccgtctctagtagagatccaaccaaatttcagcaccagggttttggtatgctcctaatggaggaagccgaacgcattgccagagaagaacatggatcggggaagatcgcggtgatctcaggcgtgggcaccaggaattattacaggaaaattggatacagactacaagggccatacatggtaaagatgctaaagtag

SEQ ID NO: 290294 - DNA, 1257 bp, Artificial Sequence
  derived and/or modified sequence
atgtgccccaccagcatgcgggccatccgggcccggtacgaccccttcttgcagactcgacaccggatagaacagctcaaacagctcgggcattccgtcgacaaggtggaatttatagtgatgggcgggactttcatggccttgccggaagagtaccgtgattactttatccgtaatctgcacgatgcactgtctgggcatacaagcaacaatatttatgaagccgtcaagtacagcgagaggtcactcaccaaatgtattgggatcacaatcgagacacggcccgattattgtatgaagaggcatttgtcggacatgctaacctatgggtgtacacggcttgagatcggagtgcagtctgtttatgaagacgtagcccgggacaccaacagagggcacacagtcaaggccgtctgcgagtctttccacttggcaaaggattcgggattcaaggttgtggcacatatgatgcccgacctgccgaatgtggggcttgagcgggatatcgaacaatttaccgagttttttgagaacccggcttttcgacccgacgggctcaagctgtatccaaccctagtcatccggggcaccgggctgtatgagctctggaaatccgggaggtacaagagttatagtcccagcgatctggtggagctcgttgctaggattttagccctggtgcccccatggacaagggtttaccgtgtgcagagggacatccccatgcccctagtgtctagcggagtggagcacggcaaccttagagagctagccctcgcacgcatgaaagatctgggcatccaatgcagggacgtacggacccgagaggtgggtattcaggaaattcatcataaggttagaccataccaagtggaactggtgcgccgagactatgtagcaaacgggggctgggaaactttcttgtcctatgaggatcctgatcaggacatactgataggcttgctgcgactgaggaagtgttccgaggaaaccttccggtttgaactgggagggggcgtcagcatcgtccgggagctgcacgtgtacgggagtgtggtaccagtgtcatccagagaccctactaagtttcagcatcagggatttggcatgttactcatggaggaggccgaaaggatcgccagggaggaacatgggagcggcaaaattgccgtaatctcaggggtcggcacccgaaattactatcgtaaaattggttacagacttcagggaccatatatggttaagatgctgaaatag

SEQ ID NO: 290295 - DNA, 1287 bp, Artificial Sequence
  derived and/or modified sequence
atgtctacccaccagttttacagaaaatacatgtgcccaactagcatgcgcgcaatccgggctaggtatgacccatttttgcagactagacatcggatcgagcaactgaagcagctgggccacagtgtggataaggttgaattcattgtcatgggaggcacattcatggcacttcctgaagagtatcgtgattacttcatccggaacctccacgacgcattgtccggccacaccagtaacaacatctatgaggcagttaaatattccgagcggtctctaacaaaatgcattggtataaccattgaaactaggcctgattactgcatgaagcgccatcttagtgacatgctaacgtatggctgcacaagactggagatcggcgtgcaatctgtatacgaggatgttgcgcgagataccaaccgagggcatactgtcaaagctgtgtgtgaatcatttcatcttgccaaggacagtggattcaaagtagtggcacacatgatgcctgatttgcctaacgtaggactcgaaagagacattgaacagttcaccgaattttttgagaatccagcgtttcggcctgatggattgaagctctatcctacgctggttatccgcggaacgggcctctatgaattatggaaaagcggtcggtataaatcctactctccgtctgatctggtcgagctggtggccagaatccttgccttggtcccaccttggacacgcgtttaccgtgtgcaacgggacattcccatgcctctagtcagctccggagtggagcatggaaatctgagagaattagctctggctcgaatgaaggacctgggaattcagtgtagagatgttcgcacccgggaggtcgggattcaggaaattcaccacaaagtgaggccctatcaggtggagttggttcggagagattacgtggctaatggaggctgggaaactttcttaagctacgaagatcctgaccaggatattctgatcggacttctgcgactgagaaaatgtagtgaagagacctttcgcttcgagttggggggtggtgtgagcattgtcagagagctccatgtttacggaagtgttgttccagtcagctcaagagatcccaccaagttccaacatcagggattcggcatgctgctgatggaggaagcagagcgtatcgctcgcgaagaacatggaagcggcaagattgccgtgatttctggcgtcggcacaaggaactattatcggaagataggatacaggcttcagggaccatacatggttaagatgctcaaatag

SEQ ID NO: 290296 - DNA, 1257 bp, Artificial Sequence
  derived and/or modified sequence
atgtgcccgacctctatgagagcgattagggcccgttacgacccattcctccagacgaggcacaggattgagcagctgaaacagctgggtcattccgttgacaaagtagaatttatcgtaatgggcggaacttttatggccctgcctgaagagtacagggactatttcattagaaatctgcatgatgcattgtccgggcatactagcaacaatatttacgaggcagtgaagtattctgagcgatctctcactaagtgcatcggcatcactattgagacccggcctgattactgtatgaagcgtcatctctccgatatgttaacctatgggtgtacacgcttggagatcggggttcagagcgtttacgaggacgtggcaagggacacaaacaggggtcacaccgtaaaagcggtctgtgagtctttccacctggccaaagatagtggcttcaaggtggtcgcacacatgatgcctgaccttccgaatgtcggcttggaaagagacattgagcagttcactgagttctttgaaaaccccgctttcagacctgacggcctgaagttgtaccctaccttagtgatccggggaactggcctgtacgagttgtggaagagcggtcggtacaaatcctacagccccagtgatctggtggaactggtggcgagaattctcgcactggtgccaccctggacccgggtctaccgcgtgcagcgtgacatcccgatgccactagtgagcagtggggtagagcacgggaacctgcgcgagcttgccttagccaggatgaaagatctgggcattcagtgtcgggacgtaaggaccagggaggtggggattcaggagattcaccacaaggtgagaccttaccaggtagagcttgtgagacgggattatgtcgcaaatgggggttgggagactttcctttcatacgaggaccctgaccaggacatccttatagggctcttgagactgcgcaagtgttccgaagagacttttagattcgagctgggcggaggagtctccatagttcgagagttgcacgtctatggaagcgtagttccggtcagctcacgggaccctacaaagtttcagcaccagggcttcggaatgctacttatggaggaggccgaacggattgcgagggaggaacacggaagcggaaagattgctgttattagtggtgtaggtacaaggaattattaccgcaagattggctacaggctccagggaccctatatggttaaaatgttgaagtag

SEQ ID NO: 290297 - DNA, 1287 bp, Artificial Sequence
  derived and/or modified sequence
atgagcacccaccagttctacagaaagtacatgtgccccaccagcatgagagccatcagagccagatacgaccccttcctgcagaccagacacagaatcgagcagctgaagcagctgggccacagcgtggacaaggtggagttcatcgtgatgggcggcaccttcatggccctgcccgaggagtacagagactacttcatcagaaacctgcacgacgccctgagcggccacaccagcaacaacatctacgaggccgtgaagtacagcgagagaagcctgaccaagtgcatcggcatcaccatcgagaccagacccgactactgcatgaagagacacctgagcgacatgctgacctacggctgcaccagactggagatcggcgtgcagagcgtgtacgaggacgtggccagagacaccaacagaggccacaccgtgaaggccgtgtgcgagagcttccacctggccaaggacagcggcttcaaggtggtggcccacatgatgcccgacctgcccaacgtgggcctggagagagacatcgagcagttcaccgagttcttcgagaaccccgccttcagacccgacggcctgaagctgtaccccaccctggtgatcagaggcaccggcctgtacgagctgtggaagagcggcagatacaagagctacagccccagcgacctggtggagctggtggccagaatcctggccctggtgcccccctggaccagagtgtacagagtgcagagagacatccccatgcccctggtgagcagcggcgtggagcacggcaacctgagagagctggccctggccagaatgaaggacctgggcatccagtgcagagacgtgagaaccagagaggtgggcatccaggagatccaccacaaggtgagaccctaccaggtggagctggtgagaagagactacgtggccaacggcggctgggagaccttcctgagctacgaggaccccgaccaggacatcctgatcggcctgctgagactgagaaagtgcagcgaggagaccttcagattcgagctgggcggcggcgtgagcatcgtgagagagctgcacgtgtacggcagcgtggtgcccgtgagcagcagagaccccaccaagttccagcaccagggcttcggcatgctgctgatggaggaggccgagagaatcgccagagaggagcacggcagcggcaagatcgccgtgatcagcggcgtgggcaccagaaactactacagaaagatcggctacagactgcagggcccctacatggtgaagatgctgaagtag

SEQ ID NO: 290298 - DNA, 1257 bp, Artificial Sequence
  derived and/or modified sequence
atgtgccccaccagcatgagagccatcagagccagatacgaccccttcctgcagaccagacacagaatcgagcagctgaagcagctgggccacagcgtggacaaggtggagttcatcgtgatgggcggcaccttcatggccctgcccgaggagtacagagactacttcatcagaaacctgcacgacgccctgagcggccacaccagcaacaacatctacgaggccgtgaagtacagcgagagaagcctgaccaagtgcatcggcatcaccatcgagaccagacccgactactgcatgaagagacacctgagcgacatgctgacctacggctgcaccagactggagatcggcgtgcagagcgtgtacgaggacgtggccagagacaccaacagaggccacaccgtgaaggccgtgtgcgagagcttccacctggccaaggacagcggcttcaaggtggtggcccacatgatgcccgacctgcccaacgtgggcctggagagagacatcgagcagttcaccgagttcttcgagaaccccgccttcagacccgacggcctgaagctgtaccccaccctggtgatcagaggcaccggcctgtacgagctgtggaagagcggcagatacaagagctacagccccagcgacctggtggagctggtggccagaatcctggccctggtgcccccctggaccagagtgtacagagtgcagagagacatccccatgcccctggtgagcagcggcgtggagcacggcaacctgagagagctggccctggccagaatgaaggacctgggcatccagtgcagagacgtgagaaccagagaggtgggcatccaggagatccaccacaaggtgagaccctaccaggtggagctggtgagaagagactacgtggccaacggcggctgggagaccttcctgagctacgaggaccccgaccaggacatcctgatcggcctgctgagactgagaaagtgcagcgaggagaccttcagattcgagctgggcggcggcgtgagcatcgtgagagagctgcacgtgtacggcagcgtggtgcccgtgagcagcagagaccccaccaagttccagcaccagggcttcggcatgctgctgatggaggaggccgagagaatcgccagagaggagcacggcagcggcaagatcgccgtgatcagcggcgtgggcaccagaaactactacagaaagatcggctacagactgcagggcccctacatggtgaagatgctgaagtag

SEQ ID NO: 290299 - DNA, 1779 bp, Artificial Sequence
  derived and/or modified sequence
gagtttgtggctgcatttttatctctggtggctctgctacggcggcgcagaaatgaggcagaagcggaaagggtgaaaaccaagacagctgccaaatatggcctttctgcccagccccgcctggtggatatcattgctgccgtccctcctcagtatcgcaaggtcttgatgcccaagttaaaggcgaaacccatcagaactgctagtgggattgctgtcgtggctgtgatgtgcaaaccccacagatgtccacacatcagttttacaggaaatatatgtgtccaacctccatgagagctatccgtgccagatatgaccctttcctacagacaagacaccgaatagaacagttaaaacaacttggtcatagtgtggataaagtggagtttattgtgatgggtggaacgtttatggcccttccagaagaatacagagattattttattcgaaatttacatgatgccttatcaggacatacttccaacaatatttacgaggcagtcaagtattctgagagaagcctcacaaagtgtattggaattactattgaaaccagaccagattactgcatgaagcgacatttaagtgacatgttgacctatggctgcacaaggctggagattggggtgcagagtgtttatgaagatgtggctagagacaccaacaggggccacactgtgaaggcagtgtgtgagtcatttcacctggccaaagattccggttttaaagtggtggcccatatgatgcctgacctgccaaacgtgggactagaaagagacattgaacagttcacagagttttttgagaaccctgcttttcgtcccgatgggctgaaactctatcctaccctggtgattcgtgggaccgggctttatgagctttggaaatcaggaagatataagagttactctcctagtgacctggttgaattggtggctcggatcctagccctcgtgcctccatggactcgagtgtaccgagtacagagggatattccaatgcctttagttagctcaggagtagagcatggtaacctgagagagctggcacttgcaagaatgaaagacctcggaatacagtgtcgagatgtgagaaccagagaagttggaatccaagaaattcatcacaaagtacggccataccaggttgaattggtaaggagagattatgttgcaaatggtggctgggaaacattcttgtcatacgaagacccagatcaagacattttgattggcctcctacgattacgcaagtgttcagaagaaactttccgtttcgaattgggtggaggtgtctccatagtacgagagctgcatgtgtatgggagtgtggtccctgtgagcagccgggatcctactaaatttcagcatcagggatttggcatgctgctgatggaggaagcagaaagaatagctagagaagaacatgggtctgggaaaatcgctgtgatatcaggggtcggcaccaggaattattatagaaagatcggctacagattacaaggcccgtacatggtgaagatgctgaaataatggccacaccagtccactcttctgcagtatcctccctggcagaacacggagaatcaggatttcttaaatactcaacagagaggctgagcagagcaaatggggggcttcaccctcatcccgcagctgcagagactggaaactgccttcaaggccacggctggtcatctgctgaccacaccccagatccgccctctcctgcgtgcaccccaaaaaatcacttgcgtttttgaggcttaaatcatctatc

SEQ ID NO: 290300 - DNA, 1923 bp, Artificial Sequence
  derived and/or modified sequence
attgaccgacattttacgacaggcgggattgttttgtggctgtcagctttccccgtggtctgagtttgtggctgcatttttatctctggtggctctgctacggcggcgcagaaatgaggcagaagcggaaaggagatctcagccctgctgagctgatgatgctgactataggagatgttattaaacaactgattgaagcccacgagcaggggaaagacatcgatctaaataaattgctgtcgtggctgtgatgtgcaaaccccacagatgtccacacatcagttttacaggaaatatatgtgtccaacctccatgagagctatccgtgccagatatgaccctttcctacagacaagacaccgaatagaacagttaaaacaacttggtcatagtgtggataaagtggagtttattgtgatgggtggaacgtttatggcccttccagaagaatacagagattattttattcgaaatttacatgatgccttatcaggacatacttccaacaatatttacgaggcagtcaagtattctgagagaagcctcacaaagtgtattggaattactattgaaaccagaccagattactgcatgaagcgacatttaagtgacatgttgacctatggctgcacaaggctggagattggggtgcagagtgtttatgaagatgtggctagagacaccaacaggggccacactgtgaaggcagtgtgtgagtcatttcacctggccaaagattccggttttaaagtggtggcccatatgatgcctgacctgccaaacgtgggactagaaagagacattgaacagttcacagagttttttgagaaccctgcttttcgtcccgatgggctgaaactctatcctaccctggtgattcgtgggaccgggctttatgagctttggaaatcaggaagatataagagttactctcctagtgacctggttgaattggtggctcggatcctagccctcgtgcctccatggactcgagtgtaccgagtacagagggatattccaatgcctttagttagctcaggagtagagcatggtaacctgagagagctggcacttgcaagaatgaaagacctcggaatacagtgtcgagatgtgagaaccagagaagttggaatccaagaaattcatcacaaagtacggccataccaggttgaattggtaaggagagattatgttgcaaatggtggctgggaaacattcttgtcatacgaagacccagatcaagacattttgattggcctcctacgattacgcaagtgttcagaagaaactttccgtttcgaattgggtggaggtgtctccatagtacgagagctgcatgtgtatgggagtgtggtccctgtgagcagccgggatcctactaaatttcagcatcagggatttggcatgctgctgatggaggaagcagaaagaatagctagagaagaacatgggtctgggaaaatcgctgtgatatcaggggtcggcaccaggaattattatagaaagatcggctacagattacaaggcccgtacatggtgaagatgctgaaataatggccacaccagtccactcttctgcagtatcctccctggcagaacacggagaatcaggatttcttaaatactcaacagagaggctgagcagagcaaatggggggcttcaccctcatcccgcagctgcagagactggaaactgccttcaaggccacggctggtcatctgctgaccacaccccagatccgccctctcctgcgtgcaccccaaaaaatcacttgcgtttttgaggcttaaatcatctatccagtttctacattttgcatgaggcctgcaggtggcctattttgactcagacggtgaaaaaagcaaattaactcatttggacaccataactcatgcaataaaactgattgtcattcgaggagc

SEQ ID NO: 290301 - protein, 322 aa, Artificial Sequence
  derived and/or modified sequence
MEGISNFKTPSKLSEKKKSVLCSTPTINIPASPFMQKLGFGTGVNVYLMKRSPRGLSHSPWAVKKINPICNDHYRSVYQKRLMDEAKILKSLHHPNIVGYRAFTEANDGSLCLAMEYGGEKSLNDLIEERYKASQDPFPAAIILKVALNMARGLKYLHQEKKLLHGDIKSSNVVIKGDFETIKICDVGVSLPLDENMTVTDPEACYIGTEPWKPKEAVEENGVITDKADIFAFGLTLWEMMTLSIPHINLSNDDDDEDKTFDESDFDDEAYYAALGTRPPINMEELDESYQKVIELFSVCTNEDPKDRPSAAHIVEALETDV

SEQ ID NO: 290302 - DNA, 969 bp, Artificial Sequence
  derived and/or modified sequence
atggagggcatcagcaacttcaagacccccagcaagctgagcgagaagaagaagagcgtgctgtgcagcacccccaccatcaacatccccgccagccccttcatgcagaagctgggcttcggcaccggcgtgaacgtgtacctgatgaagagaagccccagaggcctgagccacagcccctgggccgtgaagaagatcaaccccatctgcaacgaccactacagaagcgtgtaccagaagagactgatggacgaggccaagatcctgaagagcctgcaccaccccaacatcgtgggctacagagccttcaccgaggccaacgacggcagcctgtgcctggccatggagtacggcggcgagaagagcctgaacgacctgatcgaggagagatacaaggccagccaggaccccttccccgccgccatcatcctgaaggtggccctgaacatggccagaggcctgaagtacctgcaccaggagaagaagctgctgcacggcgacatcaagagcagcaacgtggtgatcaagggcgacttcgagaccatcaagatctgcgacgtgggcgtgagcctgcccctggacgagaacatgaccgtgaccgaccccgaggcctgctacatcggcaccgagccctggaagcccaaggaggccgtggaggagaacggcgtgatcaccgacaaggccgacatcttcgccttcggcctgaccctgtgggagatgatgaccctgagcatcccccacatcaacctgagcaacgacgacgacgacgaggacaagaccttcgacgagagcgacttcgacgacgaggcctactacgccgccctgggcaccagaccccccatcaacatggaggagctggacgagagctaccagaaggtgatcgagctgttcagcgtgtgcaccaacgaggaccccaaggacagacccagcgccgcccacatcgtggaggccctggagaccgacgtgtag

SEQ ID NO: 290303 - DNA, 969 bp, Artificial Sequence
  derived and/or modified sequence
atggaagggatcagcaacttcaaaacaccatcgaagctttcagagaaaaagaagagtgtcttatgttcaaccccaaccatcaacatcccagcaagtccattcatgcagaaactgggctttggaacgggcgtgaatgtgtatctcatgaagaggtcaccccgaggattaagtcactctccctgggctgtgaagaagatcaacccaatatgcaacgatcattataggtcagtgtaccagaaaaggctgatggacgaagccaagattctcaaaagcctccatcatccaaatatcgtaggctatagagcgttcactgaggccaacgacggttctttatgtctggcaatggaatatggtggcgagaaatccctgaacgaccttattgaagaacgctacaaggccagtcaggacccattccccgccgccatcatcctcaaggtggcactgaatatggcaaggggcctgaaatatctgcatcaggaaaagaaattgctgcacggagatatcaaatccagcaatgtggtcattaaaggagatttcgagactattaaaatctgcgatgtgggcgtaagtcttccacttgatgagaacatgactgtgactgacccagaagcgtgttacatcggaaccgaaccttggaagccgaaggaggctgtggaagagaacggagtcatcacggataaagccgatatcttcgcatttggactgaccttatgggaaatgatgacattaagcattccacacatcaacttgagtaacgacgacgatgacgaagacaaaacatttgacgaatcagacttcgacgacgaggcctattacgccgcacttggcacacggccccccataaacatggaggagcttgacgaatcctatcagaaagtgattgagctgttttctgtgtgtactaacgaggatccaaaagaccggccctctgctgcacacatagttgaagctctcgaaaccgatgtatag

SEQ ID NO: 290304 - DNA, 969 bp, Artificial Sequence
  derived and/or modified sequence
atggagggcatcagcaacttcaagacccccagcaagctgtctgagaagaagaagtctgtgctgtgcagcacccccaccatcaacatcccagccagccccttcatgcagaagctgggcttcggcaccggggtgaatgtgtacctgatgaagaggagcccccggggcctgagccacagcccctgggccgtgaagaagatcaaccccatctgcaatgaccactacagatctgtgtaccagaagaggctgatggatgaggccaagatcctgaagagcctgcaccaccccaacatcgtgggctaccgggccttcacagaggccaatgatggcagcctgtgcctggccatggagtatggaggagagaagagcctgaatgacctgattgaggagcgctacaaggccagccaggaccccttccctgctgccatcatcctgaaggtggccctgaacatggcccggggcctgaagtacctgcaccaggagaagaagctgctgcatggagacatcaagagcagcaatgtggtgatcaagggggactttgagaccatcaagatctgtgatgtgggcgtgtccctgcccctggatgagaacatgacagtgacagatcctgaggcctgctacatcggcacagagccctggaagcccaaggaggccgtggaggagaatggagtcatcacagacaaggctgacatctttgccttcggcctgaccctgtgggagatgatgaccctgagcatcccccacatcaacctgagcaatgatgatgatgatgaggacaagacctttgatgaaagtgactttgatgatgaggcctactatgctgccctgggcaccaggcctcccatcaacatggaggagctggatgagagctaccagaaggtgattgagctgttctctgtgtgcaccaatgaagaccccaaggaccggcccagcgctgcccacatcgtggaggccctggagacagatgtgtag

SEQ ID NO: 290305 - DNA, 969 bp, Artificial Sequence
  derived and/or modified sequence
atggagggcatcagcaacttcaagacccccagcaagctgagcgagaagaagaaatccgttctgtgctcaacacccaccataaacattcctgcctccccttttatgcagaagcttggcttcggaaccggggtaaacgtttacctgatgaagcgttcccctagaggactatcccacagcccgtgggccgtcaagaagatcaacccaatttgcaatgatcactacaggagcgtctatcagaaacgactgatggatgaggccaaaatactcaagtcactgcaccacccaaacatagtcggctacagggccttcactgaagccaacgacggatctctgtgtctggccatggagtatgggggcgagaagagcttgaatgatcttatcgaagagaggtataaggctagccaagaccccttcccagccgccatcatcctgaaagttgctcttaacatggcccgcggcctgaagtacttacatcaggaaaaaaagctcctgcacggggacataaagagttctaatgtcgtgatcaagggtgactttgagacgataaagatctgcgacgtcggcgtcagcctgccgctggatgaaaatatgactgtgacagatccagaggcgtgctacatagggaccgagccgtggaaacccaaagaggccgttgaagagaatggcgtcatcacagataaggccgatatatttgcattcggcctgacactgtgggagatgatgacactttcaatcccccacatcaacctgtccaacgatgacgacgatgaagataagacttttgacgagtcagactttgatgacgaagcatactacgctgctctcggcaccagaccccccatcaatatggaagagctcgacgagagctatcagaaggtgatcgagcttttctccgtctgcacgaacgaagatccaaaagaccgaccttcagcagcacacatcgtagaagctcttgaaacagacgtgtag

SEQ ID NO: 290306 - DNA, 2118 bp, Artificial Sequence
  derived and/or modified sequence
ataatcacgacacattcaacacagatgtgagcgtttggagagagcttcagccttcagcacaggcaactgtgttctattcaccgggctgtgctcctcggaagggctggtggttcctgtaaaagtttgtgctccccgcgcctttccttccttccctcgtctttggcgcctgcgggcaccgggagtcctgggagagggaggaggaacggcgaatcggcggggcgtgtccttcacgccgccccgtagctcggggccgaagctggcgcagcgcgcgactttttgaaagccaggagggttcgaattgcaacggcagctgccgggcgtatgtgttggtgctagaggcagctgcagggtctcgctgggggccgctcgggaccaattttgaagaggtacttggccacgacttattttcacctccgacctttccttccaggcggtgagactctggactgagagtggctttcacaatggaagggatcagtaatttcaagacaccaagcaaattatcagaaaaaaagaaatctgtattatgttcaactccaactataaatatcccggcctctccgtttatgcagaagcttggctttggtactggggtaaatgtgtacctaatgaaaagatctccaagaggtttgtctcattctccttgggctgtaaaaaagattaatcctatatgtaatgatcattatcgaagtgtgtatcaaaagagactaatggatgaagctaagattttgaaaagccttcatcatccaaacattgttggttatcgtgcttttactgaagccaatgatggcagtctgtgtcttgctatggaatatggaggtgaaaagtctctaaatgacttaatagaagaacgatataaagccagccaagatccttttccagcagccataattttaaaagttgctttgaatatggcaagagggttaaagtatctgcaccaagaaaagaaactgcttcatggagacataaagtcttcaaatgttgtaattaaaggcgattttgaaacaattaaaatctgtgatgtaggagtctctctaccactggatgaaaatatgactgtgactgaccctgaggcttgttacattggcacagagccatggaaacccaaagaagctgtggaggagaatggtgttattactgacaaggcagacatatttgcctttggccttactttgtgggaaatgatgactttatcgattccacacattaatctttcaaatgatgatgatgatgaagataaaacttttgatgaaagtgattttgatgatgaagcatactatgcagcgttgggaactaggccacctattaatatggaagaactggatgaatcataccagaaagtaattgaactcttctctgtatgcactaatgaagaccctaaagatcgtccttctgctgcacacattgttgaagctctggaaacagatgtctagtgatcatctcagctgaagtgtggcttgcgtaaataactgtttattccaaaatatttacatagttactatcagtagttattagactctaaaattggcatatttgaggaccatagtttcttgttaacatatggataactatttctaatatgaaatatgcttatattggctataagcacttggaattgtactgggttttctgtaaagttttagaaactagctacataagtactttgatactgctcatgctgacttaaaacactagcagtaaaacgctgtaaactgtaacattaaattgaatgaccattacttttattaatgatctttcttaaatattctatattttaatggatctactgacattagcactttgtacagtacaaaataaagtctacatttgtttaaaacactgaaccttttgctgatgtgtttatcaaatgataactggaagctgaggagaatatgcctcaaaaagagtagctccttggatacttcagactctggttacagattgtcttgatctcttggatctcctcagatctttggtttttgctttaatttattaaatgtattttccatactgagtttaaaatttattaatttgtaccttaagcatttcccagctgtgtaaaaacaataaaactcaaataggatgataaagaataaaggacactttgggtaccagaag

SEQ ID NO: 290307 - DNA, 969 bp, Artificial Sequence
  derived and/or modified sequence
atggagggcatatccaattttaaaacgccgagcaaattaagtgaaaagaagaaatcagtgctgtgttccacaccgacgattaatatccctgccagtccattcatgcagaaactcgggtttggcacaggcgtgaacgtctatctgatgaagcggtcaccccgaggcttgtcccattccccatgggcagttaagaaaataaatcctatctgcaatgaccattacagatccgtgtatcagaagcgcttaatggatgaagccaagattctgaagagtcttcatcatccaaacatcgtcgggtacagggctttcactgaggccaacgatggtagtctctgtttagctatggagtatgggggagagaagagtctgaatgatctaatcgaagagaggtataaggccagccaggaccccttccccgctgcgattatcctgaaagtggctctaaatatggcgagaggtctaaaataccttcaccaagagaagaagctgctgcacggagacatcaagtcttccaatgtagtcatcaaaggcgacttcgagactatcaagatttgtgacgttggtgttagcctgcccttagacgagaatatgactgttacagatcccgaagcctgttacattggtaccgaaccttggaagcctaaggaggcagttgaggagaatggagtgatcacggataaagcggatattttcgctttcggactaactctctgggagatgatgactctcagtatcccgcacatcaacctcagcaacgatgacgatgatgaggacaagacgttcgacgagtctgactttgatgacgaagcctactacgccgcactcggcaccagacccccaatcaacatggaagaactcgacgagagttaccaaaaagtaatcgagcttttttctgtctgtaccaacgaagaccccaaagatcgtccaagcgctgcacacatagtggaagcgctcgaaacggacgtgtag

SEQ ID NO: 290308 - DNA, 2472 bp, Artificial Sequence
  derived and/or modified sequence
atgcctggagtggcaaggctgcccctgcttttggggctacttctgctgccaagacccggtagaccgctggacctcgctgactacacttacgacctggctgaagaagacgattcagagcccctcaactataaagacccttgcaaggccgccgcctttcttggagatatagccctcgatgaggaggacctgcgggcgtttcaggtacaacaagcagttgacctccgaagacacaccgctcgcaaatcgtctatcaaagccgcagtgcccggtaatacttctactcccagctgccagtcaactaatggacaacctcaacgtggggcatgtggtaggtggaggggacgctcgaggagtagaagagccgccaccagcaggccagagagagtttggcccgatggagtcatcccattcgtgatcggtgggaatttcactggttcccaaagagcagtgtttcgccaagccatgagacattgggagaaacatacctgtgtgacttttctggaaaggacagatgaggattcttacatcgtgttcacataccgcccctgcggatgttgttcctatgtggggaggcggggaggcgggcctcaagcgatcagcatcgggaagaattgtgacaaatttggaatcgtggtgcacgagctgggccacgtagtaggcttctggcacgaacatacacgtcctgatcgagatcgccacgtatccattgtgcgggagaatatccagcccggtcaagagtacaattttttaaaaatggagccccaggaggttgagtctcttggggagacttacgatttcgatagtatcatgcattacgctaggaacactttctcccggggtatctttctggatacaattgttcctaaatacgaagtgaacggagtgaagccccccatcggacagcggacccggttgtccaagggagatatcgcccaggcaaggaaactgtataaatgcccagcgtgtggcgaaactttacaggatagcactggcaacttctcaagcccagagtaccctaacggatactctgcacatatgcactgcgtgtggaggattagcgtcacaccaggggagaaaatcatcctaaacttcacatctctggacttgtatcggtcaaggctgtgttggtacgactacgtggaagtccgtgacggtttctggagaaaagctcccctgagagggaggttttgtggctccaagttgccagaacctatcgtctccacagattctcgattatgggtggaatttagatcctcatctaactgggtaggtaaggggttcttcgcagtctacgaggccatctgcgggggtgacgtgaaaaaggattacggccacattcagtctcccaattaccctgatgactaccggccttctaaagtttgcatctggagaatccaagtctcggaagggttccacgtagggctgactttccagagtttcgagatcgagcggcacgactcctgtgcctacgattacctggaagtgagggatgggcattcggaaagcagtaccctgatcggcagatattgtggatacgagaagcccgatgatataaaaagcacttcatcccgattatggctgaagttcgtctcggacggtagcataaataaggctgggttcgcagtgaatttctttaaggaagtagacgagtgttcacgtcccaatcggggcgggtgcgagcagaggtgcctgaacacccttgggagctataagtgttcttgtgaccccggctacgaactagcccctgacaaacgcagatgcgaagcggcctgtggggggtttctgactaagctcaacggcagcataacgagtccaggctggccgaaagagtaccctcctaacaagaactgtatttggcagctcgtagcacccacccagtatcgtatttcactgcagttcgatttcttcgagacagaaggaaatgatgtgtgtaaatacgattttgtggaggtacgaagcggtctgaccgctgacagcaaacttcacggtaagttttgcggatcagagaaaccagaagttattacctcgcagtacaataatatgcgagtagagtttaaatctgacaacaccgtgagcaaaaagggcttcaaggcgcatttcttctcagtcctcgagggagccggcgatcggcattcacacctgtcaggcctggagctgttgctctgcccccacgccctagtggacaccgtcccagcaccgccctcagccctgcacggcgacacacacgcccacacccacacccacgtgcatacccactgtcccatcgctcaagaaacatgtcgcgggcccccactgggagcctcacggctgagtcctcaaggccccggacacctgactctcgccccacaggaaggcagttaccttgacttttgggacacacacaggggcgatcctaagccaaggcgtaggcgcaagagtttgaaaactttttcgttgacacccgctacttttcgtggaatatgggcactatag

SEQ ID NO: 290309 - DNA, 2472 bp, Artificial Sequence
  derived and/or modified sequence
atgcctggggtggcccggctgcccctgctgctgggcctgctgctgctgcccaggcctggccggcccctggacctggccgactacacctatgacctggccgaggaggatgacagcgagcccctgaactacaaggacccctgcaaggccgccgccttcctgggggacatcgccctggatgaggaggacctgcgggccttccaggtgcagcaggccgtggacctgcggcggcacacagccaggaagagcagcatcaaggctgctgtgcccggcaacaccagcacccccagctgccagagcaccaacggccagccccagagaggagcctgtggccgctggaggggccgcagccgcagcagaagagctgccaccagcaggcctgagcgggtgtggccagatggagtcatcccctttgtgattggaggcaacttcaccggcagccagagagctgtgttccggcaggccatgaggcactgggagaagcacacctgtgtgaccttcctggagaggacagatgaggacagctacatcgtgttcacctaccggccctgtggctgctgcagctatgtgggcagaagaggaggcggcccccaggccatcagcatcggcaagaactgtgacaagtttggcatcgtggtgcatgagctgggccacgtggtgggcttctggcatgagcacaccaggccagaccgggacagacatgtgtccatcgtgcgggagaacatccagcccggccaggagtacaacttcctgaagatggagccccaggaggtggagagcctgggggagacctatgactttgacagcatcatgcactacgccaggaacaccttcagccggggcatcttcctggacaccatcgtgcccaagtatgaggtgaatggagtgaagccacccatcggccagaggacccggctgagcaaaggagacatcgcccaggccaggaagctgtacaagtgcccagcctgtggggagaccctgcaggacagcacaggcaacttcagcagccctgagtaccccaacggctacagcgcccacatgcactgtgtgtggaggatctctgtgaccccaggagagaagatcatcctgaacttcaccagcctggacctgtaccgcagccggctgtgctggtatgactatgtggaggtgagagatggcttctggaggaaggcccccctgcggggccgcttctgtggcagcaagctgcctgagcccatcgtgtccacagacagccggctgtgggtggagttccgcagcagcagcaactgggtgggcaagggcttctttgctgtgtatgaggccatctgtggaggagatgtgaagaaggactatggccacatccagagccccaactacccagatgactaccggcccagcaaggtgtgcatctggaggatccaggtgtctgagggcttccacgtgggcctgaccttccagagctttgaaattgaaagacatgacagctgtgcctatgactacctggaggtgagagatggccacagcgagagcagcaccctcatcggccgctactgcggctatgagaagccagatgacatcaagagcaccagcagccggctgtggctgaagtttgtgtctgatggcagcatcaacaaggccggctttgctgtgaacttcttcaaggaggtggatgagtgcagccggcccaacagaggaggctgtgagcagcgctgcctgaacaccctgggcagctacaagtgcagctgtgaccccggctatgagctggccccagacaagagaagatgtgaggccgcctgtggcggcttcctgaccaagctgaatggcagcatcaccagccctggctggcccaaggagtacccacccaacaagaactgcatctggcagctggtggcccccacccagtaccgcatcagcctgcagtttgacttctttgaaacagagggcaatgatgtgtgcaagtatgactttgtggaggtgcgcagcggcctgacagctgacagcaagctgcacggcaagttctgtggcagcgagaagccagaggtgatcaccagccagtacaacaacatgagggtggagttcaagagtgacaacacagtgtccaagaagggcttcaaggcccacttcttctctgtgctggagggcgctggggacagacacagccacctgagcggcctggagctgctgctgtgcccccacgccctggtggacacagtgcctgcccctccttctgccctgcacggggacacccacgcccacacccacacccacgtgcacacccactgccccatcgcccaggagacctgccggggcccccccctgggcgccagccggctgagcccccagggccctggccacctgaccctggccccccaggagggcagctacctggacttctgggacacccacagaggagaccccaagcccaggagaagaaggaagagcctgaagaccttcagcctgaccccagccaccttccggggcatctgggccctgtag

SEQ ID NO: 290310 - DNA, 2472 bp, Artificial Sequence
  derived and/or modified sequence
atgcccggcgtggcccggctgcccctgctgctgggcctgctgctgttaccgaggccaggacggccgctggaccttgccgactacacttacgatcttgcggaggaagacgattccgagcctctgaactataaggatccatgcaaagcagctgctttccttggggacattgccctggatgaggaggacttacgggcattccaggtgcagcaggctgtcgatctacgcaggcatactgccaggaagtcctctatcaaagccgccgtgccaggcaacacgagcactccttcatgtcaaagcactaacgggcagcctcagagaggtgcttgcggtagatggcgtggcagatctagaagtcggagggccgccacatcgcgccctgagcgcgtgtggcctgacggtgtgataccttttgtaattggcggtaattttactggctcacagagagcggtttttagacaagccatgaggcactgggaaaagcatacctgcgtgaccttcctggagcggactgatgaagacagttatatagtgttcacatatcgcccgtgtgggtgttgcagctatgttggtcgaagaggtggtggccctcaggctatctcaatcggcaagaactgtgataagttcggaatagtggtgcatgagcttgggcacgtggtaggcttttggcacgagcatactagaccagatcgcgacagacatgtgtcaatagtcagagaaaatattcagcccgggcaagagtacaattttctgaagatggaaccccaggaggtggagtctctgggagagacctacgacttcgatagcattatgcactacgcccgtaacaccttttcccggggcatctttttggataccatcgtgccgaagtatgaggttaacggagtcaagcccccaatcgggcaaagaactagactctctaaaggggatatcgcccaggcgagaaagttgtataagtgtccagcatgcggagagacactgcaggacagcacggggaatttttcatctccagaatatcctaatgggtattcggctcatatgcactgcgtttggcgcattagcgtaactcccggagagaagatcatcctgaattttacctctctggatctgtaccgctcacgcttatgctggtatgactacgttgaagtgagagacggtttttggagaaaggctcctctcagggggagattttgtgggtccaagctcccggagcccattgtgagtacggactccaggctctgggtagagttcaggagttccagcaactgggtaggaaaagggttttttgccgtgtacgaggctatatgcggcggagacgtcaagaaagactacggacacatccagtctcccaactatcccgacgattaccgcccttccaaggtgtgtatctggcggatacaggtttctgaaggcttccacgtgggcctgactttccagtctttcgaaatcgagcgtcatgacagctgtgcctacgattatctggaagttagggacggacacagtgaatcctcaacactgattggtaggtactgcgggtacgaaaagcctgatgacattaaatccactagttcaaggctttggctgaagttcgtttctgacggaagcatcaacaaggccggcttcgccgttaactttttcaaagaagtggacgagtgctcaagacctaaccggggggggtgcgaacagcgctgtcttaacacccttggaagttataagtgctcctgcgacccaggctatgagcttgcacctgacaagagacggtgtgaggcggcctgtggcggctttctgacaaagcttaatggcagcatcacatccccggggtggcccaaggagtaccctcccaacaaaaattgcatctggcagctggtggcgcccacccaatatcgcatatcattgcaattcgattttttcgagacagagggcaacgacgtatgtaaatatgacttcgtcgaagtaaggagtgggcttacagccgatagcaagcttcacgggaagttctgcgggtcggagaaacctgaagtgattacctcacagtacaataatatgagagtcgagttcaagagcgacaataccgtgagcaagaaaggttttaaagctcactttttctctgtcctggaaggagccggcgatagacacagtcatctgtcaggacttgagttgttgctgtgtccccatgccctcgttgacacagtcccagcacccccaagtgctctgcacggggacactcatgcacacacacacacccacgtgcatacacactgtcccattgctcaggaaacatgccgcggcccccccctcggagccagccgactctccccccaaggcccaggccacttgactctggcccctcaggaggggagttaccttgatttttgggatactcacaggggggatcctaagccacggagaagacggaagtccctaaagacattttccttgacaccggccacatttagaggaatatgggctctctag

SEQ ID NO: 290311 - DNA, 2472 bp, Artificial Sequence
  derived and/or modified sequence
atgccgggtgtggcgcgactccccctgctcctcggcctgctcctcctcccccgaccaggtcggcctcttgacctggccgactatacctacgacctggccgaagaagacgactcggagccattaaactataaggacccctgtaaagccgcagcttttctgggggatatcgctcttgatgaggaagatctccgggcatttcaagtccaacaggccgtggatctccggaggcacaccgctcggaaaagctccattaaggccgctgttccagggaatacttcaacccccagttgccagtccacaaatggacagcctcagagaggcgcttgtggaagatggagagggagaagcagaagtaggagagcagccacgtctcgacccgaaagagtttggccagacggggtgatcccctttgtgattggcggtaacttcaccggtagtcagcgggcagtgttcagacaggctatgaggcattgggaaaagcatacctgtgtgacattcctggagcgcactgatgaggattcttacatagtgtttacatatagaccctgtggctgttgctcatatgtcgggaggagagggggaggcccacaggcgatatcgattggaaaaaattgcgacaagtttgggatagtggtacacgagttgggtcatgtggtaggattctggcatgagcacacgcgtccggatcgtgatcgccacgtttccattgtgcgtgaaaacatccagcccggtcaggaatataattttctgaagatggagccgcaagaggtggagagcctgggagaaacctatgactttgattcaatcatgcactacgcacgtaatacatttagccgaggaatctttctcgacacaatcgtgcctaagtatgaggttaatggggtcaaacccccaatagggcagcgaacaaggttgtctaagggggacatagcacaggcaaggaagctttacaagtgccccgcttgtggagagaccctgcaggactcaaccgggaatttcagctctccagagtatcccaatgggtacagcgcccatatgcattgtgtatggagaattagtgtgacgcctggggagaagatcatcttgaacttcaccagtttggatttatataggagccgcctctgttggtacgattatgttgaggtacgcgatggcttttggcggaaggctcccttacgcggacgcttctgcgggagcaaacttccagagcctattgtaagcacagactcccgcctgtgggtggagttcagatcaagctctaactgggtaggcaaggggttctttgctgtgtacgaagccatttgtgggggtgatgtgaagaaggattacggacacattcagagccccaattacccggatgattaccgcccttccaaggtgtgcatctggcggatacaggtctcagaggggttccatgttggcctgacattccaatcatttgaaatcgagaggcatgatagctgcgcttacgactatctggaggtgcgggacggacactcagagagtagcaccctgatcggacgctactgcggctatgagaaacccgatgatatcaagtccacgtcttctagactctggctcaaatttgtatctgacggctcaataaacaaagctggcttcgctgtgaatttctttaaggaggtcgacgagtgtagccgaccaaatcgtggcggatgtgagcaacgctgcctgaataccctgggttcatacaagtgttcgtgtgaccctggttacgagctggcacctgataagagaagatgtgaggctgcctgtgggggtttcctgacaaaactcaacggatccattacttctcccggttggccgaaggagtacccccctaataagaattgcatttggcaactggtcgccccaacccagtaccgtatttccttgcaatttgacttcttcgaaacggaaggtaacgacgtatgcaagtacgactttgtggaggtgcggtctgggctcaccgctgatagcaaactgcatggcaagttctgcggaagtgagaaaccggaggttataacctctcaatacaataacatgcgggtggagtttaagtctgataacacggtgagtaagaagggctttaaggcccattttttttccgttcttgaaggcgctggggacaggcactctcacctatccgggctcgagctattgctctgtccgcatgccttggttgataccgtacctgccccaccaagcgctctgcacggagatacacacgcacacactcatacccatgtgcacacgcactgccctatagcacaggaaacctgcaggggacctccgctgggggcatctcgactgagcccgcagggcccaggccatctgaccctggctccccaggaaggatcctacctggacttctgggacactcaccggggagaccctaagccacgtcgtcggcgaaaatcgttgaaaacattctctctaacgcctgctacttttcggggaatttgggcactctag

SEQ ID NO: 290312 - DNA, 2691 bp, Artificial Sequence
  derived and/or modified sequence
aaagggagagggagacggctggagcccgaggacgagcgcggagccgcggaccgagcggggggcgggagacaggaaggagggaggcgagcagagggaaggggaagaggtcggggagcgagggcgggagcggtcgcggtcgcgatcgagcaagcaagcgggcgagaggacgccctcccctggcctccagtgcgccgcttccctcgccgccgccccgccagcatgcccggcgtggcccgcctgccgctgctgctcgggctgctgctgctcccgcgtcccggccggccgctggacttggccgactacacctatgacctggcggaggaggacgactcggagcccctcaactacaaagacccctgcaaggcggctgcctttcttggggacattgccctggacgaagaggacctgagggccttccaggtacagcaggctgtggatctcagacggcacacagctcgtaagtcctccatcaaagctgcagttccaggaaacacttctacccccagctgccagagcaccaacgggcagcctcagaggggagcctgtgggagatggagaggtagatcccgtagccggcgggcggcgacgtcccgaccagagcgtgtgtggcccgatggggtcatcccctttgtcattgggggaaacttcactggtagccagagggcagtcttccggcaggccatgaggcactgggagaagcacacctgtgtcaccttcctggagcgcactgacgaggacagctatattgtgttcacctatcgaccttgcgggtgctgctcctacgtgggtcgccgcggcgggggcccccaggccatctccatcggcaagaactgtgacaagttcggcattgtggtccacgagctgggccacgtcgtcggcttctggcacgaacacactcggccagaccgggaccgccacgtttccatcgttcgtgagaacatccagccagggcaggagtataacttcctgaagatggagcctcaggaggtggagtccctgggggagacctatgacttcgacagcatcatgcattacgctcggaacacattctccaggggcatcttcctggataccattgtccccaagtatgaggtgaacggggtgaaacctcccattggccaaaggacacggctcagcaagggggacattgcccaagcccgcaagctttacaagtgcccagcctgtggagagaccctgcaagacagcacaggcaacttctcctcccctgaataccccaatggctactctgctcacatgcactgcgtgtggcgcatctctgtcacacccggggagaagatcatcctgaacttcacgtccctggacctgtaccgcagccgcctgtgctggtacgactatgtggaggtccgagatggcttctggaggaaggcgcccctccgaggccgcttctgcgggtccaaactccctgagcctatcgtctccactgacagccgcctctgggttgaattccgcagcagcagcaattgggttggaaagggcttctttgcagtctacgaagccatctgcgggggtgatgtgaaaaaggactatggccacattcaatcgcccaactacccagacgattaccggcccagcaaagtctgcatctggcggatccaggtgtctgagggcttccacgtgggcctcacattccagtcctttgagattgagcgccacgacagctgtgcctacgactatctggaggtgcgcgacgggcacagtgagagcagcaccctcatcgggcgctactgtggctatgagaagcctgatgacatcaagagcacgtccagccgcctctggctcaagttcgtctctgacgggtccattaacaaagcgggctttgccgtcaactttttcaaagaggtggacgagtgctctcggcccaaccgcgggggctgtgagcagcggtgcctcaacaccctgggcagctacaagtgcagctgtgaccccgggtacgagctggccccagacaagcgccgctgtgaggctgcttgtggcggattcctcaccaagctcaacggctccatcaccagcccgggctggcccaaggagtacccccccaacaagaactgcatctggcagctggtggcccccacccagtaccgcatctccctgcagtttgacttctttgagacagagggcaatgatgtgtgcaagtacgacttcgtggaggtgcgcagtggactcacagctgactccaagctgcatggcaagttctgtggttctgagaagcccgaggtcatcacctcccagtacaacaacatgcgcgtggagttcaagtccgacaacaccgtgtccaaaaagggcttcaaggcccacttcttctcagtcttggagggggcaggggaccgacactcacatctatcaggcctggagttactgctctgcccccatgccctggtcgacactgtgcccgccccaccctcagccctgcacggagacacacacgcccacacgcacacacatgtgcacacacattgccccatcgcacaagaaacctgcagaggacccccactgggggcatcgaggctcagccctcagggcccggggcatctgactctggccccccaggaggggagctatttggacttttgggacacccaccgaggagaccctaagccaagaaggagaagaaagagcctgaagaccttcagtctgacccctgccaccttccggggcatttgggcactgtag

SEQ ID NO: 290313 - DNA, 2472 bp, Artificial Sequence
  derived and/or modified sequence
atgcccggcgtggccagactgcccctgctgctgggcctgctgctgctgcccagacccggcagacccctggacctggccgactacacctacgacctggccgaggaggacgacagcgagcccctgaactacaaggacccctgcaaggccgccgccttcctgggcgacatcgccctggacgaggaggacctgagagccttccaggtgcagcaggccgtggacctgagaagacacaccgccagaaagagcagcatcaaggccgccgtgcccggcaacaccagcacccccagctgccagagcaccaacggccagccccagagaggcgcctgcggcagatggagaggcagaagcagaagcagaagagccgccaccagcagacccgagagagtgtggcccgacggcgtgatccccttcgtgatcggcggcaacttcaccggcagccagagagccgtgttcagacaggccatgagacactgggagaagcacacctgcgtgaccttcctggagagaaccgacgaggacagctacatcgtgttcacctacagaccctgcggctgctgcagctacgtgggcagaagaggcggcggcccccaggccatcagcatcggcaagaactgcgacaagttcggcatcgtggtgcacgagctgggccacgtggtgggcttctggcacgagcacaccagacccgacagagacagacacgtgagcatcgtgagagagaacatccagcccggccaggagtacaacttcctgaagatggagccccaggaggtggagagcctgggcgagacctacgacttcgacagcatcatgcactacgccagaaacaccttcagcagaggcatcttcctggacaccatcgtgcccaagtacgaggtgaacggcgtgaagccccccatcggccagagaaccagactgagcaagggcgacatcgcccaggccagaaagctgtacaagtgccccgcctgcggcgagaccctgcaggacagcaccggcaacttcagcagccccgagtaccccaacggctacagcgcccacatgcactgcgtgtggagaatcagcgtgacccccggcgagaagatcatcctgaacttcaccagcctggacctgtacagaagcagactgtgctggtacgactacgtggaggtgagagacggcttctggagaaaggcccccctgagaggcagattctgcggcagcaagctgcccgagcccatcgtgagcaccgacagcagactgtgggtggagttcagaagcagcagcaactgggtgggcaagggcttcttcgccgtgtacgaggccatctgcggcggcgacgtgaagaaggactacggccacatccagagccccaactaccccgacgactacagacccagcaaggtgtgcatctggagaatccaggtgagcgagggcttccacgtgggcctgaccttccagagcttcgagatcgagagacacgacagctgcgcctacgactacctggaggtgagagacggccacagcgagagcagcaccctgatcggcagatactgcggctacgagaagcccgacgacatcaagagcaccagcagcagactgtggctgaagttcgtgagcgacggcagcatcaacaaggccggcttcgccgtgaacttcttcaaggaggtggacgagtgcagcagacccaacagaggcggctgcgagcagagatgcctgaacaccctgggcagctacaagtgcagctgcgaccccggctacgagctggcccccgacaagagaagatgcgaggccgcctgcggcggcttcctgaccaagctgaacggcagcatcaccagccccggctggcccaaggagtacccccccaacaagaactgcatctggcagctggtggcccccacccagtacagaatcagcctgcagttcgacttcttcgagaccgagggcaacgacgtgtgcaagtacgacttcgtggaggtgagaagcggcctgaccgccgacagcaagctgcacggcaagttctgcggcagcgagaagcccgaggtgatcaccagccagtacaacaacatgagagtggagttcaagagcgacaacaccgtgagcaagaagggcttcaaggcccacttcttcagcgtgctggagggcgccggcgacagacacagccacctgagcggcctggagctgctgctgtgcccccacgccctggtggacaccgtgcccgccccccccagcgccctgcacggcgacacccacgcccacacccacacccacgtgcacacccactgccccatcgcccaggagacctgcagaggcccccccctgggcgccagcagactgagcccccagggccccggccacctgaccctggccccccaggagggcagctacctggacttctgggacacccacagaggcgaccccaagcccagaagaagaagaaagagcctgaagaccttcagcctgacccccgccaccttcagaggcatctgggccctgtag

SEQ ID NO: 290314 - DNA, 303 bp, Artificial Sequence
  derived and/or modified sequence
atgggaacatcttcaattttcttatgtgtactatttctttgcggagccctgggactgactatgtcccccgcacgtggacgcttgcgctgctacatctgcggatttacaaaaccctgccacccggtgccaacagaatgccgtgatgatgaggcctgtggtatcagtatcggaacctcaggccgtactctagtccagtggcccttcagtagaaggcttcctaccagcatacatccagcttttcctgtcgcacccgcttctgcttgtctcttccatcctacagatcagagtgaaattacggagtag

SEQ ID NO: 290315 - DNA, 216 bp, Artificial Sequence
  derived and/or modified sequence
atggcgatggatgagtacctgtggatggttattctgggcttcatcattgcctttatactggccttcagtgtcggtgcaaacgacgtagccaacagcttcggtaccgctgtggggtcaggtgttgtgactctcagacaggcttgtatacttgcaagcatttttgagacgacgggaagcgtactcctgggggccaaggtgggagaaaccatcagatag

SEQ ID NO: 290316 - DNA, 237 bp, Artificial Sequence
  derived and/or modified sequence
atggccatggatgaatacttgtggatggtgattctgggattcatcatcgcctttatactggccttttccgtgggagcaaacgacgtggccaattctttcgggacagcagtgggcagtggagtggtgactctacgtcaggcttgtatccttgcctcaatttttgaaaccacgggcagtgtactgctgggcgcaaaggtaggggaaaccattcggaaaggtattatcgacgtgaattag

SEQ ID NO: 290317 - DNA, 216 bp, Artificial Sequence
  derived and/or modified sequence
atggccatggatgagtacctgtggatggtgatcctgggcttcatcatcgccttcatcctggccttctctgtgggcgccaatgatgtggccaacagctttggaacagctgtgggcagcggcgtggtgaccctgcggcaggcctgcatcctggccagcatctttgagaccactggatctgtgctgctgggcgccaaggtgggggagaccatcagatag

SEQ ID NO: 290318 - DNA, 237 bp, Artificial Sequence
  derived and/or modified sequence
atggccatggatgagtacctgtggatggtgatcctgggcttcatcatcgccttcatcctggccttctctgtgggcgccaatgatgtggccaacagctttggaacagctgtgggcagcggcgtggtgaccctgcggcaggcctgcatcctggccagcatctttgagaccactggatctgtgctgctgggcgccaaggtgggggagaccatcaggaagggcatcattgatgtgaactag

SEQ ID NO: 290319 - DNA, 216 bp, Artificial Sequence
  derived and/or modified sequence
atggccatggacgagtacctgtggatggtgatcctgggcttcatcatagcatttatcctggcatttagcgtcggcgcaaacgatgtggcaaactccttcggcactgctgtcgggtccggagtagttacactccgtcaggcttgcattctagcgtccatctttgagaccaccggcagcgtgcttcttggcgccaaggttggcgaaactatcaggtag

SEQ ID NO: 290320 - DNA, 237 bp, Artificial Sequence
  derived and/or modified sequence
atggccatggacgagtacctgtggatggtgatcctgggcttcatcatagcttttatactcgcctttagcgttggggctaacgacgtggctaattccttcggtaccgctgtcggctctggggtcgtgaccttaaggcaagcctgtatcctggcctccatctttgaaacaacaggctcagttcttctgggcgcaaaagtgggtgaaaccatccgcaaggggattatcgatgtgaattag

SEQ ID NO: 290321 - DNA, 216 bp, Artificial Sequence
  derived and/or modified sequence
atggcgatggacgaatatctttggatggtgatcctggggtttattatcgccttcattctggccttcagcgttggggctaacgatgttgcaaatagcttcggaactgcagtaggctctggggttgtgactcttcggcaggcgtgcatactggccagtatctttgaaacaaccggctccgtgctgttgggcgctaaagtaggggagacaattaggtag

SEQ ID NO: 290322 - DNA, 237 bp, Artificial Sequence
  derived and/or modified sequence
atggcgatggacgagtacttatggatggtgatcttaggcttcatcattgcctttatcctggcttttagcgttggggcaaatgacgtggccaatagtttcggaaccgctgtggggtcaggtgtggtgaccctgaggcaggcctgcatcctggccagcattttcgagacaactggaagcgtgttgctgggtgccaaagtcggcgagacaatccggaaaggcattattgatgttaactag

SEQ ID NO: 290323 - DNA, 533 bp, Artificial Sequence
  derived and/or modified sequence
atgatgcaaatcagcgtgttcctgcctgctgcttggctgcagttaattttagccggggaggagacatcacagctttcccagatcgggaggaaaaatatggaatgtgttttaccgctgactgaacacaaccaaatgaactgtcctgacagtagtttgcaaaccagcagctagcagtttgtccagcctctaacattgtccagcactttccagagcaaactcactgtttacaagaactcttggccttacgaagtttataacctcaagctttgtttatttaaaatattcctgcaaaagaaaagtacccggcacccactttccaaaatggccatggatgagtatttgtggatggtcattttgggtttcatcatagctttcatcttggccttttctgttggtgcaaacgatgttgccaactcctttggtacagccgtgggctctggtgtggtgaccttgaggcaggcatgcattttagcttcaatatttgaaaccaccggctccgtgttactaggcgccaaagtaggagaaaccattcg

SEQ ID NO: 290324 - DNA, 557 bp, Artificial Sequence
  derived and/or modified sequence
atttcctgccggccggtcggtttccggatgaaacgaggagccaggcatctccttggaaacaatgccatctttgaatgtgagagataaacctagtttcagcatgtctgcagcagagaccagtacatcaggcttattcccacaggaagcctcctaaagcctgtggcgcggcaaccatttccaggactaaataataatgtgtcagatgcctgaggagacatcacagctttcccagatcgggaggaaaaatatggaatgtgttttaccgctgactgaacacaaccaaatgaactgtcctgacagtagtttgcaaaccagcagctagcagtttgtccagcctctaacattgtccagcactttccagagcaaactcactgtttacaagaactcttggccttacgaagtttataacctcaagctttgtttatttaaaatattcctgcaaaagaaaagtacccggcacccactttccaaaatggccatggatgagtatttgtggatggtcattttgggtttcatcatagctttcatcttggccttttctgttggtgcaaacgatg

SEQ ID NO: 290325 - DNA, 573 bp, Artificial Sequence
  derived and/or modified sequence
cttttcatattcacgtgtactcttaagaaagcgtctgttctccaaactggctttccattctccccgtcctaaatggaggagacatcacagctttcccagatcgggaggaaaaatatggaatgtgttttaccgctgactgaacacaaccaaatgaactgtcctgacagtagtttgcaaaccagcagctagcagtttgtccagcctctaacattgtccagcactttccagagcaaactcactgtttacaagaactcttggccttacgaagtttataacctcaagctttgtttatttaaaatattcctgcaaaagaaaagtacccggcacccactttccaaaatggccatggatgagtatttgtggatggtcattttgggtttcatcatagctttcatcttggccttttctgttggtgcaaacgatgttgccaactcctttggtacagccgtgggctctggtgtggtgaccttgaggcaggcatgcattttagcttcaatatttgaaaccaccggctccgtgttactaggcgccaaagtaggagaaaccattcgcaaaggtatcattgacgtgaac

SEQ ID NO: 290326 - DNA, 751 bp, Artificial Sequence
  derived and/or modified sequence
gccgaggggatgcaatctcagatcagcagccagcagtgtttgtaaacaacaggagggagattgtgctggtgatgtccaactcacaccaatgaagatcaaccggtttgtgctttgggcagcaggctgcagatggacagtgcctcctgagggcatcgccatgttttagggatccatgttgcaggatacctgtctgcaagagagagtcaaggagggctttttaagcccctggggttcaggcctggcatctgggtgttaagtagagtgaatctcctgaagtccaaactaacatatgacattttaaaatgaggaaaacaaatggctctgaaaaggtctataggattataggaggagacatcacagctttcccagatcgggaggaaaaatatggaatgtgttttaccgctgactgaacacaaccaaatgaactgtcctgacagtagtttgcaaaccagcagctagcagtttgtccagcctctaacattgtccagcactttccagagcaaactcactgtttacaagaactcttggccttacgaagtttataacctcaagctttgtttatttaaaatattcctgcaaaagaaaagtacccggcacccactttccaaaatggccatggatgagtatttgtggatggtcattttgggtttcatcatagctttcatcttggccttttctgttggtgcaaacgatgttgccaactcctttggtacagccgtgggctctggtgtggtgaccttgaggcaggcat

SEQ ID NO: 290327 - DNA, 216 bp, Artificial Sequence
  derived and/or modified sequence
atggccatggacgagtacctgtggatggtgatcctgggcttcatcatcgccttcatcctggccttcagcgtgggcgccaacgacgtggccaacagcttcggcaccgccgtgggcagcggcgtggtgaccctgagacaggcctgcatcctggccagcatcttcgagaccaccggcagcgtgctgctgggcgccaaggtgggcgagaccatcagatag

SEQ ID NO: 290328 - DNA, 237 bp, Artificial Sequence
  derived and/or modified sequence
atggccatggacgagtacctgtggatggtgatcctgggcttcatcatcgccttcatcctggccttcagcgtgggcgccaacgacgtggccaacagcttcggcaccgccgtgggcagcggcgtggtgaccctgagacaggcctgcatcctggccagcatcttcgagaccaccggcagcgtgctgctgggcgccaaggtgggcgagaccatcagaaagggcatcatcgacgtgaactag

SEQ ID NO: 290329 - protein, 118 aa, Artificial Sequence
  derived and/or modified sequence
MLSSFPVVLLETMSHYTDEPRFTIEQIDLLQRLRRTGMTKHEILHALETLDRLDQEHSDKFGRRSSYGGSSYGNSTNNVPASSSTATASTQTQHSGMSPSPSNSYDTSPQPCTTNQNG

SEQ ID NO: 290330 - protein, 162 aa, Artificial Sequence
  derived and/or modified sequence
MHLLPLDSSSTLTCTVPSACTKPPSRWRPTVDIFFVVTLLLTVFGEDDQSQDVLRLHQDINDYNRRFSGQPRSIMERIMDLPTLLRHAFREMFSVGGLFWMFRIRIILCLMGAFFYLISPLDFVPEALFGILGFLDDFFVIFLLLIYISIMYREVITQRLTR

SEQ ID NO: 290331 - DNA, 489 bp, Artificial Sequence
  derived and/or modified sequence
atgcacctgctgcccctggacagcagcagcaccctgacctgcaccgtgcccagcgcctgcaccaagccccccagcagatggagacccaccgtggacatcttcttcgtggtgaccctgctgctgaccgtgttcggcgaggacgaccagagccaggacgtgctgagactgcaccaggacatcaacgactacaacagaagattcagcggccagcccagaagcatcatggagagaatcatggacctgcccaccctgctgagacacgccttcagagagatgttcagcgtgggcggcctgttctggatgttcagaatcagaatcatcctgtgcctgatgggcgccttcttctacctgatcagccccctggacttcgtgcccgaggccctgttcggcatcctgggcttcctggacgacttcttcgtgatcttcctgctgctgatctacatcagcatcatgtacagagaggtgatcacccagagactgaccagatag

SEQ ID NO: 290332 - DNA, 489 bp, Artificial Sequence
  derived and/or modified sequence
atgcacctgctgcccctggatagctctagtacccttacttgcactgtcccaagcgcttgcacaaaacccccttctcgctggagaccaactgtggatattttcttcgtggtgacgctgcttctaacagtgttcggtgaggacgaccagtcacaggacgtcttacggcttcatcaggacatcaacgactacaatcgacgcttcagtggccaaccgcgctcaatcatggaacgaatcatggacctaccgactttgctccgccatgcctttagggagatgttcagtgtgggcgggcttttctggatgtttagaatccgcattattctttgtctcatgggcgcttttttttatctcatcagtccactcgacttcgtgcccgaggctctgttcggcatcctgggattcctggacgacttttttgtcattttcctgctgctgatctacattagcataatgtatcgggaggtgatcactcaaaggttaacgagatag

SEQ ID NO: 290333 - DNA, 489 bp, Artificial Sequence
  derived and/or modified sequence
atgcacctgctgcccctggacagcagcagcaccctgacctgcaccgtgcccagcgcctgcaccaagccacccagccgctggaggcccaccgtggacatcttctttgtggtgaccctgctgctgactgtgtttggagaagatgaccagagccaggatgtgctgcggctgcaccaggacatcaatgactacaacagacgcttcagcggccagcccaggagcatcatggagcgcatcatggacctgcccaccctgctgcggcatgccttccgggagatgttttctgtgggcggcctcttctggatgttccgcatccgcatcatcctgtgcctgatgggcgccttcttctacctgatcagccccctggactttgtgcctgaggccctgtttggcatcctgggcttcctggatgacttctttgtgatcttcctgctgctgatctacatcagcatcatgtaccgggaggtgatcacccagaggctgaccaggtag

SEQ ID NO: 290334 - DNA, 489 bp, Artificial Sequence
  derived and/or modified sequence
atgcacctgctgcccctggacagcagcagcaccctgacctgcaccgtcccgtcagcctgtaccaaaccgccctctaggtggcgccctactgtggacatcttttttgtggtgaccctcctcttgacagtgtttggcgaggacgaccagagccaggatgtattgaggctacaccaggatatcaatgactacaatcgtagattctctgggcagcccaggtccattatggagaggataatggatctgccgactctgctgcgccatgcattccgcgagatgttctctgtgggggggctgttctggatgttccgcatccgtatcatcctgtgtctgatgggagcctttttctatctgatatcccctctcgattttgtgccggaggccctctttggcatcctgggattcctcgacgacttcttcgtcattttcttattgttgatttacatctcaattatgtatcgggaggtcatcactcagcggctgactcgctag

SEQ ID NO: 290335 - DNA, 489 bp, Artificial Sequence
  derived and/or modified sequence
atgcatctcctgcctcttgatagcagctctactttaacctgcacggtgcccagtgcttgcactaaacccccttcaaggtggcgtccaacagtggatattttttttgttgtgaccctgttgctgaccgtctttggagaagacgaccagtcacaagatgtcttacgtctgcaccaggatattaacgactacaataggcgtttcagtgggcaacctaggagcattatggagaggattatggatctgccgacattgcttaggcacgcattccgggagatgttcagtgtcgggggactcttttggatgtttcgaatccgaatcattctgtgcctaatgggcgcatttttctatcttatctcaccactcgacttcgtcccagaggccttattcggcatcctgggcttccttgacgatttctttgttatctttctgctgctcatatatatctccatcatgtaccgcgaggtaatcacccagagactgacgaggtag

SEQ ID NO: 290336 - DNA, 138 bp, Artificial Sequence
  derived and/or modified sequence
atggccaagtaccagggcgaggtgcagagcctgaagctggacgacgacagcgtgatcgagggcgtgagcgaccaggtgctggtggccgtggtggtgagcttcgccctgatcgccaccctggtgtacgccctgttctag

SEQ ID NO: 290337 - DNA, 348 bp, Artificial Sequence
  derived and/or modified sequence
atggccaagtaccagggcgaggtgcagagcctgaagctggacgacgacagcgtgatcgagggcgtgagcgaccaggtgctggtggccgtggtggtgagcttcgccctgatcgccaccctggtgtacgccctgttcagaaacgtgcaccagaacatccaccccgagaaccaggagctggtgagagtgctgagagagcagctgcagaccgagcaggacgcccccgccgccaccagacagcagttctacaccgacatgtactgccccatctgcctgcaccaggccagcttccccgtggagaccaactgcggccacctgttctgcggcgcctgcatcatcgcctactggtag

SEQ ID NO: 290338 - DNA, 138 bp, Artificial Sequence
  derived and/or modified sequence
atggcaaagtatcagggcgaggtgcaatctctgaaactggatgatgactctgtgatcgagggcgttagcgatcaggttctggtggccgtcgtagtttcatttgcccttatagcaacgctggtctatgccctgttctag

SEQ ID NO: 290339 - DNA, 348 bp, Artificial Sequence
  derived and/or modified sequence
atggcaaaatatcagggggaagtacagagtctgaagctggatgacgattctgtgatcgagggcgtttccgaccaagtgctagtagcagtagtcgtgagcttcgctttgatagctaccctcgtgtacgccctcttcagaaacgtgcatcagaacattcaccccgagaatcaggagttagttagagtgctgcgtgagcagctgcagaccgagcaggatgcccccgcagccactagacagcagttctatactgatatgtattgtccaatatgtttacaccaagcctcctttcctgtggagaccaattgtgggcaccttttctgtggcgcttgcattattgcttactggtag

SEQ ID NO: 290340 - DNA, 138 bp, Artificial Sequence
  derived and/or modified sequence
atggccaagtaccagggcgaggtgcagagcctgaagctggatgatgattctgtgattgaaggagtgtctgaccaggtgctggtggccgtggtggtgtcctttgccctgattgccaccctggtgtatgccctcttctag

SEQ ID NO: 290341 - DNA, 348 bp, Artificial Sequence
  derived and/or modified sequence
atggccaagtaccagggcgaggtgcagagcctgaagctggatgatgattctgtgattgaaggagtgtctgaccaggtgctggtggccgtggtggtgtcctttgccctgattgccaccctggtgtatgccctcttcagaaatgtgcaccagaacatccaccctgagaaccaggagctggtgcgggtgctgcgggagcagctgcagacagagcaggatgccccagctgccacccggcagcagttctacacagacatgtactgccccatctgcctgcaccaggccagcttccctgtggagaccaactgtggccacctgttctgtggggcctgcatcatcgcctactggtag

SEQ ID NO: 290342 - DNA, 138 bp, Artificial Sequence
  derived and/or modified sequence
atggccaagtaccagggcgaggtgcagagcctgaagctggacgacgatagcgtgatcgagggcgtgagcgaccaggtgctcgtcgcggtcgtggtttctttcgcccttatagccacattggtgtatgccttgttttag

SEQ ID NO: 290343 - DNA, 348 bp, Artificial Sequence
  derived and/or modified sequence
atggccaagtaccagggcgaggtgcagagcctgaagctggacgacgactccgtaatcgaaggcgtgtctgatcaggtcctggttgccgtcgtggtgagttttgccttgatcgcgacgctggtgtacgcactcttcagaaatgtgcatcagaatattcatccggagaaccaggagcttgtgagggtgttgcgggagcagctgcaaactgagcaggacgcgccggctgctactagacagcagttttatacggatatgtactgtcctatatgtcttcatcaggctagctttccagtggaaacgaactgcggccacctgttttgcggagcttgcattattgcgtactggtag

SEQ ID NO: 290344 - DNA, 138 bp, Artificial Sequence
  derived and/or modified sequence
atggctaaataccagggcgaggtgcagagtttgaagctggatgacgactcagtcatcgaaggtgtttccgatcaggtgttggttgcagttgtcgtaagctttgcattgatagctacactggtgtatgctcttttctag

SEQ ID NO: 290345 - DNA, 348 bp, Artificial Sequence
  derived and/or modified sequence
atggctaagtatcaaggagaagtgcagtccttgaagctggacgacgactctgtaatcgagggggtcagcgaccaagtccttgtcgccgtagtggtgtccttcgccctgatagccaccctggtgtacgccctattccgcaacgtccaccagaacatccatccagaaaaccaggagcttgtgcgggttctgagagagcagctgcagaccgaacaagatgccccagccgcaactcgtcaacagttttacactgatatgtattgccccatttgtctacaccaggcgagcttccctgtggagacaaattgcggtcacctgttctgcggagcatgcatcatcgcttactggtag

SEQ ID NO: 290346 - DNA, 195 bp, Artificial Sequence
  derived and/or modified sequence
ggcaccgtcgcccgcagcgctcgccccacgggccgcgcgtggagggtcccgacctggaatggccaaatatcaaggtgaagttcaaagtttgaaactggatgatgattcagttatagaaggagtaagcgaccaagtacttgtggcagttgtggtcagtttcgctttgattgctaccctggtatatgcacttttcag

SEQ ID NO: 290347 - DNA, 580 bp, Artificial Sequence
  derived and/or modified sequence
aaattagaaaggggacgtctagtgggttgcccgggaggggtggcgggagcggtcctggaaataatctgtcctctgtcgccgggaactggcgaggtagttccttcgcggtggagaggtgtcttataagactttgacacttcctgttttgtctgaaaaaaatgtgaattacctgtgatatttggactccagtgtggctgggctatctcccctcatacctatagaattagacctggaatggccaaatatcaaggtgaagttcaaagtttgaaactggatgatgattcagttatagaaggagtaagcgaccaagtacttgtggcagttgtggtcagtttcgctttgattgctaccctggtatatgcacttttcagaaatgtacatcaaaacattcacccagaaaaccaggagctagtaagggtacttcgagaacagcttcaaacagaacaggatgcacctgctgccactcgacagcagttctacactgacatgtactgtcccatctgcctgcaccaagcctccttcccggtggagaccaactgtggacatcttttttgtggtgcctgcattattgcttactggc

SEQ ID NO: 290348 - protein, 501 aa, Artificial Sequence
  derived and/or modified sequence
MDTQAGSVDEENGRQLGEVELQCGICTKWFTADTFGIDTSSCLPFMTNYSFHCNVCHHSGNTYFLRKQANLKEMCLSALANLTWQSRTQDEHPKTMFSKDKDIIPFIDKYWECMTTRQRPGKMTWPNNIVKTMSKERDVFLVKEHPDPGSKDPEEDYPKFGLLDQDLSNIGPAYDNQKQSSAVSTSGNLNGGIAAGSSGKGRGAKRKQQDGGTTGTTKKARSDPLFSAQRLPPHGYPLEHPFNKDGYRYILAEPDPHAPDPEKLELDCWAGKPIPGDLYRACLYERVLLALHDRAPQLKISDDRLTVVGEKGYSMVRASHGVRKGAWYFEITVDEMPPDTAARLGWSQPLGNLQAPLGYDKFSYSWRSKKGTKFHQSIGKHYSSGYGQGDVLGFYINLPEDTETAKSLPDTYKDKALIKFKSYLYFEEKDFVDKAEKSLKQTPHSEVSINFGPCFKYPPKDLTYRPMSDMGWGAVVEHTLADVLYHVETEVDGRRSPPWEP

SEQ ID NO: 290349 - DNA, 1506 bp, Artificial Sequence
  derived and/or modified sequence
atggatactcaggccggaagtgtcgacgaagagaacgggcggcagcttggcgaggttgagctgcagtgcggcatttgcaccaaatggtttacagcagacacttttggaattgatacgtcttcttgcctcccatttatgactaattatagtttccactgcaatgtctgtcatcattccggcaacacgtatttcctgaggaagcaggcgaacttgaaggaaatgtgtctaagtgccttagcaaacctgacctggcaatccagaacccaagacgagcatcccaagacaatgttctccaaggataaggatattatcccgttcatcgataagtattgggagtgtatgacaacgcgccaacgcccaggcaagatgacttggcctaacaacatcgtgaagactatgagcaaggagcgcgacgtatttttagtcaaggaacatccagatccaggatcaaaggaccctgaagaagattacccaaaattcggcttgctcgaccaggatcttagcaacattggtcccgcctatgataaccaaaagcagtcttccgctgtttctacatcaggaaatctcaatggggggatcgccgctggcagtagcggcaaaggacgaggggctaagcgaaagcagcaggacggcggcacaacaggaaccacgaagaaagcccgatctgaccccctattctccgctcagcgacttcctcctcacggctaccctttggagcacccatttaacaaggacggctacagatatatcctggccgagccggatccccatgctcctgatccggagaagcttgaacttgattgctgggccggcaagccaattcccggggacctctatcgcgcttgcctttacgaacgagtgctgcttgccctgcatgatcgagcaccacaacttaaaattagtgacgacaggctcaccgtggtaggagagaaggggtacagcatggtaagggcatcccatggcgtgaggaaaggggcctggtatttcgaaattaccgtagatgaaatgccacctgatactgccgcccggctaggatggtcccaaccgcttggcaaccttcaggcgcccctgggctatgacaaattctcctactcctggaggtcgaaaaaggggacaaaattccatcaatccatcggcaagcattacagcagtggatatggtcagggagatgtgctgggcttctacattaatctacctgaggatacggaaacggcaaaatctctaccagatacctacaaggataaggctctgatcaagttcaagtcgtatctctactttgaggagaaagactttgtggacaaggctgaaaaaagtctgaagcaaacacctcacagcgaggtgtcaatcaatttcggaccctgtttcaaatatccgcctaaagacttgacatatcggcccatgagtgatatggggtggggcgcagtcgtagagcacactctcgccgatgtcctatatcacgtggagacagaggtggacggaagacgttctcccccctgggagccttag

SEQ ID NO: 290350 - DNA, 1506 bp, Artificial Sequence
  derived and/or modified sequence
atggacactcaggctggtagcgtggacgaagaaaacggcaggcagcttggcgaggtcgagctgcagtgcggcatttgtaccaagtggttcaccgctgacactttcggaatcgatactagttcctgtctcccctttatgacaaattactctttccactgcaatgtgtgccatcactctgggaacacatatttcctgagaaagcaggccaacctgaaggaaatgtgtttgagcgccctagcaaacctcacatggcaaagtcggacacaggacgagcaccccaagacaatgtttagcaaagataaagacatcatcccctttatcgataaatattgggaatgtatgaccacccgccagcgcccggggaaaatgacgtggccaaataatattgtcaagacaatgtccaaagagcgcgatgtgttcctggtcaaggaacatcccgatcccggctcaaaagacccggaagaggactatccaaagtttgggctcctcgatcaggacctcagcaatatcggccccgcttacgacaatcagaagcagtcaagtgccgtgtctactagcggtaatctgaatgggggtattgccgctggaagctctggaaagggcagaggagctaaacgcaaacaacaggacggagggactaccggaaccaccaagaaggcaagaagcgaccccctattttccgcacaaaggctgcccccgcacggatatccattggagcacccatttaataaggatgggtacagatacatcttggcggagccagatccacatgccccggatccagaaaaactggaactggactgctgggccggaaagcccattcccggcgatctgtaccgggcatgtctatatgagcgcgtcctactagcccttcacgatagggccccccagctgaagatatccgatgatagactgaccgtcgtgggcgaaaaaggctacagcatggtgcgggcatcccatggagtgaggaagggagcttggtattttgaaatcacagtcgatgaaatgccccccgatacagccgcgcgcctgggttggagccaacctttggggaacctgcaggctcctctagggtacgataagttcagttattcatggagatctaaaaaggggactaagttccatcagtccattggaaagcattatagttcaggatatgggcaaggagatgtccttggtttttatattaatctccccgaggacacggagacagctaaaagcctacctgacacttacaaggacaaagcactgatcaaattcaagtcttatctttattttgaggaaaaagacttcgtggataaagctgagaaaagtctgaagcagaccccccattctgaagtaagcataaacttcggcccttgttttaaataccctccgaaagatctcacgtataggccaatgagcgatatggggtggggcgcggtggtggaacacactcttgctgacgtgctgtaccatgtcgagactgaagtggatggacggcgcagccctccctgggagccttag

SEQ ID NO: 290351 - DNA, 1506 bp, Artificial Sequence
  derived and/or modified sequence
atggacacccaggccggctctgtggatgaagaaaatggccggcagctgggggaggtggagctgcagtgtggcatctgcaccaagtggttcaccgctgacacctttggaattgacaccagcagctgcctgcccttcatgaccaactacagcttccactgcaatgtgtgccaccacagcggcaacacctacttcctgaggaagcaggccaacctgaaggagatgtgcctgagcgccctggccaacctgacctggcagagcaggacccaggatgagcaccccaagaccatgttcagcaaggacaaggacatcatccccttcatcgacaagtactgggagtgcatgaccacccggcagaggcctgggaagatgacctggcccaacaacatcgtgaagaccatgagcaaggagagagatgtgttcctggtgaaggagcacccagaccccggcagcaaggaccctgaggaggactaccccaagtttggcctgctggaccaggacctgagcaacatcggccctgcctatgacaaccagaagcagagcagcgctgtgtccaccagcggcaacctgaatggaggcattgctgctggcagcagcggcaagggccgcggggccaagaggaagcagcaggacggcggcaccaccggcaccaccaagaaggcccggagtgaccccctcttcagcgcccagaggctgcccccccacggctaccccctggagcaccccttcaacaaggatggctaccgctacatcctggccgagccagacccccacgccccagaccctgagaagctggagctggactgctgggccggcaagcccatccctggggacctgtaccgggcctgcctgtatgaaagagtgctgctggccctgcatgaccgggccccccagctgaagatcagtgatgaccggctgactgtggtgggggagaagggctacagcatggtgcgggccagccacggcgtgaggaagggggcctggtactttgagatcaccgtggatgagatgcccccagacacagctgcccggctgggctggagccagcccctgggcaacctgcaggcccccctgggctatgacaagttctcctacagctggaggagcaagaagggcaccaagttccaccagagcatcggcaagcactacagcagcggctacggccagggagatgtgctgggcttctacatcaacctgcctgaggacacagaaacagccaagagcctgcctgacacctacaaggacaaggccctgatcaagttcaagagctacctgtactttgaggagaaggactttgtggacaaggccgagaagagcctgaagcagaccccccacagcgaggtgtccatcaactttggcccctgcttcaagtacccacccaaggacctgacctaccggcccatgtctgacatgggctggggcgctgtggtggagcacaccctggctgatgtgctgtaccacgtggagacagaggtggatggccgccgcagccccccctgggagccctag

SEQ ID NO: 290352 - DNA, 1506 bp, Artificial Sequence
  derived and/or modified sequence
atggacacccaggccggcagcgtggacgaggagaacggccggcagctcggggaagtggagttgcagtgcggcatctgcactaaatggtttacggctgatactttcggaatagatacctccagctgtttgcccttcatgactaattactcctttcactgcaatgtgtgccatcactctgggaatacgtacttcctcaggaaacaggccaatctgaaggagatgtgcctgagcgctctggcgaatctgacttggcagtctcggacgcaggacgaacacccgaagaccatgttttccaaggataaggacattattcccttcattgacaaatattgggaatgtatgaccactcgccagcggcctggcaagatgacatggcccaacaacatcgtgaaaaccatgagcaaagaaagggacgtgttcctggtgaaagaacaccctgaccctggctctaaggaccccgaagaggattatcccaaattcggacttctggaccaggatctctcgaatattgggcccgcctacgataaccagaagcagagcagcgcagtgagcacttccggcaacctgaatggcggcatcgccgcgggcagctccggaaaaggacggggcgccaagaggaagcaacaggacggcggcacgactgggacaaccaaaaaggcccgctcggaccccttgttctctgcgcagcgcctcccccctcacggctacccgttagaacaccccttcaacaaagatggatatcgttacatactggcagagccagacccccacgcccctgatccggagaagctggaactggactgctgggctggaaagcctatccccggcgatttgtaccgtgcgtgcctttacgaacgggtgctgctggcactgcacgatcgtgctccccagctaaagatttccgacgatcgcctcaccgtggtcggggaaaagggttattctatggtcagggccagccatggtgttaggaagggcgcatggtacttcgagatcacagtcgatgaaatgccccccgacaccgcagcgcgtctaggctggagccaaccattaggaaacttgcaagcgccacttggctatgataagtttagctacagttggcgcagcaagaaagggacaaaattccaccagtccatcggcaaacattattcgtcaggttacggccagggggatgttctggggttctacattaacctacctgaggacacagaaacagccaagtcactgcccgacacctacaaggataaggccctgattaagtttaagtcatacctatactttgaagagaaggattttgtcgataaggctgaaaagagcctgaagcaaaccccgcactctgaggtctctattaacttcggcccctgtttcaaatacccaccgaaggatctcacttaccgtcccatgtccgacatgggctggggcgcagtggtggagcacacccttgccgacgtactctaccatgtggaaaccgaggtcgatggaagaaggtcccctccctgggagccatag

SEQ ID NO: 290353 - DNA, 1506 bp, Artificial Sequence
  derived and/or modified sequence
atggacacccaggccggcagcgtggacgaggagaacggccggcagttgggcgaggtggagctccagtgcggcatatgcaccaaatggtttactgctgacacattcgggattgacactagttcttgcctgccgttcatgacaaattattcatttcattgcaacgtgtgccaccactcaggtaatacctattttcttcggaagcaggccaatctcaaggagatgtgtctcagtgccctggccaaccttacatggcagtcacgcacccaagatgagcaccccaagaccatgttttctaaggacaaggacatcatccccttcattgacaaatactgggagtgcatgaccacgcgccagaggccgggtaaaatgacttggccgaacaacattgtaaaaaccatgtcaaaggaaagagatgtcttcctcgtgaaggaacatcctgatccaggatcaaaggatcccgaggaggactaccccaagtttggtctgctcgatcaggatctaagcaatattggtcccgcttatgacaatcaaaagcagtcttctgctgtaagcacctccggcaacctcaacggaggcatcgccgcaggttcctctggcaagggtcggggcgctaagcggaagcagcaggatggaggaacaacgggaaccacaaagaaggctaggagcgaccccctgttttccgcccaaagactcccccctcacggttatcctctggagcatccttttaataaggacggctatcgttacattctcgcagagccggaccctcacgcacccgatccagagaagctcgaactggattgctgggctggcaagccaatacctggcgacctctatcgggcttgtctttacgagagggtgctgctggccctgcacgaccgcgcgcctcaattaaagatttcagatgatcggttgaccgtcgttggcgaaaaaggttatagtatggtcagagcgtctcatggagttaggaagggtgcttggtatttcgaaatcactgtggacgagatgcctccggataccgcagcgaggttgggctggagtcagcccctaggcaaccttcaagcacccctggggtatgataagttctcttactcctggagaagcaagaaggggacaaaatttcatcagtctataggtaagcactattcttctggctacggccagggtgatgtgttaggcttttacattaatctgccggaggacacagaaaccgccaagtcactgcctgatacctataaggataaagctttgattaaatttaaaagctatctgtactttgaagaaaaagactttgtggacaaggccgagaagtctctcaaacagacgccgcacagcgaggtttcaataaatttcggcccctgtttcaagtacccccctaaggaccttacttaccggcctatgtcagacatgggctggggggcagtggtcgaacacacgctggccgatgttctgtaccacgtggagactgaagtcgatggccgaaggtccccgccatgggagccatag

SEQ ID NO: 290354 - DNA, 1506 bp, Artificial Sequence
  derived and/or modified sequence
atggacacacaggcaggctcagtggatgaggagaatgggaggcagcttggggaagtcgaacttcagtgcggtatttgcaccaaatggtttactgctgatacgtttgggatcgacacctcgtcatgcctaccctttatgaccaattatagctttcactgcaatgtgtgccaccacagcggtaacacgtatttcctcagaaagcaggctaatctgaaggagatgtgcttgtcggccctggctaacctgacttggcagagtagaacccaagatgaacaccctaaaactatgttcagcaaggacaaagacatcattcccttcatcgataaatattgggagtgtatgacaacaaggcagaggcctggcaagatgacttggcccaataatattgtgaagaccatgtccaaggaacgcgatgtcttcctggtcaaagagcaccccgatccgggaagtaaagaccctgaagaggactatccaaaatttggcctgctcgatcaggatctgagtaatattggccctgcttatgacaaccagaagcaatcttctgcagtgtctacctcaggcaatctgaacggtggaatcgcagcagggtcttccggaaaaggaagaggcgctaaaaggaaacagcaggatgggggaacaacaggtaccacgaagaaggccagatccgaccctcttttttcagcccagcggctgcctccccacgggtatcctttggaacacccattcaacaaggacggctatagatacattctggccgagccagaccctcatgcccctgatccggaaaagctagagcttgactgttgggcgggaaagcctatacccggagacctgtaccgcgcatgtttgtacgagcgggtccttctggctctccatgatagggctccccagctgaaaatctctgacgaccgcttgaccgtggtcggcgagaagggctattccatggtgcgagcctctcatggtgtgcgcaaaggggcttggtacttcgaaataactgtcgacgagatgcccccagacacagccgctcggctaggatggtctcagccattaggaaacctgcaggcccctttagggtacgacaaattctcatactcgtggagaagcaagaaaggaacaaaattccaccagtccattggtaagcattatagcagtggctacgggcagggggatgtgctgggattctacattaacctgcccgaggataccgaaacagcaaagagtctgcccgatacgtacaaagataaggcgctcatcaagttcaaatcctatctgtactttgaagagaaagacttcgtagataaggctgaaaaatcgctcaagcagacgcctcatagcgaggtgtcaatcaactttgggccatgcttcaagtatcctcctaaggacctaacttaccgtccaatgagtgatatggggtggggtgcagtagtggagcacaccttggcagatgtgctttatcacgtcgaaacggaagtcgatggtagacgttcacccccatgggagccatag

SEQ ID NO: 290355 - DNA, 1506 bp, Artificial Sequence
  derived and/or modified sequence
atggatacccaggccggatctgtagatgaagaaaacggccgacaattgggagaggttgaactgcagtgtgggatctgcactaaatggtttaccgcggacacattcgggattgacacatccagttgcctgccctttatgaccaactactctttccattgtaatgtgtgtcaccactccggcaacacatactttctgaggaaacaagcaaacctgaaagagatgtgcctttcagcccttgcaaatcttacatggcaatctcgaacacaagacgagcacccaaaaactatgttctccaaagataaggatataattccgtttatcgataagtactgggagtgtatgaccacacggcaaagaccgggaaagatgacttggcctaataacatcgttaaaaccatgagtaaggaaagagacgtgttcctcgtaaaggaacatccagatcccggatccaaggacccggaggaggattaccccaaattcgggctattagaccaggacttatccaacatcggccctgcctatgacaatcaaaagcagtcatccgcagtctcgaccagtgggaacttgaatgggggaatagccgctggctccagcggtaaaggcagaggcgcaaagcgtaagcaacaagacggagggaccactggtacaaccaaaaaggccagatcagacccattgttttctgcacagaggctgcctccgcacggatatccgctggagcaccccttcaataaggatggatataggtacatcttggcagagccagacccacacgctcccgatccagaaaagctggaattggactgctgggcaggcaagcccatccccggagacctctatcgagcgtgcctctacgaacgggtcctactcgccctgcatgatcgcgcaccccagcttaaaatcagcgacgatcggctgacagtggtcggagagaaggggtattctatggtaagggccagccatggtgtgagaaaaggtgcatggtacttcgagatcactgtggacgagatgccaccggacaccgctgctagactggggtggtcccagcccctgggcaatcttcaagctcccctggggtacgacaaattctcctacagttggaggagtaaaaagggcacaaaatttcaccaatctatcggcaaacattatagcagcggctatggacagggcgatgttttagggttttacatcaatttgcccgaggatacggagaccgcgaagagtctccccgacacatataaagataaagcccttattaagtttaagtcctatctttacttcgaggaaaaggattttgtcgataaagccgaaaagagtctgaaacagaccccccactccgaagtgtcgatcaacttcggcccttgttttaaatacccgcctaaagatcttacctaccgcccaatgagcgacatgggttggggcgctgtggtcgagcacactcttgccgatgtattgtaccacgtcgagacagaagtagacggaagaaggtcccccccatgggaaccctag

SEQ ID NO: 290356 - DNA, 2482 bp, Artificial Sequence
  derived and/or modified sequence
cacagcaacgcgcgcgagagaagagagtattctcgcgagaagtccaggggtggccgtgatggcggcggcaggagcaggacctggccaggaagcgggtgccgggcctggcccaggagcggtcgcaaatgcaacaggggcagaagagggggagatgaagccggtggcagcgggagcagccgctcctcctggagaggggatctctgctgctccgacagttgagcccagttccggggaggctgaaggcggggaggcaaacttggtcgatgtaagcggtggcttggagacagaatcatctaatggaaaagatacactagaaggtgctggggatacatcagaggtgatggatactcaggcgggctccgtggatgaagagaatggccgacagttgggtgaggtagagctgcaatgtgggatttgtacaaaatggttcacggctgacacatttggcatagatacctcatcctgtctacctttcatgaccaactacagttttcattgcaacgtctgccatcacagtgggaatacctatttcctccggaagcaagcaaacttgaaggaaatgtgccttagtgctttggccaacctgacatggcagtcccgaacacaggatgaacatccgaagacaatgttctccaaagataaggatattataccatttattgataaatactgggagtgcatgacaaccagacagagacctgggaaaatgacttggccaaataacattgttaaaacaatgagtaaagaaagagatgtattcttggtaaaggaacacccagatccaggcagtaaagatccagaagaagattaccccaaatttggacttttggatcaggaccttagtaacattggtcctgcttatgacaaccaaaaacagagcagtgctgtgtctactagtgggaatttaaatgggggaattgcagcaggaagcagcggaaaaggacgaggagccaagcgcaaacagcaggatggagggaccacagggaccaccaagaaggcccggagtgaccctttgttttctgctcagcgccttccccctcatggctacccattggaacacccgtttaacaaagatggctatcggtatattctagctgagcctgatccgcacgcccctgaccccgagaagctggaacttgactgctgggcaggaaaacctattcctggagacctctacagagcctgcttgtatgaacgggttttgttagccctacatgatcgagctccccagttaaagatctcagatgaccggctgactgtggttggagagaagggctactctatggtgagggcctctcatggagtacggaaaggtgcctggtattttgaaatcactgtggatgagatgccaccagataccgctgccagactgggttggtcccagcccctaggaaaccttcaagctcctttaggttatgataaatttagctattcttggcggagcaaaaagggaaccaagttccaccagtccattggcaaacactactcttctggctatggacagggagacgtcctgggattttatattaatcttcctgaagacacagagacagccaagtcattgccagacacatacaaagataaggctttgataaaattcaagagttatttgtattttgaggaaaaagactttgtggataaagcagagaagagcctgaagcagactccccatagtgaggtttccattaactttggaccatgcttcaagtatcctccgaaggatctcacttaccgccctatgagtgacatgggctggggcgccgtggtagagcacaccctggctgacgtcttgtatcacgtggagacagaagtggatgggaggcgcagtcccccatgggaaccctgaccaggtccctcttttctgtcaaggactttctgggaataatactgggggttttgtttttgtttttgaactgtctcaaatgttctcccaaagatgctaaaaacacagcctctccttttagcaagttaaaaggctgggtaggactgcgggagactgcctgcctttcaccattttctccccacttccagtgactgctcttattttgtgtaccataagccaacaaccgctgactccaggattgcataagccccctgtgaaatcggtgctgtactgcataccctgccagctgtgacttgttatcctactatattttctaaggagtgaataatattgtccgagtaactaacttatttaaaagacatttccttctgtgggcattgactgtatcccacctgttttccaaggaaatggtaacctgtttctgagaacacctgaaatcaatggctatacattccaaaccaatctaaacgctatttccttttggtgtgggtttggttttgttcattttgaaatacacttttgaacactgagatccgtaaaactactagatctctggaagtgtaattgtgaaagaaacttgcttgcagctttaacaaaatgagaaacttcccaaataaaacttgttttgaagtttatgtg

SEQ ID NO: 290357 - DNA, 2433 bp, Artificial Sequence
  derived and/or modified sequence
ggagctgaggctcctgtcgttatctctgatccttgcaccctggcaggaagctggtagctcacactttaacgggaggccttcacatattccagaaaagaaaccactttgcagtgccagactggaagaagtaacggtcactctgaaaacagggtgggagagctgcctctctttgaacctctcccaggaccaactctaacccagggaggcaaacttggtcgatgtaagcggtggcttggagacagaatcatctaatggaaaagatacactagaaggtgctggggatacatcagaggtgatggatactcaggcgggctccgtggatgaagagaatggccgacagttgggtgaggtagagctgcaatgtgggatttgtacaaaatggttcacggctgacacatttggcatagatacctcatcctgtctacctttcatgaccaactacagttttcattgcaacgtctgccatcacagtgggaatacctatttcctccggaagcaagcaaacttgaaggaaatgtgccttagtgctttggccaacctgacatggcagtcccgaacacaggatgaacatccgaagacaatgttctccaaagataaggatattataccatttattgataaatactgggagtgcatgacaaccagacagagacctgggaaaatgacttggccaaataacattgttaaaacaatgagtaaagaaagagatgtattcttggtaaaggaacacccagatccaggcagtaaagatccagaagaagattaccccaaatttggacttttggatcaggaccttagtaacattggtcctgcttatgacaaccaaaaacagagcagtgctgtgtctactagtgggaatttaaatgggggaattgcagcaggaagcagcggaaaaggacgaggagccaagcgcaaacagcaggatggagggaccacagggaccaccaagaaggcccggagtgaccctttgttttctgctcagcgccttccccctcatggctacccattggaacacccgtttaacaaagatggctatcggtatattctagctgagcctgatccgcacgcccctgaccccgagaagctggaacttgactgctgggcaggaaaacctattcctggagacctctacagagcctgcttgtatgaacgggttttgttagccctacatgatcgagctccccagttaaagatctcagatgaccggctgactgtggttggagagaagggctactctatggtgagggcctctcatggagtacggaaaggtgcctggtattttgaaatcactgtggatgagatgccaccagataccgctgccagactgggttggtcccagcccctaggaaaccttcaagctcctttaggttatgataaatttagctattcttggcggagcaaaaagggaaccaagttccaccagtccattggcaaacactactcttctggctatggacagggagacgtcctgggattttatattaatcttcctgaagacacagagacagccaagtcattgccagacacatacaaagataaggctttgataaaattcaagagttatttgtattttgaggaaaaagactttgtggataaagcagagaagagcctgaagcagactccccatagtgaggtttccattaactttggaccatgcttcaagtatcctccgaaggatctcacttaccgccctatgagtgacatgggctggggcgccgtggtagagcacaccctggctgacgtcttgtatcacgtggagacagaagtggatgggaggcgcagtcccccatgggaaccctgaccaggtccctcttttctgtcaaggactttctgggaataatactgggggttttgtttttgtttttgaactgtctcaaatgttctcccaaagatgctaaaaacacagcctctccttttagcaagttaaaaggctgggtaggactgcgggagactgcctgcctttcaccattttctccccacttccagtgactgctcttattttgtgtaccataagccaacaaccgctgactccaggattgcataagccccctgtgaaatcggtgctgtactgcataccctgccagctgtgacttgttatcctactatattttctaaggagtgaataatattgtccgagtaactaacttatttaaaagacatttccttctgtgggcattgactgtatcccacctgttttccaaggaaatggtaacctgtttctgagaacacctgaaatcaatggctatacattccaaaccaatctaaacgctatttccttttggtgtgggtttggttttgttcattttgaaatacacttttgaacactgagatccgtaaaactactagatctctggaagtgtaattgtgaaagaaacttgcttgcagctttaacaaaatgagaaacttcccaaataaaacttgttttgaagttta

SEQ ID NO: 290358 - DNA, 1506 bp, Artificial Sequence
  derived and/or modified sequence
atggacacccaggccggcagcgtggacgaggagaacggcagacagctgggcgaggtggagctgcagtgcggcatctgcaccaagtggttcaccgccgacaccttcggcatcgacaccagcagctgcctgcccttcatgaccaactacagcttccactgcaacgtgtgccaccacagcggcaacacctacttcctgagaaagcaggccaacctgaaggagatgtgcctgagcgccctggccaacctgacctggcagagcagaacccaggacgagcaccccaagaccatgttcagcaaggacaaggacatcatccccttcatcgacaagtactgggagtgcatgaccaccagacagagacccggcaagatgacctggcccaacaacatcgtgaagaccatgagcaaggagagagacgtgttcctggtgaaggagcaccccgaccccggcagcaaggaccccgaggaggactaccccaagttcggcctgctggaccaggacctgagcaacatcggccccgcctacgacaaccagaagcagagcagcgccgtgagcaccagcggcaacctgaacggcggcatcgccgccggcagcagcggcaagggcagaggcgccaagagaaagcagcaggacggcggcaccaccggcaccaccaagaaggccagaagcgaccccctgttcagcgcccagagactgcccccccacggctaccccctggagcaccccttcaacaaggacggctacagatacatcctggccgagcccgacccccacgcccccgaccccgagaagctggagctggactgctgggccggcaagcccatccccggcgacctgtacagagcctgcctgtacgagagagtgctgctggccctgcacgacagagccccccagctgaagatcagcgacgacagactgaccgtggtgggcgagaagggctacagcatggtgagagccagccacggcgtgagaaagggcgcctggtacttcgagatcaccgtggacgagatgccccccgacaccgccgccagactgggctggagccagcccctgggcaacctgcaggcccccctgggctacgacaagttcagctacagctggagaagcaagaagggcaccaagttccaccagagcatcggcaagcactacagcagcggctacggccagggcgacgtgctgggcttctacatcaacctgcccgaggacaccgagaccgccaagagcctgcccgacacctacaaggacaaggccctgatcaagttcaagagctacctgtacttcgaggagaaggacttcgtggacaaggccgagaagagcctgaagcagaccccccacagcgaggtgagcatcaacttcggcccctgcttcaagtacccccccaaggacctgacctacagacccatgagcgacatgggctggggcgccgtggtggagcacaccctggccgacgtgctgtaccacgtggagaccgaggtggacggcagaagaagccccccctgggagccctag

SEQ ID NO: 290359 - DNA, 558 bp, Artificial Sequence
  derived and/or modified sequence
atggacgacagcatcaacaacagattcagctacgtgacccacgaggacatctgcaactgcttcaacggcgacaccctgctggccatccaggcccccagcggcacccagctggaggtgcccatccccgagatgggccagaacggccagaagaagtaccagatcaacctgaagagccacagcggccccatccacgtgctgctgatcaacaaggagagcagcagcagcaagcccgtggtgttccccgtgcccccccccgacgacctgacccagcccagcagccagagcctgacccccgtgaccccccagaagagcagcatggccacccagaacctgcccgagcagcacgtgagcgagagaagccaggccctgcagcagaccagcgccaccgacatcagcagcgccggcagcatcagcggcgacatcatcgacgagctgatgagcagcgacgtgttccccctgctgagactgagccccacccccgccgacgactacaacttcaacctggacgacaacgagggcgtgtgcgacctgttcgacgtgcagatcctgaactactag

SEQ ID NO: 290360 - DNA, 549 bp, Artificial Sequence
  derived and/or modified sequence
agctacgacagcaccttcagctacgtgacccacgaggacatctgcaactgcttcaacggcgacaccctgctggccatccaggcccccagcggcacccagctggaggtgcccatccccgagatgggccagaacggccagaagaagtaccagatcaacctgaagagccacagcggccccatccacgtgctgctgatcaacaaggagagcagcagcagcaagcccgtggtgttccccgtgcccccccccgacgacctgacccagcccagcagccagagcctgacccccgtgaccccccagaagagcagcatggccacccagaacctgcccgagcagcacgtgagcgagagaagccaggccctgcagcagaccagcgccaccgacatcagcagcgccggcagcatcagcggcgacatcatcgacgagctgatgagcagcgacgtgttccccctgctgagactgagccccacccccgccgacgactacaacttcaacctggacgacaacgagggcgtgtgcgacctgttcgacgtgcagatcctgaactactag

SEQ ID NO: 290361 - DNA, 558 bp, Artificial Sequence
  derived and/or modified sequence
atggacgacagtataaataataggtttagttacgtaacgcacgaagacatttgcaactgtttcaacggcgacaccctgctggccatccaggctccttccggcacccaactggaggtgcccatacccgaaatgggacagaatgggcaaaagaaataccagattaaccttaaatcacactccggcccgattcacgtgctcctaattaacaaggaaagctcaagtagtaaacccgtcgtgttccccgtgccaccccctgatgatctgacccagccttcgtcacagtcgcttaccccagtgacaccccagaagagctccatggcaactcaaaatcttcccgagcagcatgtgagcgagcgctctcaggcactgcaacagactagtgcgaccgacataagtagcgcaggttctatcagcggggatattattgatgaactgatgtcgagcgacgtttttcctcttttgcgtttaagcccaacaccagctgatgattacaacttcaatctggacgataacgaaggcgtttgcgatctttttgacgttcagattctcaattactag

SEQ ID NO: 290362 - DNA, 549 bp, Artificial Sequence
  derived and/or modified sequence
agctatgactcaactttttcctatgtcactcatgaagacatctgtaactgcttcaatggcgatactcttctggccattcaggcaccgtctggtacccaactggaggtgcccatccctgagatgggccagaacggtcagaagaagtaccagattaatctcaagtctcactccgggcccatccacgtattgttgatcaataaggagagttcgtctagtaaaccagtagtcttcccagttcccccgcccgatgaccttacacagccctccagtcaatccctgacccctgtgactcctcaaaaatccagtatggccacccaaaacctccctgaacaacacgtgtctgagagaagccaggccctacagcaaacaagcgctaccgatataagtagcgccgggtccatctctggcgatattattgatgaactgatgtcttccgatgtctttccactgctcagactcagcccaacacctgccgatgactacaacttcaacctggatgacaacgagggtgtgtgtgacctctttgacgtccagatcctgaattattag

SEQ ID NO: 290363 - DNA, 558 bp, Artificial Sequence
  derived and/or modified sequence
atggatgacagcatcaacaaccgcttctcctatgtgacccatgaggacatctgcaactgcttcaacggggacaccctgctggccatccaggcccccagcggcacccagctggaggtgcccatccctgagatgggccagaatggccagaagaagtaccagatcaacctgaagagccacagcggccccatccacgtgctgctgatcaacaaggagagcagcagcagcaagcctgtggtgtttcctgtgcccccaccagatgacctgacccagcccagcagccagagcctgacccctgtgaccccccagaagagctccatggccacccagaacctgcctgagcagcacgtgtctgagaggagccaggccctgcagcagaccagcgccacagacatcagcagcgctggcagcatcagcggggacatcattgatgagctgatgagcagtgatgtgttccccctgctgcggctgagccccaccccagcagatgactacaacttcaacctggatgacaatgaaggagtgtgtgacctgtttgatgtgcagatcctgaactactag

SEQ ID NO: 290364 - DNA, 549 bp, Artificial Sequence
  derived and/or modified sequence
tcctatgacagcaccttctcctatgtgacccatgaggacatctgcaactgcttcaatggagacaccctgctggccatccaggcccccagcggcacccagctggaggtgcccatccctgagatgggccagaatggccagaagaagtaccagatcaacctgaagagccacagcggccccatccacgtgctgctgatcaacaaggagagcagcagcagcaagcctgtggtgtttcctgtgcccccaccagatgacctgacccagcccagcagccagagcctgacccctgtgaccccccagaagagctccatggccacccagaacctgcctgagcagcacgtgtctgagaggagccaggccctgcagcagaccagcgccacagacatcagcagcgctggcagcatcagcggggacatcattgatgagctgatgagcagtgatgtgttccccctgctgcggctgagccccaccccagcagatgactacaacttcaacctggatgacaatgaaggagtgtgtgacctgtttgatgtgcagatcctgaactactag

SEQ ID NO: 290365 - DNA, 558 bp, Artificial Sequence
  derived and/or modified sequence
atggacgacagcatcaacaaccggttcagctacgtgacccacgaggacatctgtaactgttttaatggcgacaccttgctggccatccaagcccccagcgggacccagcttgaagtgcctatacccgagatggggcaaaacggtcagaagaaatatcaaataaacctgaaatcacatagcggccctatccatgtcctgctgattaacaaggagagctccagttcaaaaccagtcgtatttccagtccctcctcccgatgatctgacccagccaagttctcagagtctcacccctgtgacacctcagaagagctctatggcaactcagaaccttcctgagcaacacgtttcggagaggagccaggcattgcagcagacctcggctacagacatctcttctgcgggtagcatttcgggagacatcatcgacgaattgatgagctcagacgtctttcctctgctgcgcttatcccctacccctgccgatgactataactttaatctagacgacaacgaaggtgtgtgtgacctattcgatgtgcagatcttgaactactag

SEQ ID NO: 290366 - DNA, 549 bp, Artificial Sequence
  derived and/or modified sequence
agctacgacagcaccttcagctacgtgacccacgaggacatctgcaactgctttaatggagatacccttctggccatccaggctcccagtgggacacagttggaggtgccgattccagagatgggtcagaacggtcagaagaaatatcaaattaacctgaaatcacactctggtcctattcatgtgctactcattaacaaagagtctagcagctcaaaacccgtcgtatttcctgtgccccctccagacgacctgactcagccaagttctcagagcctcacccctgtcacacctcagaagagctctatggctactcagaatttaccagagcaacacgtgtctgaaaggagccaggcactgcagcagacgtccgccacagacatatcctcagcaggcagtatttccggcgacatcatagatgagctgatgtcctcagacgtctttccgctattacgactgtctccgacacccgcagacgattataattttaatctcgacgataatgaaggcgtgtgcgacctgttcgacgttcaaattctcaattattag

SEQ ID NO: 290367 - DNA, 558 bp, Artificial Sequence
  derived and/or modified sequence
atggatgactcaatcaataataggtttagttatgtgacgcatgaggacatttgtaactgtttcaatggggacaccctgctggctatccaggctccatctggcacacagctggaggtgccaatccccgaaatgggtcagaacggacaaaagaagtaccaaattaatctcaaatctcactcgggccctatccacgtattactcatcaataaggaaagttctagctctaagcctgtcgtgtttcctgttccgcctccagacgacctgacccaaccttcctcgcagagcctgactcctgtcaccccccagaagagcagcatggccacccagaatctgccagagcaacatgtgtctgaaagatcccaagcacttcaacagacatccgcgactgacatctcaagcgccggatctataagcggcgacatcattgatgagctcatgagctctgacgtattccctttgcttagattgtcgccaacgcccgctgacgactacaattttaacctagatgacaatgaaggagtctgtgatctgttcgacgtgcagattcttaattattag

SEQ ID NO: 290368 - DNA, 549 bp, Artificial Sequence
  derived and/or modified sequence
tcttacgattccaccttttcctacgttacacacgaagacatctgtaattgcttcaatggcgacacactcctggcgatacaggccccttccggaacccaactggaagtgccaatccccgagatgggtcagaacgggcagaaaaagtatcaaatcaatctaaagtcgcactccggtcctatccacgtcttactgatcaataaagaatcaagctcaagtaaacccgtggtgttccccgtgccacccccagacgatctgacccagccttcgagccagagcctgacccctgtgactccacagaagtcaagcatggcaacacagaacctgcctgagcagcacgtttctgaaaggtcccaagcgctgcagcaaacctccgctaccgatattagcagtgcaggaagcatctcgggggatattatagatgaattgatgagttccgatgtgttccccctgctgagacttagccctacgcccgctgacgactataacttcaatctggatgacaatgagggcgtctgcgatttgttcgacgtgcagattctgaactactag

SEQ ID NO: 290369 - DNA, 674 bp, Artificial Sequence
  derived and/or modified sequence
tcctatgacagtacattttcctatgtaactcatgaagacatctgtaattgctttaatggtgatacacttttggccattcaggcaccttctggtacacaactggaggtacccattccagaaatgggtcagaatggacaaaagaaataccagatcaatctaaagagtcattcaggacctatccatgtgctgcttataaataaagagtcgagttcatctaagcccgtggtttttcctgttcccccacctgatgacctcacacagccttcctcccagtccttgactccagtgactccacagaaatccagcatggcaactcaaaatctgcctgagcaacatgtctctgaaagaagccaggctctgcagcagacatcagctacagatatatcttcagcaggatctattagtggagatatcattgatgagttaatgtcttctgacgtgtttcctctcttaaggctttctcctaccccggcagatgactacaactttaatttagatgataacgaaggagtttgtgatctgtttgatgtccagatactaaattattagattccatggaaacttgggactgttatctacctctaactgttgaccaaaatctttctaggctacagtgctgtcatcccgcatctatacaagaaacctggatcaaatacttttagtcccttctaaca

SEQ ID NO: 290370 - DNA, 1187 bp, Artificial Sequence
  derived and/or modified sequence
gcttccggtgctaggtggagggaaggaaggagggagccggggagtgggccagggcagcaagagccttgcctcccctgcctcccctcctttttcctgtccacctatatgaccaatccctaattgctgtcctgatgatgagtcattccaatttactggatttaaaacaaaaagttgttacggtttcatggggtggcccctctctctctcaccctctgggtttcgggaggtcgagtggggtattctctttgtttggcagtggttgctgtcctcttggcatctgagtcctttccctgtccccacaagcccttctactccctgtttgcctttcctttgccaccctctccctgttttacatggaaattgcacgggcctctctgtgtttgcgtgcatgtgtgcgcctgtatatacatgtatagagagatatatttgtgggggccggggggagcggggagggggtggagtgaagctcagggcttgcagccaggacactgcccactggagcctgtcatctgccccttccgtgttggtgagattaagggaagaaggtgggagggcattagtcaagccggactgccccagtctttgactggttaccctcctctctgcaggtaggtttttctggatgataggacagatgatggattcttcaccaccattttccttgtactcttctctccacccttcttagggctggaggatggcatttatctctagatgactgttcccaaggagatgccactctgctctgccttactgttgggaaggagagaggaacccactcactcttatcagcttagagtgttcaactgatccttccccaccatcttcagatctgttcctctggagcttgactggggggtggggatggcaagtccatggtgtgtgttagggacccagggcattgggggaagggaggcgaaggcctgaggttttccatcttcattctcttttgttattaggagaaggtgaggcatgggccaatcccattcctgccttccagtgccccaccacccttctgatcttaggggttggatgggtcatctgtccttggtcagaattttctcaccctagtactcctactggcctgaccagggctgactgggtattctaatgaggagctgggaagtggggtgacatagctgaccttagtatcaacccccctcttctccaactcttgttttctagtc

SEQ ID NO: 290371 - protein, 189 aa, Artificial Sequence
  derived and/or modified sequence
MTFTFQSEDLKRDCGKKMSHQHVFSLAMEEDVKTADTKKASRILDHEKENTRSICLLEQKRKVVSSNIDVPPARKSSEELDMDKVTAAMVLTSLSTSPLVRSPPVRPNESLSGSWKEGGCVPSSTSSSGYWSWSAPSDQSNPSTPSPPLSADSFKPFRSPAQPDDGIDEAEASNLLFDEPIPRKRKNSM

SEQ ID NO: 290372 - DNA, 570 bp, Artificial Sequence
  derived and/or modified sequence
atgaccttcaccttccagagcgaggacctgaagagagactgcggcaagaagatgagccaccagcacgtgttcagcctggccatggaggaggacgtgaagaccgccgacaccaagaaggccagcagaatcctggaccacgagaaggagaacaccagaagcatctgcctgctggagcagaagagaaaggtggtgagcagcaacatcgacgtgccccccgccagaaagagcagcgaggagctggacatggacaaggtgaccgccgccatggtgctgaccagcctgagcaccagccccctggtgagaagcccccccgtgagacccaacgagagcctgagcggcagctggaaggagggcggctgcgtgcccagcagcaccagcagcagcggctactggagctggagcgcccccagcgaccagagcaaccccagcacccccagcccccccctgagcgccgacagcttcaagcccttcagaagccccgcccagcccgacgacggcatcgacgaggccgaggccagcaacctgctgttcgacgagcccatccccagaaagagaaagaacagcatgtag

SEQ ID NO: 290373 - DNA, 570 bp, Artificial Sequence
  derived and/or modified sequence
atgactttcacctttcaaagcgaggacctcaagagggactgtggcaagaaaatgtcccatcagcacgtgtttagcttagcaatggaggaggacgtgaagacagctgatactaaaaaggcgagccggattttagatcacgaaaaggaaaacacaaggagcatctgcctgctggagcagaagcgtaaagtggtatctagcaatatcgacgtgccgccggcaaggaaaagttcagaggaactggacatggacaaggtaaccgccgctatggtgctgacatcactatctaccagtcccctggtgaggagcccaccggtgcggccaaacgagtccctttcaggatcctggaaggaaggcggctgtgtgcctagctccacttcttctagcggttactggtcttggagcgcaccatcagaccaatcaaatccttctactcccagtcccccccttagtgcagatagctttaagccgtttagatccccggcgcagccggacgacggtattgatgaggcagaggccagcaaccttttgttcgacgagccaattccgcgtaagcgaaaaaactccatgtag

SEQ ID NO: 290374 - DNA, 570 bp, Artificial Sequence
  derived and/or modified sequence
atgaccttcaccttccagagcgaggacctgaagagggactgtgggaagaagatgagccaccagcacgtgttcagcctggccatggaggaggatgtgaagacagctgacaccaagaaggccagccgcatcctggaccacgagaaggagaacaccaggagcatctgcctgctggagcagaagaggaaggtggtgagcagcaacattgatgtgcccccagccaggaagagcagcgaggagctggacatggacaaggtgacagctgccatggtgctgaccagcctgagcaccagccccctggtgcgcagcccccctgtgcggcccaatgaaagcctgagcggctcctggaaggagggcggctgtgtgcccagcagcaccagcagcagcggctactggagctggagcgcccccagcgaccagagcaaccccagcacccccagcccccccctgtctgctgacagcttcaagcccttccgcagccctgcccagccagatgatggcattgatgaggccgaggccagcaacctgctgtttgatgagcccatccccaggaagaggaagaacagcatgtag

SEQ ID NO: 290375 - DNA, 570 bp, Artificial Sequence
  derived and/or modified sequence
atgaccttcaccttccagagcgaggacctgaagcgggactgcggcaagaaaatgtcccaccagcacgtgtttagcctggccatggaggaggatgtgaagaccgctgacaccaagaaagcgtctagaatcttggaccacgaaaaagaaaatacaagaagcatctgcctgctggaacaaaagcgaaaggtcgtaagctcaaacattgatgtgcccccggcaaggaaatcctcagaggaacttgacatggataaggtcaccgcagcgatggtcctcaccagcttgtccacaagcccactagtccgcagccctcccgttcggcctaatgagtctttgtctggctcctggaaagaaggggggtgtgtgccaagttctacttcatctagcggttattggtcctggtcggctccatccgatcagagtaatccctccactccatcgccgccgttgtcagcggacagctttaaacctttcagatcccccgcacagcccgacgatggtatcgatgaagcagaggccagcaacctgctgtttgacgagccaatacctaggaagaggaagaattcgatgtag

SEQ ID NO: 290376 - DNA, 570 bp, Artificial Sequence
  derived and/or modified sequence
atgacatttacatttcaaagcgaggacttgaagcgggactgcggtaagaagatgagtcatcagcatgtgttctccttggcaatggaggaggatgtcaaaaccgcagacaccaagaaagcctcacgcatacttgatcatgagaaagaaaacactaggagtatctgcctgctggagcagaagcgaaaggtagtgtcatctaacattgatgtgccgcctgcacgtaagagcagcgaggaattagacatggacaaggtcactgccgctatggtattaacgtctctttccacctctccgctggtgcggtcccctccagtccggccaaatgaaagtttatcaggatcctggaaggagggcggttgtgtaccatccagtacctcatcatctggatactggtcttggtctgccccttcagatcagagcaatccgtccacaccatctcccccattgagcgctgattcattcaagccatttcgcagcccggctcagccggatgacggaatcgatgaggctgaggcgtccaatctcttattcgacgagcctattcccagaaaaagaaaaaatagtatgtag

SEQ ID NO: 290377 - protein, 876 aa, Artificial Sequence
  derived and/or modified sequence
MDERFRYESDFDRRLSRVYTNDRMHRNKRGNMPPMEHDGDVIEQSNIRISSAENKSAPDNETSKSANQDTCSPFAGMLFGGEDRELIQRRKEKYRLELLEQMAEQQRNKRREKDLELRVAASGAQDPEKSPDRLKQFSVAPRHFEEMIPPERPRIAFQTPLPPLSAPSVPPIPSVHPVPSQNEDLRSGLSSALGEMVSPRIAPLPPPPLLPPLATNYRTPYDDAYYFYGSRNTFDPSLAYYGSGMMGVQPAAYVSAPVTHQLAQPVVNTVGQNELKITSDQVINSGLIFEDKPKPSKQSLQSYQEALQQQIREREERRKKEREEKEEYEAKLEAEMRTYNPWGKGGGGAPLRDAKGNLISHMQTQSSPFARGNVFGEPPTELQIKQQELYKNFLRFQIEEKKQREEAERERLRIAEEKEERRLAEQRARIQQEYEEEQEKKREKEEEQRLKNEEHIRLAEERQKEAERKKKEEEEKYNLQLQHYCERDNLIGEETKHMRQPSPIVPALQNKIASKLQRPPSVDSIIRSFIHESSMSRAQSPPVPARKNQLRAEEEKKNVIMELSEMRKQLRSEERRLQERLLHMDSDDEIPIRKKERNPMDIFDMARHRLQAPVRRQSPKGLDAATFQNVHDFNELKDRDSETRVDLKFMYLDPPRDHHTLEIQQQALLREQQKRLNRIKMQEGAKVDLDAIPSAKVREQRMPRDDTSDFLKNSLLESDSAFIGAYGETYPAIEDDVLPPPSQLPSARERRRNKWKGLDIDSSRPNVAPDGLSLKSISSVNVDELRVRNEERMRRLNEFHNKPINTDDESSLVDPDDIMKHIGDDGSNSVATEPWLRPGTSETLKRFMAEQLNQEQQQIPGKPGTFTWQGLSTAHG

SEQ ID NO: 290378 - DNA, 4315 bp, Artificial Sequence
  derived and/or modified sequence
gaggggcggagccccggcccggaggtctgtcatgctgttcccgctccaggtggccgctgtaacctcttcggtccgcgacgatcctctagagcactgtgtgtctccccggacgcgagcccgctcccctgaaatctgcaaaatggctgataatttggatgaatttattgaagagcaaaaagccagattggccgaagacaaagcagagttggaaagtgatccaccttacatggaaatgaagggaaagttgtcagcgaagctttctgaaaacagtaagatactgatctctatggctaaggaaaacataccaccaaatagtcaacagaccaggggttccttaggaattgattatggattaagtttaccacttggagaagactatgaacggaagaaacataaattaaaagaagaattgcggcaagattacagacgttatcttactcagggcattacacaagggaaaagaaagaaaaattttctatctacgagtgaaacagatccatctactttgggagtttctcttcctattggtgagaggttatctgctaaggaaaggttgaaacttgaacgtaacaaagaatacaatcagtttctcaggggtaaggaagaatccagtgaaaagttcaggcaggtggaaaagagtactgagcccaagagtcagagaaataaaaaacctattggtcaagttaagcctgatctaacttcacaaatacagacatcttgtgaaaattcagagggtcctagaaaagatgtcttaactccttcagaggcatatgaagaacttctgaaccaaagacgactagaggaggacagataccgacaactagatgatgaaatcgaattaaggaatagaagaattattaaaaaagcaaatgaagaagtgggcatttccaacctaaaacatcaaaggtttgcaagcaaggctggcattccagatagaagatttcacagatttaatgaggatcgtgtttttgatagacggtatcatagaccagaccaagatcctgaagtaagtgaagaaatggatgagaggtttagatatgaaagtgattttgatagaagactttcgagagtgtatacaaatgacaggatgcacaggaacaaacgagggaatatgcctcctatggaacatgatggggatgttatagaacagtcaaacataagaatttcatctgctgaaaataaaagtgctccagacaatgaaacatccaaatctgctaatcaagatacctgtagtccttttgcagggatgctctttggaggtgaagatcgagaacttattcagagaaggaaagagaaatacagactagaactgttggaacaaatggctgagcaacagaggaacaagagacgagaaaaagatttagaactcagggttgcagcgtctggagcacaagaccctgagaaatcgcctgatagactaaagcagtttagtgtggcaccaagacactttgaagagatgataccacctgaaagacccagaatagctttccagacacctctccctcctttatctgccccatctgtcccacccatcccatcagttcatcctgttccttctcaaaatgaagatttgcgcagtggactcagcagcgcccttggtgaaatggtgtctcccaggattgcacctctgcctccacctcccctactaccacctttggctactaactatcgaactccttatgatgatgcatactatttttatgggtccaggaatactttcgatcccagtcttgcttattatggttcaggaatgatgggcgtacagcctgcagcttatgttagtgctcctgtcacccaccaactagcacaacctgttgtgaatacggttggacagaatgaactgaagattacaagtgatcaagtgataaattcaggattgatttttgaagataaaccgaaaccttccaaacagtcacttcagtcttaccaagaggctttgcagcagcagattcgggaaagagaagaaagaaggaagaaagaacgtgaagaaaaagaagaatatgaagctaaattagaagctgaaatgagaacatataatccctggggaaaaggtggaggtggtgctcctctcagggatgcaaaaggaaatctgataagtcatatgcaaacacagagctctccttttgctcggggaaatgtatttggtgagcctccaactgaacttcagattaaacagcaagaattatacaagaattttcttcgtttccagattgaggaaaagaaacaaagagaggaagcagagcgagagagactgagaattgcagaagaaaaagaagaaagacggcttgcagaacagagggcacgaattcagcaggagtatgaagaggaacaggaaaagaaaagagagaaagaggaggagcaaaggctaaaaaatgaagagcatattcggttagctgaagaaagacaaaaagaagcagaaagaaagaagaaagaagaagaagaaaaatataacctgcaacttcagcactactgtgaaagagacaatttgattggggaagaaacaaagcacatgagacagccttctcctatagttcctgctcttcagaacaaaattgcaagcaaactccaaagacctccttcagttgacagcatcatacgttcctttattcatgaaagttccatgtccagggcacagtcacccccggtacctgccaggaaaaatcagctccgtgcagaagaggagaaaaaaaatgtaattatggaattatcagaaatgagaaaacagcttcgtagtgaagagaggcgtctacaagagcgattgctacacatggacagtgatgatgaaattcctatcaggaaaaaggaaaggaatcccatggatatatttgatatggctagacatcggttgcaagctcctgtcagaagacagtcccctaagggcttagacgctgccacttttcagaatgttcatgattttaatgagctgaaagatagagattcagaaacacgagttgatctgaaatttatgtacctggatcctccaagagatcatcacaccttagagattcagcagcaagccctgctaagagagcagcagaagaggctgaacagaataaaaatgcaggaaggtgccaaagttgacttagatgccatcccaagtgctaaagtacgagagcaaagaatgcccagagatgacactagtgatttcttgaaaaactcattattggaatctgatagtgcttttattggggcttacggtgagacatatcctgccattgaagatgacgtcctccctccaccatcacagttgccctctgcacgggagcgcaggaggaacaaatggaaaggactagacattgatagcagtcgtcctaatgtagcaccagatggtctctctctaaaatctatatccagtgtaaatgttgatgagcttagagtgagaaatgaggaacgaatgcgaagactgaatgaatttcacaataaacctattaatacagatgatgagagttcactggttgaccctgatgacatcatgaaacacataggggatgacggatcaaactctgtagcaactgagccctggctccgccctggcacttcagaaacgctgaaacgtttcatggcagagcagctgaaccaggagcagcagcagattcctggaaaaccaggcactttcacttggcagggcctgtcgactgcacatggttaaaataaacctgtactggacccagtagtgccttttaaggtgaaaggaatggtaaatctgtacctttaatatgtcctacttttggcccctacctgaaagttactttttttccatcatctgtatataaaattatttttatcatgatgtatattatgtacataaataaaaggccatgattattgatttatataatagaattgtatagattatttttgcacagttttgtcataaattagggtggtaatgaactggattgaactactatatgtgcattatattgaattctgcttgtcattaagataaggtgaataagtgtcttaaacgtcctgtaaaaccggactcccctttgttacatgcacattttccattgttacctcgatgcaaaagaattcatttagtaggtacatctattgtagctgtgattattccagtttctgtgtgatgcaatcaaatgtcctattaattaattattatttcatgtcatttgtagctactgatacagcagaaatgaagggaactgtaattacttgtatttttgtaagccatacgttaaatgtttgttacatcatctttctgcttctatttttatgccaatgaaggcatttgtcttgttactaattacatgatgtaactacttcttgatataaataaatttttattttaattact

SEQ ID NO: 290379 - DNA, 3715 bp, Artificial Sequence
  derived and/or modified sequence
cagtcagaccgctaacaggagaaatggaatattaagtatagtatattgttccccctcaccttttctcatttcttcctctgtctcaggcactcattcatatattcatttgcagatttattcaatgaacattttcttgggttaaagttatgtgccagcattataaaattgaatagcgcatgggccttgccttcatagattttatagtttagttttatatatgatgttccattctgaacatgagaatcaaaactttctctccttaggcttaaattctgtatctttaaaaaaaggtttagattccttcaaaaggaaacagttcctttctaggatgatttaaaattccaagcatatggaatgctttagtttcttttggaagagagttagaagcatgtgtaagaggtgtccctaaggaatcctctgttataccctctatcatcaaggagttaaataggccagaaatgtttatcaagagaattccagtgttgatagcggaattgattatggattaagtttaccacttggagaagactatgaacggaagaaacataaattaaaagaagaattgcggcaagattacagacgttatcttactcaggaaaggttgaaacttgaacgtaacaaagaatacaatcagtttctcaggggtaaggaagaatccagtgaaaagttcaggcaggtggaaaagagtactgagcccaagagtcagagaaataaaaaacctattggtcaagttaagcctgatctaacttcacaaatacagacatcttgtgaaaattcagagggtcctagaaaagatgtcttaactccttcagaggcatatgaagaacttctgaaccaaagacgactagaggaggacagataccgacaactagatgatgaaatcgaattaaggaatagaagaattattaaaaaagcaaatgaagaagtgggcatttccaacctaaaacatcaaaggtttgcaagcaaggctggcattccagatagaagatttcacagatttaatgaggatcgtgtttttgatagacggtatcatagaccagaccaagatcctgaagtaagtgaagaaatggatgagaggtttagatatgaaagtgattttgatagaagactttcgagagtgtatacaaatgacaggatgcacaggaacaaacgagggaatatgcctcctatggaacatgatggggatgttatagaacagtcaaacataagaatttcatctgctgaaaataaaagtgctccagacaatgaaacatccaaatctgctaatcaagatacctgtagtccttttgcagggatgctctttggaggtgaagatcgagaacttattcagagaaggaaagagaaatacagactagaactgttggaacaaatggctgagcaacagaggaacaagagacgagaaaaagatttagaactcagggttgcagcgtctggagcacaagaccctgagaaatcgcctgatagactaaagcagtttagtgtggcaccaagacactttgaagagatgataccacctgaaagacccagaatagctttccagacacctctccctcctttatctgccccatctgtcccacccatcccatcagttcatcctgttccttctcaaaatgaagatttgcgcagtggactcagcagcgcccttggtgaaatggtgtctcccaggattgcacctctgcctccacctcccctactaccacctttggctactaactatcgaactccttatgatgatgcatactatttttatgggtccaggaatactttcgatcccagtcttgcttattatggttcaggaatgatgggcgtacagcctgcagcttatgttagtgctcctgtcacccaccaactagcacaacctgttgtgaatacggttggacagaatgaactgaagattacaagtgatcaagtgataaattcaggattgatttttgaagataaaccgaaaccttccaaacagtcacttcagtcttaccaagaggctttgcagcagcagattcgggaaagagaagaaagaaggaagaaagaacgtgaagaaaaagaagaatatgaagctaaattagaagctgaaatgagaacatataatccctggggaaaaggtggaggtggtgctcctctcagggatgcaaaaggaaatctgataagtcatatgcaaacacagagctctccttttgctcggggaaatgtatttggtgagcctccaactgaacttcagattaaacagcaagaattatacaagaattttcttcgtttccagattgaggaaaagaaacaaagagaggaagcagagcgagagagactgagaattgcagaagaaaaagaagaaagacggcttgcagaacagagggcacgaattcagcaggagtatgaagaggaacaggaaaagaaaagagagaaagaggaggagcaaaggctaaaaaatgaagagcatattcggttagctgaagaaagacaaaaagaagcagaaagaaagaagaaagaagaagaagaaaaatataacctgcaacttcagcactactgtgaaagagacaatttgattggggaagaaacaaagcacatgagacagccttctcctatagttcctgctcttcagaacaaaattgcaagcaaactccaaagacctccttcagttgacagcatcatacgttcctttattcatgaaagttccatgtccagggcacagtcacccccggtacctgccaggaaaaatcagctccgtgcagaagaggagaaaaaaaatgtaattatggaattatcagaaatgagaaaacagcttcgtagtgaagagaggcgtctacaagagcgattgctacacatggacagtgatgatgaaattcctatcaggaaaaaggaaaggaatcccatggatatatttgatatggctagacatcggttgcaagctcctgtcagaagacagtcccctaagggcttagacgctgccacttttcagaatgttcatgattttaatgagctgaaagatagagattcagaaacacgagttgatctgaaatttatgtacctggatcctccaagagatcatcacaccttagagattcagcagcaagccctgctaagagagcagcagaagaggctgaacagaataaaaatgcaggaaggtgccaaagttgacttagatgccatcccaagtgctaaagtacgagagcaaagaatgcccagagatgacactagtgatttcttgaaaaactcattattggaatctgatagtgcttttattggggcttacggtgagacatatcctgccattgaagatgacgtcctccctccaccatcacagttgccctctgcacgggagcgcaggaggaacaaatggaaaggactagacattgatagcagtcgtcctaatgtagcaccagatggtctctctctaaaatctatatccagtgtaaatgttgatgagcttagagtgagaaatgaggaacgaatgcgaagactgaatgaatttcacaataaacctattaatacagatgatgagagttcactggttgaccctgatgacatcatgaaacacataggggatgacggatcaaactctgtagcaactgagccctggctccgccctggcacttcagaaacgctgaaacgtttcatggcagagcagctgaaccaggagcagcagcagattcctggaaaaccaggcactttcacttggcagggcctgtcgactgcacatggttaaaataaacctgtactggac

SEQ ID NO: 290380 - protein, 228 aa, Artificial Sequence
  derived and/or modified sequence
MSYVFVNDSSQTNVPLLQACIDGDFNYSKRLLESGFDPNIRDSRGRTGLHLAAARGNVDICQLLHKFGADLLATDYQGNTALHLCGHVDTIQFLVSNGLKIDICNHQGATPLVLAKRRGVNKDVIRLLESLEEQEVKGFNRGTHSKLETMQTAESESAMESHSLLNPNLQQGEGVLSSFRTTWQEFVEDLGFWRVLLLIFVIALLSLGIAYYVSGVLPFVENQPELVH

SEQ ID NO: 290381 - DNA, 687 bp, Artificial Sequence
  derived and/or modified sequence
atgagctacgtgttcgtgaacgacagcagccagaccaacgtgcccctgctgcaggcctgcatcgacggcgacttcaactacagcaagagactgctggagagcggcttcgaccccaacatcagagacagcagaggcagaaccggcctgcacctggccgccgccagaggcaacgtggacatctgccagctgctgcacaagttcggcgccgacctgctggccaccgactaccagggcaacaccgccctgcacctgtgcggccacgtggacaccatccagttcctggtgagcaacggcctgaagatcgacatctgcaaccaccagggcgccacccccctggtgctggccaagagaagaggcgtgaacaaggacgtgatcagactgctggagagcctggaggagcaggaggtgaagggcttcaacagaggcacccacagcaagctggagaccatgcagaccgccgagagcgagagcgccatggagagccacagcctgctgaaccccaacctgcagcagggcgagggcgtgctgagcagcttcagaaccacctggcaggagttcgtggaggacctgggcttctggagagtgctgctgctgatcttcgtgatcgccctgctgagcctgggcatcgcctactacgtgagcggcgtgctgcccttcgtggagaaccagcccgagctggtgcactag

SEQ ID NO: 290382 - DNA, 588 bp, Artificial Sequence
  derived and/or modified sequence
atgagctacgtgttcgtgaacgacagcagccagaccaacgtgcccctgctgcaggcctgcatcgacggcgacttcaactacagcaagagactgctggagagcggcttcgaccccaacatcagagacagcagaggcagaaccggcctgcacctggccgccgccagaggcaacgtggacatctgccagctgctgcacaagttcggcgccgacctgctggccaccgactaccagggcaacaccgccctgcacctgtgcggccacgtggacaccatccagttcctggtgagcaacggcctgaagatcgacatctgcaaccaccagggcgccacccccctggtgctggccaagagaagaggcgtgaacaaggacgtgatcagactgctggagagcctggaggagcaggaggtgaagggcttcaacagaggcacccacagcaagctggagaccatgcagaccgccgagagcgagagcgccatggagagccacagcctgctgaaccccaacctgcagcagggcgagggcgtgctgagcagcttcagaaccacctggcaggagttcgtggaggacctgggcttctggagagtgtag

SEQ ID NO: 290383 - DNA, 249 bp, Artificial Sequence
  derived and/or modified sequence
atgagctacgtgttcgtgaacgacagcagccagaccaacgtgcccctgctgcaggcctgcatcgacggcgacttcaactacagcaagagactgctggagagcggcttcgaccccaacatcagagacagcagaggcagaaccggcctgcacctggccgccgccagaggcaacgtggacatctgccagctgctgcacaagttcggcgccgacctgctggccaccgactaccagggcaacaccgccctgtag

SEQ ID NO: 290384 - DNA, 261 bp, Artificial Sequence
  derived and/or modified sequence
atgagctacgtgttcgtgaacgacagcagccagaccaacgtgcccctgctgcaggcctgcatcgacggcgacttcaactacagcaagagactgctggagagcggcttcgaccccaacatcagagacagcagaggcagaaccggcctgcacctggccgccgccagaggcaacgtggacatctgccagctgctgcacaagttcggcgccgacctgctggccaccgactaccagggcaacaccgccctgcacctgtgcggctag

SEQ ID NO: 290385 - DNA, 312 bp, Artificial Sequence
  derived and/or modified sequence
atgagctacgtgttcgtgaacgacagcagccagaccaacgtgcccctgctgcaggcctgcatcgacggcgacttcaactacagcaagagactgctggagagcggcttcgaccccaacatcagagacagcagaggcagaaccggcctgcacctggccgccgccagaggcaacgtggacatctgccagctgctgcacaagttcggcgccgacctgctggccaccgactaccagggcaacaccgccctgcacctgtgcggccacgtggacaccatccagttcctggtgagcaacggcctgaagatcgacatctag

SEQ ID NO: 290386 - DNA, 687 bp, Artificial Sequence
  derived and/or modified sequence
atgtcttacgtcttcgttaatgatagctcccagacaaatgtgcctctgttgcaggcttgcattgacggagacttcaactactccaagcgcctactcgaatctgggttcgaccccaatattcgggactctcgagggagaactggccttcatctggccgccgcccgaggaaacgtggacatctgtcagctcctgcacaagtttggagctgacctcctggccacggactaccagggcaacacagcgctgcatttgtgtggtcatgtggacacaatacagtttctcgtgtccaacgggctgaaaatcgacatctgcaaccaccaaggagcaacacccctagtactcgctaagagacgtggcgttaataaagacgtcatcagattgctagagtccctcgaggagcaggaggtgaaggggttcaatcggggcacccattccaagctggagaccatgcagacagctgagtctgagtcagctatggagagtcattctctgcttaacccaaatctgcagcagggagaaggggttctgtcgagcttccgcacaacttggcaagagttcgtggaggacttaggattttggcgcgtactcctgcttatatttgtcatagcgctgctgtctctagggatcgcttactatgtcagcggggtgctgccttttgtggagaaccagcccgagttggtccactag

SEQ ID NO: 290387 - DNA, 588 bp, Artificial Sequence
  derived and/or modified sequence
atgagctatgtctttgtgaatgactcttctcagactaacgtgcccctgctccaggcctgcatagatggcgatttcaactactctaagcgcttactggagtccggctttgacccgaacatcagggactcacggggccgtacgggactgcatctggcagcagctcggggcaacgtggacatctgccagctgctgcacaaattcggcgcggacctgctggctacagactatcaaggcaacacagcattgcatctatgtggccacgtagatactattcaatttttagtttctaatggtctaaaaatcgacatctgtaatcaccagggagcaacgcctctggttctggcaaaacgccgtggagtgaataaagacgttatccgtttgctcgagtcattggaagaacaggaggtgaagggattcaaccgaggcacccatagtaaacttgagacaatgcagaccgccgagtccgaatccgccatggaaagtcacagcctcctgaacccaaacctccagcagggtgaaggagttctgtcaagctttcggaccacgtggcaggaattcgtcgaagatctgggtttctggagggtgtag

SEQ ID NO: 290388 - DNA, 687 bp, Artificial Sequence
  derived and/or modified sequence
atgagctacgtgttcgtcaacgattccagccaaacaaatgttcctctcctacaggcctgcattgacggggacttcaactacagcaagcggctgctagagagcggcttcgaccctaatattagagattccaggggcaggaccggactgcatctggctgccgcaaggggaaacgtggacatttgccagctgttgcataagtttggtgctgatctcctggctacagactatcaggggaatacagcgctgcatctctgcggacatgtcgacacaatccaattcctcgtttccaatggattgaagatcgatatctgcaatcatcaaggcgcaaccccactcgtcttagccaaaagaagaggtgtcaataaagatgtcattcgactgttagagagtttggaagagcaagaagtgaagggttttaatcgcggaacccatagcaaacttgagacgatgcagacagccgaaagcgagtctgccatggaaagccacagcctcctgaaccctaacttgcagcaaggcgaaggtgtgttaagcagcttcaggaccacttggcaggagtttgtagaggacttgggcttctggagagtattactgcttatatttgtgatagctctgttatcgctgggaattgcatactatgtgagcggcgtcctaccctttgtagaaaaccagcccgaactggtgcactag

SEQ ID NO: 290389 - DNA, 687 bp, Artificial Sequence
  derived and/or modified sequence
atgagctatgtctttgtgaatgatagcagccagaccaatgttccactcctccaggcctgtatagatggagactttaattactctaagcggttgctggaatccggattcgaccctaatataagagattctcggggcagaactggactgcatctggctgccgcacgtgggaacgttgacatttgtcaactgctgcacaagttcggagcagacctactggccaccgactaccagggaaatactgcattgcatctgtgcggccatgttgacactattcagttcctggtttccaacgggttaaagatcgatatctgcaatcatcaaggcgccacaccgctggtcctcgctaagagacgaggtgttaacaaggacgtaatccgcctgctggagtctctggaggagcaggaagtgaaggggttcaaccgaggcacacacagcaagctggagacaatgcaaacagctgagtcagagtctgccatggagagccactctctgctcaatccaaacctgcagcagggtgagggtgtgctgagttcgttccgaaccacatggcaagaattcgttgaggacctggggttctggcgggtactcctgcttatttttgtgatcgccctgctgtctctcggcattgcatactatgtttccggggtgctcccgttcgtcgagaaccaacccgagctggtgcattag

SEQ ID NO: 290390 - DNA, 249 bp, Artificial Sequence
  derived and/or modified sequence
atgtcctacgtattcgtgaacgactcatcgcaaacaaatgttccattgctccaggcatgcattgatggggacttcaactacagtaagcgtttgttagaaagcggcttcgaccctaatatcagagatagcagggggcgaacggggctccatttagccgccgcccgggggaacgtggacatctgccaactgctgcataaattcggcgcagacctgctggcgaccgactatcaagggaatacggccttgtag

SEQ ID NO: 290391 - DNA, 261 bp, Artificial Sequence
  derived and/or modified sequence
atgagttacgtatttgtcaacgattcgagccagactaacgtgccgttacttcaggcatgtattgatggggatttcaactactccaagcggctgctggagagtggcttcgaccctaatattcgagactcccgaggccgtactgggcttcacctggcagccgcaagaggcaacgtcgatatatgccagctcttacacaagtttggtgcagaccttttagctactgactaccagggcaatactgccctccacctgtgtggctag

SEQ ID NO: 290392 - DNA, 312 bp, Artificial Sequence
  derived and/or modified sequence
atgtcctacgtttttgtgaatgacagcagtcagaccaatgtgcctctgctccaggcttgcatcgacggcgactttaattatagcaagcgactgcttgaaagtggatttgacccgaatatacgggactctcgcggcaggacaggactccacctggctgcagcccgggggaacgtggatatctgccagctgctacataagttcggggcggaccttctggcgacagactaccagggcaataccgccttacacctctgcggacatgtggatacaatccagtttctggtcagcaacggacttaagatcgacatctag

SEQ ID NO: 290393 - DNA, 687 bp, Artificial Sequence
  derived and/or modified sequence
atgtcctatgtgtttgtgaatgacagcagccagaccaacgtgcccctgctgcaggcctgcattgatggagacttcaactacagcaagaggctgctggagagcggctttgaccccaacatccgggacagccggggccgcacaggcctgcacctggccgccgcccggggaaatgtggacatctgccagctgctgcacaagtttggagctgacctgctggccacagactaccagggcaacacagccctgcacctgtgtggccacgtggacaccatccagttcctggtgtccaatggcctgaagattgacatctgcaaccaccagggcgccacccccctggtgctggccaagagaagaggagtgaacaaggatgtgatccggctgctggagagcctggaggagcaggaggtgaagggcttcaacagaggcacccacagcaagctggagaccatgcagacagctgagagcgagagcgccatggagagccacagcctgctgaaccccaacctgcagcagggcgagggcgtgctgagcagcttccgcaccacctggcaggagtttgtggaggacctgggcttctggagggtgctgctgctgatcttcgtcatcgccctgctgagcctgggcatcgcctactacgtgtctggagtgctgccctttgtggagaaccagcctgagctggtgcactag

SEQ ID NO: 290394 - DNA, 588 bp, Artificial Sequence
  derived and/or modified sequence
atgtcctatgtgtttgtgaatgacagcagccagaccaacgtgcccctgctgcaggcctgcattgatggagacttcaactacagcaagaggctgctggagagcggctttgaccccaacatccgggacagccggggccgcacaggcctgcacctggccgccgcccggggaaatgtggacatctgccagctgctgcacaagtttggagctgacctgctggccacagactaccagggcaacacagccctgcacctgtgtggccacgtggacaccatccagttcctggtgtccaatggcctgaagattgacatctgcaaccaccagggcgccacccccctggtgctggccaagagaagaggagtgaacaaggatgtgatccggctgctggagagcctggaggagcaggaggtgaagggcttcaacagaggcacccacagcaagctggagaccatgcagacagctgagagcgagagcgccatggagagccacagcctgctgaaccccaacctgcagcagggcgagggcgtgctgagcagcttccgcaccacctggcaggagtttgtggaggacctgggcttctggagggtgtag

SEQ ID NO: 290395 - DNA, 249 bp, Artificial Sequence
  derived and/or modified sequence
atgtcctatgtgtttgtgaatgacagcagccagaccaacgtgcccctgctgcaggcctgcattgatggagacttcaactacagcaagaggctgctggagagcggctttgaccccaacatccgggacagccggggccgcacaggcctgcacctggccgccgcccggggaaatgtggacatctgccagctgctgcacaagtttggagctgacctgctggccacagactaccagggcaacacagccctgtag

SEQ ID NO: 290396 - DNA, 261 bp, Artificial Sequence
  derived and/or modified sequence
atgtcctatgtgtttgtgaatgacagcagccagaccaacgtgcccctgctgcaggcctgcattgatggagacttcaactacagcaagaggctgctggagagcggctttgaccccaacatccgggacagccggggccgcacaggcctgcacctggccgccgcccggggaaatgtggacatctgccagctgctgcacaagtttggagctgacctgctggccacagactaccagggcaacacagccctgcacctgtgtggctag

SEQ ID NO: 290397 - DNA, 312 bp, Artificial Sequence
  derived and/or modified sequence
atgtcctatgtgtttgtgaatgacagcagccagaccaacgtgcccctgctgcaggcctgcattgatggagacttcaactacagcaagaggctgctggagagcggctttgaccccaacatccgggacagccggggccgcacaggcctgcacctggccgccgcccggggaaatgtggacatctgccagctgctgcacaagtttggagctgacctgctggccacagactaccagggcaacacagccctgcacctgtgtggccacgtggacaccatccagttcctggtgtccaatggcctgaagattgacatctag

SEQ ID NO: 290398 - DNA, 687 bp, Artificial Sequence
  derived and/or modified sequence
atgagctacgtgttcgtgaacgacagcagccagaccaacgtgcccctgctccaggcctgcattgacggcgacttcaactacagcaagcggctgctggaatccggattcgatcccaacatccgggactccagaggacggaccgggttgcacttggcagctgcacgcggcaatgtggacatatgtcagctactccacaagtttggcgcagacctcctcgccaccgactaccaggggaacacagcactgcacttgtgtgggcatgtggacaccattcagtttctggtcagcaacggtctgaagattgatatctgtaatcaccagggagccacaccattggtgctcgctaaacgccgcggggtcaacaaggatgttatcaggctcctggaaagcctggaggaacaggaggtgaagggatttaatcgcggcacccacagcaagctggaaaccatgcagactgcggaaagcgagtcagccatggaatcacactccctgcttaatccgaatctccaacagggcgagggcgtcctgtcaagcttcagaactacgtggcaggagtttgtcgaggatctgggattttggcgcgttctgcttttgatctttgtgattgctttgctgagcctcggaattgcctattatgtcagtggagttctgcctttcgtagaaaaccagcctgaattggttcattag

SEQ ID NO: 290399 - DNA, 588 bp, Artificial Sequence
  derived and/or modified sequence
atgagctacgtgttcgtgaacgacagcagccagaccaacgtgcccctgctgcaggcctgtatagatggagacttcaattatagcaagcggctccttgagtccggcttcgatcctaacattcgcgatagtagaggcagaactggactacacctggcggccgctagaggaaacgtcgacatttgtcagctcctgcacaaattcggtgctgacctcctcgcaaccgactatcagggtaataccgctctccatctctgtgggcatgtggacaccatacagttcctggtctccaatgggttaaagatcgatatctgtaaccatcagggggctacaccacttgttctcgctaagagacgaggcgtgaataaggacgtgatccgtcttctcgagagcctggaagaacaggaggtaaaggggtttaatagaggcactcactctaagctggaaacaatgcaaaccgcagagtcggaatccgctatggaatcacattcccttttgaatcccaacctgcagcaaggcgagggcgtcctgtcttcttttaggaccacctggcaagagtttgtagaggacctgggattttggagagtatag

SEQ ID NO: 290400 - DNA, 687 bp, Artificial Sequence
  derived and/or modified sequence
atgagctacgtgttcgtgaacgacagcagccagaccaacgtgcccctccttcaggcatgcatcgatggcgatttcaactattccaagaggctcctggaatcaggcttcgatcctaatattcgcgattcaagggggcgtactggcctgcacctggcagccgctagagggaatgttgacatatgtcagctgcttcataaattcggtgcggacctcctagccacagattaccaggggaatacagcactacacctgtgcggtcatgttgataccattcaatttctggttagtaatggactgaagattgacatctgcaaccaccagggcgccacaccgcttgtcctggctaagcgacgaggcgttaataaggacgttatcagactcttagaaagcctggaggaacaggaggtgaagggtttcaaccgcgggactcatagtaagctcgaaacaatgcagacagctgaaagcgagagcgccatggagtcacattccctgctgaacccgaacctgcagcaaggagaaggggtcctctccagcttccgtacaacatggcaggagtttgtggaagacctcggattctggagagtcttgctcttgatttttgtgatcgccctgctgagtctcggaatcgcctattatgtctctggggttctgccctttgtagaaaaccagcctgagctggtccactag

SEQ ID NO: 290401 - DNA, 687 bp, Artificial Sequence
  derived and/or modified sequence
atgagctacgtgttcgtgaacgacagcagccagaccaacgtgcccctgctccaggcttgcatcgatggagactttaactatagcaagcggctactggagtctggcttcgatcccaatattagggacagcaggggcaggactgggttgcacctcgcagcagcacgagggaatgttgatatatgtcagctgctccacaagtttggggcagacctgttagctaccgattaccagggtaacacggcactacacctttgtgggcatgtggacactatccaatttcttgtgtccaacggactgaaaatcgatatttgcaatcatcagggggctacaccactggtcctcgcaaagcgaagaggtgttaacaaagacgtgatcagactgttggaaagtctggaagaacaggaggttaagggcttcaatagaggcacacacagcaaacttgagacgatgcagaccgcagaaagcgagtctgctatggagtctcattcccttctgaaccccaatctccagcagggcgagggggttttgtcctcttttcgcactacatggcaggaatttgttgaagatctgggcttctggcgagttctgctcttgattttcgtaattgccctcctgagtctcggtattgcctactacgtgagcggcgtccttcctttcgtggaaaaccagcctgaattggttcactag

SEQ ID NO: 290402 - DNA, 249 bp, Artificial Sequence
  derived and/or modified sequence
atgagctacgtgttcgtgaacgacagcagccagaccaacgtgcccctgcttcaggcttgcattgacggcgatttcaactactccaaaaggctcttagagtccggctttgaccctaatatcagggatagtagaggacggaccggcttgcacctggccgccgctagagggaatgtagatatttgccagctgctgcacaaatttggcgctgatctgctcgctacagactatcagggcaatactgcactttag

SEQ ID NO: 290403 - DNA, 261 bp, Artificial Sequence
  derived and/or modified sequence
atgagctacgtgttcgtgaacgacagcagccagaccaacgtgcccttacttcaggcatgcatagacggagacttcaactattctaagagactgctcgagagtggcttcgatccgaatattagagattcccgagggagaacaggattgcatctcgctgccgcgaggggtaatgtcgacatctgtcagctgcttcataaatttggagctgatctgttagccacagactaccaggggaacacagctctgcatctctgcggatag

SEQ ID NO: 290404 - DNA, 312 bp, Artificial Sequence
  derived and/or modified sequence
atgagctacgtgttcgtgaacgacagcagccagaccaacgtgcccctcttacaggcctgcatcgatggagacttcaattactcaaagcgactactggagtctggatttgaccctaacatcagggatagtcgggggcgtacaggcctccatctggccgccgcaagaggaaacgtcgacatctgtcagttgttgcataaattcggagccgatttgctggcaaccgactatcaggggaataccgccttgcacttgtgtgggcatgtagacacgattcagtttttggtaagtaacgggctgaagatcgacatatag

SEQ ID NO: 290405 - DNA, 2649 bp, Artificial Sequence
  derived and/or modified sequence
accgcctccttgaagctgccgctgtcgctgctgctcgttcgagtcgcagatccttgccagcacattacagaatatttttgttgaaccttcttgagaattcagagaaactgctgagtgaccactgaacgaaaagatctaatcttaaggcttacgcgtgttccatccaccacatcagaacaatgtcgtatgtttttgtaaatgattcttctcagactaacgtgcccttgctgcaagcctgtattgatggggactttaattattccaagcggcttttggaaagtggctttgacccaaatattcgtgacagcaggggcagaacaggccttcaccttgcagcagctcgagggaatgtagacatctgccagttactgcataaattcggtgccgatcttctggccacagattatcaaggaaacacagctcttcacctctgtggccatgtggatactatccaatttttggtttccaatggactcaaaattgatatttgcaatcatcaaggtgctacccctttagttctggcaaagcgcagaggagtaaataaagatgtcatccgattgctggaatctttggaagaacaggaggtgaaaggatttaacagaggaacccactcgaaactggagaccatgcaaacagctgagagtgaaagtgccatggaaagccattcactcctcaatcccaacctgcagcaaggtgaaggagtcctctccagcttccgaaccacgtggcaggagtttgtggaggatctgggcttctggagagtattgctgttgatcttcgtcattgctttgctgtctcttggcattgcttattatgtgagtggggtgctacccttcgtggaaaaccagcctgaactggtgcattaaaggagctcatggaagatgaggcaattaattgcctgtttcctggcttccaatgtttgttctcagtttctcagaatttttcttagcgcaaagcagtgagggcagtacatgttctttttgcatttttaattattgtaatccttttagataatgatgtgttcatttgaactaactacatactatgatcaagtatattgcatcctaacgctacctctgactcaacctgactttgtaggaaagcctacacgtagccttgtttgataaaaacacggaagtgactagagaatggaagataaaggaagaagctaggaagtccttgctatcaaaaccttatcctaatataggaccaattgaagtattcaaaaagaaaaacagtatcttatatgattagtttttgttggtggttttgttttcatttatttttgcaagagccactttttatttactttctctagggataagagataaaacttgaagtacttttttcaaatcttgtgtgcaaattagtattgttagcatctatttggcttattttagtatttttaagtctagtcacaaaccaaacaaaacttttgaaaatgagctatattttgttcaaagataattgatttgatcttatatttatttgtttttaggataatttttgatctttttgtaaactgctttgcttgttaatatctgtgaaaaataaatgagttcattttgttcactttccaattttcccgagtatcctagtcatcaaagataacagttcatcagaattacagtcagaaaatcctttttctactgaatagttagcagggaaaaataattctgatatttaactgtcataattctgtagtgctattatagtgaaaaactcagttctataagctagctgtgttgtcacagttttatcatagttcataattatttcatgtgcaatcctatttggaggccctgttagacttttaacaatcccatccatatctgtaattctctgatggcaagaatggatggagcatttctgagttaacagtgctggacagtatcgtactgggtgtcataaactctttatgaatggtaatattatgtaaattgaaatctggccctcaaactatattgcagctttcagcagtatgtttgaaggcctcttttgttaatgattctgtaatgtatgaattatgttcttgagtggttaaaaaagaatatgaaggcttgataattatttattgggtaaagtcaggaaattgtagtgaaagaactaatggttttgttttttggaataaaggcacctaagctattgctaattgaattgctgctagaattagaaattatgctttagaatagaattggtatttctgtgattctttttgcttcttggtattttctcttgtatctatgtatctagtattgaggcttgctctttcatgtggctttatcctctctttaatagctgttgtaaaattcctgagtaactggctgcttcaggatcagcttgcagagtcttgcttttaggttagatacaaacaaagtaaatcatagttggtgtaaatccagcaaaaaacagctggctttggaatggagaacactacaattcaaatttgaagtatattcagaagaaaactttggaattagctttacatttgtttgtaaatctaaacaaatatgcaaaattggtcaaaatgtaagtatatagcatttttaaagattaatggttccttttatgtgctgatttctttgtattctgttctctgcattcatcattcaggaataccaccaataaatgtatttatatatcccttaa

SEQ ID NO: 290406 - DNA, 661 bp, Artificial Sequence
  derived and/or modified sequence
accgcctccttgaagctgccgctgtcgctgctgctcgttcgagtcgcaggcgtgttccatccaccacatcagaacaatgtcgtatgtttttgtaaatgattcttctcagactaacgtgcccttgctgcaagcctgtattgatggggactttaattattccaagcggcttttggaaagtggctttgacccaaatattcgtgacagcaggggcagaacaggccttcaccttgcagcagctcgagggaatgtagacatctgccagttactgcataaattcggtgccgatcttctggccacagattatcaaggaaacacagctcttcacctctgtggccatgtggatactatccaatttttggtttccaatggactcaaaattgatatttgcaatcatcaaggtgctacccctttagttctggcaaagcgcagaggagtaaataaagatgtcatccgattgctggaatctttggaagaacaggaggtgaaaggatttaacagaggaacccactcgaaactggagaccatgcaaacagctgagagtgaaagtgccatggaaagccattcactcctcaatcccaacctgcagcaaggtgaaggagtcctctccagcttccgaaccacgtggcaggagtttgtggaggatctgggcttctggagagta

SEQ ID NO: 290407 - DNA, 2779 bp, Artificial Sequence
  derived and/or modified sequence
gtctggcccctcccctccgcccgtcaccgcctccttgaagctgccgctgtcgctgctgctcgttcgagtcgcagatccttgccagcacattacagaatatttttgttgaaccttcttgagaattcagagaaactgctgagtgaccactgaacgaaaagatctaatcttaaggcttacgcctcactttgatgcccaggctggagtgctgtggctcaatcacagctcatcgcaacctcgacctcccgggctcaagtgatcctctcacctcagcgtcccgaacaggcgtgttccatccaccacatcagaacaatgtcgtatgtttttgtaaatgattcttctcagactaacgtgcccttgctgcaagcctgtattgatggggactttaattattccaagcggcttttggaaagtggctttgacccaaatattcgtgacagcaggggcagaacaggccttcaccttgcagcagctcgagggaatgtagacatctgccagttactgcataaattcggtgccgatcttctggccacagattatcaaggaaacacagctcttcacctctgtggccatgtggatactatccaatttttggtttccaatggactcaaaattgatatttgcaatcatcaaggtgctacccctttagttctggcaaagcgcagaggagtaaataaagatgtcatccgattgctggaatctttggaagaacaggaggtgaaaggatttaacagaggaacccactcgaaactggagaccatgcaaacagctgagagtgaaagtgccatggaaagccattcactcctcaatcccaacctgcagcaaggtgaaggagtcctctccagcttccgaaccacgtggcaggagtttgtggaggatctgggcttctggagagtattgctgttgatcttcgtcattgctttgctgtctcttggcattgcttattatgtgagtggggtgctacccttcgtggaaaaccagcctgaactggtgcattaaaggagctcatggaagatgaggcaattaattgcctgtttcctggcttccaatgtttgttctcagtttctcagaatttttcttagcgcaaagcagtgagggcagtacatgttctttttgcatttttaattattgtaatccttttagataatgatgtgttcatttgaactaactacatactatgatcaagtatattgcatcctaacgctacctctgactcaacctgactttgtaggaaagcctacacgtagccttgtttgataaaaacacggaagtgactagagaatggaagataaaggaagaagctaggaagtccttgctatcaaaaccttatcctaatataggaccaattgaagtattcaaaaagaaaaacagtatcttatatgattagtttttgttggtggttttgttttcatttatttttgcaagagccactttttatttactttctctagggataagagataaaacttgaagtacttttttcaaatcttgtgtgcaaattagtattgttagcatctatttggcttattttagtatttttaagtctagtcacaaaccaaacaaaacttttgaaaatgagctatattttgttcaaagataattgatttgatcttatatttatttgtttttaggataatttttgatctttttgtaaactgctttgcttgttaatatctgtgaaaaataaatgagttcattttgttcactttccaattttcccgagtatcctagtcatcaaagataacagttcatcagaattacagtcagaaaatcctttttctactgaatagttagcagggaaaaataattctgatatttaactgtcataattctgtagtgctattatagtgaaaaactcagttctataagctagctgtgttgtcacagttttatcatagttcataattatttcatgtgcaatcctatttggaggccctgttagacttttaacaatcccatccatatctgtaattctctgatggcaagaatggatggagcatttctgagttaacagtgctggacagtatcgtactgggtgtcataaactctttatgaatggtaatattatgtaaattgaaatctggccctcaaactatattgcagctttcagcagtatgtttgaaggcctcttttgttaatgattctgtaatgtatgaattatgttcttgagtggttaaaaaagaatatgaaggcttgataattatttattgggtaaagtcaggaaattgtagtgaaagaactaatggttttgttttttggaataaaggcacctaagctattgctaattgaattgctgctagaattagaaattatgctttagaatagaattggtatttctgtgattctttttgcttcttggtattttctcttgtatctatgtatctagtattgaggcttgctctttcatgtggctttatcctctctttaatagctgttgtaaaattcctgagtaactggctgcttcaggatcagcttgcagagtcttgcttttaggttagatacaaacaaagtaaatcatagttggtgtaaatccagcaaaaaacagctggctttggaatggagaacactacaattcaaatttgaagtatattcagaagaaaactttggaattagctttacatttgtttgtaaatctaaacaaatatgcaaaattggtcaaaatgtaagtatatagcatttttaaagattaatggttccttttatgtgctgatttctttgtattctgttctctgcattcatcattcaggaataccaccaataaatgtatttatatatcccttaa

SEQ ID NO: 290408 - DNA, 3270 bp, Artificial Sequence
  derived and/or modified sequence
ggtacttggcccggggcctgtgggcagcgcctgggctagagccacttgatatctcctgcaccgtccctgtagcactggaggtccagtaggcctggccggggccctgaggggcgagggtgcccgggcttcccacaccttccgcggcgactggagggagccgggccgaggaagcgaccgcgggtccgtgatggcttcttcgcggtctgtgtgttcacgagggccgggcagaggcctgcgagggttctcgtttgcgcttgcgggttagggctgtggtccggggaacccctgggcagcgcgggcagccctggctcgcggttaatcggggggtggagcgcggaagccacgccgcaggtccagctgctcggccggggcgagacggtgctttcgcggcgtgtgcttgcaggagcgcacagttcaggcgccgggacaagctgttggggtgtgagtgagctctccagaatggcacatggctccggggtgcccgggttaaaaggaaggatttgcacaccttccacttagggctcgggtaatcgcaaacttcctcccttaattggcttgcagtgctaaaaagcagatcgttctctctgaggttttcccaacagtacctcaagaaaataacatctgttttttgtaacgttccacggtattcggaattggctacagaacataataagatccttgccagcacattacagaatatttttgttgaaccttcttgagaattcagagaaactgctgagtgaccactgaacgaaaagatctaatcttaaggcttacgcgtgttccatccaccacatcagaacaatgtcgtatgtttttgtaaatgattcttctcagactaacgtgcccttgctgcaagcctgtattgatggggactttaattattccaagcggcttttggaaagtggctttgacccaaatattcgtgacagcaggggcagaacaggccttcaccttgcagcagctcgagggaatgtagacatctgccagttactgcataaattcggtgccgatcttctggccacagattatcaaggaaacacagctcttcacctctgtggccatgtggatactatccaatttttggtttccaatggactcaaaattgatatttgcaatcatcaaggtgctacccctttagttctggcaaagcgcagaggagtaaataaagatgtcatccgattgctggaatctttggaagaacaggaggtgaaaggatttaacagaggaacccactcgaaactggagaccatgcaaacagctgagagtgaaagtgccatggaaagccattcactcctcaatcccaacctgcagcaaggtgaaggagtcctctccagcttccgaaccacgtggcaggagtttgtggaggatctgggcttctggagagtattgctgttgatcttcgtcattgctttgctgtctcttggcattgcttattatgtgagtggggtgctacccttcgtggaaaaccagcctgaactggtgcattaaaggagctcatggaagatgaggcaattaattgcctgtttcctggcttccaatgtttgttctcagtttctcagaatttttcttagcgcaaagcagtgagggcagtacatgttctttttgcatttttaattattgtaatccttttagataatgatgtgttcatttgaactaactacatactatgatcaagtatattgcatcctaacgctacctctgactcaacctgactttgtaggaaagcctacacgtagccttgtttgataaaaacacggaagtgactagagaatggaagataaaggaagaagctaggaagtccttgctatcaaaaccttatcctaatataggaccaattgaagtattcaaaaagaaaaacagtatcttatatgattagtttttgttggtggttttgttttcatttatttttgcaagagccactttttatttactttctctagggataagagataaaacttgaagtacttttttcaaatcttgtgtgcaaattagtattgttagcatctatttggcttattttagtatttttaagtctagtcacaaaccaaacaaaacttttgaaaatgagctatattttgttcaaagataattgatttgatcttatatttatttgtttttaggataatttttgatctttttgtaaactgctttgcttgttaatatctgtgaaaaataaatgagttcattttgttcactttccaattttcccgagtatcctagtcatcaaagataacagttcatcagaattacagtcagaaaatcctttttctactgaatagttagcagggaaaaataattctgatatttaactgtcataattctgtagtgctattatagtgaaaaactcagttctataagctagctgtgttgtcacagttttatcatagttcataattatttcatgtgcaatcctatttggaggccctgttagacttttaacaatcccatccatatctgtaattctctgatggcaagaatggatggagcatttctgagttaacagtgctggacagtatcgtactgggtgtcataaactctttatgaatggtaatattatgtaaattgaaatctggccctcaaactatattgcagctttcagcagtatgtttgaaggcctcttttgttaatgattctgtaatgtatgaattatgttcttgagtggttaaaaaagaatatgaaggcttgataattatttattgggtaaagtcaggaaattgtagtgaaagaactaatggttttgttttttggaataaaggcacctaagctattgctaattgaattgctgctagaattagaaattatgctttagaatagaattggtatttctgtgattctttttgcttcttggtattttctcttgtatctatgtatctagtattgaggcttgctctttcatgtggctttatcctctctttaatagctgttgtaaaattcctgagtaactggctgcttcaggatcagcttgcagagtcttgcttttaggttagatacaaacaaagtaaatcatagttggtgtaaatccagcaaaaaacagctggctttggaatggagaacactacaattcaaatttgaagtatattcagaagaaaactttggaattagctttacatttgtttgtaaatctaaacaaatatgcaaaattggtcaaaatgtaagtatatagcatttttaaagattaatggttccttttatgtgctgatttctttgtattctgttctctgcattcatcattcaggaataccaccaataaatgtatttatatatccc

SEQ ID NO: 290409 - DNA, 592 bp, Artificial Sequence
  derived and/or modified sequence
agctgccgctgtcgctgctgctcgttcgagtcgcaggtacttggcccggggcctgtgggcagcgcctgggctagagccacttgatatctcctgcaccgtccctgtagcactggaggtccagtaggcctggccggggccctgaggggcgagggtgcccgggcttcccacaccttccgcggcgactggagggagccgggccgaggaagcgaccgcggatccttgccagcacattacagaatatttttgttgaaccttcttgagaattcagagaaactgctgagtgaccactgaacgaaaagatctaatcttaaggcttacgcgtgttccatccaccacatcagaacaatgtcgtatgtttttgtaaatgattcttctcagactaacgtgcccttgctgcaagcctgtattgatggggactttaattattccaagcggcttttggaaagtggctttgacccaaatattcgtgacagcaggggcagaacaggccttcaccttgcagcagctcgagggaatgtagacatctgccagttactgcataaattcggtgccgatcttctggccacagattatcaaggaaacacagctcttc

SEQ ID NO: 290410 - DNA, 567 bp, Artificial Sequence
  derived and/or modified sequence
cttgaagctgccgctgtcgctgctgctcgttcgagtcgcagggttttgctctgttgctcaggctggagtgcagtggcacaatcatggctgaatgcaccctccacctcccaggctcgagtgatcctcctgcctcagccttgaatatctgggacaacaggcacgcacgcaccaccatgcaagatccttgccagcacattacagaatatttttgttgaaccttcttgagaattcagagaaactgctgagtgaccactgaacgaaaagatctaatcttaaggcttacgcgtgttccatccaccacatcagaacaatgtcgtatgtttttgtaaatgattcttctcagactaacgtgcccttgctgcaagcctgtattgatggggactttaattattccaagcggcttttggaaagtggctttgacccaaatattcgtgacagcaggggcagaacaggccttcaccttgcagcagctcgagggaatgtagacatctgccagttactgcataaattcggtgccgatcttctggccacagattatcaaggaaacacagctcttcacctctgtgg

SEQ ID NO: 290411 - DNA, 580 bp, Artificial Sequence
  derived and/or modified sequence
tgatggcttcttcgcggtctgtgtgttcacgagggccgggcagaggcctgcgagggttctcgtttgcgcttgcgggttagggctgtggtccggggaacccctgggcagcgcgggcagccctggctcgcggttaatcgggggatccttgccagcacattacagaatatttttgttgaaccttcttgagaattcagagaaactgctgagtgaccactgaacgaaaagatctaatcttaaggcttacgcgtgttccatccaccacatcagaacaatgtcgtatgtttttgtaaatgattcttctcagactaacgtgcccttgctgcaagcctgtattgatggggactttaattattccaagcggcttttggaaagtggctttgacccaaatattcgtgacagcaggggcagaacaggccttcaccttgcagcagctcgagggaatgtagacatctgccagttactgcataaattcggtgccgatcttctggccacagattatcaaggaaacacagctcttcacctctgtggccatgtggatactatccaatttttggtttccaatggactcaaaattgatatt

SEQ ID NO: 290412 - DNA, 687 bp, Artificial Sequence
  derived and/or modified sequence
atgagctacgttttcgtgaacgactcctcccaaactaacgtccccctcctgcaggcctgtatcgatggagatttcaactatagcaagagattgttggagtccggtttcgaccctaatataagagattcccgcggtagaactggattgcacctcgctgccgcaaggggcaacgtggacatctgtcagctgttgcacaaatttggggcagatcttctggccacagattaccagggaaatactgcgctgcatctatgcggccacgtggacaccattcagttcctggtgagtaacggtctaaagatcgacatctgcaatcatcaaggagccacaccattggttcttgcaaagcgtagaggcgttaataaagatgtgattcggctgctggagtcattagaggagcaggaagttaaggggtttaaccgcggaacccattctaaactggagactatgcagactgcagaaagtgagtctgccatggagtcacactccctgcttaatcccaatctgcagcagggcgagggcgtgctttcttcatttaggactacgtggcaggagtttgtcgaggacctcggattttggcgcgttctcctgctcattttcgtcattgctcttctgagccttggcatagcgtactacgtttcgggtgtgcttcctttcgtagaaaatcaacccgaacttgttcactag

SEQ ID NO: 290413 - DNA, 588 bp, Artificial Sequence
  derived and/or modified sequence
atgagctacgtctttgtgaatgacagctcacagactaatgtacccctgctgcaggcatgtatagacggagactttaattatagtaaaaggctgctggagtcgggatttgacccgaacatccgggactcaaggggccgaaccggccttcatctcgcagccgcacggggtaatgtggacatctgtcaactcctacacaaattcggcgctgacctgcttgccacagactaccaggggaacaccgctttgcacctgtgcggccacgtggatactattcagtttctagtgtctaatggactgaagatcgatatttgtaaccatcagggggctacacctctggtcctcgccaaaagacgaggggtaaacaaagacgtgatccggctgctggaaagcctggaggagcaggaagttaagggttttaaccgaggcactcattccaagttagagacgatgcaaacggccgagagcgagtcagcaatggagtcccattccctccttaaccccaatcttcaacagggcgagggcgtgttgtcgagcttccgtaccacctggcaggaatttgtcgaggacctcggcttttggcgagtctag

SEQ ID NO: 290414 - DNA, 687 bp, Artificial Sequence
  derived and/or modified sequence
atgagttatgtcttcgtcaatgattcatctcagaccaacgtgccattgctccaggcctgcatagacggagacttcaattactctaaacggctgctggagagcgggtttgaccctaatattcgcgacagtaggggcagaaccggcctccatttggctgcggcacgaggcaatgtcgacatttgccagctgttacataagtttggagcagatctgctggctaccgactaccaaggcaacaccgccctccatctctgtgggcacgtggacactatccagttcttagtctctaacggcttgaagatagacatatgtaaccaccagggggcaacacccctagtcctggcaaaacggcgtggcgtaaacaaagatgtgatccggctattggaatcactggaagaacaggaggtgaagggattcaatagagggacccattctaagctggaaactatgcaaaccgcagaatccgagtcagccatggaaagccatagcctgctgaatccaaacctgcagcagggcgaaggagtgctgagcagttttagaaccacctggcaggaattcgtggaggatctcggcttttggagagtgctcctgctgattttcgttatcgcactgctctctctcgggatagcttactacgtctccggtgtgctgccatttgtagaaaatcaacctgagctagtccattag

SEQ ID NO: 290415 - DNA, 687 bp, Artificial Sequence
  derived and/or modified sequence
atgtcttatgtttttgttaatgatagcagccagaccaacgtcccgttgctccaggcctgtatagatggcgactttaattacagcaagcgcctccttgagagtggttttgatcccaatattcgcgattccaggggcaggacaggcctccatttggcagccgcacgcggtaacgtggacatttgtcagctgctgcacaagtttggtgctgatctcctggccactgactatcaggggaataccgcactacacctgtgcggccacgtggacactattcagttcttggtgtcaaatggcctgaagattgacatctgcaaccatcagggggctactccactggtcctggctaagaggcggggagtgaataaggacgttatccgtcttctggaaagtctggaggagcaagaggtgaagggcttcaacagaggtacccactccaaactggaaaccatgcagaccgctgaaagtgagtctgcaatggaaagccattcccttctgaatcctaatttgcaacagggggaaggggtcctctcctcttttagaactacatggcaagaattcgtggaagacctaggtttctggagggtcttgctgctcattttcgtaattgccctgctcagcttaggcatcgcttattatgtatcaggagttttgcccttcgtcgaaaatcagcccgagttagttcattag

SEQ ID NO: 290416 - DNA, 249 bp, Artificial Sequence
  derived and/or modified sequence
atgagttatgttttcgttaatgacagttcccagactaatgtgccactgctgcaggcctgcatagatggggatttcaattattcaaaacgcctgcttgaatctggcttcgaccccaacattcgtgatagtcgtgggaggactggtctgcatctggctgcggctcggggtaatgtcgacatatgccagctactgcataaatttggcgctgacctcctggcgacagactatcagggaaacactgccctatag

SEQ ID NO: 290417 - DNA, 261 bp, Artificial Sequence
  derived and/or modified sequence
atgtcttacgtcttcgttaacgacagtagtcaaacaaacgtgccgcttctccaagcctgcatcgacggtgattttaactacagcaagcggctgctcgagtccggctttgatcccaacatccgcgacagcaggggcaggacagggctccatctggccgctgcacgagggaacgtagatatctgtcagctgcttcataagttcggagctgacctgcttgccaccgattatcagggcaatacagccctacacctctgcgggtag

SEQ ID NO: 290418 - DNA, 312 bp, Artificial Sequence
  derived and/or modified sequence
atgtcatatgtgttcgttaacgatagcagccagaccaatgtccctctgctccaagcatgcatcgacggagactttaactactcaaaacgcctcctggagagtggctttgacccgaacatcagagattctcggggacgcactgggctgcatctcgctgctgcaagggggaacgtggacatatgtcagcttctccacaaattcggtgccgatctcctcgctacggattaccagggcaatactgctctgcacctctgcgggcacgtggacactattcaattcctcgtgagtaatggattgaagatcgacatctag

SEQ ID NO: 290419 - DNA, 3280 bp, Artificial Sequence
  derived and/or modified sequence
gggggcctggccggccgtcgcggactcgggagatggaggaaaaggagatattacggcggcagatccgcctactgcagggtctgattgatgactacaaaaccctccacggcaatgccccggcccctggtaccccagcagcttctgggtggcagccacccacttaccacagtggcagagcctttagtgcccgctaccctcgtccaagccggaggggctactcttcccaccatgggccttcgtggcgcaagaaatactccctcgtgaatcggcccccgggaccctcagaccctcctgccgaccatgctgtgcggccgttgcacggggcccgggggggccagcctcctgtcccgcagcagcatgtccttgagagacaggtccagctcagtcagggtcagaacgtggtcatcaaagttaaaccgccatcaaagtctggctctgccagtgcctcaggggcccagcggggctctttggaagaatttgaggaaaccccctggagtgaccaaaggccccgggaaggtgaaggtgagccccctcggggacagctgcagccctcgaggccaacaagagccagggggacctgcagtgtggaagatcctcttctggtctgccagaaggagcctggtaagcccaggatggtgaagtcagtgggcagtgtgggcgacagcccccgggagccccgccggacagtcagtgagagtgtgattgccgtcaaggcgagcttcccatcctccgctctgcccccacgcactggcgtggccctgggccggaagctgggttctcattccgtggccagctgtgctccacagctccttggggacaggagagtagatgctggccacacagatcagccagttccgtctggctcagtggggggccccgccagaccggcctcaggacccaggcaggcccgggaggcctcgctggttgtgacctgtcgaactaacaagttccggaaaaacaactacaaatgggtggctgcctcctcgaagagtccccgggttgctcggagggccctcagtcccagagtggctgcagagaatgtgtgcaaggcctctgctggcatggcaaacaaggtggagaagccgcagctcatagctgacccagagcccaagcccaggaagccagccacgtcctccaagccagggtctgcccccagcaagtacaagtggaaggcctccagcccctctgcctcctcctcttcctccttccgttggcagtcggaggccagcagcaaggaccatgcctcccagctctccccagtcctgtctaggtccccgtcgggggacagaccagcagtaggacacagtggcttgaagcccctctctggggagaccccgctctcggcttacaaagtgaagagccgcaccaagatcatccggagacgcagcagcacaagccttcctggagacaagaaaagcggcacctcacctgccgccaccgccaagagccacctcagcctccggcggagacaggccctcagggggaagagcagccctgtcctgaagaagacccccaacaagggcctggtacaggtcaccacgcaccgactatgtcgcctgccaccgagccgggcccacctccccaccaaggaagcgtccagcctgcatgccgtgcggactgcacccaccagcaaggtgatcaagacccgctaccgcattgtcaagaagacgccggcctcgcctctcagcgccccgcccttccccctgtctctgccctcctggcgggcccggcggctctcactatccaggtccctggtgctgaaccgcctgcgtccagttgccagcgggggtgggaaagcccaaccgggctccccttggtggcggagcaaaggctaccgctgcatcggaggggtcctctacaaagtatctgccaacaagctctccaagacctccggccagcccagtgatgcgggcagcaggcccctcctgcgcacaggccggctggatcctgcaggcagctgtagccgttccctggccagccgggcagtgcagcgcagcctggccatcatccggcaggcgcggcagcgcagggagaagaggaaggagtactgcatgtactacaaccgcttcggcaggtgcaaccgtggcgagcgctgcccctacatccacgatcccgagaaggtggccgtgtgcaccaggtttgtccggggcacctgcaagaaaacggatgggacctgccccttctcccaccatgtgtccaaggagaagatgccggtgtgctcctacttcctgaagggcatctgcagcaacagcaactgtccctatagccacgtgtacgtgtcccgcaaggccgaggtctgcagcgacttcctcaaaggctactgccccctgggtgcaaagtgcaagaagaaacacacgctgctgtgccccgactttgcccgcaggggggcgtgtccccgcggcgcccagtgccagctgctccaccgtacccagaaacgccacagtcggcgggcagccacgtcccccgccccagggcccagcgacgcaaccgccaggagcagggtctcggccagccacgggcccaggaagccttcagcatcccagcgccccaccaggcagacgcccagctcggctgccctcactgcggctgccgtggctgcacctccccactgcccaggggggtcagcctctccctcatcctcgaaggcttcctcctcctcctcctcctcctcatcccctcccgcttccttggaccacgaggcaccatctctccaggaggctgccttagcagcagcgtgctccaacaggctctgcaagctgccttccttcatctccctgcagtcctcgccgagcccaggagcccagcccagggtccgggcccctagggcccccctcaccaaggactcagggaagcctctgcacatcaaaccacgtctgtgaggaccccagggaccggcctgcacctacctcagaccctcatccttggagaggaaagaggctctgtccaccactctaccccacaggagggccgcccgccaccaagcctcacctgggggccacagggacactgctctgcctgcctggccctcaaccttccatgaccagcgtgtgcgcagggcctggtcttcctcccccaagccaggcccctgtccccaccccaccaccttccagggtgccaggcagggctggcctccaggcctgtccccgactgccattggcaacagtggccctgcagcccccagccctccccacccaggttttcggcccagtgaagaggccactggccaggcctcccaggcaggtgttttatgttcagcaataaaggttctatccgtaactgg

SEQ ID NO: 290420 - DNA, 81 bp, Artificial Sequence
  derived and/or modified sequence
atggcgcgccagggctgctttggcagctatcaggtgattagcctgtttacctttgcgattggcgtgaacctgtgcctgggc

SEQ ID NO: 290421 - protein, 27 aa, Artificial Sequence
  derived and/or modified sequence
MARQGCFGSYQVISLFTFAIGVNLCLG

SEQ ID NO: 290422 - protein, 294 aa, Artificial Sequence
  derived and/or modified sequence
MQQTKQQRENIQQVSQKEAKHKITSADGHIESSALLKEKQRHRLHKFLCLRVGKPMRKTFVSQASATMQQYAQRDKKHEYWFAVPQERTDHLYAFFIQWSPEIYAEDTGEYTREPGFIVVKKIEESETIEDSSNQAAAREWELTKHLPPRTIGYPWTLVYGTGKHGTSLKTLYRTMTGLDTPVLMVIKDSDGQVFGALASEPLKVSDGFYGTGETFVFTFCPEFEVFKWTGDNMFFIKGDMDSLAFGGGGGEFALWLDGDLYHGRSHSCKTFGNRTLSKKEDFFIQDIEIWAFE

SEQ ID NO: 290423 - protein, 1007 aa, Artificial Sequence
  derived and/or modified sequence
KAEYDRYLASSKIMAAAYLDPNLNHTPKEWKYELRIRYLPKGFLNQFTEDKPTLNFFYQQVKSDYMLEIADQVDQEIALKLGCLEIRRSYWEMRGNALEKKSNYEVLEKDVGLKRFFPKSLLDSVKAKTLRKLIQQTFRQFANLNREESILKFFEILSPVYRFDKECFKCALGSSWIISVELAIGPEEGISYLTDKGCNPTHLADFTQVQTIQYSNSEDKDRKGMLQLKIAGAPEPLTVTAPSLTIAENMADLIDGYCRLVNGTSQSFIIRPQKEGERALPSIPKLANSEKQGMRTHAVSVSGVSHCQHKVKKARRFLPLVFCSHDPPSTDEISGDETDDYAEIIDEEDTYTMPSIKSYCIDVARDYEIQRERIELGRCIGEGQFGDVHQGIYMSPENPALAVAIKTCKNCTSDSVREKFLQEALTMRQFDHPHIVKLIGVITENPVWIIMELCTLGELRSFLQVRKYSLDLASLILYAYQLSTALAYLESKRFVHRDIAARNVLVSSNDCVKLGDFGLSRYMEDSTYYKASKGKLPIKWMAPESINFRRFTSASDVWMFGVCMWEILMHGVKPFQGVKNNDVIGRIENGERLPMPPNCPPTLYSLMTKCWAYDPSRRPRFTELKAQLSTILEEEKAQQEERMRMESRRQATVSWDSGGSDEAPPKPSRPGYPSPRSSEGFYPSPQHMVQTNHYQVSGYPGSHGITAMAGSIYPGQASLLDQTDSWNHRPQEIAMWQPNVEDSTVLDLRGIGQVLPTHLMEERLIRQQQEMEEDQRWLEKEERFLKPDVRLSRGSIDREDGSLQGPIGNQHIYQPVGKPDPAAPPKKPPRPGAPGHLGSLASLSSPADSYNEGVKPLRLQPQEISPPPTANLDRSNDKVYENVTGLVKAVIEMSSKIQPAPPEEYVPMVKEVGLALRTLLATVDETIPLLPASTHREIEMAQKLLNSDLGELINKMKLAQQYVMTSLQQEYKKQMLTAAHALAVDAKNLLDVIDQARLKMLGQTRPH

SEQ ID NO: 290424 - DNA, 630 bp, Artificial Sequence
  derived and/or modified sequence
gagcccgcgccgccgccgccgccgccggtcccggaccactgtgagcccgcggcgtgaggcgtgggaggaagcgcggctgctgtcgcccagcgccgccccgtcgtcgtctgccttcgcttcacggcgccgagccgcggtccgagcagaactggggctcccttgcatcttccagttacaaattcagtgccttctgcagtttccccagagctcctcaagaataacggaagggaggtatagtaatggttaagaaactttgcaaagaaagtgaataatgccagtactgtcaccttttggaacttgttggtatttcctgttgtctgtctttggaaggtatggaacctgtggtgacttaagagttgtataattgtgagagctaagcacagtccttgttattaaatgacagaatatgacagatacctagcatctagcaaaataatggcagctgcttaccttgaccccaacttgaatcacacaccaaattcgagtactaagactcacctgggtactggtatggaacgttctcctggtgcaatggagcgagtattaaaggtctttcattattttgaaagcaatagtgagccaaccacctgggccagtattatcaggcatggagatgctactgatgtcagg

SEQ ID NO: 290425 - DNA, 542 bp, Artificial Sequence
  derived and/or modified sequence
ttagtagagacggggttttaccgtcttggccaggctggtcttgaactcctgacttcaggtgatccacccaccttggcctcccaaagtgttgggattacaggcctgagccaccgtgcccggcagtgcttggtcttattaaacgctttatgaaagaatatgacagatacctagcatctagcaaaataatggcagctgcttaccttgaccccaacttgaatcacacaccaaattcgagtactaagactcacctgggtactggtatggaacgttctcctggtgcaatggagcgagtattaaaggtctttcattattttgaaagcaatagtgagccaaccacctgggccagtattatcaggcatggagatgctactgatgtcaggggcatcattcagaagatagtggacagtcacaaagtaaagcatgtggcctgctatggattccgcctcagtcacctgcggtcagaggaggttcactggcttcacgtggatatgggcgtctccagtgtgagggagaagtatgagcttgctcacccaccagaggag

SEQ ID NO: 290426 - protein, 1701 aa, Artificial Sequence
  derived and/or modified sequence
MKIFQRKMRYWLLPPFLAIVYFCTIVQGQVAPPTRLRYNVISHDSIQISWKAPRGKFGGYKLLVTPTSGGKTNQLNLQNTATKAIIQGLMPDQNYTVQIIAYNKDKESKPAQGQFRIKDLEKRKDPKPRVKVVDRGNGSRPSSPEEVKFVCQTPAIADIVILVDGSWSIGRFNFRLVRHFLENLVTAFDVGSEKTRIGVKNADVNELQEIASEPDSTHVYNVAEFDLMHTVVESLTRTLCSRVEEQDREIKASAHAITGPPTELITSEVTARSFMVNWTHAPGNVEKYRVVYYPTRGGKPDEVVVDGTVSSTVLKNLMSLTEYQIAVFAIYAHTASEGLRGTETTLALPMASDLLLYDVTENSMRVKWDAVPGASGYLILYAPLTEGLAGDEKEMKIGETHTDIELSGLLPNTEYTVTVYAMFGEEASDPVTGQETTLALSPPRNLRISNVGSNSARLTWDPTSRQINGYRIVYNNADGTEINEVEVDPITTFPLKGLTPLTEYTIAIFSIYDEGQSEPLTGVFTTEEVPAQQYLEIDEVTTDSFRVTWHPLSADEGLHKLMWIPVYGGKTEEVVLKEEQDSHVIEGLEPGTEYEVSLLAVLDDGSESEVVTAVGTTLDSFWTEPATTIVPTTSVTSVFQTGIRNLVVGDETTSSLRVKWDISDSDVQQFRVTYMTAQGDPEEEVIGTVMVPGSQNNLLLKPLLPDTEYKVTVTPIYTDGEGVSVSAPGKTLPSSGPQNLRVSEEWYNRLRITWDPPSSPVKGYRIVYKPVSVPGPTLETFVGADINTILITNLLSGMDYNVKIFASQASGFSDALTGMVKTLFLGVTNLQAKHVEMTSLCAHWQVHRHATAYRVVIESLQDRQKQESTVGGGTTRHCFYGLQPDSEYKISVYTKLQEIEGPSVSIMEKTQSLPTRPPTFPPTIPPAKEVCKAAKADLVFMVDGSWSIGDENFNKIISFLYSTVGALNKIGTDGTQVAMVQFTDDPRTEFKLNAYKTKETLLDAIKHISYKGGNTKTGKAIKYVRDTLFTAESGTRRGIPKVIVVITDGRSQDDVNKISREMQLDGYSIFAIGVADADYSELVSIGSKPSARHVFFVDDFDAFKKIEDELITFVCETASATCPVVHKDGIDLAGFKMMEMFGLVEKDFSSVEGVSMEPGTFNVFPCYQLHKDALVSQPTRYLHPEGLPSDYTISFLFRILPDTPQEPFALWEILNKNSDPLVGVILDNGGKTLTYFNYDQSGDFQTVTFEGPEIRKIFYGSFHKLHIVVSETLVKVVIDCKQVGEKAMNASANITSDGVEVLGKMVRSRGPGGNSAPFQLQMFDIVCSTSWANTDKCCELPGLRDDESCPDLPHSCSCSETNEVALGPAGPPGGPGLRGPKGQQGEPGPKGPDGPRGEIGLPGPQGPPGPQGPSGLSIQGMPGMPGEKGEKGDTGLPGPQGIPGGVGSPGRDGSPGQRGLPGKDGSSGPPGPPGPIGIPGTPGVPGITGSMGPQGALGPPGVPGAKGERGERGDLQSQAMVRSVARQVCEQLIQSHMARYTAILNQIPSHSSSIRTVQGPPGEPGRPGSPGAPGEQGPPGTPGFPGNAGVPGTPGERGLTGIKGEKGNPGVGTQGPRGPPGPAGPSGESRPGSPGPPGSPGPRGPPGHLGVPGPQGPSGQPGYCDPSSCSAYGVRAPHPDQPEFTPVQDELEAMELWGPGV

SEQ ID NO: 290427 - protein, 1796 aa, Artificial Sequence
  derived and/or modified sequence
MKIFQRKMRYWLLPPFLAIVYFCTIVQGQVAPPTRLRYNVISHDSIQISWKAPRGKFGGYKLLVTPTSGGKTNQLNLQNTATKAIIQGLMPDQNYTVQIIAYNKDKESKPAQGQFRIKDLEKRKDPKPRVKVVDRGNGSRPSSPEEVKFVCQTPAIADIVILVDGSWSIGRFNFRLVRHFLENLVTAFDVGSEKTRIGLAQYSGDPRIEWHLNAFSTKDEVIEAVRNLPYKGGNTLTGLALNYIFENSFKPEAGSRTGVSKIGILITDGKSQDDIIPPSRNLRESGVELFAIGVKNADVNELQEIASEPDSTHVYNVAEFDLMHTVVESLTRTLCSRVEEQDREIKASAHAITGPPTELITSEVTARSFMVNWTHAPGNVEKYRVVYYPTRGGKPDEVVVDGTVSSTVLKNLMSLTEYQIAVFAIYAHTASEGLRGTETTLALPMASDLLLYDVTENSMRVKWDAVPGASGYLILYAPLTEGLAGDEKEMKIGETHTDIELSGLLPNTEYTVTVYAMFGEEASDPVTGQETTLALSPPRNLRISNVGSNSARLTWDPTSRQINGYRIVYNNADGTEINEVEVDPITTFPLKGLTPLTEYTIAIFSIYDEGQSEPLTGVFTTEEVPAQQYLEIDEVTTDSFRVTWHPLSADEGLHKLMWIPVYGGKTEEVVLKEEQDSHVIEGLEPGTEYEVSLLAVLDDGSESEVVTAVGTTLDSFWTEPATTIVPTTSVTSVFQTGIRNLVVGDETTSSLRVKWDISDSDVQQFRVTYMTAQGDPEEEVIGTVMVPGSQNNLLLKPLLPDTEYKVTVTPIYTDGEGVSVSAPGKTLPSSGPQNLRVSEEWYNRLRITWDPPSSPVKGYRIVYKPVSVPGPTLETFVGADINTILITNLLSGMDYNVKIFASQASGFSDALTGMVKTLFLGVTNLQAKHVEMTSLCAHWQVHRHATAYRVVIESLQDRQKQESTVGGGTTRHCFYGLQPDSEYKISVYTKLQEIEGPSVSIMEKTQSLPTRPPTFPPTIPPAKEVCKAAKADLVFMVDGSWSIGDENFNKIISFLYSTVGALNKIGTDGTQVAMVQFTDDPRTEFKLNAYKTKETLLDAIKHISYKGGNTKTGKAIKYVRDTLFTAESGTRRGIPKVIVVITDGRSQDDVNKISREMQLDGYSIFAIGVADADYSELVSIGSKPSARHVFFVDDFDAFKKIEDELITFVCETASATCPVVHKDGIDLAGFKMMEMFGLVEKDFSSVEGVSMEPGTFNVFPCYQLHKDALVSQPTRYLHPEGLPSDYTISFLFRILPDTPQEPFALWEILNKNSDPLVGVILDNGGKTLTYFNYDQSGDFQTVTFEGPEIRKIFYGSFHKLHIVVSETLVKVVIDCKQVGEKAMNASANITSDGVEVLGKMVRSRGPGGNSAPFQLQMFDIVCSTSWANTDKCCELPGLRDDESCPDLPHSCSCSETNEVALGPAGPPGGPGLRGPKGQQGEPGPKGPDGPRGEIGLPGPQGPPGPQGPSGLSIQGMPGMPGEKGEKGDTGLPGPQGIPGGVGSPGRDGSPGQRGLPGKDGSSGPPGPPGPIGIPGTPGVPGITGSMGPQGALGPPGVPGAKGERGERGDLQSQAMVRSVARQVCEQLIQSHMARYTAILNQIPSHSSSIRTVQGPPGEPGRPGSPGAPGEQGPPGTPGFPGNAGVPGTPGERGLTGIKGEKGNPGVGTQGPRGPPGPAGPSGESRPGSPGPPGSPGPRGPPGHLGVPGPQGPSGQPGYCDPSSCSAYGVRAPHPDQPEFTPVQDELEAMELWGPGV

SEQ ID NO: 290428 - DNA, 5106 bp, Artificial Sequence
  derived and/or modified sequence
atgaagatcttccagagaaagatgagatactggctgctgccccccttcctggccatcgtgtacttctgcaccatcgtgcagggccaggtggccccccccaccagactgagatacaacgtgatcagccacgacagcatccagatcagctggaaggcccccagaggcaagttcggcggctacaagctgctggtgacccccaccagcggcggcaagaccaaccagctgaacctgcagaacaccgccaccaaggccatcatccagggcctgatgcccgaccagaactacaccgtgcagatcatcgcctacaacaaggacaaggagagcaagcccgcccagggccagttcagaatcaaggacctggagaagagaaaggaccccaagcccagagtgaaggtggtggacagaggcaacggcagcagacccagcagccccgaggaggtgaagttcgtgtgccagacccccgccatcgccgacatcgtgatcctggtggacggcagctggagcatcggcagattcaacttcagactggtgagacacttcctggagaacctggtgaccgccttcgacgtgggcagcgagaagaccagaatcggcgtgaagaacgccgacgtgaacgagctgcaggagatcgccagcgagcccgacagcacccacgtgtacaacgtggccgagttcgacctgatgcacaccgtggtggagagcctgaccagaaccctgtgcagcagagtggaggagcaggacagagagatcaaggccagcgcccacgccatcaccggcccccccaccgagctgatcaccagcgaggtgaccgccagaagcttcatggtgaactggacccacgcccccggcaacgtggagaagtacagagtggtgtactaccccaccagaggcggcaagcccgacgaggtggtggtggacggcaccgtgagcagcaccgtgctgaagaacctgatgagcctgaccgagtaccagatcgccgtgttcgccatctacgcccacaccgccagcgagggcctgagaggcaccgagaccaccctggccctgcccatggccagcgacctgctgctgtacgacgtgaccgagaacagcatgagagtgaagtgggacgccgtgcccggcgccagcggctacctgatcctgtacgcccccctgaccgagggcctggccggcgacgagaaggagatgaagatcggcgagacccacaccgacatcgagctgagcggcctgctgcccaacaccgagtacaccgtgaccgtgtacgccatgttcggcgaggaggccagcgaccccgtgaccggccaggagaccaccctggccctgagcccccccagaaacctgagaatcagcaacgtgggcagcaacagcgccagactgacctgggaccccaccagcagacagatcaacggctacagaatcgtgtacaacaacgccgacggcaccgagatcaacgaggtggaggtggaccccatcaccaccttccccctgaagggcctgacccccctgaccgagtacaccatcgccatcttcagcatctacgacgagggccagagcgagcccctgaccggcgtgttcaccaccgaggaggtgcccgcccagcagtacctggagatcgacgaggtgaccaccgacagcttcagagtgacctggcaccccctgagcgccgacgagggcctgcacaagctgatgtggatccccgtgtacggcggcaagaccgaggaggtggtgctgaaggaggagcaggacagccacgtgatcgagggcctggagcccggcaccgagtacgaggtgagcctgctggccgtgctggacgacggcagcgagagcgaggtggtgaccgccgtgggcaccaccctggacagcttctggaccgagcccgccaccaccatcgtgcccaccaccagcgtgaccagcgtgttccagaccggcatcagaaacctggtggtgggcgacgagaccaccagcagcctgagagtgaagtgggacatcagcgacagcgacgtgcagcagttcagagtgacctacatgaccgcccagggcgaccccgaggaggaggtgatcggcaccgtgatggtgcccggcagccagaacaacctgctgctgaagcccctgctgcccgacaccgagtacaaggtgaccgtgacccccatctacaccgacggcgagggcgtgagcgtgagcgcccccggcaagaccctgcccagcagcggcccccagaacctgagagtgagcgaggagtggtacaacagactgagaatcacctgggacccccccagcagccccgtgaagggctacagaatcgtgtacaagcccgtgagcgtgcccggccccaccctggagaccttcgtgggcgccgacatcaacaccatcctgatcaccaacctgctgagcggcatggactacaacgtgaagatcttcgccagccaggccagcggcttcagcgacgccctgaccggcatggtgaagaccctgttcctgggcgtgaccaacctgcaggccaagcacgtggagatgaccagcctgtgcgcccactggcaggtgcacagacacgccaccgcctacagagtggtgatcgagagcctgcaggacagacagaagcaggagagcaccgtgggcggcggcaccaccagacactgcttctacggcctgcagcccgacagcgagtacaagatcagcgtgtacaccaagctgcaggagatcgagggccccagcgtgagcatcatggagaagacccagagcctgcccaccagaccccccaccttcccccccaccatcccccccgccaaggaggtgtgcaaggccgccaaggccgacctggtgttcatggtggacggcagctggagcatcggcgacgagaacttcaacaagatcatcagcttcctgtacagcaccgtgggcgccctgaacaagatcggcaccgacggcacccaggtggccatggtgcagttcaccgacgaccccagaaccgagttcaagctgaacgcctacaagaccaaggagaccctgctggacgccatcaagcacatcagctacaagggcggcaacaccaagaccggcaaggccatcaagtacgtgagagacaccctgttcaccgccgagagcggcaccagaagaggcatccccaaggtgatcgtggtgatcaccgacggcagaagccaggacgacgtgaacaagatcagcagagagatgcagctggacggctacagcatcttcgccatcggcgtggccgacgccgactacagcgagctggtgagcatcggcagcaagcccagcgccagacacgtgttcttcgtggacgacttcgacgccttcaagaagatcgaggacgagctgatcaccttcgtgtgcgagaccgccagcgccacctgccccgtggtgcacaaggacggcatcgacctggccggcttcaagatgatggagatgttcggcctggtggagaaggacttcagcagcgtggagggcgtgagcatggagcccggcaccttcaacgtgttcccctgctaccagctgcacaaggacgccctggtgagccagcccaccagatacctgcaccccgagggcctgcccagcgactacaccatcagcttcctgttcagaatcctgcccgacaccccccaggagcccttcgccctgtgggagatcctgaacaagaacagcgaccccctggtgggcgtgatcctggacaacggcggcaagaccctgacctacttcaactacgaccagagcggcgacttccagaccgtgaccttcgagggccccgagatcagaaagatcttctacggcagcttccacaagctgcacatcgtggtgagcgagaccctggtgaaggtggtgatcgactgcaagcaggtgggcgagaaggccatgaacgccagcgccaacatcaccagcgacggcgtggaggtgctgggcaagatggtgagaagcagaggccccggcggcaacagcgcccccttccagctgcagatgttcgacatcgtgtgcagcaccagctgggccaacaccgacaagtgctgcgagctgcccggcctgagagacgacgagagctgccccgacctgccccacagctgcagctgcagcgagaccaacgaggtggccctgggccccgccggcccccccggcggccccggcctgagaggccccaagggccagcagggcgagcccggccccaagggccccgacggccccagaggcgagatcggcctgcccggcccccagggcccccccggcccccagggccccagcggcctgagcatccagggcatgcccggcatgcccggcgagaagggcgagaagggcgacaccggcctgcccggcccccagggcatccccggcggcgtgggcagccccggcagagacggcagccccggccagagaggcctgcccggcaaggacggcagcagcggcccccccggcccccccggccccatcggcatccccggcacccccggcgtgcccggcatcaccggcagcatgggcccccagggcgccctgggcccccccggcgtgcccggcgccaagggcgagagaggcgagagaggcgacctgcagagccaggccatggtgagaagcgtggccagacaggtgtgcgagcagctgatccagagccacatggccagatacaccgccatcctgaaccagatccccagccacagcagcagcatcagaaccgtgcagggcccccccggcgagcccggcagacccggcagccccggcgcccccggcgagcagggcccccccggcacccccggcttccccggcaacgccggcgtgcccggcacccccggcgagagaggcctgaccggcatcaagggcgagaagggcaaccccggcgtgggcacccagggccccagaggcccccccggccccgccggccccagcggcgagagcagacccggcagccccggcccccccggcagccccggccccagaggcccccccggccacctgggcgtgcccggcccccagggccccagcggccagcccggctactgcgaccccagcagctgcagcgcctacggcgtgagagccccccaccccgaccagcccgagttcacccccgtgcaggacgagctggaggccatggagctgtggggccccggcgtgtag

SEQ ID NO: 290429 - DNA, 5391 bp, Artificial Sequence
  derived and/or modified sequence
atgaagatcttccagagaaagatgagatactggctgctgccccccttcctggccatcgtgtacttctgcaccatcgtgcagggccaggtggccccccccaccagactgagatacaacgtgatcagccacgacagcatccagatcagctggaaggcccccagaggcaagttcggcggctacaagctgctggtgacccccaccagcggcggcaagaccaaccagctgaacctgcagaacaccgccaccaaggccatcatccagggcctgatgcccgaccagaactacaccgtgcagatcatcgcctacaacaaggacaaggagagcaagcccgcccagggccagttcagaatcaaggacctggagaagagaaaggaccccaagcccagagtgaaggtggtggacagaggcaacggcagcagacccagcagccccgaggaggtgaagttcgtgtgccagacccccgccatcgccgacatcgtgatcctggtggacggcagctggagcatcggcagattcaacttcagactggtgagacacttcctggagaacctggtgaccgccttcgacgtgggcagcgagaagaccagaatcggcctggcccagtacagcggcgaccccagaatcgagtggcacctgaacgccttcagcaccaaggacgaggtgatcgaggccgtgagaaacctgccctacaagggcggcaacaccctgaccggcctggccctgaactacatcttcgagaacagcttcaagcccgaggccggcagcagaaccggcgtgagcaagatcggcatcctgatcaccgacggcaagagccaggacgacatcatcccccccagcagaaacctgagagagagcggcgtggagctgttcgccatcggcgtgaagaacgccgacgtgaacgagctgcaggagatcgccagcgagcccgacagcacccacgtgtacaacgtggccgagttcgacctgatgcacaccgtggtggagagcctgaccagaaccctgtgcagcagagtggaggagcaggacagagagatcaaggccagcgcccacgccatcaccggcccccccaccgagctgatcaccagcgaggtgaccgccagaagcttcatggtgaactggacccacgcccccggcaacgtggagaagtacagagtggtgtactaccccaccagaggcggcaagcccgacgaggtggtggtggacggcaccgtgagcagcaccgtgctgaagaacctgatgagcctgaccgagtaccagatcgccgtgttcgccatctacgcccacaccgccagcgagggcctgagaggcaccgagaccaccctggccctgcccatggccagcgacctgctgctgtacgacgtgaccgagaacagcatgagagtgaagtgggacgccgtgcccggcgccagcggctacctgatcctgtacgcccccctgaccgagggcctggccggcgacgagaaggagatgaagatcggcgagacccacaccgacatcgagctgagcggcctgctgcccaacaccgagtacaccgtgaccgtgtacgccatgttcggcgaggaggccagcgaccccgtgaccggccaggagaccaccctggccctgagcccccccagaaacctgagaatcagcaacgtgggcagcaacagcgccagactgacctgggaccccaccagcagacagatcaacggctacagaatcgtgtacaacaacgccgacggcaccgagatcaacgaggtggaggtggaccccatcaccaccttccccctgaagggcctgacccccctgaccgagtacaccatcgccatcttcagcatctacgacgagggccagagcgagcccctgaccggcgtgttcaccaccgaggaggtgcccgcccagcagtacctggagatcgacgaggtgaccaccgacagcttcagagtgacctggcaccccctgagcgccgacgagggcctgcacaagctgatgtggatccccgtgtacggcggcaagaccgaggaggtggtgctgaaggaggagcaggacagccacgtgatcgagggcctggagcccggcaccgagtacgaggtgagcctgctggccgtgctggacgacggcagcgagagcgaggtggtgaccgccgtgggcaccaccctggacagcttctggaccgagcccgccaccaccatcgtgcccaccaccagcgtgaccagcgtgttccagaccggcatcagaaacctggtggtgggcgacgagaccaccagcagcctgagagtgaagtgggacatcagcgacagcgacgtgcagcagttcagagtgacctacatgaccgcccagggcgaccccgaggaggaggtgatcggcaccgtgatggtgcccggcagccagaacaacctgctgctgaagcccctgctgcccgacaccgagtacaaggtgaccgtgacccccatctacaccgacggcgagggcgtgagcgtgagcgcccccggcaagaccctgcccagcagcggcccccagaacctgagagtgagcgaggagtggtacaacagactgagaatcacctgggacccccccagcagccccgtgaagggctacagaatcgtgtacaagcccgtgagcgtgcccggccccaccctggagaccttcgtgggcgccgacatcaacaccatcctgatcaccaacctgctgagcggcatggactacaacgtgaagatcttcgccagccaggccagcggcttcagcgacgccctgaccggcatggtgaagaccctgttcctgggcgtgaccaacctgcaggccaagcacgtggagatgaccagcctgtgcgcccactggcaggtgcacagacacgccaccgcctacagagtggtgatcgagagcctgcaggacagacagaagcaggagagcaccgtgggcggcggcaccaccagacactgcttctacggcctgcagcccgacagcgagtacaagatcagcgtgtacaccaagctgcaggagatcgagggccccagcgtgagcatcatggagaagacccagagcctgcccaccagaccccccaccttcccccccaccatcccccccgccaaggaggtgtgcaaggccgccaaggccgacctggtgttcatggtggacggcagctggagcatcggcgacgagaacttcaacaagatcatcagcttcctgtacagcaccgtgggcgccctgaacaagatcggcaccgacggcacccaggtggccatggtgcagttcaccgacgaccccagaaccgagttcaagctgaacgcctacaagaccaaggagaccctgctggacgccatcaagcacatcagctacaagggcggcaacaccaagaccggcaaggccatcaagtacgtgagagacaccctgttcaccgccgagagcggcaccagaagaggcatccccaaggtgatcgtggtgatcaccgacggcagaagccaggacgacgtgaacaagatcagcagagagatgcagctggacggctacagcatcttcgccatcggcgtggccgacgccgactacagcgagctggtgagcatcggcagcaagcccagcgccagacacgtgttcttcgtggacgacttcgacgccttcaagaagatcgaggacgagctgatcaccttcgtgtgcgagaccgccagcgccacctgccccgtggtgcacaaggacggcatcgacctggccggcttcaagatgatggagatgttcggcctggtggagaaggacttcagcagcgtggagggcgtgagcatggagcccggcaccttcaacgtgttcccctgctaccagctgcacaaggacgccctggtgagccagcccaccagatacctgcaccccgagggcctgcccagcgactacaccatcagcttcctgttcagaatcctgcccgacaccccccaggagcccttcgccctgtgggagatcctgaacaagaacagcgaccccctggtgggcgtgatcctggacaacggcggcaagaccctgacctacttcaactacgaccagagcggcgacttccagaccgtgaccttcgagggccccgagatcagaaagatcttctacggcagcttccacaagctgcacatcgtggtgagcgagaccctggtgaaggtggtgatcgactgcaagcaggtgggcgagaaggccatgaacgccagcgccaacatcaccagcgacggcgtggaggtgctgggcaagatggtgagaagcagaggccccggcggcaacagcgcccccttccagctgcagatgttcgacatcgtgtgcagcaccagctgggccaacaccgacaagtgctgcgagctgcccggcctgagagacgacgagagctgccccgacctgccccacagctgcagctgcagcgagaccaacgaggtggccctgggccccgccggcccccccggcggccccggcctgagaggccccaagggccagcagggcgagcccggccccaagggccccgacggccccagaggcgagatcggcctgcccggcccccagggcccccccggcccccagggccccagcggcctgagcatccagggcatgcccggcatgcccggcgagaagggcgagaagggcgacaccggcctgcccggcccccagggcatccccggcggcgtgggcagccccggcagagacggcagccccggccagagaggcctgcccggcaaggacggcagcagcggcccccccggcccccccggccccatcggcatccccggcacccccggcgtgcccggcatcaccggcagcatgggcccccagggcgccctgggcccccccggcgtgcccggcgccaagggcgagagaggcgagagaggcgacctgcagagccaggccatggtgagaagcgtggccagacaggtgtgcgagcagctgatccagagccacatggccagatacaccgccatcctgaaccagatccccagccacagcagcagcatcagaaccgtgcagggcccccccggcgagcccggcagacccggcagccccggcgcccccggcgagcagggcccccccggcacccccggcttccccggcaacgccggcgtgcccggcacccccggcgagagaggcctgaccggcatcaagggcgagaagggcaaccccggcgtgggcacccagggccccagaggcccccccggccccgccggccccagcggcgagagcagacccggcagccccggcccccccggcagccccggccccagaggcccccccggccacctgggcgtgcccggcccccagggccccagcggccagcccggctactgcgaccccagcagctgcagcgcctacggcgtgagagccccccaccccgaccagcccgagttcacccccgtgcaggacgagctggaggccatggagctgtggggccccggcgtgtag

SEQ ID NO: 290430 - DNA, 5106 bp, Artificial Sequence
  derived and/or modified sequence
atgaagatcttccagaggaagatgcggtattggttgctgcctcccttcctggccattgtctacttctgcacaattgtacaggggcaggtggctcccccaacaaggctgaggtacaatgtgataagtcacgacagcattcagatttcctggaaggccccacggggaaagttcgggggttataagctgttagtgacacctacctcaggtgggaagacaaatcagttaaatctgcagaataccgcgacgaaagctataattcagggcctgatgccagatcaaaattacactgtccagatcattgcctacaacaaggataaggagtcaaaaccagcacagggccagttcagaatcaaagaccttgagaaacgcaaagatcccaagccgcgcgtgaaagtggttgacaggggaaatggcagccgtcctagtagcccagaagaggtgaaattcgtttgccagactccagctattgcagatatcgtcattctggtggacggcagctggtccatcggccgatttaactttcgactggtgcgccattttctggagaacctagtgaccgctttcgacgtcggaagtgaaaagactcggatcggggtaaagaacgccgatgtgaatgagctccaggagatcgcttccgagccagactctactcacgtgtataatgttgccgagtttgatctgatgcataccgttgttgagtcacttactagaacgctgtgcagtcgcgtggaggagcaggatagagaaataaaggcgagtgcgcacgctataacaggaccaccgacagaattgatcacctctgaggtgacagcgaggagctttatggtcaactggactcacgcgccaggtaacgttgagaaatacagagttgtttactatcctaccaggggggggaagccagacgaagttgtcgtcgacggcactgtcagttccacagtgctaaagaacctgatgtcactcacagaatatcagattgcagtctttgccatatacgcgcacactgcctcagagggcctgcgtgggactgaaactacactggccctccccatggcctcagacctgcttctgtacgatgttactgaaaacagtatgagagtgaagtgggacgccgtcccaggagcatctgggtatctaatcttgtacgcccctctgactgaggggctggccggagatgagaaagaaatgaagataggggagacccatacggatattgagctgtccgggctgcttccgaacaccgagtacaccgtgaccgtctacgccatgttcggcgaggaggcctcagacccagtcaccggacaagagaccactctcgccctgagtcccccccgcaacttgcgcattagtaacgtcggctcaaattcagcccggctcacatgggaccccacaagccgccagatcaatggctataggatcgtctacaataacgcagatggaacagagataaatgaggtcgaggtcgacccaataaccacattccctttgaagggcctgactccccttactgagtacacgatagcaatttttagcatatacgacgagggacagagcgagcctttgactggcgtttttacgaccgaagaggtgccggctcagcaatatctagagatagatgaggtgaccaccgactctttccgtgtcacatggcacccactgagcgcagacgagggtttacataagctgatgtggatacctgtttacggcggtaagacagaagaggtggtcttgaaggaagaacaggacagtcacgtgatcgagggcttggaaccaggtaccgaatatgaggtttcacttctcgccgtgcttgatgatggcagtgaaagcgaagttgtgaccgccgtaggaaccactctggacagcttctggacagagcccgccactacaatagtgcctactacttctgtcacctccgtgttccaaacgggcatccgcaatttggtggtgggggatgaaactactagtagcctgagggtaaagtgggacatctctgactccgacgtccagcagttcagagtcacctacatgaccgcacaaggcgatcctgaggaggaagtgattgggaccgttatggtgcctggctcccaaaataacctgctcctgaagcctcttttacctgatacggagtacaaggtaaccgttacccccatttacaccgatggagaaggcgtcagcgtttccgcccctggcaaaacattaccgagctccggtccccagaacttacgggtgagcgaagagtggtataaccggctgagaattacctgggatcccccgtcgtcccctgtgaaggggtacaggatcgtgtacaagcccgtaagcgttccagggcccacacttgagacatttgtcggcgccgatatcaatactattttaatcacaaatttgctaagcggaatggattataacgttaagatttttgcgtcacaggctagcgggttttctgatgcactcacaggcatggttaagactctgttcctgggcgtcacaaaccttcaggccaaacacgtggaaatgacttccctctgcgcccattggcaagttcaccgccatgcaactgcttacagggtggtgatcgaaagtctgcaagatcggcagaaacaagagtccaccgtggggggaggtactacccgtcactgcttctatgggctgcaacccgatagcgaatacaagataagcgtatacacgaaacttcaggaaatcgaaggcccatctgtctctattatggaaaaaactcagagtctgcccactaggccgcccaccttcccccctacaatccccccagctaaagaagtctgtaaggcagctaaagcggacttggtcttcatggtggatgggtcatggagcatcggcgatgaaaatttcaacaaaattataagcttcctttacagcacggtaggagctctcaacaaaatcgggactgatgggacacaagttgcaatggtgcagtttacagatgaccctcgcacagaattcaagctgaatgcatataaaactaaggagacactgctggacgcaattaagcatatatcatacaagggaggcaacaccaagacaggaaaagccatcaaatacgtaagagatactctgttcaccgccgagtcagggacccggcggggtattcccaaagtcatcgtagtgattaccgatgggaggtcgcaggatgacgtgaacaagattagccgcgagatgcagcttgatggttactcgatcttcgcaattggtgtggccgacgctgattactcagaacttgtgtcaattggcagcaagccatctgcacgccacgtattttttgtggatgacttcgacgcttttaagaaaatcgaggatgagcttatcacttttgtctgcgaaaccgctagtgctacatgccccgttgtgcataaagacggaattgacctagccgggtttaagatgatggagatgtttggcctcgtcgagaaagactttagtagcgtcgagggcgtgagcatggaacctgggacctttaacgtgtttccttgctaccagctgcataaagatgctctggtgtcacagcctacgagataccttcacccagaaggcctcccctcggactacacaatctcatttctgttcagaattctccccgataccccacaggaacctttcgcactctgggagatacttaacaagaattcagacccacttgtgggggtgattttagacaatggcggaaagaccctcacctattttaactacgatcagtctggcgattttcagaccgtgacattcgaggggcccgaaattaggaagatattctacggcagttttcacaagctgcacatagtcgtgagcgaaacactggtaaaagtagttattgattgcaagcaggtcggtgaaaaggcaatgaatgcctccgctaacattacgtcagacggcgtggaggttctggggaaaatggtgaggtcacggggccccgggggaaatagtgcacccttccagctccaaatgtttgatatcgtatgttctacctcctgggcgaatacagacaaatgctgtgagctgcccggcctcagagatgatgaaagctgtcctgacctgcctcattcttgcagctgtagtgagaccaatgaagtggcactcggaccagccggacctccaggcggccccggattgcggggccctaaaggacagcaaggagagcctggtcccaaaggtccggacggaccacgaggtgagatcggtctcccggggcctcaggggcctcccggacctcaagggccctctggtcttagcattcaagggatgcccggtatgcccggcgagaaaggcgagaaaggcgacaccggtttaccgggtcctcaaggaatacccggaggcgtgggatctcctggcagagacggctcacctgggcagcgcggtctgcctggcaaagacggctccagcggaccacccggcccacctggacccattggtattcccgggacgccaggcgtgccgggcatcactgggagtatggggcctcaaggtgcccttggcccaccaggggttccaggcgctaaaggggagcggggggagaggggagatctccagagccaggccatggtgagaagtgtcgcccgacaagtgtgcgagcagttaatccagtcacacatggccagatatacagccattctaaaccaaatcccatcccactcgagtagcatcaggacagtgcaggggccaccaggcgaaccaggcagacccgggagtccaggggctcccggcgagcagggaccccccggtacacccggcttcccagggaatgctggtgtgcctggcacaccaggagaacggggtctgactggcattaaaggtgaaaagggaaatcctggcgttggcacccaggggcctcgcggccccccaggcccagccggccccagcggcgagtcccgaccaggttcaccaggcccccccggatccccaggcccccggggccctcccggccatctgggagtgcccgggccacagggaccttcaggccaaccgggatattgcgacccaagtagttgttctgcttacggcgttcgcgctccccacccggaccagccagaatttacaccggtgcaggatgagttggaagccatggaattgtgggggccaggcgtctag

SEQ ID NO: 290431 - DNA, 5391 bp, Artificial Sequence
  derived and/or modified sequence
atgaagattttccaaaggaaaatgcggtactggcttctgccaccatttttggctatagtgtacttctgcacaatcgtgcagggtcaggtcgcccctcccacccggctgcgttacaacgtgatttcacatgatagtattcagatctcgtggaaagccccgcgcggcaaattcggcggctacaagttgctcgtgaccccaacatccggcgggaaaacaaaccagctgaacctccaaaataccgccacaaaagcgataatacaaggcctgatgcctgatcagaattataccgtccagatcatcgcgtataacaaagataaggagtccaaacctgctcaggggcagtttagaattaaagatttagaaaaacggaaagaccccaagcctagggtgaaagtcgtggacaggggaaacggaagtaggccctcctctcctgaagaggtcaaattcgtctgtcagacccctgctatagcagacatcgtgattctggtcgacggctcatggtcgataggacgttttaacttcagactcgtacgccacttcctcgagaatctagtgaccgcctttgatgttggctctgagaagaccagaatcggcttggctcagtacagcggcgatccccgcattgaatggcacctgaacgcattctctaccaaagacgaagtgatcgaggccgtgcggaacctgccttataaaggtgggaacaccctgaccgggttggctctgaactacattttcgagaatagctttaaacctgaggcgggctcacgaaccggggtgtccaagattggcattctgatcaccgacggcaagtcgcaagacgacattatacctcctagtcgcaacctccgcgaatccggggtcgagctgtttgcaatcggagtgaagaatgccgacgtgaacgaactgcaggagatcgcttccgagccagatagcactcatgtgtacaatgtggcagaatttgacttgatgcatactgtggtggaatccctcacccgaaccctgtgcagtagggttgaggaacaggaccgcgaaattaaagcttcagcacatgccatcaccgggccgccaaccgagctcattaccagtgaggtcaccgctcgcagctttatggtcaactggacacatgctccaggcaacgtcgagaagtacagagttgtgtactacccgactcgtggcggcaaacctgatgaggtcgtggtagatgggaccgtgtcctctacagtcctcaaaaatctgatgagccttactgagtaccaaatcgccgtgttcgccatttacgcccatactgccagtgagggcctcagagggaccgagaccacgctcgctctgccaatggccagcgacttactgctttatgacgtgacagagaacagtatgagggtcaagtgggacgccgtccccggggcgtctggctacctgattctgtatgctccgttgaccgaggggttggctggtgatgagaaagagatgaaaattggagagacacacacggacattgaactctccggactgctacctaatacagaatacacagtgacagtgtacgccatgttcggtgaggaggcaagtgaccctgtgactggtcaggaaacaaccctggccctaagtccgcccagaaatctcagaataagtaatgtgggctctaattcagcccgcctgacatgggacccaactagcaggcagatcaacggatatagaattgtctacaataatgccgatggcacagagatcaacgaagtggaggtggatccaatcaccacttttccattaaaaggactgacgccattgaccgagtacactattgctattttcagtatttatgatgaaggccaaagcgagccactcactggcgttttcacaaccgaggaagtccccgcccagcagtacctagaaatcgatgaagtaaccaccgactcgttccgtgtaacctggcatcccctcagtgcggacgaggggttgcacaaattgatgtggattcctgtttatggggggaagacggaggaagttgtcttgaaagaggagcaggattcacatgtcatagaaggccttgaacctgggacagagtatgaagttagtcttttagcggtactagacgatggttccgagtccgaggtggtgaccgcagtggggacaactcttgattctttctggacagaacccgccaccacgattgtcccgaccacatcagttacaagcgtctttcagaccggcatcagaaacttggtcgtcggggatgagactacttccagcctgagagtgaagtgggatattagtgacagcgacgtgcagcagtttcgtgtgacctacatgactgctcaaggtgatcccgaggaagaggtcattgggaccgtaatggttccggggtctcaaaacaatctgcttctgaaaccccttctccctgatacagagtacaaagttaccgtgaccccaatatacacggacggagagggtgtctctgtgagcgctcccggaaagacactgccctcaagcggtccacagaacctgcgggtgtccgaagagtggtacaatcggctgcgcatcacatgggacccccccagttcccctgtcaaaggatataggatcgtatataagcctgtttccgtgccaggtccaaccctggaaactttcgtgggcgcagacatcaacacaatcttgataacaaacctgctgagcggtatggattacaatgtcaaaatatttgcttctcaggcatccgggttcagtgacgccctaacaggcatggttaaaacgctcttcctgggtgtaacaaacttgcaagccaagcacgtggagatgaccagtctgtgcgcccattggcaggtgcacaggcacgctacagcatatagagtggtgatagagtctctccaggaccgtcagaaacaggaaagtacagtcggaggggggactactaggcactgcttttatgggctccagccagattcagaatataaaattagtgtgtatactaagttgcaagagatcgaggggccctccgtgagtattatggaaaaaacccagagcctgcccacacggccgccaacattcccgcctacaattcccccagccaaggaagtctgtaaagccgccaaagcagacttagtgtttatggtagatgggagctggtcgatcggtgatgagaactttaacaagatcattagcttcctgtatagtactgtgggagctctcaacaagatagggactgacggcactcaagtcgccatggtccaatttaccgatgacccaaggaccgagtttaagctgaatgcatataaaacaaaagaaactctgttagatgccataaaacacataagctataagggtggaaacacaaaaaccgggaaagcaatcaagtacgttcgggacaccttatttaccgctgagtccggtactcgccgtgggattccaaaggtgattgtggttatcaccgacgggagatcgcaggatgatgtgaacaagatttccagagagatgcagctagacgggtattccatttttgccataggggtcgcggatgccgattattccgaactcgtctcaatcgggtccaagcctagcgcacgccacgtcttttttgtcgatgatttcgatgctttcaaaaaaatagaggacgaactgataacgtttgtctgtgagacggcctccgccacctgcccagtggtccacaaggacggaattgacctcgccggtttcaagatgatggagatgtttggactcgtggaaaaggacttctcttcagtcgagggcgttagtatggagccaggaacattcaacgtattcccatgctaccagttgcataaggatgccctggtgagtcaaccgacgcgctatttgcacccagagggtttgcccagcgattacacgatctcattcctcttccgaatacttcctgacactccccaggagcccttcgccctgtgggagattctgaacaagaactctgacccattagtgggagtgattctcgataatggcggaaaaacgttgacctactttaactacgaccaatccggcgattttcaaacggtgactttcgagggtcccgagattaggaagatcttttatgggtcattccataaattgcacatcgtggtgtctgagacattggtaaaggtggtgattgactgtaagcaggtaggggaaaaagccatgaacgcgagcgcaaatatcacatccgacggcgtggaggtgctgggcaagatggtccgatcccgagggcctgggggcaattcagctccatttcaactacagatgtttgacattgtttgcagtaccagctgggccaatactgacaaatgctgcgagctgcccggattgagggacgacgaaagctgcccggatctgccccattcctgttcctgtagcgagacgaatgaggtcgcccttggtcctgcagggccccctggcggtccgggcctgcgaggccccaagggtcagcaaggagaacccggccccaagggtcctgacggaccccgcggagagatcggactgcctggaccgcagggaccacctgggccacaaggcccctcggggctctccattcagggaatgcctggcatgcccggcgaaaaaggagagaagggggatactggtctgccagggccacagggcattcctggcggtgtgggctcacctggccgcgacggatcgccaggccagagaggtctcccagggaaagatggatccagcggtcctccggggcctccaggaccaattgggatccccggcactccaggggtgccggggatcaccgggtcgatgggtcctcagggagccctgggcccgccgggcgtgcctggagccaaaggggagcgcggcgaaaggggagaccttcagagtcaagcaatggtacgcagtgtggctaggcaggtgtgcgaacagctgatccagagccatatggctcggtatactgcgatactgaaccagattccaagccacagctctagtatcagaaccgtccaaggccctcccggcgaaccaggccgaccagggagccccggagcacctggggaacaggggcctcccgggacaccggggttcccaggcaatgccggagttcccggcacaccaggagagcgtgggctgaccggcataaagggcgagaagggcaatcccggggtgggcacgcagggtcctcgaggacctccaggacccgcaggtccaagcggggaaagccgccctggaagtccagggccgccgggaagccctggcccgaggggtccaccaggccaccttggggtccccgggcctcagggcccatccgggcaacctggctattgtgacccctctagctgtagcgcgtatggggttagagcccctcatcccgaccagccagaattcactcctgtgcaagacgaactggaggccatggagctgtgggggccgggtgtttag

SEQ ID NO: 290432 - DNA, 5106 bp, Artificial Sequence
  derived and/or modified sequence
atgaagatcttccagaggaagatgagatactggctgctgccccccttcctggccatcgtgtacttctgcaccatcgtgcagggccaggtggccccacccacccggctgcgctacaacgtcatcagccatgacagcatccagatctcctggaaggccccccggggcaagtttggaggctacaagctgctggtgacccccaccagcggcggcaagaccaaccagctgaacctgcagaacacagccaccaaggccatcatccagggcctgatgccagaccagaactacacagtgcagatcatcgcctacaacaaggacaaggagagcaagccagcccagggccagttccgcatcaaggacctggagaagaggaaggaccccaagccccgggtgaaggtggtggacagaggaaatggcagccggcccagcagccctgaggaggtgaagtttgtgtgccagaccccagccatcgctgacatcgtcatcctggtggatggctcctggagcatcggccgcttcaacttccggctggtgcgccacttcctggagaacctggtgacagcctttgatgtgggcagcgagaagaccagaattggagtgaagaatgctgatgtgaatgagctgcaggagatcgccagcgagccagacagcacccacgtgtacaacgtggccgagtttgacctgatgcacacagtggtggagagcctgaccaggaccctgtgcagccgggtggaggagcaggaccgggagatcaaggccagcgcccacgccatcaccggccccccaacagagctgatcaccagcgaggtgacagcccgctccttcatggtgaactggacccacgcccctggaaatgtggagaagtacagagtggtgtactaccccacccggggcggcaagccagatgaggtggtggtggatggcaccgtgagcagcacagtgctgaagaacctgatgagcctgacagagtaccagattgctgtgtttgccatctatgcccacacagccagcgagggcctgcggggcacagagaccaccctggccctgcccatggccagtgacctgctgctgtatgatgtgacagaaaattccatgagggtgaagtgggatgctgtgcctggggccagcggctacctgatcctgtatgcccccctgacagagggcctggccggagatgagaaggagatgaagattggagagacccacacagacatcgagctgagcggcctgctgcccaacacagagtacacagtgacagtgtatgccatgtttggagaggaggccagtgaccctgtgacaggccaggagaccaccctggccctgagcccccccaggaacctgcgcatcagcaatgtgggcagcaacagcgcccggctgacctgggaccccaccagccggcagatcaatggctaccgcatcgtgtacaacaatgctgatggaacagagatcaatgaggtggaggtggaccccatcaccaccttccccctgaagggcctgacccccctgacagagtacaccatcgccatcttcagcatctatgatgagggccagagcgagcccctgactggagtcttcaccacagaggaggtgcctgcccagcagtacctggagattgatgaggtgaccacagacagcttccgggtgacctggcaccccctgtctgcagatgagggcctgcacaagctgatgtggatccctgtgtatggaggcaagacagaggaggtggtgctgaaggaggagcaggacagccacgtgattgagggcctggagcccggcacagaatatgaggtgtccctgctggccgtgctggatgatggcagcgagagcgaggtggtgacagctgtgggcaccaccctggacagcttctggacagagcccgccaccaccatcgtgcccaccacctctgtgacctctgtgttccagacaggcatccggaacctggtggtgggagatgagaccaccagcagcctgcgggtgaagtgggacatcagtgacagtgatgtgcagcagttccgggtgacctacatgacagcccagggcgaccctgaggaggaggtgattggcaccgtgatggtgcccggcagccagaacaacctgctgctgaagcccctgctgcctgacacagagtacaaggtgacagtgacccccatctacacagatggagagggcgtgtctgtgtctgcccctgggaagaccctgcccagcagcggcccccagaacctgcgggtgtctgaggagtggtacaaccggctgcgcatcacctgggacccccccagcagccctgtgaagggctaccgcatcgtgtacaagcctgtgtctgtgcccggccccaccctggagacctttgtgggcgctgacatcaacaccatcctgatcaccaacctgctgagcggcatggactacaacgtgaagatctttgccagccaggccagcggcttcagtgatgccctgaccggcatggtgaagaccctcttcctgggcgtgaccaacctgcaggccaagcacgtggagatgaccagcctgtgtgcccactggcaggtgcacagacatgccacagcctacagagtggtgattgagagcctgcaggaccggcagaagcaggagagcacagtgggcggcggcaccaccaggcactgcttctacggcctgcagcctgacagcgagtacaagatctctgtgtacaccaagctgcaggagattgagggccccagcgtgtccatcatggagaagacccagagcctgcccaccaggcctcccaccttcccccccaccatccccccagccaaggaggtgtgcaaggccgccaaggctgacctggtgttcatggtggatggctcctggagcattggagatgagaacttcaacaagatcatctccttcctgtacagcacagtgggcgccctgaacaagattggaacagatggcacccaggtggccatggtgcagttcacagatgaccccaggacagagttcaagctgaatgcctacaagaccaaggagaccctgctggatgccatcaagcacatctcctacaagggcggcaacaccaagacaggcaaggccatcaagtatgtgcgggacaccctcttcaccgctgagagcggcacccggcggggcatccccaaggtgattgtggtgatcacagatggccgcagccaggatgatgtgaacaagatcagccgggagatgcagctggatggctacagcatctttgccatcggcgtggctgatgctgactacagcgagctggtgtccatcggcagcaagcccagcgcccggcacgtgttctttgtggatgactttgatgccttcaagaagattgaagatgagctgatcacctttgtgtgtgaaacagccagcgccacctgccctgtggtgcacaaggatggcatcgacctggccggcttcaagatgatggagatgtttggcctggtggagaaggacttcagctctgtggagggcgtgtccatggagcccggcaccttcaacgtgttcccctgctaccagctgcacaaggatgccctggtgtcccagcccacccgctacctgcaccctgagggcctgcccagcgactacaccatctccttcctgttccgcatcctgcctgacaccccccaggagccctttgccctgtgggagatcctgaacaagaacagcgaccccctggtgggcgtcatcctggacaatggaggcaagaccctgacctacttcaactatgaccagagcggggacttccagacagtgacctttgagggccctgagatcaggaagatcttctacggcagcttccacaagctgcacatcgtggtgtctgagaccctggtgaaggtggtgattgactgcaagcaggtgggggagaaggccatgaatgccagcgccaacatcaccagtgatggagtggaggtgctgggcaagatggtgcgcagccggggccctgggggcaacagcgcccccttccagctgcagatgtttgatattgtgtgcagcacctcctgggccaacacagacaagtgctgtgagctgcccggcctgagagatgatgagagctgcccagacctgccccacagctgcagctgcagcgagaccaatgaggtggccctgggccctgctggccccccaggcggccctggcctgcggggccccaagggccagcagggcgagcccggccccaagggcccagatggccccagaggagaaattggcctgcccggcccccagggccccccaggcccccagggccccagcggcctgagcatccagggcatgcctggcatgcctggagagaagggggagaagggggacaccggcctgcccggcccccagggcatccctggaggagtgggcagccctggaagagatggcagccctggccagaggggcctgcccgggaaggatggcagcagcggccccccaggccccccaggccccatcggcatccctggcaccccaggagtgcccggcatcaccggctccatgggcccccagggcgccctgggccccccaggagtgcctggggccaagggggagcggggggagcggggggacctgcagagccaggccatggtgcgctctgtggcccggcaggtgtgtgagcagctgatccagagccacatggcccgctacacagccatcctgaaccagatccccagccacagcagcagcatcagaacagtgcagggccccccaggagagcccggccggcccggcagccctggggcccctggagagcagggccccccaggcaccccaggcttccctggaaatgctggggtgcccggcaccccaggagagcggggcctgaccggcatcaagggggagaagggcaaccctggggtgggcacccagggcccccggggccccccaggccctgctggccccagcggggagagcaggcctggcagccctggccccccaggcagccctggcccccggggccccccaggccacctgggcgtgcccggcccccagggccccagcggccagcccggctactgtgaccccagcagctgcagcgcctacggcgtgcgggccccccacccagaccagcctgagttcacccctgtgcaggatgagctggaggccatggagctgtggggccctggggtgtag

SEQ ID NO: 290433 - DNA, 5391 bp, Artificial Sequence
  derived and/or modified sequence
atgaagatcttccagaggaagatgagatactggctgctgccccccttcctggccatcgtgtacttctgcaccatcgtgcagggccaggtggccccacccacccggctgcgctacaacgtcatcagccatgacagcatccagatctcctggaaggccccccggggcaagtttggaggctacaagctgctggtgacccccaccagcggcggcaagaccaaccagctgaacctgcagaacacagccaccaaggccatcatccagggcctgatgccagaccagaactacacagtgcagatcatcgcctacaacaaggacaaggagagcaagccagcccagggccagttccgcatcaaggacctggagaagaggaaggaccccaagccccgggtgaaggtggtggacagaggaaatggcagccggcccagcagccctgaggaggtgaagtttgtgtgccagaccccagccatcgctgacatcgtcatcctggtggatggctcctggagcatcggccgcttcaacttccggctggtgcgccacttcctggagaacctggtgacagcctttgatgtgggcagcgagaagaccagaattggcctggcccagtacagcggggacccccgcatcgagtggcacctgaatgccttcagcaccaaggatgaagtcatcgaggccgtgaggaacctgccctacaagggcggcaacaccctgaccggcctggccctgaactacatctttgagaacagcttcaagccagaggccggcagcaggactggagtgtccaagattggcatcctgatcacagatggcaagagccaggatgacatcatcccccccagcaggaacctgcgggagagcggcgtggagctgtttgccatcggcgtgaagaatgctgatgtgaatgagctgcaggagatcgccagcgagccagacagcacccacgtgtacaacgtggccgagtttgacctgatgcacacagtggtggagagcctgaccaggaccctgtgcagccgggtggaggagcaggaccgggagatcaaggccagcgcccacgccatcactggaccacccacagagctgatcaccagcgaggtgacagcccggagcttcatggtgaactggacccacgcccctggaaatgtggagaagtacagagtggtgtactaccccacccggggcggcaagccagatgaggtggtggtggatggcaccgtgagcagcacagtgctgaagaacctgatgagcctgacagagtaccagattgctgtgtttgccatctatgcccacacagccagcgagggcctgcggggcacagagaccaccctggccctgcccatggccagtgacctgctgctgtatgatgtgacagagaacagcatgagggtgaagtgggatgctgtgcctggggccagcggctacctgatcctgtatgcccccctgacagagggcctggccggagatgagaaggagatgaagatcggggagacccacacagacatcgagctgagcggcctgctgcccaacacagagtacacagtgacagtgtatgccatgtttggagaggaggccagtgaccctgtgacaggccaggagaccaccctggccctgagccccccaagaaacctgcgcatcagcaatgtgggcagcaacagcgcccggctgacctgggaccccaccagccggcagatcaatggctacagaattgtgtacaacaatgctgatggaacagagatcaatgaggtggaggtggaccccatcaccaccttccccctgaagggcctgacccccctgacagagtacaccatcgccatcttcagcatctatgatgagggccagagcgagcccctgactggagtcttcaccacagaggaggtgcctgcccagcagtacctggagattgatgaggtgaccacagacagcttccgggtgacctggcaccccctgtctgcagatgagggcctgcacaagctgatgtggatccctgtgtatggaggcaagacagaggaggtggtgctgaaggaggagcaggacagccacgtgattgagggcctggagcctggaacagaatatgaggtgtccctgctggccgtgctggatgatggcagcgagagcgaggtggtgacagctgtgggcaccaccctggacagcttctggacagagcccgccaccaccatcgtgcccaccacctctgtgaccagcgtcttccagacaggcatccggaacctggtggtgggagatgagaccaccagcagcctgcgggtgaagtgggacatcagtgacagtgatgtgcagcagttccgggtgacctacatgacagcccagggcgaccctgaggaggaggtgattggaacagtgatggtgcccggcagccagaacaacctgctgctgaagcccctgctgcctgacacagagtacaaggtgacagtgacccccatctacacagatggagaaggagtgtctgtgtctgcccctgggaagaccctgcccagcagcggcccccagaacctgcgggtgtctgaggagtggtacaaccggctgcgcatcacctgggacccccccagcagccctgtgaagggctacagaattgtgtacaagcctgtgtctgtgcccggccccaccctggagacctttgtgggcgctgacatcaacaccatcctgatcaccaacctgctgagcggcatggactacaacgtgaagatctttgccagccaggccagcggcttcagtgatgccctgaccggcatggtgaagaccctcttcctgggcgtgaccaacctgcaggccaagcacgtggagatgaccagcctgtgtgcccactggcaggtgcacagacatgccacagcctacagagtggtgattgagagcctgcaggaccggcagaagcaggagagcacagtgggcggcggcaccaccaggcactgcttctacggcctgcagccagattctgagtacaagatctctgtgtacaccaagctgcaggagattgagggccccagcgtgtccatcatggagaagacccagagcctgcccacccggccccccaccttcccccccaccatccccccagccaaggaggtgtgcaaggccgccaaggctgacctggtgttcatggtggatggctcctggagcattggagatgagaacttcaacaagatcatctccttcctgtacagcacagtgggcgccctgaacaagattggaacagatggcacccaggtggccatggtgcagttcacagatgaccccaggacagagttcaagctgaatgcctacaagaccaaggagaccctgctggatgccatcaagcacatctcctacaagggcggcaacaccaagacaggcaaggccatcaagtatgtgcgggacaccctcttcaccgctgagagcggcacccggcggggcatccccaaggtgattgtggtgatcacagatggccgcagccaggatgatgtgaacaagatcagccgggagatgcagctggatggctacagcatctttgccatcggcgtggctgatgctgactacagcgagctggtgtccatcggcagcaagcccagcgcccggcacgtgttctttgtggatgactttgatgccttcaagaagattgaagatgagctgatcacctttgtgtgtgaaacagccagcgccacctgccctgtggtgcacaaggatggcatcgacctggccggcttcaagatgatggagatgtttggcctggtggagaaggacttcagctctgtggagggcgtgtccatggagcccggcaccttcaacgtgttcccctgctaccagctgcacaaggatgccctggtgtcccagcccacccgctacctgcaccctgagggcctgcccagcgactacaccatctccttcctgttccgcatcctgcctgacaccccccaggagccctttgccctgtgggagatcctgaacaagaacagcgaccccctggtgggcgtcatcctggacaatggaggcaagaccctgacctacttcaactatgaccagagcggggacttccagacagtgacctttgagggccctgagatcaggaagatcttctacggcagcttccacaagctgcacatcgtggtgtctgagaccctggtgaaggtggtgattgactgcaagcaggtgggggagaaggccatgaatgccagcgccaacatcaccagtgatggagtggaggtgctgggcaagatggtgcgcagccggggccctgggggcaacagcgcccccttccagctgcagatgtttgacatcgtgtgcagcacctcctgggccaacacagacaagtgctgtgagctgcccggcctgagagatgatgagagctgcccagacctgccccacagctgcagctgcagcgagaccaatgaggtggccctgggccctgctggccccccaggcggccctggcctgcggggccccaagggccagcagggcgagcccggccccaagggcccagatggccccagaggagagatcggcctgcccggcccccagggccccccaggcccccagggccccagcggcctgagcatccagggcatgcctggcatgcctggagagaagggggagaagggggacaccggcctgcccggcccccagggcatccctgggggcgtgggcagccctggaagagatggcagccctggccagaggggcctgcccgggaaggatggcagcagcggccccccaggccccccaggccccatcggcatccctggcaccccaggagtgcccggcatcaccggctccatgggcccccagggcgccctgggccccccaggagtgcctggggccaagggggagcggggggagcggggggacctgcagagccaggccatggtgcgctctgtggcccggcaggtgtgtgagcagctgatccagagccacatggcccgctacacagccatcctgaaccagatccccagccacagcagcagcatcagaacagtgcagggccccccaggagagcccggccggcccggcagccctggggcccctggagagcagggccccccaggcaccccaggcttccctggaaatgccggcgtgcccggcaccccaggagagcggggcctgaccggcatcaagggggagaagggcaaccctggggtgggcacccagggcccccggggccccccaggccctgctggccccagcggggagagccggcccggcagccctggccccccaggcagccctggcccccggggccccccaggccacctgggcgtgcccggcccccagggccccagcggccagcccggctactgtgaccccagcagctgcagcgcctatggagtgcgggccccccacccagaccagcctgagttcacccctgtgcaggatgagctggaggccatggagctgtggggccctggggtgtag

SEQ ID NO: 290434 - DNA, 5106 bp, Artificial Sequence
  derived and/or modified sequence
atgaagatcttccagcggaagatgcggtactggctgctgccccccttcctcgccattgtgtatttctgtactattgtgcaaggacaagtcgccccacccaccagattgaggtacaacgttattagtcacgatagcattcagatcagctggaaggcgccaagaggaaagttcggaggctacaaattgctggtgactcccacttctggagggaagaccaaccagctgaatctgcaaaataccgccactaaagctattatccagggtctgatgccagatcagaattacaccgtccaaatcattgcatataacaaagacaaggagtcaaaacctgctcagggtcagttcaggatcaaggatctcgaaaagagaaaggatccgaagccccgagtgaaggtggtggaccgagggaacggcagccggccatcatcaccagaggaagttaaatttgtctgccagacccccgcgattgccgacatcgtaatacttgtggatggcagctggtccataggtaggttcaatttcaggctcgtgaggcactttctggaaaatcttgtcaccgcatttgatgtggggagcgagaagacccggataggcgtgaaaaatgctgatgttaatgaattgcaggagatagcaagtgagccagacagtacacacgtctataatgttgctgagttcgaccttatgcatactgtcgtggaaagcctgactcggaccctctgttcccgcgtcgaagaacaagacagggagatcaaagcttccgcacacgccattacgggcccccctaccgagcttatcacttcagaggtgaccgccaggagttttatggtgaactggacccacgccccaggaaacgttgagaagtaccgcgtagtttattaccctactagaggtggcaagcctgacgaggtagtcgtagacggtactgtatccagcactgtgctgaagaacctgatgagcttaaccgagtatcagatcgcagtgtttgccatatacgcccacaccgcctccgaagggcttagagggaccgaaaccacgttagctcttcctatggcatctgacctgctgctctacgacgtcaccgaaaactccatgcgggttaaatgggacgcagtaccaggcgctagtggatatctcatcctgtatgcaccacttaccgaaggtctagctggtgatgagaaggagatgaagatcggggagacccacacagatatagagctttcaggactgcttcccaacaccgaatacacagtgacagtttacgcaatgttcggagaagaagccagcgacccagttaccgggcaggagacgaccctggccctatctcccccccgcaatttgcgtatctctaatgtcggcagcaacagcgcacgactgacctgggaccccactagcaggcagataaacgggtatcgaatcgtttacaataacgccgacggtacggaaatcaacgaagtggaagtggaccccatcacgacatttccactgaagggtttaactcccttgactgagtacacaatagcgattttcagcatctatgatgagggacagtccgagcctttaaccggagtgttcaccacagaggaggttccggcccagcagtatctggagattgatgaggtgaccacagactcctttcgggtcacttggcaccctctgtccgccgacgaaggactgcacaagctcatgtggatcccggtttatgggggcaagaccgaagaagtggtacttaaggaggaacaagacagccatgtgatcgaggggctggaacccggaacagagtacgaggtgagtttgcttgcggtacttgacgacggaagcgagtcagaggtggtgacagccgtggggaccaccctcgactctttctggacagagccagcaaccacaatcgttcccaccactagtgtgacctctgtgttccaaactggcataaggaacctggttgtgggcgacgagacgaccagcagcctgcgggtcaagtgggacattagcgattcggacgtgcaacagttcagagtgacatacatgacagcccagggcgatccggaggaggaagtcattggcaccgtgatggtacctggaagccagaataatctactgcttaagcccctgttgccagacacagaatacaaagttacggtcacacctatctatacggatggcgaaggggtttctgtctccgcacctggaaagactctgccatcaagcggcccacagaaccttcgagtctccgaggaatggtacaatcggctacggattacatgggacccgccttctagccccgtaaagggatatcgtatcgtgtataagccagttagtgtccccggaccaaccttggagacctttgtcggagcggacatcaataccatcctaattaccaatctgctcagtggaatggactacaacgtaaaaatctttgcatcccaagcctccggattctccgacgcccttactggcatggtgaaaactcttttccttggggtaaccaacctgcaggccaagcatgtggaaatgacctcactctgtgcgcattggcaagtgcaccgccatgctaccgcttacagggtagtcatcgaaagcctccaggaccgccaaaaacaagaatctacagttggaggaggaactaccaggcactgcttctacggactgcagccagacagcgaatacaagatctctgtctacacgaaactccaagagatcgaggggccatcagtttcgatcatggagaagactcaatcgctgccgacccggccccctacttttccacccaccatcccaccggctaaggaggtgtgtaaggcagcaaaggctgacctggtcttcatggtggacggtagttggagcattggggatgagaacttcaacaagattatcagcttcctatatagcacggtcggcgccctgaataaaataggcactgatggcactcaggtcgccatggtacagtttacagatgacccaaggaccgagtttaaattaaacgcctacaaaactaaggaaaccctcctggacgccattaaacacatctcttacaaaggaggcaatactaagaccgggaaagccataaagtatgtgcgggatacactatttacagctgagagtggcactcgcagaggaatcccaaaggtgatcgtagtgattaccgatggccgctctcaggatgatgttaataaaatttcacgcgagatgcagctcgacgggtatagtattttcgccatcggtgtggcagacgctgactactccgagctcgtctctatcggaagtaaacctagcgctaggcacgtcttttttgtagacgatttcgacgctttcaagaagattgaggacgagctgatcacattcgtatgtgaaactgcaagtgctacttgccccgtcgtgcacaaagacggcatcgacctggctggcttcaaaatgatggagatgtttggcttggtggagaaagatttctccagcgtcgagggggtctcaatggaacccggaaccttcaatgtatttccatgctaccagctacataaagatgcgctggtcagccagccaactcgatatctgcaccctgaaggcctacctagtgattataccatctccttcctcttcagaatacttcccgatactccacaggagcctttcgctctttgggaaatccttaataagaattccgaccctttagtaggcgtcatcttagataacggaggaaagacattgacatatttcaactatgatcaaagcggggatttccagactgtgacctttgaagggccagaaatccgcaagatcttttatggctcgtttcataaactgcatatcgttgtgtccgagaccctggtgaaggtcgttatcgattgtaaacaagtgggcgagaaagccatgaacgcgagtgccaatattacttccgacggtgtggaggtactggggaagatggtgcgcagccgcgggcctggcggaaacagtgcccctttccagctacagatgttcgatattgtgtgtagtacctcctgggcgaatacagacaaatgctgcgaattaccggggcttcgtgatgatgagagctgtcccgatttaccccactcctgttcctgcagtgagacaaatgaggttgctctggggccagccggccctcctgggggccccgggcttcgggggccaaaggggcagcaaggggagccaggccccaaaggacccgatggaccaagaggcgagataggtctgcccggaccacagggacccccagggccccagggccccagtggcctctccattcaagggatgcctggaatgcctggcgagaagggcgaaaagggcgacacgggtcttcccgggccccagggaattcccggcggtgtgggcagtccggggagagacggcagccccggacaacgaggtttgcctggtaaggacggaagttccggaccccccgggccacctggccccattggcatccctggcacacccggtgtccccggaattaccgggagtatgggccctcagggcgcgctcggccccccaggcgtccccggtgccaagggggagaggggagagagaggcgatctgcagtcccaagcgatggtgaggtccgttgcacgacaggtgtgcgagcagttaatacagtcccacatggcgagatacaccgccatactaaaccagatccccagtcacagctcttccatacggacagtgcagggcccgcctggcgagccagggagaccaggaagtccaggcgccccgggagagcagggaccccctggcacacccggatttccgggtaatgccggggtgcctggtacacctggggaaagagggcttaccggtatcaagggtgaaaaaggcaatcccggggttggcacacagggacctcggggcccacctggccccgcagggccgagtggcgagtctaggcccgggagtcccgggcctcctgggagcccagggccgaggggtcctcctggacacctgggcgtgccgggaccgcagggccctagtgggcagcctggctattgcgacccctccagctgctcagcctatggagtgagagcacctcacccagatcagcccgaatttaccccagtccaggacgaactagaagcgatggaactgtggggccccggcgtgtag

SEQ ID NO: 290435 - DNA, 5391 bp, Artificial Sequence
  derived and/or modified sequence
atgaagatcttccagcggaagatgcggtactggctgctgcccccctttctggcaatcgtctatttctgtaccattgtccagggccaggtagcccccccaactcggttgcgctacaacgtgatttcccacgatagcatccagatcagctggaaggccccccgcgggaagtttggaggctataagttacttgttactccgacatccggcggcaaaacaaatcagctgaatctccaaaacacagccaccaaggccattatccaagggttgatgcccgatcagaactacactgtacaaattattgcctataacaaagacaaagaatccaaacctgcccagggccagttccgcattaaggatctcgaaaaaaggaaagatccgaagcctcgcgttaaagttgttgaccggggaaatggttctcgaccatcctcccccgaagaagtcaaatttgtctgccagactccagccatcgcggacatcgttatcctggttgacgggtcatggtccatcgggcggtttaatttccggctagtcagacactttctcgagaatctcgtgacagccttcgatgtagggagcgaaaaaactcgcatcggcctggctcagtattccggtgacccccggattgagtggcacttgaacgcgttcagcacaaaggacgaagtcattgaggccgtgcggaacctcccttataagggcggcaatactttaaccggcctcgctttgaactatatatttgaaaactcatttaaacctgaagctggttctcgaacgggagtgtctaagattgggatcctcattaccgacggtaagtcccaggatgatataatccctccttcccggaacctgcgcgagagtggcgtggagcttttcgccattggtgtcaaaaacgctgatgtgaatgagctacaggaaattgccagcgagcctgattcaactcatgtctataacgttgccgagtttgacctcatgcataccgtcgttgagtcactaacgagaacactttgttccagagtagaagagcaggacagagagattaaggccagtgcacatgcgattactggccctccaacagaattgatcacatctgaggttacagcacggtcattcatggtgaattggactcatgcacctgggaatgtcgaaaaatatcgggtagtgtattatccaacaagaggaggaaaacctgatgaggtggttgtcgatggcacagtgtcttccacagtgctcaagaacctgatgagcttgaccgaataccagattgcggtgttcgccatctacgcccacacagcaagtgagggcctgcgaggtaccgaaaccactcttgccttgcctatggcatcggaccttctactttatgatgtgacagagaacagtatgcgtgttaagtgggacgccgtgccaggcgccagtgggtacttgatcctgtatgcaccgctgacagaaggcctcgctggggatgagaaagagatgaaaatcggcgagacccatactgacattgagctgtctgggttacttccaaacaccgaatatacagtaaccgtctacgccatgttcggcgaggaagcgtcagatcccgtgacaggacaggagacaactcttgccctgagtccgccacgcaatctcaggataagcaatgtaggctccaatagcgctcgcctgacttgggatcccacatcaaggcagatcaacggataccgtatcgtgtacaataatgcagatggcactgagatcaacgaagtcgaagtggacccaatcaccacttttccattgaaaggcctgacacctttgaccgagtatacaatcgctattttcagcatctatgatgaggggcagagcgagcctctgacaggggtttttacgacagaagaagtgcctgcacagcagtaccttgaaattgacgaggttactacagactcattcagagtgacctggcatcctctatccgcggatgaggggctccacaaactgatgtggattccagtgtacggggggaaaacagaagaagtggtactgaaagaagaacaagactcccacgtaattgagggactggagccggggacggagtacgaggtgtcattgttggccgtactggatgacgggtcagagagcgaggtggtgactgctgtgggtacgaccttggattccttctggacggaacctgcgaccactatcgtgcccactacctccgtgaccagcgttttccagactggaatcaggaacctggttgtaggagacgagacaacctctagtctgagagtgaaatgggacatctcggactcggacgttcagcagtttcgcgtcacatacatgactgcgcagggcgaccccgaggaagaggtaatcggcaccgtcatggtgcccggaagtcagaacaatctattgctgaagcctttgcttcctgacactgagtataaagttactgtcacacccatctacactgacggggagggtgtaagcgtgtccgcgcctggtaagaccctgcctagctcaggtccacagaacctgcgggtgagcgaggagtggtataatcgactgcggattacatgggatccaccctcctcaccagttaaaggctatcggatcgtgtataaaccagtgagcgtccccggtcctaccctggaaacctttgtcggagctgatattaatacaatactgattaccaatcttctgagcggcatggattataatgtgaaaatcttcgccagccaggcatctggcttctccgacgcccttacagggatggtcaaaaccctgtttcttggggttacgaatctgcaggccaagcatgttgagatgacatctctgtgtgcacattggcaggtgcatagacacgccaccgcctacagggtggtgatcgaatctttgcaggaccggcaaaagcaagaatcgacggtagggggcggaaccacaagacattgcttctacgggctgcagcccgacagtgagtataaaatttccgtgtatacaaaactgcaggagatcgaaggaccatccgtctctatcatggagaagactcagagtcttcccacacggcccccaaccttccccccaactataccccccgccaaggaggtctgtaaagcagcaaaggccgatcttgtattcatggtggacggcagctggagcatcggcgatgagaatttcaataagataatttccttcctatactccaccgtcggcgcgcttaacaaaatcggcactgatggcactcaagtggctatggtgcagtttacggacgatcctagaacagagttcaaactgaacgcgtataagactaaggagacgctcttggacgccatcaagcatatctcttacaagggcgggaataccaaaaccggcaaggccatcaaatatgttagagataccctgtttacggccgaatccggcacgcgtcggggaatacccaaggtgatcgtagtgatcaccgacggcagatcacaggacgacgtaaacaagatctctagggaaatgcagttggacggatattctatctttgccataggagtggccgacgccgattattccgaattagtgtcaatcggctccaagcctagcgcccggcatgtattttttgtcgacgatttcgatgcttttaagaagatcgaagacgagctcatcacatttgtttgtgaaacagctagtgccacttgtcctgtcgtccacaaggacggaatcgatctggcggggtttaaaatgatggagatgttcggattggtggagaaggatttttcttcagtggagggggtgtccatggaaccagggacgttcaacgtgtttccctgttatcagctgcacaaagacgcactcgtgtcacagccaaccagatatctccacccagaaggcctgcccagcgactacactataagcttcctcttccgcatcctcccggataccccccaggaaccttttgcattgtgggagatccttaataaaaacagtgatcccttggtcggggtcatccttgacaacggcggaaagactctcacctacttcaattacgaccagtccggggatttccagaccgtgacgtttgaaggaccagagattagaaaaatcttttatgggtccttccacaagctgcacatagtggtgtccgaaacactcgtcaaagtggtaatagactgcaaacaagtgggcgaaaaagccatgaacgctagcgctaacatcacatctgatggagtggaggtactaggcaagatggtgcgtagccgcggccccggcgggaattccgcccctttccagctgcagatgtttgatatcgtttgttctacgtcctgggcaaacaccgataaatgttgcgagctgccaggactgcgggacgatgagtcgtgtcccgacctgcctcacagttgctcctgctccgagaccaatgaggtagcactggggcccgccggccctcccggagggcccgggcttcgcggccctaaggggcagcagggggaacccggtccaaaggggcctgacggccccagaggggagattgggctgccgggaccacagggtccccctggtccgcaaggcccgtccgggctatccatccaagggatgcctggtatgccgggggaaaaaggagagaaaggcgacaccggtctgcccgggcctcaggggatccccggcggtgtgggctcacccggtagagacggcagccctggccagagaggactgcctggtaaggacggctcaagcggaccccctggccctcccggcccaatcggaatccctggaacacctggagttcctgggatcacaggatctatgggtcctcagggtgccttaggcccccctggggtccctggtgccaagggcgaacgcggcgaacgtggagaccttcagtcccaagctatggtccgctcagtcgccaggcaggtgtgtgagcaactgatccagtcacacatggcacgctacactgccatcctcaatcagattccatcacatagtagctctatccggaccgtgcagggtccacccggtgagccgggccgtcccgggtctccaggcgcccccggggaacagggtcccccagggacccccggctttcctggcaatgctggcgtgcctggcaccccaggagagagaggactaacggggattaagggcgaaaaggggaatccaggagtagggacccaaggccctagagggcctcccggccccgcaggtccgtccggagaatctcggccaggaagtcccgggccccccggatcacctggtcctcgcggcccacctgggcacttgggtgtcccgggtcctcagggtccatctggccagcccgggtactgtgacccttcatcctgctcagcatacggcgtgagggctccacatcctgaccagcccgagtttactcctgtgcaggatgagttagaggccatggaactatggggacctggcgtgtag

SEQ ID NO: 290436 - DNA, 6167 bp, Artificial Sequence
  derived and/or modified sequence
atcctgggctcccagctggagaggcggaggcagctccagggggctggaagtggaagcgcagcggcagaaggagagggagagagaaagagagagaggctaattaaaaaaggatactccgagggaagagagcaagggcggtgcgccgccaaggaccaactagcggcggagcttcgatcttgcctaggcgcggagagctcccaacctgggctggaaccttgcccagcacaggtggctgctacaccccatgtaaaaagcggaaaataaaatgaagattttccagcgcaagatgcggtactggttgcttccaccttttttggcaattgtttatttctgcaccattgtccaaggtcaagtggctccacccacaaggttaagatataatgtaatatctcatgacagtatacagatttcatggaaggctccaagagggaaatttggtggttacaaacttcttgtgactccaacttcaggtggaaaaactaaccagctgaatctgcagaacactgcaactaaagcaattattcaaggccttatgccagaccagaattacacagttcaaattattgcatacaataaagataaagaaagcaagccagctcaaggccaattcagaattaaagatttagaaaaaagaaaggatccaaagcccagagtcaaagttgtggacagaggaaatgggagtagaccatcttcaccagaagaagtgaaatttgtctgtcaaactccagcaattgctgacattgtaatcctggtcgatggttcatggagtattggaagattcaacttcagactggttcggcatttcttggaaaacctggttacagcattcgatgtgggctcagagaagacacgaattggggtgaaaaacgcggatgtgaatgagctgcaggagatcgcctctgaaccagacagcactcatgtgtacaatgttgccgaattcgatctgatgcacacagttgtggagagtctgaccaggactctctgctctagagtggaagaacaggacagagaaattaaagcctcagcccatgccatcactgggccgcctacggagttgattacttctgaagtcactgccagaagctttatggttaactggactcatgccccaggaaatgtggaaaaatacagagttgtgtattatcctaccaggggtggaaaaccagacgaggtggtggtagatggaactgtatcttccacagtgttgaaaaacttgatgtctttaactgaatatcagatagcagtctttgcaatctatgcccacactgctagtgaaggcctacggggaactgaaactacacttgctttaccgatggcttctgaccttctactgtacgacgtgactgagaacagcatgcgagtcaaatgggatgcagtgcctggggcctcaggttacctgatcctttatgctcctctaacagagggcctggctggggatgaaaaagagatgaaaattggagagacccacacagatattgaattgagtgggttgttgcccaatacagaatacacagtcacagtttatgccatgtttggagaagaggccagtgatcctgttacgggacaagaaacaacattggctttaagtccaccaagaaacctgagaatctccaatgttggctctaacagtgctcgattaacctgggacccaacttcaagacagatcaatggttatcgaattgtatataacaatgcagatgggactgaaatcaatgaggttgaagtcgatcctattactaccttccctctgaagggcttgacacctctcacagagtatactattgctattttctccatctatgatgaaggacagtcagagcctctgactggagtttttaccaccgaggaagttccagcccagcaatacttagaaattgatgaggtgacgacagacagttttagggtgacctggcatcccctctcagctgatgaagggctacacaaattgatgtggattccagtctatggggggaagactgaggaggttgtcctgaaagaagagcaggactcacatgttattgaaggcctggagcccggtacggagtatgaagtttcactattggccgtacttgatgatggaagcgagagtgaggtggtgactgctgtcgggaccacacttgacagtttttggacagaaccagctacaaccatagtgcctaccacatctgtgacttcagttttccagacgggaatcagaaacctagttgtaggtgatgaaactacttctagcctgcgggtaaaatgggacatttctgacagcgatgtgcagcagtttagggtgacctacatgacagctcaaggggaccctgaggaagaagtcataggaacggttatggtgcctggaagccagaacaacctccttctgaagcctctgcttcctgatactgaatacaaagtcacagtgactcccatctacacggatggcgaaggcgtcagcgtctccgctcctggaaaaaccttaccatcctcggggccccagaacttgcgggtgtccgaggaatggtataaccggttgcgcattacgtgggaccccccatcttccccggtgaaaggctatagaattgtctacaaacctgtcagtgttcctggtccaacactggaaacgtttgtgggagctgacattaacaccatccttatcacaaacctcctcagcggaatggactacaatgtgaagatatttgcctcccaggcctcaggcttcagcgacgccctgacaggcatggtgaaaacattgttcttgggtgttaccaatctccaagccaaacatgttgaaatgaccagcttgtgtgcccactggcaggtacatcgccatgccacagcctatagggttgttatagaatccctccaggataggcaaaagcaagaatccactgtgggtggagggacaaccaggcattgcttctatggacttcagcctgattctgaatataaaatcagtgtttatacaaagctccaggagattgaaggacctagtgtgagcataatggaaaaaacacaatcacttcctacacgaccaccaacttttcctccaaccattccaccagcaaaagaagtatgtaaggcggccaaggctgacctggtatttatggtggatggatcctggagcattggagatgaaaatttcaataagatcatcagctttctatacagcactgttggagccctgaacaagattggcacagatggaacccaagttgcaatggttcagttcactgatgatcccagaacagaatttaaactaaatgcttacaaaaccaaagagactcttcttgatgcaattaaacacatttcatacaaaggaggaaatacaaaaacaggaaaagcaattaagtatgttcgagataccttgttcactgcagagtcaggtacaagaaggggcatcccaaaggttatcgtggttataactgatggaagatcacaagatgatgtgaacaaaatctccagggagatgcaattagatggctatagcatttttgcaattggtgtggccgatgcagattactcggagttggttagcattggcagtaagcccagcgcacgccatgtcttctttgtggatgactttgacgcctttaagaaaatcgaagatgagttaattacttttgtctgcgaaacagcatcagcaacctgtccagtggtacacaaggatggcattgatcttgcaggatttaagatgatggaaatgtttggtttggttgaaaaagatttttcatcagtggaaggggtttctatggagcctggtaccttcaatgtgtttccatgttaccaactccataaagatgccctggtttcccagccaaccaggtacttgcacccagaaggattgccctccgactacacaatcagttttctattccggattcttcctgacactccacaggagccatttgctctttgggagattttaaataaaaattctgacccattggttggggttattttagacaatggtgggaaaactctaacatatttcaactatgaccagagtggggattttcaaactgttactttcgaaggacctgaaattaggaaaattttttatggaagctttcacaagctacacattgttgtcagtgagactttggtcaaagtggttattgactgcaagcaagtgggtgagaaggcaatgaacgcatcagctaatatcacgtcagatggtgtagaagtgctagggaaaatggttcgatcaagaggaccaggtggaaactctgcaccgttccagttacagatgtttgatattgtttgctccacatcatgggccaatacagacaaatgctgtgaacttccaggcctgagagatgatgagtcttgcccagaccttccccattcctgctcctgttctgaaaccaatgaagtggctctgggaccagcgggcccaccaggtggtccaggactccgaggaccaaagggccagcaaggtgaaccgggtccaaagggaccagatggccctcggggtgaaattggtctgccaggacctcagggtccacctggacctcaaggaccaagtggtctgtccattcaaggaatgcccggaatgccaggagaaaaaggagagaaaggagatactggccttccaggtccacagggtatcccaggaggcgttggttcaccaggacgtgatggctcaccaggccagaggggccttccgggaaaggatggatcctcgggacctccaggaccaccagggccaataggcattcctggcacccctggagtcccagggatcacaggaagcatgggaccgcaaggcgccctgggaccacctggtgtccctggagcaaagggggaacgaggagagcggggtgacctgcagtctcaagccatggtgagatcagtggcgcgtcaagtatgcgaacagctcatccagagtcacatggccaggtacactgccatcctcaaccagattcccagccactcctcatccatccggactgtccaagggcctcctggggagcctgggaggccaggctcacctggagcccctggtgaacaaggacccccaggcacaccaggcttccccggaaatgcaggcgtgccagggaccccaggagaacgaggtctaactggtatcaaaggagaaaaaggaaatccaggcgttggaacccaaggtccaagaggcccccctggaccagcaggaccttcaggggagagtcggcctggcagccctgggccccctggctctcctggaccaagaggcccaccaggtcatctgggggttcctggaccccaaggtccttctggccagcctggatattgtgacccctcatcatgttctgcctatggtgtgagagctccccatccagatcagccagagttcacccctgtccaagatgagctggaagccatggaactgtggggccctggagtctgatagcctcaggagaaatttgaagaccaactgcaagaactcttaaggaatcttgtttgagaaaatgttgttatgtggtttgtatgctacttttggggggcagggctcatttcagcagcctaaatctcctccttggataatgttaatattattattattattaacaaaaaatatatatttttaaaaagttcccttaatctatgacatggtagcaatgatttccctttggtgtcttaatggcatgtcagataatttgtttttccagagaagagagctcaaagaggaattgggaaaaataaattgaactctggaatcttctctctcaagtcctaaaatgaacaaacagatatgattgtgtttgagggaaatatgtccctagcaggaaaagaattcaaagaggttcaaagaatatgtcacttactcctacttgctgtaggaataaccttgctgataagaaaaaaagggacaatattggagaaactacctcttgtttaattgatctgtccaactctgagatcacttggtaactggtttcatgtgtatccaaaaatcagcatttggatttaagctttctgaatttggtagtttaagaaacagatttagtttttcagtggttttaactcatgtgaaataatgattttccaccagctctgatgcaaagagatataattttaatgaacgatttatccagcagtgtgttccaggggttgcctctccttatctacggggattactttgtacatgcagataagttttcgcaaacctatttccattttcttttgtaagcaaataaaacttt

SEQ ID NO: 290437 - DNA, 6466 bp, Artificial Sequence
  derived and/or modified sequence
atctgatcctgggctcccagctggagaggcggaggcagctccagggggctggaagtggaagcgcagcggcagaaggagagggagagagaaagagagagaggctaattaaaaaaggatactccgagggaagagagcaagggcggtgcgccgccaaggaccaactagcggcggagcttcgatcttgcctaggcgcggagagctcccaacctgggctggaaccttgcccagcacaggtggctgctacaccccatgtaaaaagcggaaaataaaatgaagattttccagcgcaagatgcggtactggttgcttccaccttttttggcaattgtttatttctgcaccattgtccaaggtcaagtggctccacccacaaggttaagatataatgtaatatctcatgacagtatacagatttcatggaaggctccaagagggaaatttggtggttacaaacttcttgtgactccaacttcaggtggaaaaactaaccagctgaatctgcagaacactgcaactaaagcaattattcaaggccttatgccagaccagaattacacagttcaaattattgcatacaataaagataaagaaagcaagccagctcaaggccaattcagaattaaagatttagaaaaaagaaaggatccaaagcccagagtcaaagttgtggacagaggaaatgggagtagaccatcttcaccagaagaagtgaaatttgtctgtcaaactccagcaattgctgacattgtaatcctggtcgatggttcatggagtattggaagattcaacttcagactggttcggcatttcttggaaaacctggttacagcattcgatgtgggctcagagaagacacgaattggtcttgcacagtatagtggtgaccccagaatagaatggcacttgaatgcatttagcacaaaagatgaagtgattgaagctgtccgaaacctcccatataaaggaggaaatacactaacaggtcttgctttgaactacatttttgaaaatagcttcaaaccagaagcaggatcaaggactggagtatccaaaattggcattttaatcacagatggaaaatcccaagatgacattattccaccatctagaaatcttcgtgagtctggtgtagaactgtttgccataggggtgaaaaacgcggatgtgaatgagctgcaggagatcgcctctgaaccagacagcactcatgtgtacaatgttgccgaattcgatctgatgcacacagttgtggagagtctgaccaggactctctgctctagagtggaagaacaggacagagaaattaaagcctcagcccatgccatcactgggccgcctacggagttgattacttctgaagtcactgccagaagctttatggttaactggactcatgccccaggaaatgtggaaaaatacagagttgtgtattatcctaccaggggtggaaaaccagacgaggtggtggtagatggaactgtatcttccacagtgttgaaaaacttgatgtctttaactgaatatcagatagcagtctttgcaatctatgcccacactgctagtgaaggcctacggggaactgaaactacacttgctttaccgatggcttctgaccttctactgtacgacgtgactgagaacagcatgcgagtcaaatgggatgcagtgcctggggcctcaggttacctgatcctttatgctcctctaacagagggcctggctggggatgaaaaagagatgaaaattggagagacccacacagatattgaattgagtgggttgttgcccaatacagaatacacagtcacagtttatgccatgtttggagaagaggccagtgatcctgttacgggacaagaaacaacattggctttaagtccaccaagaaacctgagaatctccaatgttggctctaacagtgctcgattaacctgggacccaacttcaagacagatcaatggttatcgaattgtatataacaatgcagatgggactgaaatcaatgaggttgaagtcgatcctattactaccttccctctgaagggcttgacacctctcacagagtatactattgctattttctccatctatgatgaaggacagtcagagcctctgactggagtttttaccaccgaggaagttccagcccagcaatacttagaaattgatgaggtgacgacagacagttttagggtgacctggcatcccctctcagctgatgaagggctacacaaattgatgtggattccagtctatggggggaagactgaggaggttgtcctgaaagaagagcaggactcacatgttattgaaggcctggagcccggtacggagtatgaagtttcactattggccgtacttgatgatggaagcgagagtgaggtggtgactgctgtcgggaccacacttgacagtttttggacagaaccagctacaaccatagtgcctaccacatctgtgacttcagttttccagacgggaatcagaaacctagttgtaggtgatgaaactacttctagcctgcgggtaaaatgggacatttctgacagcgatgtgcagcagtttagggtgacctacatgacagctcaaggggaccctgaggaagaagtcataggaacggttatggtgcctggaagccagaacaacctccttctgaagcctctgcttcctgatactgaatacaaagtcacagtgactcccatctacacggatggcgaaggcgtcagcgtctccgctcctggaaaaaccttaccatcctcggggccccagaacttgcgggtgtccgaggaatggtataaccggttgcgcattacgtgggaccccccatcttccccggtgaaaggctatagaattgtctacaaacctgtcagtgttcctggtccaacactggaaacgtttgtgggagctgacattaacaccatccttatcacaaacctcctcagcggaatggactacaatgtgaagatatttgcctcccaggcctcaggcttcagcgacgccctgacaggcatggtgaaaacattgttcttgggtgttaccaatctccaagccaaacatgttgaaatgaccagcttgtgtgcccactggcaggtacatcgccatgccacagcctatagggttgttatagaatccctccaggataggcaaaagcaagaatccactgtgggtggagggacaaccaggcattgcttctatggacttcagcctgattctgaatataaaatcagtgtttatacaaagctccaggagattgaaggacctagtgtgagcataatggaaaaaacacaatcacttcctacacgaccaccaacttttcctccaaccattccaccagcaaaagaagtatgtaaggcggccaaggctgacctggtatttatggtggatggatcctggagcattggagatgaaaatttcaataagatcatcagctttctatacagcactgttggagccctgaacaagattggcacagatggaacccaagttgcaatggttcagttcactgatgatcccagaacagaatttaaactaaatgcttacaaaaccaaagagactcttcttgatgcaattaaacacatttcatacaaaggaggaaatacaaaaacaggaaaagcaattaagtatgttcgagataccttgttcactgcagagtcaggtacaagaaggggcatcccaaaggttatcgtggttataactgatggaagatcacaagatgatgtgaacaaaatctccagggagatgcaattagatggctatagcatttttgcaattggtgtggccgatgcagattactcggagttggttagcattggcagtaagcccagcgcacgccatgtcttctttgtggatgactttgacgcctttaagaaaatcgaagatgagttaattacttttgtctgcgaaacagcatcagcaacctgtccagtggtacacaaggatggcattgatcttgcaggatttaagatgatggaaatgtttggtttggttgaaaaagatttttcatcagtggaaggggtttctatggagcctggtaccttcaatgtgtttccatgttaccaactccataaagatgccctggtttcccagccaaccaggtacttgcacccagaaggattgccctccgactacacaatcagttttctattccggattcttcctgacactccacaggagccatttgctctttgggagattttaaataaaaattctgacccattggttggggttattttagacaatggtgggaaaactctaacatatttcaactatgaccagagtggggattttcaaactgttactttcgaaggacctgaaattaggaaaattttttatggaagctttcacaagctacacattgttgtcagtgagactttggtcaaagtggttattgactgcaagcaagtgggtgagaaggcaatgaacgcatcagctaatatcacgtcagatggtgtagaagtgctagggaaaatggttcgatcaagaggaccaggtggaaactctgcaccgttccagttacagatgtttgatattgtttgctccacatcatgggccaatacagacaaatgctgtgaacttccaggcctgagagatgatgagtcttgcccagaccttccccattcctgctcctgttctgaaaccaatgaagtggctctgggaccagcgggcccaccaggtggtccaggactccgaggaccaaagggccagcaaggtgaaccgggtccaaagggaccagatggccctcggggtgaaattggtctgccaggacctcagggtccacctggacctcaaggaccaagtggtctgtccattcaaggaatgcccggaatgccaggagaaaaaggagagaaaggagatactggccttccaggtccacagggtatcccaggaggcgttggttcaccaggacgtgatggctcaccaggccagaggggccttccgggaaaggatggatcctcgggacctccaggaccaccagggccaataggcattcctggcacccctggagtcccagggatcacaggaagcatgggaccgcaaggcgccctgggaccacctggtgtccctggagcaaagggggaacgaggagagcggggtgacctgcagtctcaagccatggtgagatcagtggcgcgtcaagtatgcgaacagctcatccagagtcacatggccaggtacactgccatcctcaaccagattcccagccactcctcatccatccggactgtccaagggcctcctggggagcctgggaggccaggctcacctggagcccctggtgaacaaggacccccaggcacaccaggcttccccggaaatgcaggcgtgccagggaccccaggagaacgaggtctaactggtatcaaaggagaaaaaggaaatccaggcgttggaacccaaggtccaagaggcccccctggaccagcaggaccttcaggggagagtcggcctggcagccctgggccccctggctctcctggaccaagaggcccaccaggtcatctgggggttcctggaccccaaggtccttctggccagcctggatattgtgacccctcatcatgttctgcctatggtgtgagagctccccatccagatcagccagagttcacccctgtccaagatgagctggaagccatggaactgtggggccctggagtctgatagcctcaggagaaatttgaagaccaactgcaagaactcttaaggaatcttgtttgagaaaatgttgttatgtggtttgtatgctacttttggggggcagggctcatttcagcagcctaaatctcctccttggataatgttaatattattattattattaacaaaaaatatatatttttaaaaagttcccttaatctatgacatggtagcaatgatttccctttggtgtcttaatggcatgtcagataatttgtttttccagagaagagagctcaaagaggaattgggaaaaataaattgaactctggaatcttctctctcaagtcctaaaatgaacaaacagatatgattgtgtttgagggaaatatgtccctagcaggaaaagaattcaaagaggttcaaagaatatgtcacttactcctacttgctgtaggaataaccttgctgataagaaaaaaagggacaatattggagaaactacctcttgtttaattgatctgtccaactctgagatcacttggtaactggtttcatgtgtatccaaaaatcagcatttggatttaagctttctgaatttggtagtttaagaaacagatttagtttttcagtggttttaactcatgtgaaataatgattttccaccagctctgatgcaaagagatataattttaatgaacgatttatccagcagtgtgttccaggggttgcctctccttatctacggggattactttgtacatgcagataagttttcgcaaacctatttccattttcttttgtaagcaaataaaactttaaaacaatg

SEQ ID NO: 290438 - DNA, 5106 bp, Artificial Sequence
  derived and/or modified sequence
atgaagatttttcagcgtaaaatgagatactggctcctgccccctttcttggctatcgtatacttctgtaccattgtgcagggccaggtcgcccctccaacacgtctgagatacaatgtcatcagccacgactctatccagattagttggaaggcgccacgaggcaagttcggtggatacaaactgcttgtaacccccacgagtggaggcaagacaaatcagttgaatctgcagaatactgctaccaaggcaattattcagggcttgatgccggaccagaactacactgttcagatcatcgcctataacaaggataaagaaagcaagcctgctcagggccagtttagaataaaagacttggagaagcgcaaggatcccaaaccaagggtgaaggtagtcgaccggggtaatggaagtcgacctagcagtccggaagaggtgaagttcgtctgccagacccctgctatcgcggacatagtcatcctcgtcgacggatcttggtccatcggacgctttaattttcgcctggtgaggcatttcttggagaatcttgtgaccgcctttgacgtcggcagcgagaagacccggattggcgtcaagaacgcggatgtcaatgaactgcaggagattgctagcgaacccgattccacccacgtgtacaatgtggccgaattcgacctaatgcacaccgtggtcgaatccttgaccaggaccctgtgcagcagagtagaggagcaggatcgggaaatcaaggcatccgcacacgcaatcacagggccaccaacagaacttatcacctctgaggtgaccgctcgtagttttatggtgaattggactcacgcccctgggaacgtcgaaaaatatagagtggtctactatcctacacgaggaggaaagccagacgaagtagtcgtcgacggcacagtgtccagtaccgtcttgaagaatctcatgagcctgacggagtaccagattgctgtgttcgcgatctacgcccatacggcctcggaaggcctccggggaaccgaaacgaccttagcccttcccatggcctcagacttgcttctgtatgacgtcaccgagaacagcatgagagttaaatgggacgcggtgccgggagcctccgggtatctgatcctgtacgcgcctcttacagaaggcttggccggagacgaaaaggagatgaagataggggaaacccacacagacatcgaactcagcgggctgttgccaaacacagagtacactgtcaccgtgtacgctatgttcggcgaagaggcgagtgaccctgtaacaggacaagagacaaccctggcccttagtccgccacgcaatctgcgaattagcaatgtagggagtaactccgctaggctcacatgggatcctacttctcgccagattaacggctatagaattgtttataacaacgccgacggcactgagatcaacgaggttgaagtcgatccgataacaacattcccactaaagggcctcacaccactgactgaatatacaatagctatattcagcatttacgatgaaggccagtcagaaccattgaccggggtcttcacgaccgaggaagtccccgctcagcagtacctggagattgatgaggtgactacggacagttttagggttacatggcaccccctgtcggccgatgaaggacttcataagctcatgtggattcctgtctatggcggtaaaactgaggaggtggttctgaaggaggagcaggatagccacgtgatagaagggttagaaccgggaaccgaatatgaggtgtcattgctcgccgtgttggacgatggctccgagagtgaagtggtcaccgcagtggggactacgctggactcattctggaccgagccggcaactactattgttcccaccacatcagtaacaagcgtgtttcagacgggtatccgtaatttagtggtgggagacgagacgacctcttccctaagagtgaaatgggacatctcagattcagatgttcaacagttccgcgtcacatatatgacggcccagggtgatccggaagaagaggtcattgggaccgtcatggtccctggttcccagaacaatcttctgttgaagccacttctgcccgacaccgagtataaggttacagtgacgcccatctatactgacggagaaggggttagcgtgagcgcaccaggaaagaccctgccttctagcggaccccagaatctgcgcgtctctgaggagtggtacaacaggctacgcattacttgggatcccccttctagcccggtgaaaggatatcgcattgtgtataagcccgtatctgtgccaggacctacattagaaacatttgttggggctgacatcaacaccatcctgatcaccaatctgctctccggaatggactacaacgtgaagatctttgcctctcaagcctcaggattctcagacgcattgacgggcatggtgaaaaccctctttctgggcgtgaccaatctccaggccaagcacgtggaaatgactagcctctgcgcccattggcaggttcataggcatgccacagcctacagagtcgtgattgagtcccttcaggaccgacagaaacaggaatccaccgtgggcggaggtacgaccaggcattgcttctatggccttcaacccgatagcgagtataaaatttctgtgtatacaaaactccaagaaattgaaggaccatctgtgtcaatcatggaaaagactcaatccctgccaacgagacctccaacgttcccgccaacaataccaccagccaaggaggtatgtaaagctgctaaagccgacctcgtgttcatggttgacggctcctggagtatcggcgatgagaactttaataagattatctcattcctgtattcaaccgtgggggcactgaataaaatcggaacagacggcactcaagtggcaatggtgcagttcacagatgacccaaggactgaatttaagctaaatgcatacaagacaaaagagaccctgttagatgctattaagcacattagttacaagggtgggaacacgaaaacgggcaaggcaataaagtatgttagggacactctttttacagccgagtcagggactaggagaggtattccaaaagtgatcgtggttatcaccgatggtcgttctcaagacgatgtgaacaagattagtagagaaatgcagcttgatggctactcaattttcgcaatcggcgtggcggatgccgattactctgaacttgtatccattggatcaaagcctagtgcacgacatgtattcttcgtagacgacttcgacgccttcaaaaagatcgaagacgagctgatcacttttgtctgcgagaccgccagtgccacttgccctgtggttcataaagacggaatcgacttagcaggatttaagatgatggaaatgtttgggctcgtggaaaaagactttagtagcgtggaaggcgtgtcaatggagccagggactttcaatgtctttccctgttaccagctccacaaggacgcgctggtgagccagcccactcgctacctgcacccagaggggttgccttccgactacactataagcttcttgtttcggatcctgcctgacacaccccaggaaccattcgcactgtgggaaattctcaacaagaactctgaccccttggtgggagttatcctggataacgggggaaagacccttacttactttaattatgatcagagcggggatttccagactgtcacctttgaaggcccagaaatcaggaaaatcttttacggttcctttcataagctccatatcgtggtatccgaaaccctggtcaaagtggtgatcgactgcaaacaggtgggggagaaagccatgaatgcgagtgctaatatcacatcagacggagtggaggtcctcggcaaaatggtgcggagtagaggcccaggaggaaatagcgccccatttcagttacagatgtttgatattgtatgttctacgtcgtgggcaaacaccgataagtgctgcgaactaccgggtctgagagatgatgagtcatgccccgacctccctcacagctgtagttgctctgaaaccaacgaggtggctctcggtcccgcaggtccacctggcggtcccggtttaagaggacccaaaggtcagcaaggcgaacccggacctaaaggacccgacggccctagaggtgaaatcggactgcctgggcctcaaggccctcccggtccacagggcccaagtggactgtccatacagggtatgcccggaatgcccggtgagaagggtgagaagggtgatacaggtctgccaggaccccaaggcatacctggtggagtgggttcccccggtcgggacggctcacccggacagagaggactccccggaaaggacggatcgagtggtccacccggtccgcctggcccaatcggcattccaggaacgcccggtgttccaggaatcactggttccatgggaccccagggcgctctcggccctcccggtgtacctggagcgaagggcgagcgcggagaacggggtgaccttcagagccaagctatggtgaggtctgtcgctcggcaagtttgcgagcagcttatccagtcgcacatggccagatacaccgccattctaaaccagattccatctcacagcagttccattaggacggtgcaagggccacctggagagccaggtcggcctggttctccaggtgcgcctggagaacaaggccctcctggcacacccggttttcccggtaatgcgggtgtcccgggaacacctggggagcgcggtctgactggaataaagggcgagaaaggcaatcccggtgttgggactcagggcccaagaggcccaccagggcctgctgggccttcaggagaatccaggcccggaagcccaggcccaccagggtccccagggcctaggggaccccctggccacctcggggttcccggtccacagggaccctctggacaacccggatattgtgacccttccagttgctctgcgtacggggtacgagcgcctcaccccgatcagccggagtttacccccgttcaggacgagctggaagctatggagttgtgggggccaggagtgtaa

SEQ ID NO: 290439 - DNA, 5390 bp, Artificial Sequence
  derived and/or modified sequence
atgaagatattccagagaaagatgcgttactggctgctgcctccatttctggctatcgtgtatttctgcaccatcgtgcaggggcaggttgcaccaccgaccaggttacggtataatgtgataagtcatgattccatccagatatcctggaaagcgccaagagggaaatttggaggatataagctgctagtaacccccaccagtggcggtaaaacaaaccaactgaatctacaaaatacagcgacaaaggcaatcatccaggggcttatgcccgaccagaactacacagtgcagattatcgcgtacaacaaagataaagagtcaaaaccagcccagggacaattccggatcaaggacttggaaaagcgaaaagacccgaagccccgtgtcaaggtggttgacaggggcaatgggtcaaggcctagcagccctgaagaggtgaagttcgtgtgccagactcctgccattgctgacattgtcatcttagtggatggaagttggtccatcgggagatttaactttcgactggtacgacactttctcgagaacctagtcaccgccttcgacgttggctccgagaagactcggatcgggctcgcccaatattcaggtgatccaagaatcgaatggcatctgaacgcattttccaccaaggacgaggtgattgaagctgttcggaacctaccatataagggtgggaatacccttaccggcctggctctgaattatattttcgaaaacagtttcaaaccggaggccggtagtcgtacaggagttagcaagatcggcattttaatcaccgacggaaaatcccaggatgacattatcccaccctcccgcaatttgcgggaatccggcgtcgagttgttcgctattggggtgaaaaacgccgatgttaacgagctgcaggagatcgcctccgagcccgatagcacacatgtctacaacgtggctgaattcgatctgatgcacacagtggttgagtccctcacccgtactctctgctctcgtgtggaggagcaagatagagagatcaaagctagtgcccatgccattacgggacctcccactgaactgataacatccgaagtgacggcacgctcatttatggtgaactggactcacgcacccggaaacgtcgaaaaataccgagtagtatactatcccacaagagggggaaaacccgacgaggttgtagtggatggtaccgtctcttccactgtcctaaagaatctgatgtcactcactgagtaccagatcgctgttttcgccatctacgcgcacactgcctccgaggggctccgcggaacagagaccaccttggcactgccaatggcatccgatttactcctttacgatgtaactgaaaactctatgagagtaaaatgggacgcagtgccaggagcgtcagggtaccttatcttatacgctcccctgactgaaggactcgccggtgacgagaaagaaatgaagataggggagacccatactgatatcgagctctccgggctactgccaaatacagagtacacagtgactgtatacgccatgttcggcgaggaagcttctgatcccgtgacagggcaagaaacaaccttagcattatcccctcctcgtaacctgagaatcagtaacgtagggtcgaacagtgcccgtttaacttgggatcccacatctaggcagattaacgggtacagaatcgtttacaataacgcggatggcactgaaataaatgaggttgaggttgatcctataacaacatttcctctgaaggggctcacgcccctgacggagtataccatcgctatttttagcatctatgatgagggacaatctgagcccctgacaggagtgtttaccacagaggaggttcctgcacagcagtacttagagatcgatgaagtcactacagattcgttcagggtcacttggcacccactctctgcagatgaagggctgcacaaacttatgtggatccccgtttacgggggtaagacggaagaagtcgtgctgaaggaagagcaggatagccacgtgatcgagggcttagaaccgggtaccgaatatgaggtgagtttactggccgtcctggacgatggttctgagagcgaagtggtgacagcagtgggaactacgctagactctttttggactgagcccgcaactacaatcgtccccacaaccagcgtgacatctgtctttcagaccgggatcagaaacttggtcgtgggcgatgagactaccagttcactgagggtgaaatgggatatctcggacagcgacgttcaacaatttcgggtcacctacatgaccgcacagggtgacccagaggaggaggttataggtactgtcatggtgcctggatcccagaacaatctgctgctgaaaccactgctccctgatacagagtacaaggtgaccgtgacccccatctacaccgacggtgagggggtaagcgtatcagctcccggtaagaccctccccagctctggaccacagaatcttagggtcagcgaggaatggtacaacagactgaggataacttgggaccccccttccagtcctgtaaaaggttatagaattgtgtataaacctgtatctgtgcccggacccaccttggagacctttgtcggagccgacatcaataccatcttgatcacgaacttgctttcagggatggactacaacgtgaagatctttgccagtcaggcaagcggcttttccgatgctttaacaggcatggtgaagacgctatttctgggagtgaccaatttacaagcaaagcacgttgaaatgacctctctctgcgcgcactggcaggtgcatcgtcatgctaccgcttacagggtcgttatcgagtccttgcaggacaggcagaaacaggagtctacagtcgggggtggtacaacaagacactgcttctacggactgcagcccgactcggaatacaaaatttctgtgtatacgaagcttcaggaaattgagggcccatccgttagcatcatggagaaaacacagtccctgccgacgaggccaccaacattcccccctaccattcccccagccaaagaagtgtgcaaggcagcaaaagccgatcttgtgttcatggttgatggtagctggtccatcggggacgagaacttcaacaagatcatctcgtttctttactctaccgtgggagcactaaataaaattggcacggacggcacacaagtcgccatggttcaattcactgacgaccccagaaccgagttcaagctgaacgcttataaaaccaaagagaccttactggatgcgatcaagcatatctcatacaaaggaggaaacacaaagaccggcaaagcgattaaatatgtacgggataccctattcaccgccgagtccgggactcggaggggaatcccaaaggtgatcgtagtgattacggacggccgtagccaagacgacgtcaacaagataagccgggagatgcaactggatggctattcaatattcgcgattggcgtcgccgacgcagactacagtgaacttgtgagcattggcagtaagccttctgcacgccatgtgtttttcgtggatgacttcgacgcctttaaaaagatcgaggacgagctgatcaccttcgtgtgcgagaccgctagcgctacctgtccagtagtccacaaggacggcatagacctcgctgggtttaaaatgatggagatgtttgggctggtcgaaaaggacttctcctcggtcgaaggcgtgtcgatggagcctgggactttcaacgtgttcccgtgttaccaattgcataaggatgccctagtcagtcagcctacgcggtatctgcaccccgagggtctgccgtccgactacaccatttcctttctgtttcggatcctccctgacacgcctcaggaaccattcgctctctgggagattcttaataaaaacagcgatccccttgtgggcgtgatccttgacaacgggggtaagacccttacttacttcaactatgatcagagtggagattttcaaactgtaacctttgagggcccagaaattaggaagatattctacggaagttttcataagcttcacattgttgtgtctgagacactggtaaaagtcgttattgattgtaaacaggttggcgaaaaggcaatgaatgccagcgctaacattacatccgacggggtggaggtattggggaaaatggtgaggagcaggggtcctggcggtaattctgcgccattccagctgcagatgttcgacatagtctgcagcacatcatgggccaacacagataaatgctgcgaactccctggcctaagagacgacgagagctgccctgacctaccccactcctgcagctgcagcgaaactaatgaggtagccctcggacccgctggacccccaggcggtccaggacttcggggtcctaagggccaacagggcgaacccggtcctaagggccctgacgggccaaggggtgaaattgggcttccgggaccccagggacctccgggaccccaagggccaagcggcctaagcatccagggtatgccaggtatgcccggagaaaaaggcgagaagggtgatacgggtctgcctgggcctcagggaatccctggaggtgtggggtcccccggacgggacggaagtccgggtcagcgcggtctgccaggcaaggatggatcttccgggccacccggtcctccaggccctatcggcatccccggaactccaggggtgccgggaatcactggctctatgggccctcaaggcgctctcgggcctccgggagttcccggtgcgaaaggcgagcggggagagcgcggagatctccaatcccaagcaatggtgaggagcgtagcccgacaagtctgtgaacagctcatccagtcccacatggcaagatacacagccatcctcaatcagattccaagtcattcatcttccattcgaaccgttcagggaccacccggtgagcccggtcggccagggagtcccggagcgcctggcgagcaagggcctccaggtacccctggtttccccggtaacgctggcgtgccaggcactccaggcgagcggggattgaccgggatcaagggcgaaaaggggaaccccggagtgggcactcagggcccacgagggcctccaggacctgctggtccatcgggcgagagtcgcccagggagtccaggccctcccggttcacctggtccaagggggcctcctggacatctcggggtccccggtccacagggaccaagcggccaacctgggtactgtgatcccagtagctgctccgcctacggcgtgagagcgccacacccagatcagcctgagttcacaccagtgcaggatgagctggaggcaatggaactgtggggacccggagttta

SEQ ID NO: 290440 - DNA, 1773 bp, Artificial Sequence
  derived and/or modified sequence
atggacatcctgaagagcgagagctacggcaccgtggtgagaatcagcccccaggacttcccccagaaccccggcttcggcgacgtgagcgacagcgaggtgtggctggacagccacctgggcagccccggcctgaaggtgaccggcttcaccttccagaacaactgcctgaacgaggagaccgtggtgcccaagaccttcaccaaggacgccccccagggctgcaaggagctgggcagcagcggcctggactgccagcccctggagagccagggcgagagcgccgagggcatgagccagagatgcgaggagtgcggcaagggcatcagagccaccagcgacatcgccctgcactgggagatcaacacccagaagatcagcagatgccaggagtgccagaagaagctgagcgactgcctgcagggcaagcacaccaacaactgccacggcgagaagccctacgagtgcgccgagtgcggcaaggtgttcagactgtgcagccagctgaaccagcaccagagaatccacaccggcgagaagcccttcaagtgcaccgagtgcggcaaggccttcagactgagcagcaagctgatccagcaccagagaatccacaccggcgagaagccctacagatgcgaggagtgcggcaaggccttcggccagagcagcagcctgatccaccaccagagaatccacaccggcgagagaccctacggctgcagagagtgcggcaaggccttcagccagcagagccagctggtgagacaccagagaacccacaccggcgagagaccctacccctgcaaggagtgcggcaaggccttcagccagagcagcaccctggcccagcaccagagaatgcacaccggcgagaaggcccagatcctgaaggccagcgacagccccagcctggtggcccaccagagaatccacgccgtggagaagcccttcaagtgcgacgagtgcggcaaggccttcagatggatcagcagactgagccagcaccagctgatccacaccggcgagaagccctacaagtgcaacaagtgcaccaaggccttcggctgcagcagcagactgatcagacaccagagaacccacaccggcgagaagcccttcaagtgcgacgagtgcggcaagggcttcgtgcagggcagccacctgatccagcaccagagaatccacaccggcgagaagccctacgtgtgcaacgactgcggcaaggccttcagccagagcagcagcctgatctaccaccagagaatccacaagggcgagaagccctacgagtgcctgcagtgcggcaaggccttcagcatgagcacccagctgaccatccaccagagagtgcacaccggcgagagaccctacaagtgcaacgagtgcggcaaggccttcagccagaacagcaccctgttccagcaccagatcatccacgccggcgtgaagccctacgagtgcagcgagtgcggcaaggccttcagcagaagcagctacctgatcgagcaccagagaatccacaccagagcccagtggttctacgagtacggcaacgccctggagggcagcaccttcgtgagcagaaagaaggtgaacaccatcaagaagctgcaccagtgcgaggactgcgagaagatcttcagatggagaagccacctgatcatccaccagagaatccacaccggcgagaagccctacaagtgcaacgactgcggcaaggccttcaacagaagcagcagactgacccagcaccagaagatccacatgggctag

SEQ ID NO: 290441 - DNA, 1773 bp, Artificial Sequence
  derived and/or modified sequence
atggacatcttgaagagtgagagttatgggaccgtagtgcgcatctctccacaggactttccccagaacccaggattcggcgacgtgtctgactctgaggtctggctcgatagtcatctcggcagccccggcctgaaagtaaccgggtttaccttccagaacaactgcctgaatgaggagacagtggtgcctaagacctttacaaaagatgctccacaaggatgcaaggaactcggctccagtggactcgactgccaacctcttgaatcacagggcgagtccgccgaaggaatgtcccagagatgtgaggagtgcggaaaaggaatacgggccaccagtgatatcgcactccactgggaaattaacactcagaagatctctaggtgtcaggaatgtcaaaaaaaattgtctgactgcctgcagggcaaacacacgaataattgtcatggggaaaaaccatacgagtgtgccgagtgtggaaaggtgtttaggctttgctcccaactaaaccagcaccagagaattcataccggcgagaagccatttaagtgcaccgagtgtgggaaagctttccgtctttcgtctaaactgattcagcatcagcgaatccatacaggcgaaaagccatacagatgcgaggagtgtggcaaagcctttgggcaatcatctagtctaatacaccatcaaagaatccacacgggggaaagaccttatggatgcagggagtgtggaaaggcgttctcccaacagagtcagctcgtgcggcaccagcgaacacatacgggtgaacggccctatccgtgcaaagaatgcggaaaagctttctctcaatccagcacactggcgcagcaccagaggatgcacaccggtgaaaaggcccagatcttgaaggcaagtgattccccaagcctggtggcccaccagagaatccacgccgtggaaaagccctttaaatgtgacgagtgtggcaaagcgtttcgctggataagccgtcttagtcagcaccaactgattcacaccggtgaaaagccctataagtgtaacaaatgcaccaaggccttcggctgttcttcacggctcatccgacaccagagaacccacacgggcgaaaaacctttcaagtgcgacgaatgtggtaagggatttgtgcagggatctcatttaattcagcaccaaaggatacacacaggagaaaagccgtatgtgtgtaacgattgtggtaaggctttctctcagtcaagttcactgatttaccatcaacggatacacaagggggagaagccttacgagtgtctgcagtgcgggaaagcttttagcatgagtacacaacttaccattcaccagcgcgtgcatactggtgaaagaccatacaagtgtaacgagtgtgggaaggcctttagccaaaattccacactttttcagcaccagattattcatgctggggtgaagccttacgagtgctctgagtgcggaaaagcttttagtaggtcctcatacctgattgaacatcaaagaatccatacccgggcacagtggttctatgaatacggaaatgcgctggaggggagtacatttgtcagcagaaaaaaggtgaatacgataaagaaactgcaccagtgtgaagattgcgaaaagatctttagatggcgatcccaccttatcattcaccagcgtattcacaccggcgaaaagccatacaaatgcaacgattgcggcaaggcattcaaccgttccagtagattaacacagcaccaaaagatccacatgggctag

SEQ ID NO: 290442 - DNA, 1773 bp, Artificial Sequence
  derived and/or modified sequence
atggacatcctgaagtctgagagctatggaacagtggtgcgcatcagcccccaggacttcccccagaaccctggctttggagatgtgtctgacagcgaggtgtggctggacagccacctgggcagccctggcctgaaggtgacaggcttcaccttccagaacaactgcctgaatgaggagaccgtggtgcccaagaccttcaccaaggatgccccccagggctgcaaggagctgggcagcagcggcctggactgccagcccctggagagccagggcgagagcgctgagggcatgagccagagatgtgaggagtgtgggaagggcatccgggccaccagtgacatcgccctgcactgggagatcaacacccagaagatcagccgctgccaggagtgccagaagaagctgagtgactgcctgcagggcaagcacaccaacaactgccacggggagaagccctatgaatgtgccgagtgtgggaaggtgttccggctgtgcagccagctgaaccagcaccagaggatccacactggagagaagcccttcaagtgcacagaatgtgggaaggccttccggctgagcagcaagctgatccagcaccagaggatccacactggagagaagccctaccgctgtgaggagtgtgggaaggccttcggccagagcagcagcctcatccaccaccagaggatccacactggagagcggccctacggctgccgggagtgtgggaaggccttcagccagcagagccagctggtgcgccaccagaggacccacactggagagcggccctacccctgcaaggaatgtgggaaggccttcagccagagcagcaccctggcccagcaccagaggatgcacactggagagaaggcccagatcctgaaggccagtgacagccccagcctggtggcccaccagagaattcatgctgtggagaagcccttcaagtgtgatgaatgtgggaaggccttccgctggatcagccggctgagccagcaccagctgatccacactggagagaagccctacaagtgcaacaagtgcaccaaggccttcggctgcagcagccgcctcatccgccaccagaggacccacactggagagaagcccttcaagtgtgatgaatgtgggaagggctttgtgcagggcagccacctgatccagcaccagaggatccacactggagagaagccctacgtgtgcaatgactgtgggaaggccttcagccagagcagcagcctcatctaccaccagaggatccacaagggggagaagccctatgagtgcctgcagtgtgggaaggccttctccatgagcacccagctgaccatccaccagagggtgcacactggagagcggccctacaagtgcaatgaatgtgggaaggccttcagccagaacagcaccctcttccagcaccagatcatccacgccggcgtgaagccctatgagtgcagtgaatgtgggaaggccttcagccgcagcagctacctgattgagcaccagaggatccacacccgggcccagtggttctatgaatatggaaatgccctggagggcagcacctttgtgtccaggaagaaggtgaacaccatcaagaagctgcaccagtgtgaggactgtgagaagatcttccgctggaggagccacctgatcatccaccagaggatccacactggagagaagccctacaagtgcaatgactgtgggaaggccttcaacagaagcagccggctgacccagcaccagaagatccacatgggctag

SEQ ID NO: 290443 - DNA, 1773 bp, Artificial Sequence
  derived and/or modified sequence
atggacatcctgaagagcgagagctacggcaccgtggtgcggatctctcctcaggatttccctcaaaatcccgggttcggcgatgtttccgactcggaagtctggctcgatagccacctgggtagtcccggtttaaaagtcaccggcttcacattccagaacaactgtctcaatgaggagacagtcgtccctaaaactttcaccaaggacgctccccagggatgtaaagagcttggctctagcggattagactgccagccgttagaatcccaaggcgagtccgctgaaggaatgtcgcaaaggtgcgaggaatgcggaaaagggatccgtgctacatcagacatcgccctgcattgggaaattaacacgcaaaaaatctcccgctgtcaggaatgccagaagaaactttcagattgcctgcagggcaagcacaccaacaactgccacggggagaaaccttacgaatgcgctgaatgtgggaaggtcttccgactgtgctcacaactgaatcaacatcagcgcattcatacgggggagaagccgttcaaatgtaccgaatgcggcaaggcttttcgcctctccagcaagctgatccagcatcaaaggatccataccggtgagaaaccataccgctgtgaagaatgtggcaaagcgttcgggcagtcatcaagcctgattcaccaccagcgcatacatacgggggaaagaccttatgggtgccgggagtgcggcaaagcattctcccagcagagtcagttggtaaggcaccagaggacacatacgggggagaggccttacccttgcaaagagtgtggtaaagcattcagccagtcatcaactctcgcccagcaccaacggatgcacaccggcgagaaagcgcagatccttaaggcctccgacagcccctcactcgtggcccaccagcggatccatgccgtggaaaaacccttcaaatgcgacgagtgtgggaaagcttttcgctggatttcacgactcagccagcaccagctgatccacaccggcgagaagccatataaatgcaataaatgcaccaaggccttcggatgtagttcacggctcatacggcaccagagaacgcacacaggcgagaagccattcaaatgcgatgagtgtggtaagggcttcgtgcaggggagtcatctcatccagcaccagaggatccataccggcgagaaaccttatgtgtgtaatgattgtggaaaagccttttcccagtcaagctcactgatctatcaccaacgaattcacaagggcgagaagccctatgagtgcctgcagtgtggcaaggcgttcagtatgtctactcagctgactattcatcaacgcgtccatacaggcgagaggccttacaagtgcaacgagtgtgggaaggcttttagtcagaacagtacactatttcagcaccagatcattcacgccggggtgaaaccttacgaatgcagtgagtgtggaaaggcattctccagaagttcttacttgatcgaacaccagcgcattcacaccagagctcagtggttttacgaatatggtaacgccctggaaggttccaccttcgtttcgcgtaaaaaagttaatactattaagaagctgcatcagtgtgaagactgtgagaagatctttagatggcgcagccacctaattatacaccagcgtattcatactggagaaaagccatacaagtgtaacgactgcgggaaggcatttaatcggagctcaaggctgacccaacatcagaagatccatatggggtag

SEQ ID NO: 290444 - DNA, 1773 bp, Artificial Sequence
  derived and/or modified sequence
atggatattctaaaatcagagtcctacggaacagtcgttcgcatttcaccccaagactttcctcaaaatccaggattcggcgacgtctcggatagcgaagtgtggctggactcccacctgggatcaccgggtctgaaggtgaccggatttacatttcagaacaactgcctgaacgaggaaactgtcgtgcccaaaacctttactaaagatgcaccgcaaggttgcaaggaactcggaagctctggcctggattgccaacctctggaaagtcagggcgagtccgccgaaggtatgagccagcggtgtgaggaatgtggcaaaggtatacgagccacctccgatattgcgctccattgggagataaatacccagaagatcagccggtgtcaggagtgccagaaaaagctgagtgattgcctgcagggcaaacacactaacaattgtcacggcgagaaaccatacgagtgtgccgagtgcgggaaggtctttaggctctgctcccagctgaaccagcatcaaagaattcacacgggggaaaaaccattcaagtgcacggagtgtggaaaagccttcagattatcttccaaattgattcagcatcagaggatacataccggagaaaagccgtacagatgtgaagaatgcggcaaggctttcggccagtcctccagtctcatccatcatcagcgcatccatactggcgaaagaccctatggatgcagggaatgtggaaaggccttttcgcagcagtctcagttggtaagacatcaaagaacacatactggcgaacgcccttatccttgcaaggaatgcggcaaggctttcagtcagagcagtactctggcacagcaccagaggatgcacactggcgagaaggcccagattctgaaagcctcagatagtcccagcctcgtggcgcatcagcgaattcacgctgtagaaaaaccatttaaatgcgatgagtgcggcaaggcgttcagatggatctctcgcctgtcccaacaccagctcatccacactggagaaaagccgtacaaatgtaacaaatgcactaaggccttcggctgctcctctcggctaatacggcaccagcgaacacataccggcgaaaagccattcaaatgtgacgaatgcgggaaaggttttgtgcagggttcccatctgattcagcatcagaggatacacaccggagaaaagccctatgtgtgcaacgattgtgggaaggcctttagtcagagctcctcacttatctaccaccaacgcatacacaaaggtgagaagccctatgagtgccttcaatgtggaaaggccttctccatgtccacacagttaaccatccaccaacgggtccacaccggtgagaggccttataagtgtaacgaatgcggaaaggccttttctcaaaacagtacactgttccagcaccagatcatccacgcgggagtgaagccctatgagtgctctgagtgcgggaaagctttctccaggtcctcctatcttatcgagcaccagaggattcacacgagagcgcaatggttttacgagtacgggaacgccttagaaggcagcacatttgtcagcagaaaaaaagtgaacacaatcaagaagctgcaccagtgtgaggattgcgagaagattttcaggtggagatcacacttaattatccaccagaggattcacactggagagaagccatacaaatgcaacgactgcggcaaggcatttaatagatcgtctcggctgactcagcaccagaaaatccacatgggctag

SEQ ID NO: 290445 - protein, 110 aa, Artificial Sequence
  derived and/or modified sequence
MITGGNLQDSKDALHLAQTNGMFFSTVGCHPTRCGEFEKNNPDLYLKELLNLAENNKGKVVAIGECGLDFDRLQFCPKDTQLKYFEKQFELSEQTKLPMFLHCRNSHAEF

SEQ ID NO: 290446 - protein, 195 aa, Artificial Sequence
  derived and/or modified sequence
MPVPLTSRHEVVPALDAGSSDSSSRQHRPGHDAVGEVEAWHRNCIAYTSPWSPCSTSCGLGVSTRISNVNAQCWPEQESRLCNLRPCDVDIHTLIKAGKKCLAVYQPEASMNFTLAGCISTRSYQPKYCGVCMDNRCCIPYKSKTIDVSFQCPDGLGFSRQVLWINACFCNLSCRNPNDIFADLESYPDFSEIAN

SEQ ID NO: 290447 - protein, 473 aa, Artificial Sequence
  derived and/or modified sequence
MLRPVIEEEISMLGEITHLQTISEDLKSLTMDPHKLPSSSEQVILDLKGSDYSWSYQTPPSSPSTTMSRKSSVCSSLNSVNSSDSRSSGSHSHSPSSHYRYRSSNLAQQAPVRLSSVSSHDSGFISQDAFQSKSPSPMPPEAPNQRRKEKREPDPNGGGPTTASGPPAAAEEAQRPRSMTVSAATRPGEEMEACEELALALSRGLQLDTQRSSRDSLQCSSGYSTQTTTPCCSEDTIPSQVSDYDYFSVSGDQEADQQEFDKSSTIPRNSDISQSYRRMFQAKRPASTAGLPTTLGPAMVTPGVATIRRTPSTKPSVRRGTIGAGPIPIKTPVIPVKTPTVPDLPGVLPAPPDGPEERGEHSPESPSVGEGPQGVTSMPSSMWSGQASVNPPLPGPKPSIPEEHRQAIPESEAEDQEREPPSATVSPGQIPESDPADLSPRDTPQGEDMLNAIRRGVKLKKTTTNDRSAPRFS

SEQ ID NO: 290448 - DNA, 4758 bp, Artificial Sequence
  derived and/or modified sequence
ccccgggagcccagccagagcgagcgccggggccgggcgcgcaggagtgaaaaggaggcggcggccgcagctgcgagcaacagatccggacgccgcgagctgacccgctctgctgttgggcgatttttttttaattgcagaaaaatttattaaattggaaaatcttgcgtttttcaatggcgctggccccgggtcagcgggcgattttctctgcatcaagatgggctttgccgtttccgtagtgggcaccagtggtggcctgattgtcagtcttctcccggcatttttaaggccaggagccgagcgctgcttgtaggcgaataccctacagagcggtttggctttttaaattactgttattattttgggcagagaacagtcggtctggtgcaccccgtcctcgctgcagaagaggctgcgagtccgaggtgggtctctcggaaggtgaaattccttctggggtgagcgagccccggccccgcgcgcagtccagcggccccgcgtgtgtgccctcgccctgccggagccgggaaaatggaggctgtgattgagaaggaatgcagcgcgctcggaggcctcttccagaccatcatcagcgacatgaaggggagctatccagtttgggaagatttcataaacaaagcaggaaagctgcagtcccagcttcggacaacagtagtagcagcagctgccttcttggacgcctttcagaaagtggctgacatggccaccaacacacgtggtgggaccagggagattggatctgctctcaccaggatgtgcatgaggcacagaagcattgaagccaagctgaggcagttttcgagcgctttaattgattgtctgataaacccacttcaagaacagatggaagaatggaagaaagtggccaaccagctggataaagaccacgcaaaagaatataagaaagcccgccaagagataaaaaagaagtcctcggatacgctgaaactgcagaagaaagcaaaaaaagggagaggtgatatccagcctcagttggacagtgctctccaagatgtcaatgataagtatctcttattggaagaaacagaaaagcaggctgtccggaaggctttgattgaagaacgtggccgattctgtaccttcatctctatgctgcggccagtgattgaagaagaaatctcaatgctaggggaaataacccaccttcagaccatctcggaagatctaaaaagcctgaccatggaccctcacaaactgccctcctcaagtgaacaggtgattctggacttgaaaggttctgattacagctggtcgtatcagacgccaccctcttcccccagcaccaccatgtccagaaagtccagtgtctgcagcagcctgaacagtgtcaacagcagtgactcccggtccagcggctcccactcgcattcccccagctcacattaccgctaccgcagctccaacctggcccagcaggctcctgtgaggctgtccagcgtgtcctcccatgactcaggattcatatcccaggatgccttccagtccaagtcaccatcccccatgccgccagaggcccccaaccagcgccgcaaagagaagcgagaaccggaccccaacgggggaggacccactaccgccagcggcccacctgcagcagctgaggaggctcagagaccacggagcatgactgtatcggctgccaccaggcctggtgaggagatggaggcttgtgaggagctggccctggccctgtctcggggcctgcagctggacacccagaggagcagccgggactcgcttcagtgctccagcggctacagcacccagacaaccaccccctgctgctctgaggacaccatcccttcccaagtttcagattatgattatttctctgtaagtggtgaccaggaggcagatcagcaggagttcgacaagtcctccaccattccaagaaacagcgacatcagccagtcctaccgacggatgttccaagccaagcgtccagcctcaactgctggcctccccaccaccctgggacctgctatggtcactccaggggttgcaactatccgacggaccccttccaccaagccttctgtccgccggggaaccattggagctggtcccatccccatcaagacacccgtgatccctgtcaagaccccaaccgtcccagacctcccaggggtgttgccagcccctccagatgggccagaagagcggggggagcacagccctgagtcgccatctgtgggtgagggcccccaaggtgtcaccagcatgccctcctcaatgtggagcggccaagcttccgttaaccctccacttccaggcccgaagcccagtatccctgaggagcacagacaggcaattccagaaagtgaagctgaagaccaggaacgggaacccccaagtgccactgtctccccaggccagattccagagagtgaccctgcagacctgagcccaagggatactccacaaggagaagacatgctgaacgccatccgaaggggcgtgaaactgaagaagaccacgacaaacgatcgctcagcccctcgcttttcttaggttcacaagaaatgcgccggtggggaatgaactgtttcattaataaaacctaatttgtcttgatccattccactctataataaaacaaaagattttgtaggcaactcggaatatagctcttttgaaagtactcgacacctttagataagaattaaaaccaacctatgtaactgacataatcttgatcttttaatttgtaaatattgacaattttctttctgcacattttaatcttagtttcccttttgatttttctgaaggtgccaaattccatttaacttttttacaagtctttgtaaaattttaaatgcataaagggggttggggcaggggaaccacgaagtagttaattttagaaaaggatttactatacttcactcttctttttttttccccacaagcttttgtagatgcattgtagtagtctagcttagaagcaaatgcaagttattttaatgtacaaactaaatgggtaagaggtaaaatcttcatttaaatatactatgttctggatgaaaagagcaggagtaacaattgatgagcaatattcagagtgaagtaaatctggaaatggtagactgtgttgggattggggggagggccatgggaggggtacatcgtcaacatagccgatcctgttacatttaagagtagcctcgtaggttgaatttcttctggtagcttcatggtaaatgcatccgaataagccatactggattgcagtgtttgtttctgtagggtgtttaaggacttgacttcctttctcccatgattcctctggactgcacacagcacccacaaccagccccatgcatgctgctgcctctgggcagtcgtagaatctcccacttcagtttctcgttgattgtactcacctttatggaatccaaatacatccaaaagggtaaggcagttttaaaaatgtgaaaacatttaaaaatgataatagcagggaattcttagattatagtaaatgccttttacttaactgtgcccagcaggctgggtgcgttaaaaagcccaagtattttgaaaaaactcgaacagatttgacaagggtagccagcttggagtctagcaacttgccaatgtgtttaccaatctgggggcttgtttttcttttcttctttcaaataaatggcagttaactggctttacagtaaacattgaagagaggaggatttgtttattgtcactgggaatctgaccactatactgtcctttttttgtattctgggtaaatgttttttggaaaagatttgtcttttctaagtggaagttaaatttgttatactgcccatcccctaaagccaacagagatttgtagatttaaagggatcacatttgaagacaatagtgtttaagaaagcaagcaagtcccttagcagtcaggtcataacagggcacatttctgaccgaaccctctcaaggcagaggaggagtttggtgggtttcatacaccctgcagattcctgttggctctaaccctcaattacctaatcttatgctttaacacataactgcattggatgtgagagtaacgtaccgtatggtcattgttctatatattaacattgaacactgctgcgattgctcaaggacattttatgttacggctttaaagcaaaggcatgattattagaaactatttaagcttttttctttgaaaaacaagctccttttacagaatataaacaacagtagtgcctgtggtttagcccaccaatcttgatgactaaaagtagctgatgcattgtgcatatgatgcttgagatggtttttgcaaaagcagaaatcgctgcaaggtaatcacaatagataaaagtggtattttaaacctttgaaataaatggatgtaactgtaccttggtacagcttttcacttgtttagtttttaaacgttagtataatctgaataaataaaatgttgccaaattcaatgtagaaagaatgtgacaacacaccttgggtagttctgcttgtgtttttgcatattgtaaaagcagtgtcacagctaaaaagaaagaaatcgtttctaacagtaaattattgtgctttagttgctagtttgtactgagagttgacctctccctgtgcagttttttgttctaaacttgtataaataacaattgtgtaatgtgtctccctcctacattgtaacaattgcttcagcctacgttataaataaagaaccactagatt

SEQ ID NO: 290449 - protein, 182 aa, Artificial Sequence
  derived and/or modified sequence
MPPGGGGEVVFSCPVRKVLKPIQLTDPGKIKRIRGMAYSVRVSPQMANRIVDSARSILNKFIPDIYIYTDHMKGVNSGKSPGFGLSLVAETTSGTFLSAELASNPQGQGAAVLPEDLGRNCARLLLEEIYRGGCVDSTNQSLALLLMTLGQQDVSKVLLGPLSPYTIEFLRHLKSFFQIMFK

SEQ ID NO: 290450 - DNA, 956 bp, Artificial Sequence
  derived and/or modified sequence
ccgagccgccgccgtcggtgtcgccgccaccaccaccatcggagtcacgagtcccgcgtctgtccgaagtcgccgctctcgggctgctcacgtctcttcggagagcgcgcacatggcgactcaggcgcactccctcagctacgcagggtgcaacttcttgcgccaacgtctggtcctgtctaccctgagcgggcgccccgtcaaaatccgaaagattcgggccagagacgacaacccgggcctccgagattttgaagccagcttcataaggctattggacaaaataacgaatggttctcgaattgaaataaaccaaacaggttgatgttcttaaggcaacagcactccctttgttgaaacaatttgggattgatggtgaatcatttgaactgaagattgtgcgacggggaatgcctcccggaggaggaggcgaagtggttttctcatgtcctgtgaggaaggtcttgaagcccattcaactcacagatccaggaaaaatcaaacgtattagaggaatggcgtactctgtacgtgtgtcacctcagatggcgaaccggattgtggattctgcaaggagcatcctcaacaagttcatacctgatatctatatttacacagatcacatgaaaggagtcaactctgggaagtctccgggctttgggttgtcactggttgctgagaccaccagtggcaccttcctcagtgctgaactggcctccaacccccagggccagggagcagcagtacttccagaggaccttggcaggaactgtgcccggctgctgctggaggaaatctacaggggtggatgcgtagactcgaccaaccaaagcctggcgctactactcatgacccttggacagcaggatgtttccaaagtcctgctaggccctctctctccctacacgatagaatttttgcggcatttgaagagctttttccagattatgtttaaa

SEQ ID NO: 290451 - DNA, 2944 bp, Artificial Sequence
  derived and/or modified sequence
agactgaagccagtggcgctgcgctgaatgcaactgcgcgcgcccgccgggtgagccagcgatctgagccaggcgggggcggcccgacctttcccgcccagcctgggtcagaggaagccgaaagcggcctcagcaaggtgaggcgcccgaggctgcagaagaccgagcagaactttgcagagttcgggatgtgctgggctaggtcgctgaggacttgactggcttcctccctccttccctccacctaccttctccctccccctccaccatccagtgggttcgttccgggcctccagctatcagctcccgatctcgtgtttgagggtagcgaccccgatttctgtttgcatgcacagccagcagccctagcgccagatcctaaagctggatatcttttaactgggctaccagcccgggcctcaaagttttgagtgagggccgccaggctcaggccccagcgaagccccgagcgccatggccgacccgcaggctggctccgcggccggggactgggagatcgatgtcgagagcctggagctggaagaggacgtctgcggggcgccgcggtccacgccccccgggcccagcccgccgccggcggacggggactgcgaggacgacgaagatgacgacggggtggacgaagacgcggaagaagagggcgacggcgaggaggcaggcgcgtcccccgggatgcccggccagccggagcagcgggggggaccgcagccgaggccgccgctcgcgcctcaggcctcacccgccggcaccggtccccgagagcgctgcactcccgcgggcggcggcgcggagccgcgcaagctgagccgcacgcccaagtgcgcgcgctgccgcaaccacggcgtggtgtcctgcctgaagggccacaagcgcttctgtcgctggcgcgactgccagtgcgccaactgcctgctggtggtggagcggcagcgcgtcatggccgcccaggtggcgctccggaggcagcaggccaccgaggacaagaaggggctttccgggaaacagaataatttcgagcgcaaagctgtgtaccagaggcaagtcagagcccccagtttgctggccaaaagcattttagaagttctccttggattattctacagctattatgtgtacataatgaaccatctttagaaaataaaagtgacatcagctctaggtatagatatattttttaataatgaaaaaagatgacatggataataataaaacattgattgatacaagataaatagtcttgtctcttaatgcgtagggggcctgggaagaatattaaaattttaatcaataaagtatgtctgttgaagcaagcaagcaaacaaatccataacaaccacaacaagcaacaagaacaagaacaacaacaagaagaagttgcagtatggatatctttcaccctcccaggaaactctttcaaacctaatctgtacttttgcatctgtataaaaatatcagtgagatggaactgtaaataattgttctgctgatctgtagtgttgctgttaccttctgggtttccacatttttattccgtagatgttaatctctttcatgtgcaatctttgcttcttgtaggctatcgccccattccagcggagacttatgtaggagggaccttccctctacctcccccagttagtgacaggatgaggaaaagaagagcctttgctgataaagagttggagaacattatgctggagagagaatataaagaaagggagatgttggaaacttctcaagctgctgctctgtttctgcccaaccgcatggtgcctggacctgactacaattcctacaaaagtgcctacagccccagcccagtggaaccaccaagcaaggacttctgtaattttttgcccacctgccttgatttaaccatgcagtattcagggtctgggaatatggaactaatttcttctaatgtcagcgtggccacaacttatagacagtatcccttgtcctcaagatttttagtttggcccaagtgtggccccattagcgacaccctcctctaccagcaatgcctgctaaatgccaccacctcagttcaagccctgaagcctggggccagctgggacttgaagggagcacgagtccaggatggactcagtgcagagcaggacatgatgccatcgaaattggaaggttccctggtgctgcctcacactcctgagatccagaccacgagaagtgaccttcagggtcatcaggctgtcccagagaggtccgcgttctccccaccccgacggaatttctctcccattgttgacacggactccctggcagctcaagggcatgtcttaacgaagatcagcaaagaaaacaccaggcaccctctgccacttagacataatccattccactcattattccagcaaacacttactgacaaatcgggtcctgagttgaaaacaccatttgtcaaagaggcctttgaagagacccctaagaaacacagagagtgtttagttaaggacaaccagaagtacacatttacaatagatagatgtgcaaaagacctttttgtagccaaacaagttggaacaaaactctcggtgaatgaaccactgtcattttctgttgagtctattcttaagaggccttcatctgccatcactcgtgtctctcagtgaaaggctgcttaaacagaaagctggattttctgcagtcttagagcattatagccatttgctactttttttaaaagttaagatgtttgtgtaaagaaatttctaatgtaaagatgatgattttgaaaaattttatatattcctaatatgcatgtactttttcttatcacatatatttaaacttacagatggaaattgcccaatgtgcaaattgttaagtaccacactttacacagcatttcaaaaagcaataaaattgacactgtcttctcaaagacccaataaaaaaaaaa

SEQ ID NO: 290452 - DNA, 2459 bp, Artificial Sequence
  derived and/or modified sequence
atggccgacccgcaggctggctccgcggccggggactgggagatcgatgtcgagagcctggagctggaagaggacgtctgcggggcgccgcggtccacgccccccgggcccagcccgccgccggcggacggggactgcgaggacgacgaagatgacgacggggtggacgaagacgcggaagaagagggcgacggcgaggaggcaggcgcgtcccccgggatgcccggccagccggagcagcgggggggaccgcagccgaggccgccgctcgcgcctcaggcctcacccgccggcaccggtccccgagagcgctgcactcccgcgggcggcggcgcggagccgcgcaagctgagccgcacgcccaagtgcgcgcgctgccgcaaccacggcgtggtgtcctgcctgaagggccacaagcgcttctgtcgctggcgcgactgccagtgcgccaactgcctgctggtggtggagcggcagcgcgtcatggccgcccaggtggcgctccggaggcagcaggccaccgaggacaagaaggggctttccgggaaacagaataatttcgagcgcaaagctgtgtaccagaggcaagtcagagcccccagtttgctggccaaaagcattttagaagttctccttggattattctacagctattatgtgtacataatgaaccatctttagaaaataaaagtgacatcagctctaggtatagatatattttttaataatgaaaaaagatgacatggataataataaaacattgattgatacaagataaatagtcttgtctcttaatgcgtagggggcctgggaagaatattaaaattttaatcaataaagtatgtctgttgaagcaagcaagcaaacaaatccataacaaccacaacaagcaacaagaacaagaacaacaacaagaagaagttgcagtatggatatctttcaccctcccaggaaactctttcaaacctaatctgtacttttgcatctgtataaaaatatcagtgagatggaactgtaaataattgttctgctgatctgtagtgttgctgttaccttctgggtttccacatttttattccgtagatgttaatctctttcatgtgcaatctttgcttcttgtaggctatcgccccattccagcggagacttatgtaggagggaccttccctctacctcccccagttagtgacaggatgaggaaaagaagagcctttgctgataaagagttggagaacattatgctggagagagaatataaagaaagggagatgttggaaacttctcaagctgctgctctgtttctgcccaaccgcatggtgcctggacctgactacaattcctacaaaagtgcctacagccccagcccagtggaaccaccaagcaaggacttctgtaattttttgcccacctgccttgatttaaccatgcagtattcagggtctgggaatatggaactaatttcttctaatgtcagcgtggccacaacttatagacagtatcccttgtcctcaagatttttagtttggcccaagtgtggccccattagcgacaccctcctctaccagcaatgcctgctaaatgccaccacctcagttcaagccctgaagcctggggccagctgggacttgaagggagcacgagtccaggatggactcagtgcagagcaggacatgatgccatcgaaattggaaggttccctggtgctgcctcacactcctgagatccagaccacgagaagtgaccttcagggtcatcaggctgtcccagagaggtccgcgttctccccaccccgacggaatttctctcccattgttgacacggactccctggcagctcaagggcatgtcttaacgaagatcagcaaagaaaacaccaggcaccctctgccacttagacataatccattccactcattattccagcaaacacttactgacaaatcgggtcctgagttgaaaacaccatttgtcaaagaggcctttgaagagacccctaagaaacacagagagtgtttagttaaggacaaccagaagtacacatttacaatagatagatgtgcaaaagacctttttgtagccaaacaagttggaacaaaactctcggtgaatgaaccactgtcattttctgttgagtctattcttaagaggccttcatctgccatcactcgtgtctctcagtgaaaggctgcttaaacagaaagctggattttctgcagtcttagagcattatagccatttgctactttttttaaaagttaagatgtttgtgtaaagaaatttctaatgtaaagatgatgattttgaaaaattttatatattcctaatatgcatgtactttttcttatcacatatatttaaacttacagatggaaattgcccaatgtgcaaattgttaagtaccacactttacacagcatttcaaaaagcaataaaattgacactgtcttctcaaagacccaa

SEQ ID NO: 290453 - DNA, 1779 bp, Artificial Sequence
  derived and/or modified sequence
atgctggatgagtccttggcagtcaggaggtccaaaaaatgcaaagaaatgataatgcactgggagaagaaagaagatattgacatcgtgaacacagtagaccaattggacaaaacagctcctcgtatcacactcttgcattccccttctcaagtggggctcctgaaaaatggctgctacgggatttacatcacttcccgcgtgttgaaggcatcagaccctgacactgaggacgatcagatcatctttaaaattctacaaggcccaaaacatggacatctggagaacacaacaacaggtgaatttatccatgagaaatttagccaaaaggacttaaacagtaagactattctttacatcataaacccatctttggaagtaaattcagataccgtggaatttcaaatcatggaccccacagggaactcggccactcctcaaattttggaactgaagtggtctcatattgaatggtcacagaccgaatatgaagtctgtgagaatgtgggtttgttgcccttggaaattatcagaaggggatattccatggactcggcctttgtgggtataaaggtcaaccaagtgtcagctgcagttggaaaagatttcaccgtgattccatctaaactgattcagtttgacccaggaatgtcaactaagatgtggaatatagcaattacctatgacggattagaggaagatgatgaggtctttgaagtaattctgaactcccctgtgaatgcagttcttggcacaaagacaaaagctgcagtgaaaattttggactcaaaaggaggacaatgccatccttcatattcctccaaccaaagcaagcacagcacatgggagaagggcatttggcatctgctgcccccagggtcttcctcatccaccacttctggttcctttcatctggaaagaagacctcttccatcttccatgcagctagcagtcatcaggggagacaccctgcggggctttgattctacagatctttctcaaaggaagcttaggacccgtgggaatggcaaaacagttcgtccatcctctgtttatagaaatggaacagacatcatctataattatcatgggatagtttccttgaaactggaggatgacagtttcccaactcacaaaaggaaggccaaagtatccatcattagtcagccacaaaagacaatcaaagtggcagaactgcctcaagcagataaggtggaatccacaactgactcacacttccccagacaggaccagttgccctcatttccaaagaactgcactctggaattaaagggactcttccattttgaagaaggcatccagaagctgtatcagtgcaatgggatcgcctggaaagcctggagtccccaaaccaaggatgtggaagacaaatcctgtccagccgggtggcaccagcactcaggctactgtcacatcttgatcacagagcagaaaggcacctggaatgcggctgcccaagcttgcagggaacaatacctgggcaaccttgtaactgtattctccaggcagcacatgcggtggctctgggacattggtgggagaaagtccttttggataggtttgaacgaccaagtgcatgctggccactgggagtggatcggtggtgaacctgttgccttcaccaatgggagaagagggccctctcaacgctccaagcttggaaagagctgtgttttggttcaaagacaagggaaatggcaaacaaaagactgtaggagagccaaacctcataattatgtgtgttccagaaaactctaa

SEQ ID NO: 290454 - DNA, 648 bp, Artificial Sequence
  derived and/or modified sequence
atgctcgatgagtccttggctgttcggcgcagtaaaaaatgcaaagagatgatcatgcattgggagaagaaggaggatatcgatattgtgaataccgtggatcagctggataagacagcaccaaggatcacgctcttgcacagcccatcacaggtgggcctgctcaagaacggctgttacggcatttatatcactagtcgtgtgctgaaagcctctgatccagacacagaggatgatcagattatattcaagatcctacaaggaccaaagcatgggcaccttgagaacaccactacaggagagtttattcacgaaaagttttctcagaaggatctaaacagcaaaacaattctgtacattattaatcccagcctggaagttaattcagatactgtcgaatttcagattatggatccaaccgggaatagcgccaccccgcagatcctggaactgaagtggtcccacatagaatggagtcagacagaatatgaggtgtgtgagaatgtcggtctcctcccccttgagataattcgccggggatattcaatggatagtgcctttgtcggaatcaaggtaaaccaggtgtcagcagccgtgggcaaagatttcactgttatcccgagtaaactaatccagttcgatccgtag

SEQ ID NO: 290455 - DNA, 2148 bp, Artificial Sequence
  derived and/or modified sequence
atggtgacccaggagtctatgctgaaggccgccttacctctgttcaccaggttcatcatatccaatggcttgaggaccgagcatggcgttttcgagataacacttgagaccgtggatcgagcactgcctgtggtgaccagaaacaaggggctacgcctggcacagggcgctgtcggcctgttgagcccagacctcctgcaattaaccgatccggacactccagccgagaatctgaccttcctgctggtacagctcccacagcatgggcagctgtacctgtgggggactgggctccttcaacacaattttacacagcaagacgtcgactcaaagaatgttgcctaccggcattccggcggcgattcccagactgattgcttcacttttatggcgaccgacggtaccaaccaaggatttatagtcaatggccgagtgtgggaggagcccgtactgtttacaatccaggtcgaccagctcgataaaaccgctcctcgtataacactgctccacagcccttcccaagtcggtttacttaaaaacgggtgttacgggatttatattacaagccgtgttcttaaagcctcagaccccgacactgaggatgatcagattattttcaaaatactgcaggggccaaagcacggccatcttgaaaacaccaccaccggagaattcatccatgagaagtttagccagaaagatcttaattccaagacaatcctgtatattattaacccaagtctggaggttaattccgacaccgtggaattccaaatcatggaccctactggaaattccgctacgccccagattctggagcttaagtggagccacattgaatggtcccagacggaatatgaagtctgtgaaaacgtggggcttctgccattagaaatcattcggaggggttattctatggactcagccttcgtgggtataaaggtcaatcaagtcagtgctgccgtgggcaaagatttcactgttattcccagcaagttgatacaattcgaccccggcatgagtaccaagatgtggaatattgctatcacgtacgatggactagaagaagacgacgaggtatttgaggttatcctgaatagtcccgtgaatgctgtgttaggtaccaagactaaagccgctgtgaaaatattggattcaaagggtggacaatgccacccgtcgtactcctcgaaccaaagcaaacactctacctgggagaaaggcatttggcacctactcccaccgggcagttcatcatcaacaacctcaggaagcttccaccttgaaagacggcccctccctagcagtatgcagctggcagtgattagaggtgacacactacggggatttgactctacagatttgagccagaggaagttgaggacccgcggaaacggtaagacggtgagaccctctagcgtctaccggaacggcaccgacataatctacaattaccatgggatcgtttccctcaagctcgaggatgatagttttcctacgcacaaaagaaaagctaaggtgtccatcatatcacagcctcaaaaaacaattaaggttgccgaactgcctcaggctgacaaagtggagagcactacagatagccattttccacggcaggaccagctgccctcgtttcctaaaaactgtacacttgagctcaagggtctcttccacttcgaagaaggcatacagaaactttatcagtgtaacggcatcgcttggaaggcttggtccccgcagacaaaagatgtggaagacaaaagctgtcctgccgggtggcaccagcacagtggctactgccacatactgatcactgagcagaaaggaacttggaatgcagctgcccaagcttgccgggaacaatatcttggcaatctcgtcaccgttttctctcggcaacatatgaggtggctgtgggatatcggtggaagaaagtcattctggatagggctcaatgatcaggtccacgccggacattgggaatggattggaggagagcccgttgctttcaccaatggccgacggggcccttcacagcgcagcaagttggggaagtcgtgtgtgcttgtgcagagacagggaaagtggcagactaaagattgtcgccgcgctaaacctcacaattacgtctgttctcgcaagctgtag

SEQ ID NO: 290456 - DNA, 648 bp, Artificial Sequence
  derived and/or modified sequence
atgctggatgagagcctggccgtgagaagaagcaagaagtgcaaggagatgatcatgcactgggagaagaaggaggacattgatattgtgaacacagtggaccagctggacaagacagccccccgcatcaccctgctgcacagccccagccaggtgggcctgctgaagaatggctgctacggcatctacatcaccagccgggtgctgaaggccagtgaccctgacacagaagatgaccagatcatcttcaagatcctgcagggccccaagcacggccacctggagaacaccaccactggagagttcatccacgagaagttcagccagaaggacctgaacagcaagaccatcctgtacatcatcaaccccagcctggaggtgaacagcgacacagtggagttccagatcatggaccccaccggcaacagcgccaccccccagatcctggagctgaagtggagccacatcgagtggagccagacagaatatgaggtgtgtgaaaatgtgggcctgctgcccctggagatcatccggcggggctacagcatggattctgcctttgtgggcatcaaggtgaaccaggtgtctgctgctgtgggcaaggacttcaccgtcatccccagcaagctgatccagtttgacccctag

SEQ ID NO: 290457 - DNA, 2148 bp, Artificial Sequence
  derived and/or modified sequence
atggtgacccaggagagcatgctgaaggccgccctgcccctcttcacccgcttcatcatcagcaatggcctgaggacagagcacggcgtgtttgagatcaccctggagaccgtggaccgggccctgcctgtggtgaccagaaataaaggcctgcggctggcccagggcgctgtgggcctgctgagcccagacctgctgcagctgacagatcctgacaccccagctgagaacctgaccttcctgctggtgcagctgccccagcacggccagctgtacctgtggggcaccggcctgctgcagcacaacttcacccagcaggatgtggacagcaagaatgtggcctaccgccacagcggcggggacagccagacagactgcttcaccttcatggccacagatggcaccaaccagggcttcatcgtgaatggccgggtgtgggaggagcctgtgctcttcaccatccaggtggaccagctggacaagacagccccccgcatcaccctgctgcacagccccagccaggtgggcctgctgaagaatggctgctacggcatctacatcaccagccgggtgctgaaggccagtgaccctgacacagaagatgaccagatcatcttcaagatcctgcagggccccaagcacggccacctggagaacaccaccaccggggagttcatccacgagaagttcagccagaaggacctgaacagcaagaccatcctgtacatcatcaaccccagcctggaggtgaacagcgacacagtggagttccagatcatggaccccactggaaacagcgccaccccccagatcctggagctgaagtggagccacatcgagtggagccagacagaatatgaggtgtgtgaaaatgtgggcctgctgcccctggagatcatcagaagaggctacagcatggacagcgcctttgtgggcatcaaggtgaaccaggtgtctgctgctgtgggcaaggacttcaccgtcatccccagcaagctgatccagtttgaccccggcatgagcaccaagatgtggaacatcgccatcacctatgatggcctggaggaggatgatgaggtgtttgaagtcatcctgaacagccctgtgaatgctgtgctgggcaccaagaccaaggctgctgtgaagatcctggacagcaaaggaggccagtgccaccccagctacagcagcaaccagagcaagcacagcacctgggagaagggcatctggcacctgctgcccccaggcagcagcagcagcaccaccagcggcagcttccacctggagcggcggcccctgcccagctccatgcagctggccgtcatccggggggacaccctgcggggctttgacagcacagacctgagccagaggaagctgcggaccagaggaaatggcaagacagtgcggcccagctctgtgtacagaaatggaacagacatcatctacaactaccacggcatcgtgtccctgaagctggaggatgacagcttccccacccacaagaggaaggccaaggtgtccatcatcagccagccccagaagaccatcaaggtggccgagctgccccaggccgacaaggtggagagcaccacagacagccacttcccccggcaggaccagctgcccagcttccccaagaactgcaccctggagctgaagggcctcttccactttgaggagggcatccagaagctgtaccagtgcaatggcatcgcctggaaggcctggagcccccagaccaaggatgtggaggacaagagctgcccagctggctggcaccagcacagcggctactgccacatcctgatcacagagcagaagggcacctggaatgctgctgcccaggcctgccgggagcagtacctgggcaacctggtgaccgtcttcagccggcagcacatgcgctggctgtgggacattggaggcaggaagagcttctggattggcctgaatgaccaggtgcatgctggccactgggagtggattggaggagagcctgtggccttcaccaacggccggcggggccccagccagaggagcaagctgggcaagagctgtgtgctggtgcagaggcagggcaagtggcagaccaaggactgccggcgggccaagccccacaactacgtgtgcagcaggaagctgtag

SEQ ID NO: 290458 - DNA, 648 bp, Artificial Sequence
  derived and/or modified sequence
atgctggacgagagcctggccgtgcggcggagcaagaagtgcaaggagatgatcatgcactgggagaaaaaggaagacatagatatcgtgaacacggtagaccagctggataaaactgcgcctaggattactctgctgcactctccatcgcaggtagggcttttgaaaaacggctgctatgggatctatatcacttctcgcgtactgaaggcctctgacccggacaccgaagatgaccaaataatattcaagatcctccaggggccgaaacacggacacctggagaacacgacaacaggcgaatttatccatgagaaattttcccaaaaagacttgaattcgaagaccatactgtacatcataaatccgagcctggaagtgaactctgataccgtggagttccagataatggatcctactggaaactctgcaaccccccaaatattggaacttaaatggtcgcacatcgagtggagtcaaaccgagtatgaggtttgtgagaacgtcggcctcctgcccctggagattatccggcgaggatacagtatggatagtgcattcgtgggaatcaaggtcaaccaggtgtctgccgctgtcggtaaagacttcacagtcatcccatcaaaactcatacagttcgatccatag

SEQ ID NO: 290459 - DNA, 2148 bp, Artificial Sequence
  derived and/or modified sequence
atggtgacccaggagagcatgctgaaggccgccctgcccctgttcactaggtttattatttctaatgggctgaggaccgagcatggggtcttcgagattaccctggagacggtggatagagcccttcctgttgtgaccaggaacaagggcctacgcctggcccaaggcgccgtgggcctgctgagcccggaccttctgcagctcacagatccagacactcctgcagaaaatcttacatttttacttgtgcagttgccacagcatggacagctctatctgtggggaacggggctgttgcaacacaacttcacgcagcaagacgttgactccaagaatgtcgcttataggcacagtgggggcgatagccagaccgactgcttcaccttcatggccaccgatggcaccaatcaggggtttatcgtaaacgggcgcgtttgggaagagccggtgctatttacaattcaagtggatcagctcgacaaaaccgctccccggatcacactcctgcactcccctagccaggtgggtttactgaagaacgggtgctatgggatatatattacatctagggttctcaaggcttccgatccagatacagaggatgaccaaatcatcttcaaaatactgcagggaccaaagcacggacaccttgaaaacacaactacaggagagtttatccatgagaagtttagccagaaggatctcaattcaaaaaccatcctgtatattataaatcccagcttggaggtcaattctgatactgtcgaattccaaattatggaccctacaggaaacagcgccactccccagatactggagctgaaatggtctcacatcgaatggagccagacagagtatgaggtgtgcgagaacgtcggcctgttgccattggaaattattcggagggggtactctatggactccgctttcgttgggatcaaagttaatcaagtctcagcagccgtaggaaaggactttactgtaatccccagcaagttgatccagtttgatcctggcatgtccacgaagatgtggaacatcgccatcacatacgatggtcttgaagaagatgatgaggtttttgaagtgatcctgaatagccctgtgaatgccgttctcggaaccaagacaaaggccgcggtgaaaatcctggactccaagggagggcagtgccatccctcctatagttcgaaccagtcgaagcacagcacatgggaaaagggaatctggcatctgctgccaccaggcagcagttcctccacaacgagcgggagctttcatctcgagagaaggcctcttcctagtagtatgcagctggctgtgatccgaggcgatacactgagggggttcgattccaccgaccttagccagaggaaactcaggacgcgtggaaatggcaagacagtacgacccagctctgtgtatagaaatggtacggatattatttacaattatcatgggatagtgtcactcaagctggaggacgattcgttcccaacccacaagagaaaggcaaaagtttccattatatcccagccgcagaagacgatcaaggtcgcggagctgccccaggccgataaagtagagtccaccactgattcccatttcccccgccaggaccagttaccttcgtttccaaagaactgcaccttggagctgaaggggttgtttcactttgaggaaggaatccagaagctctatcagtgcaatggaatagcctggaaggcatggagcccacagacaaaggatgtagaggataagtcttgtcctgcagggtggcatcagcacagcgggtactgtcacattctcattaccgaacagaagggcacttggaacgctgctgcccaagcttgccgtgagcagtacctgggtaacctggtcaccgtgttttccaggcaacatatgaggtggctgtgggatatcggtggcagaaagtccttttggatcggacttaacgaccaggtccacgccggacattgggagtggattggaggggaacctgtcgcttttactaatggccgacgaggcccctctcagagatcaaagctggggaaatcctgtgtgctggtgcagcggcaaggaaagtggcagacaaaagactgccgcagggccaagccacacaactatgtctgctctcgtaagctgtag

SEQ ID NO: 290460 - DNA, 648 bp, Artificial Sequence
  derived and/or modified sequence
atgctggatgagagcctggctgttaggagaagtaagaaatgcaaggagatgattatgcactgggaaaaaaaggaggatatcgatatcgtcaacacagtggaccaacttgataaaacagcgcctaggatcacattactacattcaccatcccaggtaggacttctgaagaatggttgctacgggatttacatcacttcccgggtgttaaaggctagcgatccggacaccgaggatgaccagataattttcaagatccttcagggacccaagcatggccatcttgaaaacacaaccactggtgagttcattcacgaaaagttcagccagaaagacctgaatagcaagacaatcctgtatatcattaacccatccctcgaagtcaactccgacaccgtggagtttcagataatggatcccacaggcaacagtgcaaccccacaaatcttagagctgaaatggagccatatagagtggagccaaaccgaatacgaggtttgtgagaatgtgggtttacttcctttagaaatcataaggcgcggttattcgatggacagcgctttcgtggggatcaaggtgaatcaggtgtccgctgccgtaggcaaagactttaccgtgattcccagtaaattgattcagttcgatccttag

SEQ ID NO: 290461 - DNA, 2148 bp, Artificial Sequence
  derived and/or modified sequence
atggtaacccaggagagcatgctcaaggccgcactgcccttgtttactagattcataatctcaaatgggctgcggacagaacatggcgtgtttgagataaccctcgaaaccgtggacagagccctgcctgttgtcactcgcaataaaggtctcaggcttgcccagggtgccgtcgggctgctgagtccagacctgctccagttaactgatcctgatacaccagctgagaatcttacctttctgctcgtacaacttccacagcatgggcagctgtacctgtggggcaccggccttctgcagcacaactttacacagcaagacgtggacagcaaaaacgttgcttataggcactctggcggtgactctcaaactgactgctttaccttcatggcaacggacggaactaatcagggttttattgtcaatgggcgagtttgggaagaacccgtgttgtttacaattcaggtagaccaactggacaagaccgcccctagaattacactgctccattcaccctctcaggtggggttactaaagaacggctgttacggaatatacattaccagtcgagtgcttaaggcctcagacccagacacagaggatgatcaaataatctttaaaattctgcaggggccaaaacatggtcacctggagaacaccaccacgggcgaatttatccacgagaaatttagccagaaggatctgaatagcaagaccattctgtatattatcaatccctccctggaggtgaattctgatacagtggagtttcaaatcatggatcccacgggaaacagcgcaacccctcagattttggaacttaagtggtcccatattgaatggtcccagactgaatacgaggtctgcgaaaatgtgggcctgctacccctggaaattatccgtaggggttattctatggattccgccttcgtaggcataaaggtgaaccaagttagcgccgcagtgggcaaagatttcactgtgattccctctaagctgattcagtttgatcctgggatgtctaccaaaatgtggaatattgctataacctatgatgggctggaagaggacgatgaagtcttcgaagtcatcttgaattcccctgtgaacgccgttctgggcacaaagacaaaagcagccgtcaagattttagactccaagggagggcagtgccatccctcttattcatccaaccagtctaaacacagtacctgggagaagggaatctggcacctgttgccgccaggaagtagtagctccacaacctccggctcctttcatctcgaaagacgaccactaccgtctagcatgcagttagcagtgattagaggggatacactccggggattcgattccacagacctgtcacagaggaagctccgtacgaggggaaatgggaaaaccgtgagaccatcatcagtctatcgtaacgggaccgacattatttataattaccatggcatagtgagcctcaaactggaagacgacagctttcccacacataagaggaaagcaaaagtgtccatcatttcgcagccgcagaaaaccatcaaagtagcagaactacctcaagcggataaggttgagagcactacagactcccatttcccacgtcaggaccaactgcctagcttcccaaaaaactgcacactggaactgaaaggactctttcactttgaggaggggatacagaaattatatcagtgtaatgggatcgcttggaaagcttggtctccccagacaaaggacgtggaggacaagagttgccccgcaggatggcaccaacattctgggtattgtcacattttaattaccgagcagaaagggacctggaatgctgccgctcaggcttgtcgagaacagtacctggggaacttagtcaccgtgttctcacggcaacacatgcggtggctgtgggatattggaggacgcaaatctttctggatcggactgaacgatcaggtgcatgcgggacactgggagtggatcgggggagagccagttgctttcacaaacggcagacgcggaccatctcagcgctctaagcttggtaagagttgtgttttggttcagaggcagggaaagtggcagaccaaggactgtcgacgcgctaagcctcataactatgtgtgctctaggaaactgtag

SEQ ID NO: 290462 - DNA, 648 bp, Artificial Sequence
  derived and/or modified sequence
atgctggacgagagcctggccgtgagaagaagcaagaagtgcaaggagatgatcatgcactgggagaagaaggaggacatcgacatcgtgaacaccgtggaccagctggacaagaccgcccccagaatcaccctgctgcacagccccagccaggtgggcctgctgaagaacggctgctacggcatctacatcaccagcagagtgctgaaggccagcgaccccgacaccgaggacgaccagatcatcttcaagatcctgcagggccccaagcacggccacctggagaacaccaccaccggcgagttcatccacgagaagttcagccagaaggacctgaacagcaagaccatcctgtacatcatcaaccccagcctggaggtgaacagcgacaccgtggagttccagatcatggaccccaccggcaacagcgccaccccccagatcctggagctgaagtggagccacatcgagtggagccagaccgagtacgaggtgtgcgagaacgtgggcctgctgcccctggagatcatcagaagaggctacagcatggacagcgccttcgtgggcatcaaggtgaaccaggtgagcgccgccgtgggcaaggacttcaccgtgatccccagcaagctgatccagttcgacccctag

SEQ ID NO: 290463 - DNA, 2148 bp, Artificial Sequence
  derived and/or modified sequence
atggtgacccaggagagcatgctgaaggccgccctgcccctgttcaccagattcatcatcagcaacggcctgagaaccgagcacggcgtgttcgagatcaccctggagaccgtggacagagccctgcccgtggtgaccagaaacaagggcctgagactggcccagggcgccgtgggcctgctgagccccgacctgctgcagctgaccgaccccgacacccccgccgagaacctgaccttcctgctggtgcagctgccccagcacggccagctgtacctgtggggcaccggcctgctgcagcacaacttcacccagcaggacgtggacagcaagaacgtggcctacagacacagcggcggcgacagccagaccgactgcttcaccttcatggccaccgacggcaccaaccagggcttcatcgtgaacggcagagtgtgggaggagcccgtgctgttcaccatccaggtggaccagctggacaagaccgcccccagaatcaccctgctgcacagccccagccaggtgggcctgctgaagaacggctgctacggcatctacatcaccagcagagtgctgaaggccagcgaccccgacaccgaggacgaccagatcatcttcaagatcctgcagggccccaagcacggccacctggagaacaccaccaccggcgagttcatccacgagaagttcagccagaaggacctgaacagcaagaccatcctgtacatcatcaaccccagcctggaggtgaacagcgacaccgtggagttccagatcatggaccccaccggcaacagcgccaccccccagatcctggagctgaagtggagccacatcgagtggagccagaccgagtacgaggtgtgcgagaacgtgggcctgctgcccctggagatcatcagaagaggctacagcatggacagcgccttcgtgggcatcaaggtgaaccaggtgagcgccgccgtgggcaaggacttcaccgtgatccccagcaagctgatccagttcgaccccggcatgagcaccaagatgtggaacatcgccatcacctacgacggcctggaggaggacgacgaggtgttcgaggtgatcctgaacagccccgtgaacgccgtgctgggcaccaagaccaaggccgccgtgaagatcctggacagcaagggcggccagtgccaccccagctacagcagcaaccagagcaagcacagcacctgggagaagggcatctggcacctgctgccccccggcagcagcagcagcaccaccagcggcagcttccacctggagagaagacccctgcccagcagcatgcagctggccgtgatcagaggcgacaccctgagaggcttcgacagcaccgacctgagccagagaaagctgagaaccagaggcaacggcaagaccgtgagacccagcagcgtgtacagaaacggcaccgacatcatctacaactaccacggcatcgtgagcctgaagctggaggacgacagcttccccacccacaagagaaaggccaaggtgagcatcatcagccagccccagaagaccatcaaggtggccgagctgccccaggccgacaaggtggagagcaccaccgacagccacttccccagacaggaccagctgcccagcttccccaagaactgcaccctggagctgaagggcctgttccacttcgaggagggcatccagaagctgtaccagtgcaacggcatcgcctggaaggcctggagcccccagaccaaggacgtggaggacaagagctgccccgccggctggcaccagcacagcggctactgccacatcctgatcaccgagcagaagggcacctggaacgccgccgcccaggcctgcagagagcagtacctgggcaacctggtgaccgtgttcagcagacagcacatgagatggctgtgggacatcggcggcagaaagagcttctggatcggcctgaacgaccaggtgcacgccggccactgggagtggatcggcggcgagcccgtggccttcaccaacggcagaagaggccccagccagagaagcaagctgggcaagagctgcgtgctggtgcagagacagggcaagtggcagaccaaggactgcagaagagccaagccccacaactacgtgtgcagcagaaagctgtag

SEQ ID NO: 290464 - DNA, 270 bp, Artificial Sequence
  derived and/or modified sequence
atgatggttcagagactagggttaatttcgccacccgcctcccaggtaagtactgcatgtaatcagatctcacccagtctgcaacgggccatgaacgctgcaaatctaaacatacccccctctgacacccgctctttaatatcccgtgaatctcttgcctcgactactctgtctctgaccgagtcccagagcgcatcaagtatgaagcaggaatggtcacaaggatacagagccctgccttctctgtcgaatcacgggtcgcagaattag

SEQ ID NO: 290465 - DNA, 735 bp, Artificial Sequence
  derived and/or modified sequence
atgaacgggagaagttgttctatgtcattgcataggacaagtgggaccccccagggaccaaggatggtttctggacatcacattcctgccatccgggcccatagcggaacccctggccctagcccctgcggtagcacctcgagtcccactatggcgagcttagccaacaaccttcacctgaagatgcctagtgggggcggaatggctccgcaaaataatgtcgctgagtctagaattcatttgccggccctttctccccgacgccagatgctgactaatggcaaaccacgatttcaagtcactcaagcagggggcatgagtggtagccacacgctgaagcccaaacaacaggagttcggaagccctttcccccctaacccaggcaagggagcactgggcttcgggcctcagtgcaaatccattgggaaaggctcttgtaataacctggtggtgacctcttctcccatgatggtccagcggttgggattgatcagtcctcctgcttcgcaggtttctactgcctgcaatcagatttcgccaagccttcagagagccatgaatgccgccaatctcaatattcccccgtccgacacgcggtccctaatcagcagagaaagcctcgcgtcaactacactatcactgaccgagtcacagagtgccagtagcatgaaacaggagtggtctcagggttatcgagccttgccttccctgagcaatcacgggagccagaattag

SEQ ID NO: 290466 - DNA, 270 bp, Artificial Sequence
  derived and/or modified sequence
atgatggtccagcggctggggctgataagccctccagcttctcaggttagcaccgcctgtaatcagatttctccgagtctgcagagagccatgaatgccgccaacctaaatatccctccaagtgatactaggtcactcattagcagagagtcactcgcttccactaccctctctcttactgaaagccagtcagcctcttccatgaagcaggagtggtctcaagggtaccgcgcccttccatctctgagtaatcatggttcacagaactag

SEQ ID NO: 290467 - DNA, 270 bp, Artificial Sequence
  derived and/or modified sequence
atgatggtgcaaagactgggactcatctcacccccagcctcacaagtgtcaacagcttgtaaccagataagtccttccctgcagcgtgctatgaatgcagccaacctgaatatccctccatctgacaccaggagtcttatctcaagggagtccctggcatctaccacattgtctctgaccgagtctcagtctgcttctagcatgaagcaggagtggtcacagggatacagagccctgccatctctatccaatcatggctcacagaattag

SEQ ID NO: 290468 - DNA, 735 bp, Artificial Sequence
  derived and/or modified sequence
atgaacgggcgcagctgctccatgagcttgcaccgaaccagtggcaccccccagggaccaagaatggtgtcaggccaccacatccccgcaatacgggcccatagcggcacgcctggaccttcgccgtgtggtagtacaagttcgccaactatggcctcattagccaataatttgcacctcaaaatgccatccggagggggtatggctccacagaacaatgtggcagagagccggatccacctgcctgcgctatccccgaggaggcaaatgctgactaatggcaagccacgcttccaggttactcaggccggggggatgtccgggtcccacacgttgaagcccaagcaacaggagtttggctctcctttccctccaaatcccgggaagggcgcccttgggttcgggcctcaatgcaagagcatcgggaagggatcctgtaacaacttagtcgtgacatccagcccaatgatggtgcaacgactgggcctgatttccccacctgcttcccaggtgtcgacggcctgcaatcagatatcccctagcttgcaaagagccatgaatgccgctaacctaaatattcccccttccgatacaaggagcctgatctccagggagtctcttgcgagtactacgttgagcttgaccgagtctcagagcgcctcctctatgaaacaggaatggtcccagggttatcgggccttaccatccttgtccaaccacggcagccaaaactag

SEQ ID NO: 290469 - DNA, 700 bp, Artificial Sequence
  derived and/or modified sequence
actgacctcatccatagtgtggtgtttggtctatgagcagttgattcaccagttttcagagcccaagtctaaaatcacagatcctgtgggggatctgggagcatctgccttacctttatgaaggttatggtcagttaagccttgctttcaatgggctcacttcgctatgggaagaaaattctgcagttgttaaaaacaaaaggacactgccttttccaagggagctgacagctattggtttttccggagaggattactggtgaagacagttatgaagaacaagtaactcttgtaaataaacagcatgttcttgcttaaatatttcccagaacagttctaaagaaatataatacaggggctcttggctttgggcctcagtgcaagtccattggaaaaggcagctgcaacaatctagtggtcaccagcagtcccatgatggttcagcgactgggactcatttcacctccagcaagccaggtctctacagcatgcaaccagatcagtcctagcttacagagggcaatgaatgcagccaacctgaatatacctccttcagataccaggtcccttatttcgcgtgagtctttggcgtccacgaccttgagtctgacggaaagtcagtcggcctcaagcatgaagcaggagtggtcccagggctacagggccctcccttcgctctccaaccacggctctcagaatg

SEQ ID NO: 290470 - DNA, 1327 bp, Artificial Sequence
  derived and/or modified sequence
cgggaccccctgtacgccgtccgcgccgtccagggtcacaccggcgacggaacccgccggcagcaattagccagcatcccggggtcggcccccagaagcattccccggcccaggacgaggatgaacaggacaggcgaggcacaaagtcgcaactgaactttttagaaacattatttgtgtgtgtatgtgtgtagcaggggagaatgagctgatgccgagggtccagccaccccgcctctgcctcctcctccccctgccgccgctgccctcgcagacgcgcgcgcacacacggcacttgggccgggtttccgcgctccgtccccccgtttggatgggggttttcatttccgaaggaggcacagcccgcggagcgctctgaagggctggagccccaagttactcctcgccagcgccggccgcccgctgtcactcgcgctggccggccgggggaagggacccgcacgccgggctttgttgtggaaatcccggttacctggcttataacccacaccatggataacttattggactttgcctgaaaggagtcattagtgacattggatatttgaccgtcttggccacaggtttttcagaatgaatggaagatcatgcagcatgagtctccaccggacatcgggaaccccacaggggcctaggatggtcagtggtcatcacattcctgccatccgagcccactccgggactcctggcccctcgccctgtggcagcacatcgagtcccactatggcaagccttgctaacaacctccatctcaagatgccctcaggaggagggatggctcctcagaacaacgtggctgagagccgcatccatctgcctgccttaagccccaggagacaaatgctcaccaatgggaagccgcgattccaggtcacccaggctggaggcatgtcagggtcacatactttaaagccaaagcagcaggagtttggaagcccttttcctccaaatcctgggaaaggggctcttggctttgggcctcagtgcaagtccattggaaaaggcagctgcaacaatctagtggtcaccagcagtcccatgatggttcagcgactgggactcatttcacctccagcaagccaggtctctacagcatgcaaccagatcagtcctagcttacagagggcaatgaatgcagccaacctgaatatacctccttcagataccaggtcccttatttcgcgtgagtctttggcgtccacgaccttgagtctgacggaaagtcagtcggcctcaagcatgaagcaggagtggtcccagggctacagggccctcccttcgctctccaaccacggctctcagaatg

SEQ ID NO: 290471 - DNA, 693 bp, Artificial Sequence
  derived and/or modified sequence
catttgtcagatgctttcctctctgcactccagcctttgctgaatgtcctggcagttcctgaatgttcctgctgcctgcattttataaaaccaaagagcaagtagccctggaaatgtatgccaagtactctgcacagctgtctgaggcccccagccaagggcaagatataaacaatctatacccacacaggtacacaagcagacactgcatatggaagccccgcagtgcaaggacttcttacttctaacactttaaaatgtcagtggccaaacagcctgagaacatgaataatttaagcatgagatgcttttgctgatgattttgatcatttttcaggaagaataatggggctcttggctttgggcctcagtgcaagtccattggaaaaggcagctgcaacaatctagtggtcaccagcagtcccatgatggttcagcgactgggactcatttcacctccagcaagccaggtctctacagcatgcaaccagatcagtcctagcttacagagggcaatgaatgcagccaacctgaatatacctccttcagataccaggtcccttatttcgcgtgagtctttggcgtccacgaccttgagtctgacggaaagtcagtcggcctcaagcatgaagcaggagtggtcccagggctacagggccctcccttcgctctccaaccacggctctcagaatg

SEQ ID NO: 290472 - DNA, 458 bp, Artificial Sequence
  derived and/or modified sequence
agttccaagttactcactggagctgacaagtcacctcggggaccgggaagtcactcaagtgtctggaaatcttggccctggctgatttgtcatcctatggatgattcaattaggggctcttggctttgggcctcagtgcaagtccattggaaaaggcagctgcaacaatctagtggtcaccagcagtcccatgatggttcagcgactgggactcatttcacctccagcaagccaggtctctacagcatgcaaccagatcagtcctagcttacagagggcaatgaatgcagccaacctgaatatacctccttcagataccaggtcccttatttcgcgtgagtctttggcgtccacgaccttgagtctgacggaaagtcagtcggcctcaagcatgaagcaggagtggtcccagggctacagggccctcccttcgctctccaaccacggctctcagaatg

SEQ ID NO: 290473 - DNA, 944 bp, Artificial Sequence
  derived and/or modified sequence
agttccaagttactcactggagctgacaagtcacctcggggaccgggaagtcactcaagtgtctggaaatcttggccctggctgatttgtcatcctatggatgattcaattaggcttataacccacaccatggataacttattggactttgcctgaaaggagtcattagtgacattggatatttgaccgtcttggccacaggtttttcagaatgaatggaagatcatgcagcatgagtctccaccggacatcgggaaccccacaggggcctaggatggtcagtggtcatcacattcctgccatccgagcccactccgggactcctggcccctcgccctgtggcagcacatcgagtcccactatggcaagccttgctaacaacctccatctcaagatgccctcaggaggagggatggctcctcagaacaacgtggctgagagccgcatccatctgcctgccttaagccccaggagacaaatgctcaccaatgggaagccgcgattccaggtcacccaggctggaggcatgtcagggtcacatactttaaagccaaagcagcaggagtttggaagcccttttcctccaaatcctgggaaaggggctcttggctttgggcctcagtgcaagtccattggaaaaggcagctgcaacaatctagtggtcaccagcagtcccatgatggttcagcgactgggactcatttcacctccagcaagccaggtctctacagcatgcaaccagatcagtcctagcttacagagggcaatgaatgcagccaacctgaatatacctccttcagataccaggtcccttatttcgcgtgagtctttggcgtccacgaccttgagtctgacggaaagtcagtcggcctcaagcatgaagcaggagtggtcccagggctacagggccctcccttcgctctccaaccacggctctcagaatg

SEQ ID NO: 290474 - DNA, 270 bp, Artificial Sequence
  derived and/or modified sequence
atgatggtgcagaggctgggcctcatcagccccccagccagccaggtgtccacagcctgcaaccagatcagccccagcctgcagagggccatgaatgctgccaacctgaacatccccccaagtgacaccaggagcctcatcagccgggagagcctggccagcaccaccctgagcctgacagagagccagagcgccagctccatgaagcaggagtggagccagggctaccgggccctgcccagcctgagcaaccacggcagccagaactag

SEQ ID NO: 290475 - DNA, 735 bp, Artificial Sequence
  derived and/or modified sequence
atgaatggccgcagctgcagcatgagcctgcacaggaccagcggcaccccccagggccccaggatggtgtctggccaccacatcccagccatccgggcccacagcggcaccccaggccccagcccctgtggcagcaccagcagccccaccatggccagcctggccaacaacctgcacctgaagatgcccagcggcggcggcatggccccccagaacaacgtggccgagagccgcatccacctgcctgccctgagcccccggcggcagatgctgaccaacgggaagccccgcttccaggtgacccaggccggcggcatgagcggcagccacaccctgaagcccaagcagcaggagtttggcagccccttcccccccaaccctggaaaaggagccctgggcttcggcccccagtgcaagagcatcggcaagggcagctgcaacaacctggtggtgaccagcagccccatgatggtgcagaggctgggcctcatcagccccccagccagccaggtgtccacagcctgcaaccagatcagccccagcctgcagagggccatgaatgctgccaacctgaacatcccccccagcgacaccaggagcctcatcagccgggagagcctggccagcaccaccctgagcctgacagagagccagagcgccagctccatgaagcaggagtggagccagggctaccgggccctgcccagcctgagcaaccacggcagccagaactag

SEQ ID NO: 290476 - DNA, 270 bp, Artificial Sequence
  derived and/or modified sequence
atgatggtgcagcggctgggcctgatcagcccccccgccagccaggtgagtacagcctgcaaccagataagcccttcacttcagcgggcaatgaatgccgcaaatttaaatatccccccatccgacacgcggtcgctgatttctagagaatctctggcgagcacaacactgtctctcactgaaagccaatctgcatctagtatgaagcaggagtggtcacaaggttatagagcactgcctagcctgtccaaccatggaagtcaaaactag

SEQ ID NO: 290477 - DNA, 735 bp, Artificial Sequence
  derived and/or modified sequence
atgaacggccggagctgcagcatgagcctgcaccggaccagcggcacaccccaaggccccaggatggtttctgggcaccacattccggccataagggctcacagcgggactccaggtcctagcccttgcgggtctacaagctctccgaccatggcctctctcgcgaacaatttacacctgaagatgccttccgggggcgggatggcacctcaaaataatgtggctgaatcgcgtatccatttgcctgccctgagccccagaagacagatgttgactaacggaaagcctcgattccaggttacgcaggccggagggatgagcgggagccacaccctcaagccaaaacagcaggagttcggcagcccttttccaccgaaccccggcaagggtgccctagggttcggaccgcagtgtaaatctatagggaagggctcatgcaataatttggtagtcacatctagccccatgatggtccagaggttaggcctcatttcaccccccgccagccaggtcagcacagcctgtaaccaaatcagtccatcattacaacgcgcaatgaacgccgccaatctgaacattccacctagcgataccagatcgctaatttcacgtgagtctctcgcctcaactacacttagtctgacagagtctcagagcgcatcctctatgaagcaagaatggtcccaaggttatagggcccttccgtctctcagcaaccatggctcccagaattag

SEQ ID NO: 290478 - DNA, 270 bp, Artificial Sequence
  derived and/or modified sequence
atgatggtgcagcggctgggcctgatcagcccccccgccagccaggtctcaacggcctgcaatcagatttcaccatctcttcagcgcgccatgaatgccgcaaacttgaatatccctccctccgacactcgcagcctgatcagtcgcgaatcccttgcatccaccacactttctttgacagagtctcaaagcgcaagctcaatgaagcaggagtggagtcaggggtaccgggctttaccgtcactgtcaaatcacgggtcccagaactag

SEQ ID NO: 290479 - DNA, 270 bp, Artificial Sequence
  derived and/or modified sequence
atgatggtgcagcggctgggcctgatcagcccccccgccagccaggttagcactgcctgcaatcagatttcgccaagcctgcaacgggctatgaatgccgctaacctgaatataccgccaagcgatacccgctcactgatatctcgagaaagtctggcttcaaccaccctgtcgcttacggaatcgcagtcagctagctccatgaaacaggagtggtcccagggctaccgcgcccttcccagcctgtctaaccacgggagtcaaaattag

SEQ ID NO: 290480 - DNA, 735 bp, Artificial Sequence
  derived and/or modified sequence
atgaacggccggagctgcagcatgagcctgcaccggaccagcggcacaccgcaggggcctcgcatggtatccggtcaccacattccagctataagggctcatagcgggaccccaggaccctctccgtgcggttccacatcctcacctacgatggcctccctcgcaaataacctgcatctcaaaatgccatcgggcggtgggatggctccgcagaacaacgtggccgagagtaggatacacctgcccgctcttagcccaaggcgccaaatgttaaccaacggtaagccccgctttcaggtaactcaggccggtggaatgagcggctcgcatactttgaaaccaaagcagcaagaatttgggtccccattccctcctaaccctggcaaaggggccttaggatttggtccccagtgcaagtcaatcggaaaggggagttgtaataacctcgtggtgacttccagccccatgatggtccaacgacttggtctcattagccctcctgccagtcaggtctccacagcttgtaatcagatctctccttcactgcagagggctatgaatgccgcaaatcttaatatccccccaagcgacacccgttccctcatttccagagagagcctggccagcacgaccctatccctcacagaaagccagtctgcaagcagcatgaagcaagaatggagccagggctatcgagcattaccttccctgtctaaccacgggagtcagaattag

SEQ ID NO: 290481 - DNA, 270 bp, Artificial Sequence
  derived and/or modified sequence
atgatggtccagcgacttgggctcataagtcctcccgcatcccaggtgagcacggcgtgcaaccagatttctcctagcctgcagcgggctatgaacgccgctaacctgaacatccctccttcagatacgagatccctgatttctcgagagagtctggcctccaccaccctttcactcaccgagtcacagtctgccagctcaatgaagcaggaatggtcacaaggctatagagcgctgccatctctctctaatcatggtagtcagaactag

SEQ ID NO: 290482 - DNA, 735 bp, Artificial Sequence
  derived and/or modified sequence
atgaatgggcgatcttgctctatgagccttcatcgcaccagtgggactccacaggggcctcgcatggtgagcggacaccacattcccgctatccgagcccattctggcaccccgggtcccagcccatgcggctccacctctagcccaactatggcctccctcgccaataatctgcacctaaagatgccatcagggggaggtatggcccctcagaacaacgtggcggaaagccgcatacaccttccagcactgagtcctcgcaggcagatgctaacaaacggcaaacccagatttcaggttacgcaggccggtggcatgagtgggagccacacccttaagcccaagcagcaggagtttggatctccatttcccccaaaccctggaaagggcgcactggggtttggccctcagtgcaaatctatcggcaaaggatcttgcaacaatctggtcgtgacttcatcacctatgatggttcaaagactcgggctcattagtcccccagcctcccaggtgagcactgcgtgcaaccagatatcgccttctcttcagcgggcaatgaacgcggcaaacctcaacatccctccctccgacacgagatcactgatctccagggaatcactcgcttccacaacccttagcctaactgagtcccagagcgcttcctctatgaagcaggaatggagccaagggtatcgggctctgccatccctgtcgaatcatggcagccagaactag

SEQ ID NO: 290483 - DNA, 270 bp, Artificial Sequence
  derived and/or modified sequence
atgatggtgcagcgcttggggctgatcagtccccctgcctctcaggtgtctactgcttgcaatcagatctctccatcactgcaaagagccatgaatgcggcaaacctaaacatcccccctagcgataccagatcactgataagcagggagagcctggcgagtaccaccctctcgctgacagagtcacagtcagcctcctcaatgaaacaagagtggtcccagggctatagggccctaccctcgctgagcaatcacgggtctcagaattag

SEQ ID NO: 290484 - DNA, 270 bp, Artificial Sequence
  derived and/or modified sequence
atgatggtgcagcgattgggtttgatttccccaccagcatcacaggtgagcacagcctgcaaccagatatctccctctcttcagagggcgatgaatgcggcaaatctcaacatacctcccagcgatactcgcagcttgatttcccgtgagagcctggcctccacgactctcagcctgacagagtctcagtcagcctcaagtatgaaacaggagtggagtcaggggtacagagcgctccctagcctctccaaccacggtagtcagaattag

SEQ ID NO: 290485 - DNA, 735 bp, Artificial Sequence
  derived and/or modified sequence
atgaacggccgaagttgcagcatgtcccttcaccgcacttctggtacacctcaggggcctagaatggtatctgggcaccatataccagccatcagggcccactccgggactccaggacctagtccctgtggcagcactagcagtcctaccatggcgagcctggctaacaacctacacctgaagatgccctcaggtgggggtatggccccacaaaacaacgtggcagagtctcgtatccatctccctgcattgagcccgagacggcagatgcttactaacggaaagccgaggttccaagtgacacaagctggaggtatgtcaggtagtcatacactgaagccgaagcagcaggagtttggcagtccgtttccacctaatccagggaagggtgcactagggttcggaccccagtgtaaatccataggtaagggctcctgcaataatctggtcgtcactagttccccaatgatggtccagcgactgggtttaatctctcccccagcatcccaggtaagtaccgcttgcaaccagatttcccctagcctgcaacgcgcaatgaatgccgctaacctgaatatccccccttctgacaccagaagcctaatctctagggagagcctcgcatccacaacgctttcccttacagaatctcagagcgcgagcagtatgaagcaggaatggtctcaggggtaccgcgcactgccgagtctgtcaaaccatggctcccaaaactag

SEQ ID NO: 290486 - DNA, 270 bp, Artificial Sequence
  derived and/or modified sequence
atgatggtgcagagactgggcctgatcagcccccccgccagccaggtgagcaccgcctgcaaccagatcagccccagcctgcagagagccatgaacgccgccaacctgaacatcccccccagcgacaccagaagcctgatcagcagagagagcctggccagcaccaccctgagcctgaccgagagccagagcgccagcagcatgaagcaggagtggagccagggctacagagccctgcccagcctgagcaaccacggcagccagaactag

SEQ ID NO: 290487 - DNA, 735 bp, Artificial Sequence
  derived and/or modified sequence
atgaacggcagaagctgcagcatgagcctgcacagaaccagcggcaccccccagggccccagaatggtgagcggccaccacatccccgccatcagagcccacagcggcacccccggccccagcccctgcggcagcaccagcagccccaccatggccagcctggccaacaacctgcacctgaagatgcccagcggcggcggcatggccccccagaacaacgtggccgagagcagaatccacctgcccgccctgagccccagaagacagatgctgaccaacggcaagcccagattccaggtgacccaggccggcggcatgagcggcagccacaccctgaagcccaagcagcaggagttcggcagccccttcccccccaaccccggcaagggcgccctgggcttcggcccccagtgcaagagcatcggcaagggcagctgcaacaacctggtggtgaccagcagccccatgatggtgcagagactgggcctgatcagcccccccgccagccaggtgagcaccgcctgcaaccagatcagccccagcctgcagagagccatgaacgccgccaacctgaacatcccccccagcgacaccagaagcctgatcagcagagagagcctggccagcaccaccctgagcctgaccgagagccagagcgccagcagcatgaagcaggagtggagccagggctacagagccctgcccagcctgagcaaccacggcagccagaactag

SEQ ID NO: 290488 - protein, 174 aa, Artificial Sequence
  derived and/or modified sequence
MPNDEAFSKPSTPSEAPHAPGVPPQGRAGGFGKASGALVGAASGSSAGGSSRGGGSGSGASDLGAGSKKSPRLPKCARCRNHGYASPLKGHKRFCMWRDCQCKKCNLIAERQRVMAAQVGAGVREPGFSLSFFFFFFFRWSLARLPRLQCSGAILAHCNSASRVQAILLPQPPK

SEQ ID NO: 290489 - protein, 644 aa, Artificial Sequence
  derived and/or modified sequence
MDLQQSTTITSLEKWCLDESLSGCRRHYSVKKKLKLIRVLGLFMGLVAISTVSFSISAFSETDTQSTGEASVVSGPRVAQGYHQRTLLDLNDKILDYTPQPPLSKEGESENSTDHAQGDYPKDIFSLEERRKGAIILHVIGMIYMFIALAIVCDEFFVPSLTVITEKLGISDDVAGATFMAAGGSAPELFTSLIGVFIAHSNVGIGTIVGSAVFNILFVIGMCALFSREILNLTWWPLFRDVSFYIVDLIMLIIFFLDNVIMWWESLLLLTAYFCYVVFMKFNVQVEKWVKQMINRNKVVKVTAPEAQAKPSAARDKDEPTLPAKPRLQRGGSSASLHNSLMRNSIFQLMIHTLDPLAEGRFREKASILHKIAKKKCHVDENERQNGAANHVEKIELPNSTSTDVEMTPSSDASEPVQNGNLSHNIEGAEAQTADEEEDQPLSLAWPSETRKQVTFLIVFPIVFPLWITLPDVRKPSSRKFFPITFFGSITWIAVFSYLMVWWAHQVGETIGISEEIMGLTILAAGTSIPDLITSVIVARKGLGDMAVSSSVGSNIFDITVGLPLPWLLYTVIHRFQPVAVSSNGLFCAIVLLFIMLLFVILSIALCKWRMNKILGFIMFGLYFVFLVVSVLLEDRILTCPVSI

SEQ ID NO: 290490 - DNA, 1935 bp, Artificial Sequence
  derived and/or modified sequence
atggacctgcagcagtccacgaccatcactagtctggagaagtggtgtctggatgagtcactgtctgggtgtagacgccactacagcgtcaagaagaaactcaagctcattagggttctgggtcttttcatggggctagtcgccatcagtacggtgtcttttagcatcagcgccttttccgagaccgacacccagagcacgggggaagcctctgtagtgagtggtccgcgcgtggctcaaggttaccaccagagaaccctactagatctgaacgacaaaatcttagactataccccccagccccccctgtccaaggagggcgagtccgaaaattccaccgatcatgcccagggcgattacccgaaggacatcttttctctggaggaacgacggaagggtgcgattattcttcatgtgatcggcatgatttatatgtttatagctcttgctattgtttgcgatgagtttttcgtgcccagcctcactgtgataacagagaagcttggtattagcgacgacgtcgccggagccactttcatggcagccggaggctctgcacctgaactctttacatctcttatcggagtattcatcgcccacagcaatgtaggcattgggaccatcgtagggtcagcagtgttcaacatactcttcgtgattgggatgtgcgcactttttagcagagagattctgaaccttacctggtggccacttttccgagacgtctcattttacattgtcgatcttatcatgttgatcatctttttcctagacaacgtcatcatgtggtgggagagcttactgctgctcactgcatacttttgctatgttgttttcatgaaatttaacgttcaggtggagaagtgggtcaagcagatgattaaccgtaataaagtggtaaaggtcacggcaccggaggcccaggcaaagcccagcgctgcgcgcgataaagatgaaccaactctcccagcaaaaccgaggttgcagcgcggcgggtcctccgcctcgcttcacaacagcctgatgcggaactccatctttcagctgatgattcatacactcgatcccttagcagaaggccgcttcagagagaaggcttctatcttgcacaagatagcaaaaaaaaagtgtcatgtggatgaaaatgagcgtcagaatggggccgccaaccatgtggagaagatcgaactgcctaactcgactagtaccgacgtggaaatgacaccaagcagcgacgctagtgaaccggtgcagaacggtaatttatctcataacatcgaaggggcggaagcccagacagccgacgaggaggaagatcagccactgtctctggcgtggcctagcgaaacacggaaacaggttacttttctcattgtatttccaatcgtatttccgctgtggattacgttacccgatgttaggaaacccagttccaggaaatttttcccaatcaccttttttggctccataacctggatcgctgtcttttcctacctgatggtttggtgggcacaccaggtcggggaaaccattggcatctctgaggagatcatgggtcttaccatcctggcagctggaacctccatccctgacctgatcaccagcgtgatcgtcgctcggaagggcctgggcgacatggctgtgagtagctccgtaggaagcaatatcttcgatatcaccgtcggcctgccgctcccttggctgctgtacactgtaatacaccggttccagcccgtggcggtgagttctaacggactgttttgcgcgatcgtgttactgtttattatgcttctttttgtcatcctgtccattgccttatgtaaatggaggatgaataagatcctgggcttcattatgttcggattgtacttcgttttcttggtggtttctgttctactcgaggatagaattcttacgtgccccgtatccatatag

SEQ ID NO: 290491 - DNA, 1935 bp, Artificial Sequence
  derived and/or modified sequence
atggacctgcagcagagcaccaccatcaccagcctggagaagtggtgcctggatgagagcctgagcggctgcagaagacactacagcgtgaagaagaagctgaagctgatccgggtgctgggcctcttcatgggcctggtggccatcagcacagtgtccttcagcatcagcgccttcagcgagacagacacccagagcactggagaggcctctgtggtgtctggcccccgggtggcccagggctaccaccagaggaccctgctggacctgaatgacaagatcctggactacaccccccagccccccctgagcaaggagggggagagcgagaacagcacagaccacgcccagggcgactaccccaaggacatcttcagcctggaggagaggaggaagggggccatcatcctgcacgtgattggcatgatctacatgtttattgccctggccatcgtgtgtgatgagttctttgtgcccagcctgaccgtcatcacagagaagctgggcatcagtgatgatgtggccggggccaccttcatggccgccggcggcagcgcccctgagctgttcaccagcctcatcggggtcttcatcgcccacagcaatgtgggcatcggcaccatcgtgggcagcgctgtgttcaacatcctcttcgtcatcggcatgtgtgccctcttcagccgggagatcctgaacctgacctggtggcccctcttcagagatgtgtccttctacatcgtggacctgatcatgctgatcatcttcttcctggacaacgtcatcatgtggtgggagagcctgctgctgctgacagcctacttctgctacgtggtgttcatgaagttcaacgtgcaggtggagaagtgggtgaagcagatgatcaacagaaacaaggtggtgaaggtgacagcccctgaggcccaggccaagcccagcgctgcccgggacaaggatgagcccaccctgcctgccaagccccggctgcagagaggaggcagcagcgccagcctgcacaacagcctgatgagaaattccatcttccagctgatgatccacaccctggaccccctggccgagggccgcttccgggagaaggccagcatcctgcacaagatcgccaagaagaagtgccacgtggatgaaaatgaaaggcagaatggagctgccaaccacgtggagaagattgagctgcccaacagcaccagcacagatgtggagatgacccccagcagtgatgccagcgagcctgtgcagaatggaaacctgagccacaacatcgagggcgctgaggcccagacagcagatgaggaggaggaccagcccctgagcctggcctggcccagcgagaccaggaagcaggtgaccttcctgattgtgttccccatcgtgttccccctgtggatcaccctgcctgatgtgaggaagcccagcagcaggaagttcttccccatcaccttcttcggcagcatcacctggattgctgtgttctcctacctgatggtgtggtgggcccaccaggtgggggagaccatcggcatcagcgaggagatcatgggcctgaccatcctggccgccggcaccagcatcccagacctgatcacctctgtgattgtggccaggaagggcctgggggacatggctgtgagcagctctgtgggcagcaacatctttgacatcaccgtgggcctgcccctgccctggctgctgtacaccgtcatccaccgcttccagcctgtggccgtgagcagcaatggcctcttctgtgccatcgtgctgctcttcatcatgctgctgtttgtgatcctgagcatcgccctgtgcaagtggaggatgaacaagatcctgggcttcatcatgtttggcctgtactttgtgttcctggtggtgtctgtgctgctggaggaccgcatcctgacctgccctgtgtccatctag

SEQ ID NO: 290492 - DNA, 1935 bp, Artificial Sequence
  derived and/or modified sequence
atggacctgcagcagagcaccaccatcaccagcctggagaagtggtgcttagacgaaagcctgtcaggatgtagacggcactactccgtgaagaagaagctcaagctcatccgtgtccttggtctgttcatgggattagttgccatttctacagtaagcttctctatctctgcattctctgagacagacacgcagtctactggcgaggcgtccgtggtcagtggaccgagggtggcacaggggtatcaccaacggaccctgctcgacctgaacgataagatactcgactacaccccacagccacctctttccaaggagggcgagagcgaaaacagcacggaccatgcccagggagattatcccaaagacatcttttccctggaggagcgacgtaagggagcaattatcctgcacgtgattggtatgatatatatgttcatcgcgctggccattgtgtgcgacgagttttttgtgccgagtctcacagtgatcactgagaaactcggaatcagcgatgatgtggcgggcgcaactttcatggccgctggcggatcagcccccgagcttttcacctcactaatcggggtgtttattgctcattccaacgtagggatcggcacgatagttggcagcgcagtgtttaatatcttgttcgtgataggcatgtgcgcactctttagccgggagatcttaaacctcacttggtggcccttgtttagggacgtatctttctacatcgtagacctgattatgctgattatattcttcttagataacgtcatcatgtggtgggaatccctactactcttgaccgcatacttctgctacgttgtctttatgaagtttaatgtccaggtcgaaaagtgggtgaagcagatgatcaaccgcaacaaggtggtaaaggtgacagcccctgaagcgcaggccaaaccttccgccgcacgggataaagatgaacctacgctccccgccaaacccaggcttcaaagaggcggctcctccgcttctcttcacaattctctgatgcggaatagtatttttcaactgatgattcacaccctagatcccctggctgaaggcagatttagggaaaaggctagcattctgcataagatcgcgaagaagaaatgtcacgtagatgaaaatgagcggcagaatggggcggccaaccacgtggaaaaaatcgagcttcccaactctacctccactgacgtggaaatgacgccatctagtgatgccagcgagcctgtgcagaatggcaacctttcacacaacattgagggagcagaagcccagaccgctgacgaagaagaggatcagcctctaagtctggcctggcccagtgagacccggaaacaagtcacattcctcatagtgtttcccattgtttttccactttggatcactctccctgatgtgagaaagccttctagccggaagttttttcctatcactttttttggttcgatcacctggatcgccgtctttagttatctcatggtctggtgggctcaccaggtcggagaaactatcgggatctcggaggaaataatgggactgaccatacttgcggctgggacttccatccccgacctgatcaccagcgttatcgtcgcccggaaaggactgggggacatggctgtttcctcctctgttggttcaaacatcttcgatattacagtcgggctccccctcccctggctgctatacaccgtcattcatagattccagcccgtggcagtgtcatccaacgggttgttttgcgctattgtgctcttgttcattatgctgctcttcgtaattctctcgatcgccttgtgtaaatggaggatgaacaagatccttggttttattatgttcgggctgtatttcgtctttcttgtggttagtgtgctcttggaagatagaattcttacgtgccctgtgagcatctag

SEQ ID NO: 290493 - DNA, 1935 bp, Artificial Sequence
  derived and/or modified sequence
atggatctgcagcagagcactactattacatctcttgagaagtggtgtttggacgaatctctctccggctgtcggagacattattctgtgaagaaaaaactgaaactcatccgagtgttggggctgttcatgggactggtggccatcagtaccgtatccttttctattagcgcattctcagaaactgacactcaatctactggggaagcctccgtggtgtccggcccacgcgtggcccaggggtaccaccagcggaccctcctggatctgaacgataagatcctagactacacacctcagcctcctttgtccaaggagggggagtcggagaactccacagatcatgcccagggcgactaccccaaggacatctttagcttggaggaaagaagaaagggggcaatcattctgcacgtcattggcatgatatacatgttcatcgccctagcgattgtctgcgacgagttcttcgtgccaagtctgacagttattactgagaaactggggatctctgacgatgtggccggagccacttttatggccgctggcggatccgctcccgagctgtttacatctctgatcggagttttcatcgcccactctaatgtggggattggaactatagttgggtcagctgttttcaacattctattcgtgattggaatgtgcgctttgttttcacgggaaatcttgaacctgacctggtggcctctctttagagatgtgtctttctacattgtcgacctaattatgcttattatcttcttccttgacaacgttatcatgtggtgggagtccctgctgttgcttactgcatacttctgttatgtagtgttcatgaaatttaatgtccaagtggagaaatgggtcaagcagatgatcaaccgcaataaggttgtgaaggtgacggctcctgaggcgcaggccaagccttctgcagcccgagacaaagatgagcctaccctgcctgcaaagccgaggttgcagaggggaggctcctccgctagcctccacaattcacttatgaggaactccatattccaactaatgatccacaccctagacccactcgcagaaggccgattccgggagaaagcctctattctccataagatcgcaaagaagaagtgccacgtggacgaaaacgaacgtcagaatggagctgccaaccatgtggagaaaatcgagttgccaaattcaacctccaccgacgtggagatgaccccctcctcagacgcctcagaacctgtgcagaacggtaatctaagtcacaacattgagggcgcagaggcccagactgcagatgaggaggaggatcaacccctgagtctggcatggccctccgaaacacggaaacaagtgacgtttctgattgtgtttcccattgtgttcccactatggatcactctgccagacgtgaggaaaccttcgtcgagaaagtttttccctatcacctttttcggctcaatcacttggattgctgtgttcagttaccttatggtatggtgggcccaccaggtcggggaaacaattggaatttcagaagaaataatgggacttaccatactagccgcaggcactagcatacccgatctcatcacatcagtgatcgtggcgagaaaagggctgggagacatggctgtttcatcaagtgtcgggtccaatatctttgacattacagtggggctgccactgccctggctgctctacaccgtcatccatcgctttcagccggtggcggtgagttccaatggtctgttctgtgcaatcgtcctgttatttataatgctgctgtttgttattttgagcattgccctctgcaagtggcgtatgaataagattctgggatttattatgttcggcctctactttgtctttttggttgtgtccgttctgctggaggatcgtattctgacctgtccggtgtcaatctag

SEQ ID NO: 290494 - DNA, 2170 bp, Artificial Sequence
  derived and/or modified sequence
tgaaagaaccatctggttgagtctaaagttggaagatcaccatatccaccagaagacccaggatggatctgcaacaaagcaccaccatcacttccctagagaaatggtgtttggatgagtcactgtctggctgcagaagacattatagtgtcaagaaaaaactgaagttaattcgagtcttaggccttttcatgggtctggtagccattagcactgtctcattttcaatcagtgccttttctgagacagatacacagagcacaggagaggccagtgttgtaagtggccctagggtagcacagggttaccatcagagaactctcttagatttaaatgacaagattctggattatactccacagccacctctttctaaggaaggcgagtctgagaatagtacagatcacgcccaaggagactacccgaaagacatcttttcccttgaggagagaagaaaaggtgcgatcattctgcatgtcattggaatgatctacatgttcatagccttagccattgtctgtgatgagttctttgttccttctttgactgtcatcactgaaaaactgggcatctctgatgatgtggctggagccaccttcatggctgcaggagggtcagccccagaacttttcacatctctcataggggtatttatcgctcacagcaacgttggcataggcacaattgtaggttcagcagtattcaacatcctctttgttattggcatgtgtgctctgttttctagagaaatcttaaacctgacatggtggccgctctttcgagatgtgtctttctacattgttgacttgatcatgctgatcatatttttcctggataatgtcatcatgtggtgggaaagcttgcttctcttaacagcttatttttgctatgtggttttcatgaaattcaacgtccaagtagaaaaatgggtgaagcaaatgataaaccgcaataaggtcgtcaaggtgacagcaccagaagcccaagcaaagccatctgcagccagggacaaggatgaaccaactctaccggctaagccgcgtctccagcgaggtggaagctctgcctccctccacaacagtctcatgaggaatagcatcttccaactcatgatacacacccttgacccactcgccgaagggaggttcagagaaaaggcttcaattctccacaagatcgccaagaagaaatgtcatgtggatgagaacgagaggcagaatggggctgccaaccacgtggaaaaaattgagcttccaaacagcaccagcacagatgttgaaatgacaccatccagtgatgcttcagaacctgtacaaaatggaaatctctcccacaacattgaaggtgcagaagcccagaccgctgatgaggaggaggaccagcctctcagccttgcctggccttctgaaacccgcaagcaagtcacgtttctgattgttttccccatagtgtttcctctctggattacgttacctgacgttcgcaaaccttcatcgaggaagttttttcccatcacgttctttggctccattacctggattgcagtattctcttacttgatggtctggtgggcgcaccaggttggagagacaattggcatcagtgaagagattatgggcctgaccatcttggctgctgggacctccatccctgatcttatcaccagtgtcatagtggcccggaaggggttaggggacatggctgtgtccagctctgttggaagcaacatttttgacatcactgtagggctcccactgccctggctcctgtacaccgtcattcacagattccagccagtggctgtcagcagcaatggccttttctgtgccatcgtccttctcttcatcatgctgctcttcgtcatcctctctatcgccctctgcaagtggcgaatgaacaaaatcctgggcttcatcatgtttggcctctactttgtgttcctggtggtgagcgttctcctagaagacagaattcttacatgccccgtctccatctagcaggaaaagccatatcttgcaccagcagcatgaatggtccctccacactctgggctctgggctccttgacctcttgagaagaggcagctggcacacagccctgggtgccaagtgtccctccttggtgaatttgaggagagatggattcacactgggcccattcacttcacagg

SEQ ID NO: 290495 - DNA, 1935 bp, Artificial Sequence
  derived and/or modified sequence
atggacctgcagcagagcaccaccatcaccagcctggagaagtggtgcctggacgagagcctgagcggctgcagaagacactacagcgtgaagaagaagctgaagctgatcagagtgctgggcctgttcatgggcctggtggccatcagcaccgtgagcttcagcatcagcgccttcagcgagaccgacacccagagcaccggcgaggccagcgtggtgagcggccccagagtggcccagggctaccaccagagaaccctgctggacctgaacgacaagatcctggactacaccccccagccccccctgagcaaggagggcgagagcgagaacagcaccgaccacgcccagggcgactaccccaaggacatcttcagcctggaggagagaagaaagggcgccatcatcctgcacgtgatcggcatgatctacatgttcatcgccctggccatcgtgtgcgacgagttcttcgtgcccagcctgaccgtgatcaccgagaagctgggcatcagcgacgacgtggccggcgccaccttcatggccgccggcggcagcgcccccgagctgttcaccagcctgatcggcgtgttcatcgcccacagcaacgtgggcatcggcaccatcgtgggcagcgccgtgttcaacatcctgttcgtgatcggcatgtgcgccctgttcagcagagagatcctgaacctgacctggtggcccctgttcagagacgtgagcttctacatcgtggacctgatcatgctgatcatcttcttcctggacaacgtgatcatgtggtgggagagcctgctgctgctgaccgcctacttctgctacgtggtgttcatgaagttcaacgtgcaggtggagaagtgggtgaagcagatgatcaacagaaacaaggtggtgaaggtgaccgcccccgaggcccaggccaagcccagcgccgccagagacaaggacgagcccaccctgcccgccaagcccagactgcagagaggcggcagcagcgccagcctgcacaacagcctgatgagaaacagcatcttccagctgatgatccacaccctggaccccctggccgagggcagattcagagagaaggccagcatcctgcacaagatcgccaagaagaagtgccacgtggacgagaacgagagacagaacggcgccgccaaccacgtggagaagatcgagctgcccaacagcaccagcaccgacgtggagatgacccccagcagcgacgccagcgagcccgtgcagaacggcaacctgagccacaacatcgagggcgccgaggcccagaccgccgacgaggaggaggaccagcccctgagcctggcctggcccagcgagaccagaaagcaggtgaccttcctgatcgtgttccccatcgtgttccccctgtggatcaccctgcccgacgtgagaaagcccagcagcagaaagttcttccccatcaccttcttcggcagcatcacctggatcgccgtgttcagctacctgatggtgtggtgggcccaccaggtgggcgagaccatcggcatcagcgaggagatcatgggcctgaccatcctggccgccggcaccagcatccccgacctgatcaccagcgtgatcgtggccagaaagggcctgggcgacatggccgtgagcagcagcgtgggcagcaacatcttcgacatcaccgtgggcctgcccctgccctggctgctgtacaccgtgatccacagattccagcccgtggccgtgagcagcaacggcctgttctgcgccatcgtgctgctgttcatcatgctgctgttcgtgatcctgagcatcgccctgtgcaagtggagaatgaacaagatcctgggcttcatcatgttcggcctgtacttcgtgttcctggtggtgagcgtgctgctggaggacagaatcctgacctgccccgtgagcatctag

SEQ ID NO: 290496 - protein, 189 aa, Artificial Sequence
  derived and/or modified sequence
MQPMSFGWDHSLHKRKRLPPVKRSLVYYLKNREVRLQNETSYSRVLHGYAAQQLPSLLKEREFHLGTLNKVFASQWLNHRQVVCGTKCNTLFVVDVQTSQITKIPILKDREPGGVTQQGCGIHAIELNPSRTLLATGGDNPNSLAIYRLPTLDPVCVGDDGHKDWIFSIAWISDTMAVSGSRDGSMGLW

SEQ ID NO: 290497 - DNA, 570 bp, Artificial Sequence
  derived and/or modified sequence
atgcagcccatgagcttcggctgggaccacagcctgcacaagagaaagagactgccccccgtgaagagaagcctggtgtactacctgaagaacagagaggtgagactgcagaacgagaccagctacagcagagtgctgcacggctacgccgcccagcagctgcccagcctgctgaaggagagagagttccacctgggcaccctgaacaaggtgttcgccagccagtggctgaaccacagacaggtggtgtgcggcaccaagtgcaacaccctgttcgtggtggacgtgcagaccagccagatcaccaagatccccatcctgaaggacagagagcccggcggcgtgacccagcagggctgcggcatccacgccatcgagctgaaccccagcagaaccctgctggccaccggcggcgacaaccccaacagcctggccatctacagactgcccaccctggaccccgtgtgcgtgggcgacgacggccacaaggactggatcttcagcatcgcctggatcagcgacaccatggccgtgagcggcagcagagacggcagcatgggcctgtggtag

SEQ ID NO: 290498 - DNA, 570 bp, Artificial Sequence
  derived and/or modified sequence
atgcagcctatgtcattcggatgggaccattctctgcacaagcgcaagaggttacctcccgtgaaaaggtctctggtgtactatttgaaaaaccgggaggtacggctgcagaacgagacctcatattcaagagtcctgcatggatatgccgctcaacagttaccttcactgctcaaggagcgcgagtttcacctcggaactctcaacaaggtgtttgcatcccagtggctgaatcacaggcaggtcgtatgcggcaccaaatgcaataccctgtttgtggtcgatgtgcagacgtcacagataactaaaattcctatattgaaggacagagagccgggtggcgttacacagcagggctgcggtatccatgccatcgagctgaatccttcccgaacactgttagctaccggaggtgacaacccaaactccctggctatctaccgattgcctacacttgatcccgtgtgtgtgggggatgacggccacaaggactggattttttctatcgcgtggatttcagataccatggctgtgtccgggtctcgtgatggctcaatgggcctgtggtag

SEQ ID NO: 290499 - DNA, 570 bp, Artificial Sequence
  derived and/or modified sequence
atgcagcccatgagctttggctgggaccacagcctgcacaagaggaagaggctgccccctgtgaagaggagcctggtgtactacctgaagaaccgggaggtgcggctgcagaatgagaccagctacagccgggtgctgcacggctacgccgcccagcagctgcccagcctgctgaaggagcgggagttccacctgggcaccctgaacaaggtgtttgccagccagtggctgaaccaccggcaggtggtgtgtggcaccaagtgcaacaccctgtttgtggtggatgtgcagaccagccagatcaccaagatccccatcctgaaggaccgggagcccggcggcgtgacccagcagggctgcggcatccacgccatcgagctgaaccccagcaggaccctgctggccaccggcggggacaaccccaacagcctggccatctaccgcctgcccaccctggaccctgtgtgtgtgggagatgatggccacaaggactggatcttcagcatcgcctggatcagtgacaccatggctgtgtctggcagcagagatggctccatgggcctgtggtag

SEQ ID NO: 290500 - DNA, 570 bp, Artificial Sequence
  derived and/or modified sequence
atgcagcccatgagcttcggctgggaccacagcctgcacaagcggaagaggctgccccccgtgaagagatctctggtttattacctgaagaacagggaggtgcgactgcagaatgaaacatcctatagccgggtgctccacggctatgccgctcagcaactgccttcgcttttaaaggaacgagagtttcacttaggcactttgaacaaggtgtttgcaagccagtggttgaaccatcggcaggtagtttgcggcacgaagtgcaataccctgttcgtggtggatgttcaaacatcccagatcaccaagattccaattctcaaggatagagaacctgggggggtgactcagcagggttgtggtatccacgccattgagctgaaccccagcaggacgttactcgcaaccggcggggacaatcccaattccttagccatttatagactccctacgctggatccagtttgtgtgggcgacgacggccataaagattggattttctctattgcgtggatttccgacactatggctgtgtctggctccagggacggaagcatgggtttgtggtag

SEQ ID NO: 290501 - DNA, 570 bp, Artificial Sequence
  derived and/or modified sequence
atgcagccaatgtcattcggctgggatcatagtctacataaacgcaagaggttgccacccgtcaaacggagtctggtttactatctgaaaaatcgggaagttcgcttgcaaaacgaaaccagctactcgcgggttcttcatggctacgccgctcagcagctgccttcgctcctaaaagaacgtgaattccatcttggcacccttaacaaggtgtttgcttcacagtggctgaaccatcggcaggttgtgtgcggtacaaaatgtaacactttgtttgtcgtagacgtccaaacctcgcagattaccaaaatccccatcttgaaggacagggaaccaggaggagtgacacagcaggggtgtggcattcacgccattgaactgaatccttcccggactctgcttgctactggtggagacaaccccaattcacttgccatctaccgccttcccactcttgatcccgtgtgcgtgggagatgacgggcataaggattggatattcagcattgcttggatctctgacaccatggctgtgagtgggtcacgcgatggatccatgggcctctggtag

SEQ ID NO: 290502 - DNA, 676 bp, Artificial Sequence
  derived and/or modified sequence
tgatgatgcatccctggaagacctgggagccaggtctggctccttggactgtatcttccgtgctccagtgggagtacagactgagagggagaagggggctgggtagagatgcagcccatgtcgtttggctgggatcactcgcttcacaaaaggaaaagacttcctcctgtgaagagatccttagtatactacttgaagaaccgggaagtcaggctacagaatgaaaccagctactctcgagtgttgcatggttatgcagcacagcaacttcccagtctcctgaaggagagagagtttcaccttgggacccttaataaagtgtttgcatctcagtggttgaatcataggcaagtggtgtgtggcacaaaatgcaacacgctatttgtcgtagatgtccagacaagccagatcaccaagatccccattctgaaagaccgggagcctggaggtgtgacccagcagggctgtggtatccatgccatcgagctgaatccttctagaacactgctagccactggaggagacaaccccaacagtcttgccatctatcgactacctacgctggatcctgtgtgtgtaggagatgatggacacaaggactggatcttttccatcgcatggatcagcgacactatggcagtgtctggctcacgtgatggttctatgggactctggg

SEQ ID NO: 290503 - protein, 481 aa, Artificial Sequence
  derived and/or modified sequence
MLRNDIYRCRASGIFLRLEGGGLIAGNNIYHNAEAGVDIRKKSNPLILCNQIHHGLRSGIVVLGNGKGIIRNNQIFSNKEAGIYILYHGNPVVSGNHIFKGRAAGIAVNENGKGLITENVIRENQWGGVDIRRGGIPVLRSNLICFGYSDGVVVGDEGKGLIEGNTIYANKGCGVWMMSSSLPHVTSNHVSYNGLYGVAVFSQKDGSSELPRGHRAQENFSEDGDAILWETELEKEDDPLRRPITIALVESNSINHNGASGLYVQSSEALHVITNVIHANGDRGITVAQSSQPTRVANNSISCNRQSGVKVEAQCKVELRGNGIYDNRGHGIITKGDSTIVIENDIIGNRGSGLQLLPRSDTKVIKNRIHSFRAYGIAVRGRAKALVQENIIFQGKTSKTIFQQISNNRECIMQNNKFLVFKKKSDTWRLVNPPARPHLENSLRRPSAAHNGQKVTAMATRITARVEGGYHSNRSVFCTIL

SEQ ID NO: 290504 - DNA, 1446 bp, Artificial Sequence
  derived and/or modified sequence
atgctgagaaacgacatatatcgctgtagggcctccggaatatttctgcgattggaaggaggagggcttatcgcgggaaacaatatctaccacaatgcagaagccggtgtggacattcgcaaaaaaagtaatcccctgattctctgcaaccaaattcatcatgggctgaggtcggggattgtcgtgctgggcaatggtaaaggcatcatcaggaataaccaaatcttcagcaacaaagaggccggaatttatattttgtaccacggcaacccagtggttagtggaaatcacatctttaagggccgtgcagccggaatcgctgtgaacgagaatgggaaggggctgatcacagaaaatgtgattcgagagaatcaatggggcggggttgacatcagaagaggcggaatacctgtgttaagatcgaatttgatctgttttggctactctgatggggtggtggtgggcgatgagggcaagggcttgatcgaaggcaacacgatctatgccaataaggggtgtggcgtctggatgatgtccagctccctgccccacgtgacgtccaatcacgtgtcctacaacggtctgtatggcgtggctgttttctcacagaaggatgggagcagcgaactgcccagaggacacagggctcaggagaattttagcgaggatggagacgccatactctgggagaccgaactggaaaaagaggatgatccactgaggagacccattaccatagcacttgtggagtccaatagtattaatcacaacggggctagtggcctttatgttcaatccagtgaagcgttgcacgtaataaccaatgtgatccacgccaatggtgaccgcggaatcactgttgcccagagctcacaaccaactcgcgtcgccaataactctatcagctgtaatcggcagtcaggggtgaaagtggaagctcagtgcaaagtggagctccgcggcaatggcatttatgacaatcggggtcatggaattatcacgaagggagactccacaattgtaattgagaacgacattattggcaatcgcggctccggcctgcagctgttgccccgtagtgatacaaaagtgattaagaataggattcactcttttagagcttacggaattgccgtgcgcggacgagctaaggccctcgttcaagaaaacatcattttccaggggaaaactagcaagacgatattccagcagatctctaataatcgagagtgtatcatgcagaataataagtttttggtgtttaagaagaagagcgatacctggcgactcgtaaatccgcctgcccggccccacttagagaatagtctccggcgacctagcgccgcccataatggccaaaaggttactgctatggccacccgtatcacagcgcgcgtggaaggggggtatcacagtaaccggagcgttttctgtacgattctctag

SEQ ID NO: 290505 - DNA, 1446 bp, Artificial Sequence
  derived and/or modified sequence
atgctgagaaatgacatctaccgctgccgggccagcggcatcttcctgcggctggagggcggcggcctgattgctggcaacaacatctaccacaatgctgaggccggcgtggacatcaggaagaagagcaaccccctcatcctgtgcaaccagatccaccacggcctgcggagcggcatcgtggtgctgggcaatggcaagggcatcatccggaacaaccagatcttcagcaacaaggaggccggcatctacatcctgtaccacggcaaccctgtggtgtctggcaaccacatcttcaagggccgggccgccggcattgctgtgaatgaaaatggcaagggcctcatcacagaaaatgtcatccgggagaaccagtggggcggcgtggacatccggcggggcggcatccctgtgctgcggagcaacctgatctgcttcggctacagtgatggagtggtggtgggagatgagggcaagggcctcatcgagggcaacaccatctatgccaacaagggctgcggcgtgtggatgatgagcagcagcctgccccacgtgaccagcaaccacgtgtcctacaacggcctgtatggagtggccgtgttcagccagaaggatggcagcagcgagctgccccggggccaccgggcccaggagaacttctctgaagatggagatgccatcctgtgggagacagagctggagaaggaggatgaccccctgcggcggcccatcaccatcgccctggtggagagcaacagcatcaaccacaatggagccagcggcctgtatgtgcagagcagcgaggccctgcacgtgatcaccaacgtcatccacgccaacggggaccggggcatcaccgtggcccagagcagccagcccaccagggtggccaacaacagcatcagctgcaaccggcagagcggcgtgaaggtggaggcccagtgcaaggtggagctgcggggaaatggcatctatgacaacagaggccacggcatcatcaccaagggggacagcaccatcgtgattgaaaatgacatcatcggcaacagaggcagcggcctgcagctgctgcccaggagtgacaccaaggtgatcaagaaccgcatccacagcttccgggcctatggaattgctgtgcggggccgggccaaggccctggtgcaggagaacatcatcttccagggcaagaccagcaagaccatcttccagcagatcagcaacaaccgggagtgcatcatgcagaacaacaagttcctggtgttcaagaagaagagtgacacctggaggctggtgaaccccccagcccggccccacctggagaacagcctgcggcggcccagcgctgcccacaacggccagaaggtgacagccatggccacccgcatcacagcccgggtggagggcggctaccacagcaacagatctgtgttctgcaccatcctgtag

SEQ ID NO: 290506 - DNA, 1446 bp, Artificial Sequence
  derived and/or modified sequence
atgctgcggaacgacatctaccggtgccgggccagcggcatcttcctcagactggaaggaggcgggctaatcgctggcaacaatatttaccataacgccgaggctggggttgatatcagaaaaaagagtaaccccctcatcctctgcaatcagattcaccatgggctgaggagcggtatagtggtgttgggaaatggaaagggaatcatccgaaataaccagatcttttctaataaggaagccggaatttacatcctctaccatgggaatcctgtggtctccggaaaccatatcttcaaagggagggccgccgggattgccgtcaacgagaatggcaaggggttgataaccgagaatgtgatcagggagaatcagtggggtggagtcgacattcgacggggtggaatcccagtactgaggagcaatttgatctgctttggatactcggacggtgtcgttgtcggggacgaaggcaaaggccttatcgagggaaacacaatctacgcgaataaaggatgcggggtctggatgatgtcatccagcctgccccacgttacgtccaatcacgtgtcctacaatggcctgtacggcgtagccgttttttcccagaaagacggcagttctgaacttcctagaggacaccgggcccaggagaattttagtgaggacggggacgccatcttatgggagaccgaacttgagaaggaggatgatccgctgaggaggccgattacgatagcactggtggaatccaacagcataaatcacaacggtgcgtcaggactgtacgtgcaatccagcgaggctctccatgtcatcacgaatgttatacatgccaatggcgaccgaggaatcacagttgcccagtcctctcaaccaaccagggtcgctaataattctatctcttgtaacagacagagcggtgtgaaggtggaagcccagtgtaaagtcgaactccggggtaacggtatttacgataatcgcggccatggcattattactaagggtgattcaaccatagtgatagagaacgacattatcggtaaccgtggaagcgggcttcagcttcttcccaggagcgatacaaaggtgattaagaaccgaatacacagcttccgggcatacggtattgcagtgcgcggccgtgctaaagccctggtgcaggagaacataatattccaaggaaaaaccagtaagacaatctttcagcagatatctaacaatagggagtgcatcatgcaaaataataaatttttagtcttcaaaaagaaaagcgacacttggcgactcgttaacccacctgccaggccccatctcgaaaacagcttacgccgcccaagtgcagctcacaacggacagaaggtcactgccatggccacaagaattaccgcccgggtcgaaggcggctaccattccaataggagtgtattctgcactatactctag

SEQ ID NO: 290507 - DNA, 1446 bp, Artificial Sequence
  derived and/or modified sequence
atgctccgaaacgacatttacagatgcagggcatccgggatctttcttaggcttgagggaggtgggctgattgccggaaataacatttaccataacgccgaggccggagtggatatccggaagaagtcaaaccccctgatactctgtaaccagattcatcacggactgcgatccgggatcgtagtattgggcaatggaaaaggtattatcagaaataatcagattttcagtaataaggaagctgggatatatattctgtaccatggcaatcccgtggtaagcggcaaccatatcttcaaggggagggctgccggtatcgcagtcaatgaaaatggcaaggggcttatcacggagaacgtgatccgtgaaaatcagtgggggggagtcgacataaggaggggcggtatcccagtgcttcgtagtaacctgatttgcttcggctattcagacggggtcgtagtgggcgatgaaggcaagggccttatcgaaggtaacacgatttacgcaaataaggggtgcggggtgtggatgatgtccagctccctcccgcacgtgacatcaaaccatgtgagttacaacgggctatatggggtcgcagtgttttcacagaaggatggaagcagcgagcttcctagaggccatagggcccaggagaatttctctgaagacggtgacgccatactctgggagacagagctggagaaagaagacgatcctttaagaaggcccatcactatcgccctggtggagtcaaactctatcaaccacaacggggcttctgggctgtatgttcagtctagcgaagctctgcacgtgatcaccaatgtaatccatgcaaacggagatcggggaattactgtcgcccaaagcagtcaacccacaagagtggccaacaatagcatctcctgcaatagacagtcaggagtcaaggtggaagcccagtgcaaggtcgagctgcgagggaacggaatctacgataaccgcggtcatggtatcatcactaagggtgacagcaccatcgttatcgagaacgatatcatcgggaatcgcggttcaggcctccagcttctgccgcgttcagacaccaaggtgataaagaaccggattcacagcttccgggcttatggcatcgcggtgcgcggacgggcaaaggcactggtgcaggagaacataatcttccagggcaaaaccagtaagacaatatttcagcagatctccaataatagggagtgtatcatgcaaaacaataagttcctggtgttcaaaaaaaagtctgacacctggcggctcgtcaatccacccgcacggccacatttggagaacagcctacggagacctagtgctgctcacaacgggcagaaggtcactgccatggctactaggataaccgcacgcgtggagggtgggtaccactccaatcggagtgtgttctgtacgattctctag

SEQ ID NO: 290508 - DNA, 1446 bp, Artificial Sequence
  derived and/or modified sequence
atgctgagaaacgacatctacagatgcagagccagcggcatcttcctgagactggagggcggcggcctgatcgccggcaacaacatctaccacaacgccgaggccggcgtggacatcagaaagaagagcaaccccctgatcctgtgcaaccagatccaccacggcctgagaagcggcatcgtggtgctgggcaacggcaagggcatcatcagaaacaaccagatcttcagcaacaaggaggccggcatctacatcctgtaccacggcaaccccgtggtgagcggcaaccacatcttcaagggcagagccgccggcatcgccgtgaacgagaacggcaagggcctgatcaccgagaacgtgatcagagagaaccagtggggcggcgtggacatcagaagaggcggcatccccgtgctgagaagcaacctgatctgcttcggctacagcgacggcgtggtggtgggcgacgagggcaagggcctgatcgagggcaacaccatctacgccaacaagggctgcggcgtgtggatgatgagcagcagcctgccccacgtgaccagcaaccacgtgagctacaacggcctgtacggcgtggccgtgttcagccagaaggacggcagcagcgagctgcccagaggccacagagcccaggagaacttcagcgaggacggcgacgccatcctgtgggagaccgagctggagaaggaggacgaccccctgagaagacccatcaccatcgccctggtggagagcaacagcatcaaccacaacggcgccagcggcctgtacgtgcagagcagcgaggccctgcacgtgatcaccaacgtgatccacgccaacggcgacagaggcatcaccgtggcccagagcagccagcccaccagagtggccaacaacagcatcagctgcaacagacagagcggcgtgaaggtggaggcccagtgcaaggtggagctgagaggcaacggcatctacgacaacagaggccacggcatcatcaccaagggcgacagcaccatcgtgatcgagaacgacatcatcggcaacagaggcagcggcctgcagctgctgcccagaagcgacaccaaggtgatcaagaacagaatccacagcttcagagcctacggcatcgccgtgagaggcagagccaaggccctggtgcaggagaacatcatcttccagggcaagaccagcaagaccatcttccagcagatcagcaacaacagagagtgcatcatgcagaacaacaagttcctggtgttcaagaagaagagcgacacctggagactggtgaacccccccgccagaccccacctggagaacagcctgagaagacccagcgccgcccacaacggccagaaggtgaccgccatggccaccagaatcaccgccagagtggagggcggctaccacagcaacagaagcgtgttctgcaccatcctgtag

SEQ ID NO: 290509 - DNA, 585 bp, Artificial Sequence
  derived and/or modified sequence
atggaccaaaatctgaacttttttagcgtcagcagcgatggacgcattgtcagttggacacttgttaagcgtaaactggtacatattgacgtgatcaagctgaaagtggaaggctcaacgacagaagttcccgagggtctgcagctccaccctgtggggtgcggtaccgcgtttgatttccataaagaaattgattacatgtttttggttggtacagaagaaggtaagatatataagtgtagcaagagttatagttctcagtttctggatacctacgacgcccacaatatgagtgtcgacacggtctcctggaatccgtatcacacaaaggtgtttatgtcttgtagttctgactggaccgtcaaaatttgggatcacaccattaaaactcctatgttcatatacgacctgaacagtgctgttggcgacgtggcctgggctccttacagctccaccgtttttgcggccgtgactacggacggaaaagagaaaaaagggcaggaggtgcaaaaggggccagccgtggaaatcgcgaagttagacaaactgttaaatctcgtgcgcgaagtgaaaattaaaacatag

SEQ ID NO: 290510 - DNA, 429 bp, Artificial Sequence
  derived and/or modified sequence
tgatgcggcaccgcttttgacttccacaaggagatcgattacatgttcttggtggggactgaagaaggtaagatttacaagtgctctaaatcctattccagtcagttcctggacacctacgacgctcacaatatgtcagtggacacagtaagttggaacccttaccatacaaaagtttttatgtcatgcagcagcgattggacagtgaagatctgggatcatacaattaagacacctatgtttatatatgatctaaactctgcggttggggacgttgcttgggctccctactcgagcacggtatttgcagcagtaacaactgatggcaaggaaaaaaaggggcaggaggtgcagaaagggcctgcagttgaaatagctaaactggacaaactgctaaacctcgtccgcgaagtgaagattaagacatag

SEQ ID NO: 290511 - DNA, 585 bp, Artificial Sequence
  derived and/or modified sequence
atggaccagaacctgaacttcttctctgtgtccagtgatggccgcatcgtgtcctggaccctggtgaagaggaagctggtgcacattgatgtgatcaagctgaaggtggagggcagcaccacagaggtgcctgagggcctgcagctgcaccctgtgggctgcggcacagcctttgacttccacaaggagattgactacatgttcctggtgggcacagaggagggcaagatctacaagtgcagcaagagctacagcagccagttcctggacacctatgatgcccacaacatgtctgtggacacagtgtcctggaacccctaccacaccaaggtgttcatgagctgcagcagtgactggacagtgaagatctgggaccacaccatcaagacccccatgttcatctatgacctgaacagcgctgtgggagatgtggcctgggccccctacagcagcacagtgtttgctgctgtgaccacagatggcaaggagaagaagggccaggaggtgcagaagggccctgctgtggagatcgccaagctggacaagctgctgaacctggtgcgggaggtgaagatcaagacctag

SEQ ID NO: 290512 - DNA, 429 bp, Artificial Sequence
  derived and/or modified sequence
tgatgtggcacagcctttgacttccacaaggagattgactacatgttcctggtgggcacagaggagggcaagatctacaagtgcagcaagagctacagcagccagttcctggacacctatgatgcccacaacatgtctgtggacacagtgtcctggaacccctaccacaccaaggtgttcatgagctgcagcagtgactggacagtgaagatctgggaccacaccatcaagacccccatgttcatctatgacctgaacagcgctgtgggagatgtggcctgggccccctacagcagcacagtgtttgctgctgtgaccacagatggcaaggagaagaagggccaggaggtgcagaagggccctgctgtggagatcgccaagctggacaagctgctgaacctggtgcgggaggtgaagatcaagacctag

SEQ ID NO: 290513 - DNA, 585 bp, Artificial Sequence
  derived and/or modified sequence
atggaccagaacctgaacttcttcagcgtgagcagcgacggccggattgtctcctggacgttagtcaagcgaaaactcgtccatatagacgttattaagctcaaggtcgaggggtcaactacagaggtgcctgagggactgcagctgcatccagtgggctgcggaactgcctttgatttccataaagagatcgactacatgtttctcgtaggaaccgaggaggggaagatttacaaatgcagcaaaagctacagcagccagtttctcgatacctacgacgcgcacaacatgagcgtggacaccgtgtcctggaatccctaccacaccaaagtgtttatgtcgtgtagctctgattggacggtgaaaatttgggaccacactatcaagactcctatgttcatatacgatcttaattcggccgttggcgacgtagcatgggctccctactcctctacagtcttcgccgcagttacaaccgacggaaaagagaagaaaggccaagaagtgcagaagggacccgcggtcgagattgctaagctggataagctgttgaatcttgttcgggaggtaaaaattaaaacatag

SEQ ID NO: 290514 - DNA, 429 bp, Artificial Sequence
  derived and/or modified sequence
tgatgcggcaccgccttcgacttccacaaggagatcgactacatgttcttagtcggcacggaggaagggaaaatctacaagtgtagtaagtcttactcatctcagtttctcgatacctacgatgcacacaacatgtccgtggacactgtttcgtggaacccgtaccacaccaaggtgtttatgtcgtgcagttccgactggacagtgaagatatgggatcatacaataaagacaccaatgttcatttatgacttgaactccgcggtgggcgatgtggcctgggctccatatagtagtacggtgttcgccgctgtgactactgacggtaaagagaagaaggggcaagaggtgcaaaagggaccagctgtggaaatagcaaaactcgataagctgttaaacctagtgagggaggtgaagattaaaacctag

SEQ ID NO: 290515 - DNA, 585 bp, Artificial Sequence
  derived and/or modified sequence
atggaccagaaccttaactttttcagcgtctcatccgacggcaggatagtgtcctggacgctggtcaaacggaaactggttcatatcgacgtgattaagctcaaagtcgaaggatcaacgactgaggtcccagagggactgcagcttcatccagtcggttgcggaactgctttcgacttccataaggagatcgactatatgtttttagtggggaccgaagaaggcaagatctataagtgttctaagtcctacagctcccaattcctggacacgtatgatgcccacaatatgtcagtggatactgtgagctggaatccatatcatactaaagtttttatgagctgctcttctgattggaccgtaaaaatttgggaccataccattaagaccccgatgttcatctacgacttgaactccgccgtgggcgatgtggcttgggccccttatagtagcacggtgtttgcagccgtcaccacagacggcaaagaaaaaaagggccaggaagtgcaaaaggggccagcggtggagattgccaagctggacaaactgctgaacctggtcagagaggtgaaaatcaagacatag

SEQ ID NO: 290516 - DNA, 429 bp, Artificial Sequence
  derived and/or modified sequence
tagtgcggaacagccttcgacttccacaaggagatcgactacatgttcttagtcggtacggaggaaggaaaaatatacaaatgtagtaaaagttactcctcccagttcctggatacatatgacgctcacaatatgagtgtcgacaccgtcagttggaacccgtatcatactaaggtctttatgagctgctcctctgactggacagtaaagatctgggaccataccatcaagacacctatgttcatctacgatctgaatagcgcggttggggacgtggcttgggccccatactctagtaccgttttcgcggctgtcacaaccgacggtaaggagaaaaagggccaggaggtgcagaagggccctgccgtggagattgcaaagctggacaaactcttaaacttagtgcgcgaggtgaagatcaaaacctag

SEQ ID NO: 290517 - DNA, 585 bp, Artificial Sequence
  derived and/or modified sequence
atggaccagaacctgaacttcttcagcgtgagcagcgacggcagaatcgtgagctggaccctggtgaagagaaagctggtgcacatcgacgtgatcaagctgaaggtggagggcagcaccaccgaggtgcccgagggcctgcagctgcaccccgtgggctgcggcaccgccttcgacttccacaaggagatcgactacatgttcctggtgggcaccgaggagggcaagatctacaagtgcagcaagagctacagcagccagttcctggacacctacgacgcccacaacatgagcgtggacaccgtgagctggaacccctaccacaccaaggtgttcatgagctgcagcagcgactggaccgtgaagatctgggaccacaccatcaagacccccatgttcatctacgacctgaacagcgccgtgggcgacgtggcctgggccccctacagcagcaccgtgttcgccgccgtgaccaccgacggcaaggagaagaagggccaggaggtgcagaagggccccgccgtggagatcgccaagctggacaagctgctgaacctggtgagagaggtgaagatcaagacctag

SEQ ID NO: 290518 - DNA, 429 bp, Artificial Sequence
  derived and/or modified sequence
tgatgcggcaccgccttcgacttccacaaggagatcgactacatgttcctggtgggcaccgaggagggcaagatctacaagtgcagcaagagctacagcagccagttcctggacacctacgacgcccacaacatgagcgtggacaccgtgagctggaacccctaccacaccaaggtgttcatgagctgcagcagcgactggaccgtgaagatctgggaccacaccatcaagacccccatgttcatctacgacctgaacagcgccgtgggcgacgtggcctgggccccctacagcagcaccgtgttcgccgccgtgaccaccgacggcaaggagaagaagggccaggaggtgcagaagggccccgccgtggagatcgccaagctggacaagctgctgaacctggtgagagaggtgaagatcaagacctag

SEQ ID NO: 290519 - DNA, 656 bp, Artificial Sequence
  derived and/or modified sequence
gttgtggcactgcctttgacttccacaaagagattgactacatgttcctagtgggcacagaggagggaaaaatctacaagtgctctaaatcctactccagccaattcctcgacacctatgacgcccacaacatgtcagtggacactgtgtcctggaacccataccacaccaaggtcttcatgtcctgcagctccgactggacagtgaagatctgggaccacaccatcaagaccccgatgttcatctatgacctgaactcagccgtgggtgatgtggcctgggcgccatactcttctactgtgttcgcagcagtcaccacagatgggaaggaaaagaaggggcaggaggtgcagaagggtccagctgtggagattgcgaaactggacaaactgctgaacctggtgagggaagtgaaaatcaagacctgaggggctggcctcagtctctgtcccatcgcttgaatacagtactcctagggcttgaccctggtacccagcccagccttagcacccagcatgtgaccccactcctgatcaggtcccagcatcttcccttcttgttctgttccttaaggtcccagcaccttaccccaggacttggtcttcaaccaccattacccctctaactttgcacaaataaacctgtgtagaaaccca

SEQ ID NO: 290520 - protein, 200 aa, Artificial Sequence
  derived and/or modified sequence
MMYSPICLTQDEFHPFIEALLPHVRAIAYTWFNLQARKRKYFKKHEKRMSKDEERAVKDELLSEKPEIKQKWASRLLAKLRKDIRQEYREDFVLTVTGKKHPCCVLSNPDQKGKIRRIDCLRQADKVWRLDLVMVILFKGIPLESTDGERLMKSPHCTNPALCVQPHHITVSVKELDLFLAYYVQEQGKNFFSSNKCIKI

SEQ ID NO: 290521 - DNA, 1029 bp, Artificial Sequence
  derived and/or modified sequence
atgatgcgggtgtgttggctggttaggcaggatagccggcatcagagaatccgcttaccccacctcgaagccgtggtaattggtcgtgggccagaaactaagataacggacaaaaagtgttctcggcagcaagtgcagctgaaggcggagtgtaataagggctacgtcaaagtgaagcaggtgggggtaaatccgactagcattgattccgtggtgataggaaaggatcaggaggtgaaactgcagcccggtcaggttctgcatatggtaaatgagctctatccatatatcgtcgagttcgaagaggaggctaagaatcctggcctggagacccacaggaagaggaagaggagcgggaattcagacagcattgagagagacgcagcacaggaagccgaagctgggactggactggaaccaggctctaattccggacagtgtagtgttcctctcaagaaagggaaagatgcccctatcaaaaaggaatcactgggccactggagccagggtctgaagatctctatgcaggatcctaagatgcaggtctacaaggacgagcaggtggttgtgatcaaggacaagtacccaaaagctcgttaccactggctggtgctgccctggacttccataagctcgttaaaagccgtggcccgggagcacttagagctgcttaagcacatgcacaccgttggagaaaaagtaatcgttgacttcgccgggtcgtcaaaactgaggtttcgcctcggctatcacgccattcccagtatgtcacacgtgcatctacatgtgatcagccaagatttcgattccccttgtctcaaaaacaagaaacattggaactcatttaataccgagtattttctcgagagccaggctgtcatcgaaatggttcaggaggccggaagagtaactgtccgcgacgggatgccagagctcctaaaattgccattgcgctgccatgaatgtcagcagctactcccaagtatcccacagctgaaggagcatctccggaaacattggacgcagtag

SEQ ID NO: 290522 - DNA, 1029 bp, Artificial Sequence
  derived and/or modified sequence
atgatgcgcgtgtgctggctggtgcggcaggacagcagacatcaacgcattcgactccctcacctggaggccgtggtgattggccgaggaccggagaccaaaataacagacaagaagtgctctcggcagcaagtccaactgaaggcagaatgcaataaggggtatgtgaaggtgaaacaggtcggtgttaacccaacgtcaattgactctgtggtcataggaaaggaccaagaggttaaattacaacccggtcaggttctccacatggtgaacgagctgtatccttatattgttgaattcgaagaggaggcgaaaaatcccggcctggagacgcaccgcaagagaaaacggtcagggaactcagactccatcgagagagatgccgctcaggaagccgaggccgggacaggcctggagcctggctctaactctgggcagtgtagcgtacctctcaagaagggtaaggacgcaccaattaagaaggagagcttgggccactggagccagggtctgaaaatcagtatgcaggatcctaaaatgcaggtgtacaaagacgaacaagttgtggttatcaaggacaagtaccctaaggctcgctaccattggctggtgttgccgtggacctccatcagctctttaaaagccgtggcccgcgagcacctggaattactgaagcacatgcacacagtgggcgaaaaggtaattgtggatttcgccggatcctctaaactcaggttccggctggggtatcacgccataccgtccatgtcacacgtacatctgcacgttatctcccaggattttgacagcccctgtctaaagaataagaaacactggaacagcttcaatacagagtattttctcgaatctcaggccgtgatcgagatggtacaagaggctggaagggtgaccgtgagagatggtatgcctgagctgctaaagctgccacttcggtgtcatgagtgccagcaattgctcccctccatccctcagctgaaagagcacttgcgaaaacattggactcagtag

SEQ ID NO: 290523 - DNA, 1029 bp, Artificial Sequence
  derived and/or modified sequence
atgatgcgggtgtgctggttggtgagacaagacagccgacaccaacggattcgcttgccgcatctcgaagccgtcgttatcgggcggggcccagaaactaagattaccgacaagaagtgcagcaggcagcaggttcaactgaaagcagagtgcaacaaaggatacgtaaaagtgaagcaggtgggagttaacccaaccagtatcgactcggttgtgatcgggaaggaccaggaggtgaagctgcaacccggccaggtgctgcacatggtgaatgagctctatccatacatagtggaattcgaagaggaagctaagaaccccggactggagacacacaggaagcggaagcgcagcggcaatagcgattccatcgaacgggacgctgcccaggaagcggaggccggaactggtttggagccagggtcaaactccggccagtgttccgtgcccctgaagaaaggcaaagacgcccctatcaaaaaggagagccttggacactggtctcaagggttgaaaatcagtatgcaggacccaaagatgcaggtctacaaggatgaacaggtggtcgtgattaaggataaataccccaaggcgcgctatcactggctggtgctcccttggacttctatctcatcactgaaagctgtggctcgagagcatttggagctcctgaagcacatgcacactgtgggcgaaaaagtcattgtggattttgcaggatcctccaagctacggtttcggctgggatatcacgccattccttccatgagtcacgtgcacctgcacgtcatatcccaggacttcgactcaccttgcctgaagaataagaagcattggaacagttttaatacggaatacttcctggagagccaggcagtgatagagatggtgcaggaagctgggagggttacagttcgcgatggcatgccagaactgcttaagttgccactgcggtgccatgagtgtcagcagctgctgccctccattcctcaactgaaggagcacctaagaaagcattggacgcaatag

SEQ ID NO: 290524 - DNA, 1029 bp, Artificial Sequence
  derived and/or modified sequence
atgatgagggtgtgctggctggtgcggcaggacagccgccaccagaggatccggctgccccacctggaggccgtggtgattggccggggccctgagaccaagatcacagacaagaagtgcagccggcagcaggtgcagctgaaggccgagtgcaacaagggctacgtgaaggtgaagcaggtgggcgtgaaccccaccagcattgacagcgtggtgattggcaaggaccaggaggtgaagctgcagcccggccaggtgctgcacatggtgaatgagctgtacccctacatcgtggagtttgaggaggaggccaagaaccctggcctggagacccacaggaagaggaagaggagcggcaacagcgacagcattgaaagagatgctgcccaggaggccgaggccggcaccggcctggagcccggcagcaacagcggccagtgcagcgtgcccctgaagaagggcaaggatgcccccatcaagaaggagagcctgggccactggagccagggcctgaagatctccatgcaggaccccaagatgcaggtgtacaaggatgagcaggtggtggtgatcaaggacaagtaccccaaggcccgctaccactggctggtgctgccctggaccagcatcagcagcctgaaggctgtggcccgggagcacctggagctgctgaagcacatgcacacagtgggggagaaggtgattgtggactttgctggcagcagcaagctgcgcttccggctgggctaccacgccatccccagcatgagccacgtgcacctgcacgtgatcagccaggactttgacagcccctgcctgaagaacaagaagcactggaacagcttcaacacagagtacttcctggagagccaggccgtcatcgagatggtgcaggaggccggccgggtgacagtgagagatggcatgcctgagctgctgaagctgcccctgcgctgccacgagtgccagcagctgctgcccagcatcccccagctgaaggagcacctgaggaagcactggacccagtag

SEQ ID NO: 290525 - DNA, 1029 bp, Artificial Sequence
  derived and/or modified sequence
atgatgcgggtgtgctggctggtgcggcaggacagccggcaccagcgaataaggctacctcatctggaggccgttgtgattggccgagggcctgagactaagatcactgataaaaaatgctcaagacagcaggttcagctgaaggcggaatgtaataagggctacgtgaaggtgaagcaggtgggggtgaatcccacttctattgatagcgttgtaattggcaaggatcaggaggttaagctccagcctggacaggttttgcacatggtcaatgagttgtacccatacatcgtggaatttgaggaggaagccaagaatcccgggctggaaacccatcggaagcgaaagaggagcggcaattccgattcaatagagagggatgctgctcaggaggcagaggccggtactggtctcgaaccaggttcaaactcaggtcagtgctctgtgccactgaaaaaaggcaaggacgccccaattaagaaggaatccctgggccactggtctcagggccttaagattagcatgcaagaccccaagatgcaggtctacaaagacgaacaagtggtggtcattaaggacaaatatcctaaagcccggtaccactggctggtgctaccatggaccagtatcagctccttgaaggccgtcgcacgcgaacaccttgagctgttgaagcacatgcacaccgtcggcgagaaagttattgtggactttgcaggcagttctaagctgaggttccgacttggatatcatgcaatcccatcgatgtcccacgttcacctgcatgtgatctcacaggatttcgactctccttgtctcaagaacaaaaaacactggaattcttttaacactgaatatttcttggaatcacaggcagtaattgaaatggtgcaggaggcaggccgcgtgactgtgcgggatggtatgccggaattgctcaagcttccattgcgatgccacgaatgccagcagctgctacccagtatccctcaactcaaggagcatttgcgtaagcactggacacagtag

SEQ ID NO: 290526 - DNA, 1029 bp, Artificial Sequence
  derived and/or modified sequence
atgatgcgggtgtgctggctggtgcggcaggacagccggcaccagcgcatccggcttcctcatcttgaagccgtcgtcattgggcgcggccccgaaacgaaaatcaccgataaaaaatgttcccgacagcaggtgcaactgaaggccgaatgcaacaagggctacgttaaagtgaaacaggtgggcgttaacccgaccagcatcgactccgtggtaataggcaaggaccaggaagttaaactgcagcccgggcaggtgctgcatatggttaacgagctgtatccatacattgtggagtttgaggaagaggccaagaatcctggactggaaacccatagaaaacgcaagcgctccggaaatagcgactccattgaacgagacgctgctcaggaggccgaagctggcaccgggctggagccaggatctaatagcggacagtgttcagtgcccctgaagaaggggaaggatgcacctatcaagaaggagtctcttgggcactggtctcaaggtttgaagatttccatgcaggaccccaaaatgcaagtctataaagatgaacaggtcgtggtaataaaagacaagtaccccaaggcccggtatcattggttagtccttccatggacctcgatctcatccctaaaagctgtcgctcgagagcatcttgaactactcaagcatatgcatacagtcggagaaaaggttatcgtagacttcgccggttccagcaagttaaggttccggctgggttaccacgccatcccctctatgtcccatgtacacctgcacgtgatttcccaagacttcgattccccatgcctcaagaacaagaaacattggaactcttttaatacggaatattttctggagagccaagccgttatcgagatggtgcaggaggctggcagagtgactgtgagagacggaatgccagagctgttgaaattgccactccgatgccacgaatgccaacagctgctgccgagcattcctcaactgaaagagcacctgaggaagcattggacgcaatag

SEQ ID NO: 290527 - DNA, 1029 bp, Artificial Sequence
  derived and/or modified sequence
atgatgcgggtgtgctggctggtgcggcaggacagccggcaccagcggattagactgccacatctggaggccgtcgtgattgggcgaggccctgaaaccaagattactgacaagaaatgctctaggcaacaggtccagctgaaggcggagtgcaacaaggggtacgtcaaagtcaagcaggtgggggtgaaccccacctctatagactccgtggtgatagggaaagaccaggaagtcaaactccagcccggccaggtcctacacatggtcaatgagctgtatccttacatagtagagttcgaggaagaagccaaaaatccaggactggaaacccaccgcaaacgcaagcgttcaggaaactcagatagtattgagagggatgcagcccaggaggctgaagcaggcaccgggctggagcctggctcaaactccggacagtgttcagtgcctctgaagaagggtaaggacgctcccatcaagaaagaatctctgggacactggagccagggcttaaaaatttccatgcaggaccctaagatgcaggtgtataaggatgagcaagtggtggtcattaaggataaatatcccaaggcgcgataccactggctggtgttgccttggacgagcatatcctcactaaaagctgttgcacgtgagcacctggagttacttaagcacatgcatacagtgggagagaaagtgattgtcgattttgccgggagcagtaagctccggtttcgactaggataccacgctatcccatccatgagccacgtccacctgcatgttatcagccaggatttcgactccccatgcctgaaaaataagaaacactggaattcctttaacactgagtatttcctggagtcccaggcggtgatcgaaatggtgcaggaagctgggagggttacagtaagagacgggatgcccgaacttctcaagctgcctcttcgatgccatgagtgccagcagttgctcccttctatcccccagctgaaagagcacctccggaagcattggacccaatag

SEQ ID NO: 290528 - DNA, 1029 bp, Artificial Sequence
  derived and/or modified sequence
atgatgagagtttgttggctagtgagacaagactcccgccatcagagaatacgacttccacacctggaggctgtcgtaattggaagaggtcctgagacaaagattaccgataaaaagtgttcccgacagcaggtccagctgaaggcagaatgcaataaaggctatgtaaaggtgaagcaagtaggagtcaaccctacatcgattgacagtgtggtcatcgggaaggatcaggaggttaagcttcagcccggtcaggtgttacatatggtgaacgaactctacccttacatcgtggagtttgaggaggaggcgaaaaacccaggcctagaaacccacaggaagcggaagcgctctgggaatagtgactctattgagagagacgccgctcaggaagcagaggcgggaaccggccttgaaccaggcagcaactctggccagtgttctgtgcctctcaaaaaaggcaaagacgcaccgatcaagaaagagagccttggtcattggagccagggactcaaaatcagcatgcaggatcccaagatgcaggtctacaaggacgagcaggtcgtggtgatcaaggacaagtaccctaaggctcgatatcattggttggtccttccatggacctccataagttctcttaaagcagtggctcgcgaacacttagaattgttaaagcatatgcacactgtgggagagaaagtgatcgtggacttcgcagggtcatccaagctgaggtttcggctggggtatcatgcaatcccatccatgtcacatgtgcatctgcatgtgatctcacaggactttgacagcccttgcctgaagaacaagaagcactggaatagtttcaatacggaatacttcctggagagccaagctgtcatcgagatggtgcaagaagccggtcgagtgacagtacgggatggcatgccagaattactcaagcttccactgcgatgtcacgaatgtcagcaactcctacccagcattccacagctcaaggagcatctgcggaagcattggacacagtag

SEQ ID NO: 290529 - DNA, 1029 bp, Artificial Sequence
  derived and/or modified sequence
atgatgagagtttgctggctcgtgcgacaggactcccgccatcagcgcattagactgccacacctggaagctgtagtgattggaagagggcctgagaccaagatcactgataagaaatgctccaggcagcaggtgcagttgaaggcagaatgtaacaaaggctacgtgaaagtgaaacaggttggggttaatcccacaagtatcgactcagtggtgattggcaaagatcaggaggtgaaactccagcccggacaagtgcttcatatggtgaacgagctgtatccgtatattgtagaattcgaagaagaagcgaagaacccagggctggaaactcacaggaagcgaaagcggtcgggcaatagcgacagcattgagcgagatgccgctcaagaggctgaggcgggaacagggttagaacctggatcaaattcaggacaatgttccgtgccactgaagaagggaaaagacgcacccataaagaaagagtccctcggacactggagccaggggctgaaaatcagcatgcaggacccgaagatgcaggtctataaggatgaacaggtggtcgtgattaaagataagtatccaaaggccagatatcactggttggtgctcccttggaccagcatctccagccttaaggctgtcgctcgagagcatttagagcttctgaaacacatgcatactgtgggcgagaaagtgatcgtggactttgctggatcaagcaaactgaggtttcgcctcggctaccacgccattccaagcatgtcccacgtccacctgcacgttatatctcaggactttgatagcccctgcctgaagaacaaaaaacactggaatagcttcaacacagaatatttcctcgaatctcaggcagtgatagagatggtgcaggaggctggtagagtgactgtccgcgacggcatgcctgagctgctcaagctcccactacgctgccatgaatgtcagcagctcttgcctagtatcccacagctcaaggagcatctgaggaagcactggacccagtag

SEQ ID NO: 290530 - DNA, 1029 bp, Artificial Sequence
  derived and/or modified sequence
atgatgcgggtgtgctggttagtgcgccaggatagcagacatcagagaatccgcctaccacatcttgaggcggttgtgatcggcagagggcctgagactaaaattaccgataaaaagtgtagtcgtcagcaggtacagctgaaagctgagtgcaacaaaggatatgtgaaagtcaagcaggtaggcgtaaatcccacatcaattgattccgtggttattgggaaagaccaggaagtgaaactgcagcccggacaggtgcttcacatggttaacgagctgtacccctacattgtggagtttgaagaggaggctaagaatcccggactcgagacacaccgaaaacgtaagcgcagcgggaacagcgattctatcgagcgagacgccgctcaagaggctgaggccggtactgggctggaaccgggaagtaatagcggacagtgtagtgtcccacttaagaaaggtaaagacgcacctatcaaaaaggagtcacttggccattggtcccaaggactaaagatctctatgcaagaccccaagatgcaggtttacaaggacgaacaagtggtagtgataaaggacaaatacccgaaggcaaggtatcactggttagttttaccgtggacttcgattagtagcctaaaggccgtggcacgagagcacctggagctgttgaaacacatgcatacagtgggagaaaaggtgattgttgattttgctggctcctccaaacttaggttcaggttaggatatcacgctatcccttcaatgagccacgtccatcttcacgttatttctcaagattttgactccccttgtctaaaaaacaagaaacattggaactcttttaataccgaatactttctggagtctcaggccgtcatcgagatggtgcaggaagctggcagagttactgttcgggatggaatgcctgaacttctgaagcttcctctgagatgtcatgagtgtcagcagctgctgccctctatccctcaactgaaggagcacttgcgtaagcactggacacagtag

SEQ ID NO: 290531 - DNA, 1029 bp, Artificial Sequence
  derived and/or modified sequence
atgatgagagtgtgctggctggtgagacaggacagcagacaccagagaatcagactgccccacctggaggccgtggtgatcggcagaggccccgagaccaagatcaccgacaagaagtgcagcagacagcaggtgcagctgaaggccgagtgcaacaagggctacgtgaaggtgaagcaggtgggcgtgaaccccaccagcatcgacagcgtggtgatcggcaaggaccaggaggtgaagctgcagcccggccaggtgctgcacatggtgaacgagctgtacccctacatcgtggagttcgaggaggaggccaagaaccccggcctggagacccacagaaagagaaagagaagcggcaacagcgacagcatcgagagagacgccgcccaggaggccgaggccggcaccggcctggagcccggcagcaacagcggccagtgcagcgtgcccctgaagaagggcaaggacgcccccatcaagaaggagagcctgggccactggagccagggcctgaagatcagcatgcaggaccccaagatgcaggtgtacaaggacgagcaggtggtggtgatcaaggacaagtaccccaaggccagataccactggctggtgctgccctggaccagcatcagcagcctgaaggccgtggccagagagcacctggagctgctgaagcacatgcacaccgtgggcgagaaggtgatcgtggacttcgccggcagcagcaagctgagattcagactgggctaccacgccatccccagcatgagccacgtgcacctgcacgtgatcagccaggacttcgacagcccctgcctgaagaacaagaagcactggaacagcttcaacaccgagtacttcctggagagccaggccgtgatcgagatggtgcaggaggccggcagagtgaccgtgagagacggcatgcccgagctgctgaagctgcccctgagatgccacgagtgccagcagctgctgcccagcatcccccagctgaaggagcacctgagaaagcactggacccagtag

SEQ ID NO: 290532 - protein, 933 aa, Artificial Sequence
  derived and/or modified sequence
MGTQDPGNMGTGVPASEQISCAKEDPQVYCPEETGGTKDVQVTDCKSPEDSRPPKETDCCNPEDSGQLMVSYEGKAMGYQVPPFGWRICLAHEFTEKRKPFQANNVSLSNMIKHIGMGLRYLQWWYRKTHVEKKTPFIDMINSVPLRQIYGCPLGGIGGGTITRGWRGQFCRWQLNPGMYQHRTVIADQPICPLKFTVCLRREGQTVYQQVLSLERPSVLRSWNWGLCGYFAFYHALYPRAWTVYQLPGQNVTLTCRQITPILPHDYQDSSLPVGVFVWDVENEGDEALDVSIMFSMRNGLGGGDDAPGGLWNEPFCLERSGETVRGLLLHHPTLPNPYTMAVAARVTAATTVTHITAFDPDSTGQQVWQDLLQDGQLDSPTGQSTPTQKGVGIAGAVCVSSKLRPRGQCRLEFSLAWDMPRIMFGAKGQVHYRRYTRFFGQDGDAAPALSHYALCRYAEWEERISAWQSPVLDDRSLPAWYKSALFNELYFLADGGTVWLEVLEDSLPEELGRNMCHLRPTLRDYGRFGYLEGQEYRMYNTYDVHFYASFALIMLWPKLELSLQYDMALATLREDLTRRRYLMSGVMAPVKRRNVIPHDIGDPDDEPWLRVNAYLIHDTADWKDLNLKFVLQVYRDYYLTGDQNFLKDMWPVCLAVMESEMKFDKDHDGLIENGGYADQTYDGWVTTGPSAYCGGLWLAAVAVMVQMAALCGAQDIQDKFSSILSRGQEAYERLLWNGRYYNYDSSSRPQSRSVMSDQCAGQWFLKACGLGEGDTEVFPTQHVVRALQTIFELNVQAFAGGAMGAVNGMQPHGVPDKSSVQSDEVWVGVVYGLAATMIQEGLTWEGFQTAEGCYRTVWERLGLAFQTPEAYCQQRVFRSLAYMRPLSIWAMQLALQQQQHKKASWPKVKQGTGLRTGPMFGPKEAMANLSPE

SEQ ID NO: 290533 - DNA, 2802 bp, Artificial Sequence
  derived and/or modified sequence
atgggcacccaggaccccggcaacatgggcaccggcgtgcccgccagcgagcagatcagctgcgccaaggaggacccccaggtgtactgccccgaggagaccggcggcaccaaggacgtgcaggtgaccgactgcaagagccccgaggacagcagaccccccaaggagaccgactgctgcaaccccgaggacagcggccagctgatggtgagctacgagggcaaggccatgggctaccaggtgccccccttcggctggagaatctgcctggcccacgagttcaccgagaagagaaagcccttccaggccaacaacgtgagcctgagcaacatgatcaagcacatcggcatgggcctgagatacctgcagtggtggtacagaaagacccacgtggagaagaagacccccttcatcgacatgatcaacagcgtgcccctgagacagatctacggctgccccctgggcggcatcggcggcggcaccatcaccagaggctggagaggccagttctgcagatggcagctgaaccccggcatgtaccagcacagaaccgtgatcgccgaccagcccatctgccccctgaagttcaccgtgtgcctgagaagagagggccagaccgtgtaccagcaggtgctgagcctggagagacccagcgtgctgagaagctggaactggggcctgtgcggctacttcgccttctaccacgccctgtaccccagagcctggaccgtgtaccagctgcccggccagaacgtgaccctgacctgcagacagatcacccccatcctgccccacgactaccaggacagcagcctgcccgtgggcgtgttcgtgtgggacgtggagaacgagggcgacgaggccctggacgtgagcatcatgttcagcatgagaaacggcctgggcggcggcgacgacgcccccggcggcctgtggaacgagcccttctgcctggagagaagcggcgagaccgtgagaggcctgctgctgcaccaccccaccctgcccaacccctacaccatggccgtggccgccagagtgaccgccgccaccaccgtgacccacatcaccgccttcgaccccgacagcaccggccagcaggtgtggcaggacctgctgcaggacggccagctggacagccccaccggccagagcacccccacccagaagggcgtgggcatcgccggcgccgtgtgcgtgagcagcaagctgagacccagaggccagtgcagactggagttcagcctggcctgggacatgcccagaatcatgttcggcgccaagggccaggtgcactacagaagatacaccagattcttcggccaggacggcgacgccgcccccgccctgagccactacgccctgtgcagatacgccgagtgggaggagagaatcagcgcctggcagagccccgtgctggacgacagaagcctgcccgcctggtacaagagcgccctgttcaacgagctgtacttcctggccgacggcggcaccgtgtggctggaggtgctggaggacagcctgcccgaggagctgggcagaaacatgtgccacctgagacccaccctgagagactacggcagattcggctacctggagggccaggagtacagaatgtacaacacctacgacgtgcacttctacgccagcttcgccctgatcatgctgtggcccaagctggagctgagcctgcagtacgacatggccctggccaccctgagagaggacctgaccagaagaagatacctgatgagcggcgtgatggcccccgtgaagagaagaaacgtgatcccccacgacatcggcgaccccgacgacgagccctggctgagagtgaacgcctacctgatccacgacaccgccgactggaaggacctgaacctgaagttcgtgctgcaggtgtacagagactactacctgaccggcgaccagaacttcctgaaggacatgtggcccgtgtgcctggccgtgatggagagcgagatgaagttcgacaaggaccacgacggcctgatcgagaacggcggctacgccgaccagacctacgacggctgggtgaccaccggccccagcgcctactgcggcggcctgtggctggccgccgtggccgtgatggtgcagatggccgccctgtgcggcgcccaggacatccaggacaagttcagcagcatcctgagcagaggccaggaggcctacgagagactgctgtggaacggcagatactacaactacgacagcagcagcagaccccagagcagaagcgtgatgagcgaccagtgcgccggccagtggttcctgaaggcctgcggcctgggcgagggcgacaccgaggtgttccccacccagcacgtggtgagagccctgcagaccatcttcgagctgaacgtgcaggccttcgccggcggcgccatgggcgccgtgaacggcatgcagccccacggcgtgcccgacaagagcagcgtgcagagcgacgaggtgtgggtgggcgtggtgtacggcctggccgccaccatgatccaggagggcctgacctgggagggcttccagaccgccgagggctgctacagaaccgtgtgggagagactgggcctggccttccagacccccgaggcctactgccagcagagagtgttcagaagcctggcctacatgagacccctgagcatctgggccatgcagctggccctgcagcagcagcagcacaagaaggccagctggcccaaggtgaagcagggcaccggcctgagaaccggccccatgttcggccccaaggaggccatggccaacctgagccccgagtag

SEQ ID NO: 290534 - DNA, 3527 bp, Artificial Sequence
  derived and/or modified sequence
acagtgagcaagaggaggtggtgtcgctacaggacaacctgagctctgcctcagccccagagataatctggcttcttcccagaagggccaccaccttcagtgccagcatccccacctggatgcagaagtggccgtgggcggaagggggttggtgacggtcactacacactccagcgcctccccagccaaaaatacaggaccccggctgagctctgctaccacttcaatcatggcagctccggaatcagatctagaaggaaacaaggcggggcggaggacctacagagacaaccgaaggagagcccaaggcggcttctttgctgtcgccgcccccactgaagcaagagctccccggctccactgaaacaccagctcatttaagctttccccaacgcccggccctccgggacgatacctaacaacgaccggcgcccgcatctggaataggctggcgagatacttagtatccgagggctcgggacttggcgccatcgaggtcatggggacccaggatccagggaacatgggaaccggcgtcccagcctcggagcagataagctgtgccaaagaggatccacaagtttattgccctgaagagactggcggcaccaaggatgtgcaggttacagactgtaagagtcccgaagacagccgacccccaaaagagacggactgctgcaatccggaggactctgggcagctgatggtttcctatgagggtaaagctatgggctaccaggtgcctccctttggctggcgcatctgtctggctcatgagtttacagagaagaggaaaccctttcaagctaacaacgtctccctaagcaacatgataaagcatataggcatgggcttgaggtacctgcagtggtggtaccggaagacccatgtggaaaagaagacacctttcatcgacatgatcaattctgtacccctaagacagatttatggttgtcccttgggtggcatcgggggaggcactattacccgtggctggagaggccagttctgtcgttggcagcttaaccctggaatgtatcagcaccggacagtcatcgctgaccaacctatctgccctcttaagttcacagtgtgcctgcgtcgggaagggcagactgtgtaccagcaagtcctgtccctggagcgcccaagtgtcctccgcagctggaactggggcctgtgtgggtactttgctttctaccatgccctctatccccgagcctggactgtctatcagcttcctggccagaatgtcaccctcacctgccgtcagatcacacccatcttgccccatgactaccaggacagcagcctgcctgtaggagtctttgtgtgggatgtggaaaatgaaggggacgaagctctagatgtgtccatcatgttctccatgcggaatggactgggtggtggagacgatgccccagggggtttgtggaatgagcccttctgtctggagcgtagcggggaaactgtccgggggctgctcctgcatcatccaacccttccaaacccctacacgatggctgtggctgcacgagtcacggcagctaccacggtaacccacatcacagcctttgaccctgacagcacggggcagcaggtgtggcaggatctacttcaggatggacagctggactctcccactggccaaagcacccctacgcagaaaggagtaggcattgctggagctgtgtgtgtttccagcaagttgcgacctcgaggccagtgccgcctggagttttcactggcttgggacatgcccaggatcatgtttggagctaaaggccaagtccactacaggcggtatacaaggttctttggccaggatggagatgcagcacctgccctcagccactatgcactgtgccgatacgcagagtgggaagagaggatctcagcttggcagagcccggtattggatgacagatcactgcctgcctggtacaaatctgcgctgttcaatgaactatacttcctggctgatggaggcacagtgtggctggaagttcttgaggactccctaccagaggagctgggcagaaacatgtgtcacctccgccccaccctacgggactacggtcgatttggctaccttgagggccaggagtaccgcatgtacaacacatatgatgtccacttttatgcttcctttgccctcatcatgctctggcccaaacttgagctcagcctacagtatgacatggctctggccactctcagggaggacctgacacggcgacggtacctgatgagtggggtgatggcacctgtgaaaaggaggaacgtcatcccccatgatattggggacccagatgatgaaccatggctccgcgtcaatgcatatttaatccatgatactgctgattggaaggacctgaacctgaagtttgtgctgcaggtttatcgggactattacctcacgggtgatcaaaacttcctgaaggacatgtggcctgtgtgtctagctgtgatggaatctgaaatgaagtttgacaaggaccatgatggactcattgaaaatggaggctatgcagaccagacctatgatggatgggtgaccacaggccccagtgcttactgtggagggctgtggctggcagctgtggctgtgatggtccagatggctgctctgtgtggggcacaggacatccaggataagttttcttctatcctcagccggggccaagaagcctatgagagactgctgtggaatggccgctattacaactatgacagcagctctcggcctcagtctcgtagtgttatgtctgaccagtgtgctggacagtggttcctgaaggcctgtggcctaggagaaggagacactgaggtgtttcctacccaacatgtggtccgtgctctccaaactatctttgagctgaacgtccaggcctttgcaggaggggccatgggggctgtgaatgggatgcagccccatggtgtccctgataaatccagtgtgcagtctgatgaagtctgggtgggtgtggtctacgggctggcagctaccatgatccaagagggcctgacttgggagggcttccagacagctgaaggctgctaccgtaccgtgtgggagcgcctgggtctggccttccagaccccagaggcatactgccagcagcgagtgttccgctcactggcctacatgcggccactgagcatatgggccatgcagctagccctgcaacagcagcagcacaaaaaggcctcctggccaaaagtcaaacagggcacaggactaaggacagggcctatgtttggaccaaaggaagccatggcaaacctgagcccagagtgagccgtctgaactgtgggagggaagtgctaacagcccagcctccagcctggcctttcctccttcccctctgaacctcctgcaaccctgagccatcaggacaatcataccccttcccttctctccacccaattgtgccagtaaatgggggttgagggtgacctaggcagcattagaatcacttatttatttctttcctcacctgttccctgactgcgtgaaatgttca

SEQ ID NO: 290535 - DNA, 2802 bp, Artificial Sequence
  derived and/or modified sequence
atgggaactcaggacccaggtaacatgggtaccggagttccggcatctgaacagatcagttgcgccaaagaagatccgcaggtttattgccccgaggagactggcggcactaaagatgttcaagttacggattgcaagagtccagaggattcaaggccccccaaagaaacagattgctgtaatccggaggactctggccaactgatggtctcatacgagggaaaggcgatgggctatcaggtgcccccctttggttggcggatctgtctggcacacgagttcacagaaaagagaaagccatttcaggccaataacgttagcctcagtaacatgattaagcacattgggatgggcctgagatatctgcagtggtggtaccgcaaaacccacgtagaaaaaaagactccctttatcgacatgatcaattccgtgccactgaggcagatctatggctgtcccctgggtggaatcggggggggcaccattacgagaggatggcggggacagttctgtcgctggcagcttaatcctgggatgtaccagcaccggacggtaattgcggatcaaccgatctgccccctgaaatttactgtctgcctacgcagggaaggacagactgtctaccaacaggtgctgtcccttgagcgccctagtgtgcttcgatcatggaattggggtctgtgtggatactttgcattttatcacgccctgtacccacgtgcttggaccgtttatcagttacctggtcagaacgttacactcacttgccgccagatcactcctatccttcctcatgactatcaagactcctcgcttccagtgggcgtgttcgtgtgggatgtggagaatgaaggggatgaagccctggacgtctctattatgttcagtatgcggaacggcctcggcggcggcgacgatgcacctggcggcctttggaatgaaccattctgtctggagagatctggcgagactgtgagaggactgttgctgcatcaccccacactacccaatccttatacaatggctgtcgcagcccgcgtcacagctgcaaccacggtcactcatattactgcgttcgatcctgacagtaccgggcaacaggtgtggcaggatttgttgcaggatggacagttggactcaccgacgggccagagtacaccaactcagaagggcgtgggtattgccggggccgtgtgcgtatctagcaaacttcgcccccgagggcagtgccggctagaattcagcttggcctgggacatgcccagaattatgttcggtgctaaggggcaggtgcactaccgtaggtatacacgcttttttggacaggatggggacgccgcacctgccctgtctcattatgccctgtgcagatatgcagagtgggaggagcggattagcgcctggcagagtccagtcttggacgacagatccctgcccgcatggtacaagtccgctctgtttaatgaactgtattttctagccgatgggggcactgtgtggctagaagtgctggaggactcgttacctgaggagctagggcgaaatatgtgccatttgcgaccgacactgagagattatggcaggtttggctacctcgaaggtcaagaatacagaatgtataacacctacgacgtccacttttacgccagttttgccctgattatgttgtggcctaagcttgaactgtcgttgcagtacgacatggccctggctacgctgcgtgaagacttgacccgtcgaagataccttatgagcggagtgatggccccggtcaaaaggaggaacgtcatcccacatgacattggggaccctgacgatgaaccctggcttcgggtcaacgcctacttgattcacgacacagccgattggaaagacctgaatctgaagtttgtgctgcaggtgtacagagactactacttaaccggtgatcagaacttcctgaaggatatgtggcccgtctgtctcgccgtcatggagtcagagatgaaattcgacaaagaccacgatgggttgatagaaaacgggggctatgctgaccagacctatgacggatgggtgactactggcccaagtgcgtattgtggagggctgtggctggccgctgtcgcagttatggtgcagatggcagccctgtgtggtgcccaagatattcaggacaaattttccagcattttgagcagaggacaggaggcatacgaaagattgctttggaatggccgttattacaactacgactcatcttcaagacctcaaagcaggtctgtcatgagcgaccagtgcgcgggacagtggttcctcaaggcttgcgggctgggtgaaggtgataccgaagtctttcccacacagcatgtagtgagggccctccagaccatcttcgaattaaacgtgcaggccttcgctggtggagctatgggtgcagtcaacggaatgcagccccatggggttccagacaagtccagtgtgcagtctgacgaggtgtgggtgggggtggtttatgggcttgccgcgaccatgatccaggagggcctgacttgggaggggttccaaaccgccgagggatgttaccggaccgtttgggaaaggttggggctggcctttcagacacctgaggcctactgtcagcagagggtgtttcgcagcctggcttatatgcgacccctgtctatatgggccatgcagttggcactccagcagcaacagcataagaaagcttcctggcccaaagtgaagcagggcaccggcttgaggactggacctatgtttgggccaaaggaagcgatggctaacctatcacctgaatag

SEQ ID NO: 290536 - DNA, 2802 bp, Artificial Sequence
  derived and/or modified sequence
atgggcacccaggaccccggcaacatgggcactggagtgcctgccagcgagcagatcagctgtgccaaggaggacccccaggtgtactgcccagaggagaccggcggcaccaaggatgtgcaggtgacagactgcaagagccctgaggacagcaggcctcccaaggagacagactgctgcaacccagaagattctggccagctgatggtgtcctatgagggcaaggccatgggctaccaggtgccccccttcggctggaggatctgcctggcccacgagttcacagagaagaggaagcccttccaggccaacaacgtgtccctgagcaacatgatcaagcacatcggcatgggcctgcgctacctgcagtggtggtacaggaagacccacgtggagaagaagacccccttcatcgacatgatcaacagcgtgcccctgcggcagatctacggctgccccctgggcggcattggaggcggcaccatcacccggggctggaggggccagttctgccgctggcagctgaaccctggcatgtaccagcacaggacagtgattgctgaccagcccatctgccccctgaagttcaccgtgtgcctgcggcgggagggccagacagtgtaccagcaggtgctgagcctggagcggcccagcgtgctgcgctcctggaactggggcctgtgtggctactttgccttctaccacgccctgtacccccgggcctggacagtgtaccagctgcccggccagaatgtgaccctgacctgccggcagatcacccccatcctgccccatgactaccaggacagcagcctgcctgtgggcgtgtttgtgtgggatgtggagaatgaaggagatgaggccctggatgtgtccatcatgttctccatgagaaatggcctgggcggcggagatgatgcccctgggggcctgtggaatgagcccttctgcctggagaggtctggagagaccgtgcggggcctgctgctgcaccaccccaccctgcccaacccctacaccatggctgtggccgcccgggtgacagctgccaccaccgtgacccacatcacagcctttgatcctgacagcacaggccagcaggtgtggcaggacctgctgcaggacggccagctggacagccccaccggccagagcacccccacccagaagggcgtgggcattgctggagctgtgtgtgtgagcagcaagctgcggccccggggccagtgccgcctggagttcagcctggcctgggacatgccccgcatcatgtttggagccaagggccaggtgcactaccgccgctacacccgcttcttcggccaggatggagatgctgccccagccctgagccactacgccctgtgccgctatgcagagtgggaggagcgcatcagcgcctggcagagccctgtgctggatgacaggagcctgcctgcctggtacaagagcgccctcttcaatgagctgtacttcctggctgatggcggcaccgtgtggctggaggtgctggaggacagcctgcctgaggagctgggcaggaacatgtgccacctgcggcccaccctgcgggactatggccgcttcggctacctggagggccaggagtacaggatgtacaacacctatgatgtgcacttctacgccagctttgccctgatcatgctgtggcccaagctggagctgagcctgcagtatgacatggccctggccaccctgcgggaggacctgacccggcggcgctacctgatgtctggagtgatggcccctgtgaagagaagaaatgtcatcccccatgacattggagaccctgatgatgagccctggctgcgggtgaatgcctacctgattcatgacacagctgactggaaggacctgaacctgaagtttgtgctgcaggtgtacagagactactacctgactggagaccagaacttcctgaaggacatgtggcctgtgtgcctggccgtgatggagagcgagatgaagtttgacaaggaccatgatggcctgattgaaaatggaggctacgccgaccagacctatgatggctgggtgaccaccggccccagcgcctactgcggcggcctgtggctggccgctgtggccgtgatggtgcagatggccgccctgtgtggggcccaggacatccaggacaagttcagcagcatcctgagccggggccaggaggcctatgaaaggctgctgtggaatggccgctactacaactatgacagcagcagccggccccagagccgctctgtgatgtctgaccagtgtgccggccagtggttcctgaaggcctgtggcctgggggagggggacacagaggtgttccccacccagcacgtggtgcgggccctgcagaccatctttgagctgaatgtgcaggcctttgctgggggcgccatgggcgctgtgaatggcatgcagccccatggagtgcctgacaagagctctgtgcagagtgatgaggtgtgggtgggcgtggtgtatggcctggccgccaccatgatccaggagggcctgacctgggagggcttccagacagctgagggctgctacagaacagtgtgggagcggctgggcctggccttccagaccccagaggcctactgccagcagagggtcttccgcagcctggcctacatgaggcccctgagcatctgggccatgcagctggccctgcagcagcagcagcacaagaaggcctcctggcccaaggtgaagcagggcaccggcctgaggacaggccccatgtttggccccaaggaggccatggccaacctgagccctgagtag

SEQ ID NO: 290537 - DNA, 2802 bp, Artificial Sequence
  derived and/or modified sequence
atgggcacccaggaccccggcaacatgggcaccggcgtgcccgcctcagaacagatttcatgtgctaaagaagatcctcaggtctattgtcccgaagagacaggcggcaccaaggacgtgcaagtaacagactgtaaaagccctgaggacagccgaccgccaaaggagacagactgctgtaaccctgaggattctggccagctaatggtgtcctatgaagggaaagccatgggctaccaggtgccacccttcgggtggagaatctgcctggctcacgagttcaccgaaaaacggaagcctttccaggctaacaatgtgtccctgtctaacatgatcaaacacataggcatgggcctcagatatctccagtggtggtataggaaaacacacgtcgaaaaaaaaacgccattcatcgacatgatcaatagcgtacctctgcggcagatatatggatgtcccctggggggcatcgggggcggcacaatcactcgaggctggaggggacagttttgccggtggcagctgaatcctggcatgtaccagcacaggacagtgatcgctgatcagcctatatgcccgcttaaatttacagtttgcctcagacgggagggtcagacagtctaccaacaagtgctctctctcgagcgcccaagtgtcttaagatcttggaactggggactttgcggttattttgcgttctaccacgcactctatccccgtgcttggacagtctatcagctgcccgggcagaatgtaacccttacttgtagacaaatcacacccattctgccccacgactaccaggattcttcgcttcccgtcggcgtattcgtttgggacgttgagaacgaaggcgacgaggccctcgacgtttccatcatgtttagtatgcgcaacggcctgggcggaggagatgatgctcccggcgggctgtggaatgaacccttctgtcttgagcgctctggcgaaacagtcaggggactgctccttcaccatcctacgctgccgaacccctacactatggccgtggctgcccgggtaactgcagctaccacagtgacccatattactgcctttgaccctgacagtacaggccagcaagtgtggcaggacctgctgcaagatggccaacttgacagccctaccggccaaagcactccgacccagaaaggagtcggcatagccggcgccgtctgcgtgtcgtcaaaactgagaccaaggggacaatgccgcctggagttttctcttgcctgggacatgccccgaatcatgtttggagcaaagggacaggtgcactacaggagatatacaagattctttggacaggacggggacgccgcccctgccctgtcacattacgctttgtgcagatacgctgaatgggaggagcgcatcagcgcttggcagtctccagttctggatgacaggagtctgccagcctggtacaagtccgcactgttcaatgagctgtactttttggcagatggcggcaccgtctggctggaggttctggaagatagcctgcccgaggagctggggaggaatatgtgccacttacgtccaaccctgcgcgattatgggaggttcggttatctcgaagggcaagagtacagaatgtataatacgtacgatgtgcatttctatgcaagctttgccctgattatgttatggcctaaactagaacttagtctgcagtacgacatggctctggctaccctgagggaagacctgacacgcaggcggtatttaatgtccggcgtaatggcccccgtgaagaggaggaatgttatcccacacgatatcggtgacccagacgacgagccttggctccgcgtcaacgcttacctcatccacgacactgcagactggaaggatttgaatttaaagtttgtccttcaggtataccgtgattactacttaacaggagatcagaacttcttgaaggatatgtggcccgtctgtttggctgttatggagtccgagatgaaattcgacaaggatcatgacggcctgattgagaacggcggttacgccgaccagacgtatgatggatgggtgactaccggcccatccgcctactgtggagggctgtggctggccgcagtggcagtgatggtacagatggccgctctctgcggagctcaagacattcaagataagttctctagtatcttaagcagaggacaagaggcatatgagcggctgctctggaacgggaggtattataattacgatagttcttcacgaccccagtcgcgatcagtgatgtcggatcagtgtgccgggcagtggttcctaaaagcctgcgggttaggagagggcgatacagaggtcttcccgacacagcacgtggtgcgagccctgcagaccatcttcgagctgaatgtgcaggcatttgctggtggcgctatgggggcggtcaatggaatgcagccccacggggtgcccgataaaagctctgtgcaatctgacgaagtgtgggtaggggtagtctatggcttggccgctacgatgatccaagagggactgacatgggagggctttcaaactgccgaaggctgctaccgaacggtctgggagaggcttggcctcgcatttcaaacccccgaagcctactgtcagcaacgtgtgtttcggtctcttgcatatatgcgccctctgtccatctgggcaatgcaattggcactgcagcagcagcagcataaaaaagcatcctggcctaaagtcaaacagggcaccggattacgtacggggccaatgttcggacctaaagaggccatggccaacctgagcccagagtag

SEQ ID NO: 290538 - DNA, 2802 bp, Artificial Sequence
  derived and/or modified sequence
atgggaacgcaggatcctggaaatatgggtaccggtgtacctgcctcagaacagatctcctgtgcaaaggaggacccacaggtctactgtcctgaggagacgggcggtaccaaggatgtgcaagtgactgactgcaaatcacctgaggattcgaggcccccaaaggaaaccgattgttgcaatcctgaagattctggccagctcatggtgtcgtacgaaggtaaagcaatgggctaccaggttccccctttcggatggaggatatgcctggcccatgagtttaccgagaagcggaaaccattccaggccaacaacgttagtctgagcaatatgatcaaacacatcggtatggggctccggtacttgcagtggtggtaccgcaagacacacgtagagaaaaaaaccccattcatcgatatgataaactcagttccactgaggcaaatctacggatgcccactaggcggaattgggggaggtaccataacaaggggctggcgcggtcaattctgcagatggcagctgaaccccggaatgtatcagcatagaactgtgattgccgatcagccaatctgtcctctgaagttcaccgtgtgtttacgtcgcgagggccagactgtctaccagcaggtgctgtctcttgaacggccttccgttctccggagctggaactggggattatgtggctacttcgccttttaccatgcactatatcctcgggcttggaccgtttaccagctaccaggacagaacgtcaccctgacatgtagacagattaccccaatcttgccccacgattaccaggattcgtctctgccggttggcgtcttcgtttgggacgtggagaatgagggtgatgaagctctagacgtaagcattatgttttctatgcggaatggcttaggcggtggagatgatgctcctggcggactgtggaatgagccattctgcctcgaacgctctggcgagacggtgcgagggctgctgctgcaccatcccacccttccaaatccttacacgatggcagtcgctgctagggtgactgcggctaccactgtcacccacataacagctttcgatcccgactctaccggacagcaggtgtggcaggatctgctccaggacggccaattagacagccccacaggccagagcaccccaacacaaaagggggtcgggatagcaggcgcagtgtgtgttagtagcaaacttcgccctcgcggtcaatgtcgcctggagttttcccttgcctgggatatgcccagaataatgtttggtgccaaaggccaggtgcactataggcggtacacacgttttttcggccaagacggcgacgctgcaccggctctgagccattatgccctttgtagatacgctgagtgggaagagagaatttctgcatggcagagccctgttctcgatgatcggtcgctgcctgcctggtacaaatccgccctcttcaacgagctgtacttccttgccgacggaggcacagtatggctcgaagtgctcgaagacagtcttccagaagaacttggacgaaatatgtgccacttaagaccaaccctgcgagactatgggaggtttgggtatctggaggggcaggagtaccgaatgtataacacatatgatgtgcatttctatgcttccttcgcacttattatgctttggcctaagttggaactctccctgcagtacgatatggccttggccacgttgcgggaggacctgaccagacggagatacctgatgtccggcgtgatggctcctgttaagaggcgtaatgtgattcctcatgatattggagaccccgacgacgaaccttggctgcgcgtgaacgcttatctaatccatgatacagctgattggaaggacctgaacctcaaattcgtcctccaggtgtaccgagactactacctcaccggcgatcagaacttccttaaggatatgtggcctgtgtgcctggccgtaatggagtctgaaatgaaattcgataaagatcacgatggcctcattgagaacggaggctacgccgaccaaacctacgatggttgggtgaccactgggccttcagcttactgcggaggcctctggcttgccgcagtggccgtgatggtgcagatggcggcactttgtggggcacaagatattcaggacaagttctcgtctatactcagtcgaggccaggaggcttacgaacgcctgctgtggaatgggaggtattataattacgatagctcgtcaagaccgcagagtcgatctgtcatgagcgaccagtgtgccggacagtggttcttaaaggcatgcggcctgggagaaggtgacaccgaagttttccccacacagcatgtggtgcgcgctctgcagaccatctttgaattgaatgtgcaggcgttcgccggaggcgcaatgggggctgtgaatggcatgcagccgcacggggtccccgacaagagctcagtgcagtctgatgaggtctgggtgggggtcgtatacggactggctgcaaccatgatccaagagggtttgacgtgggagggctttcagactgctgagggctgttatcgaaccgtttgggagcgcctgggcctcgcctttcagacgccagaagcatactgccagcagcgagtcttccggtccttggcgtatatgaggcccctgtccatctgggccatgcagctggctctacaacaacagcagcacaagaaggcaagctggcccaaagttaaacagggaaccggactgcgcactgggcctatgtttggacccaaagaagcgatggccaatcttagtcctgagtag

SEQ ID NO: 290539 - DNA, 282 bp, Artificial Sequence
  derived and/or modified sequence
atggtgcacgtggcgcggctactgctcctgctcttgactttcttcctccgaacagatgctgagacccctccacggtttactagaacccccgtggatcagactggtgtctcaggtggcgttgcttccttcatttgtcaagccactggagaccctagacccaaaatcgtgtggaataagaaaggtaaaaaagtgagcaaccaaaggtttgaagttattgagtttgacgacggttccgggtctgtgctcaggatccagccactgagaactcccagagatgaatag

SEQ ID NO: 290540 - DNA, 282 bp, Artificial Sequence
  derived and/or modified sequence
atggtgcacgtggcccggctgctgctgctgctgctgaccttcttcctgaggacagatgctgagaccccaccccgcttcaccaggacccctgtggaccagacaggagtgtctggaggagtggccagcttcatctgccaggccaccggggacccccggcccaagatcgtgtggaacaagaagggcaagaaggtgagcaaccagagatttgaagtcatcgagtttgatgatggcagcggctctgtgctgcgcatccagcccctgcggaccccaagagatgaatag

SEQ ID NO: 290541 - DNA, 282 bp, Artificial Sequence
  derived and/or modified sequence
atggtgcacgtggcccggctgctgctgctgctgctgaccttcttcttgcgcaccgatgcagaaactcccccccggtttacccggaccccggtggaccagactggtgtatccggaggtgtggcttcgttcatctgtcaggccaccggcgatccacgaccaaagattgtttggaataagaaaggaaaaaaggttagtaaccagcgtttcgaggtcatcgaatttgatgacgggtctggcagcgttctgcggatccagcccttgcggacacccagagatgaatag

SEQ ID NO: 290542 - DNA, 282 bp, Artificial Sequence
  derived and/or modified sequence
atggtccacgtggcacgtctcctcctgctgctgctgacctttttccttcgaaccgacgccgaaaccccgcctagattcaccagaaccccggttgatcagaccggtgtgtcagggggagttgccagtttcatttgtcaggccacgggcgatccacgcccaaaaattgtatggaataagaagggcaagaaggtaagtaaccaacggtttgaagtcatcgagtttgacgacggcagtggctccgtgcttagaattcagcccctgaggaccccccgtgatgaatag

SEQ ID NO: 290543 - DNA, 521 bp, Artificial Sequence
  derived and/or modified sequence
gcggccgctgctccgcgggattaaattggccgcccggaggcggcggcgcggccgtggcggggcgcgaaggcgctggaggaaagtgttggcggcggcgcgggaggcggtggcggcggctgcccggggccaacatgaccaggctctgaaagtgttccagctgaaatttcagatcggacagactcgctgcggctccggaggcagtgattccaagctgctcgcgcacgctgctgccaagctgcaggatggtgcacgtagccaggctgctgctgctgctcctcactttcttcctccgcacggatgctgagacacctccaaggtttacacgaacacccgttgatcagacaggggtctctggcggagttgcctctttcatctgccaagctacgggagacccaagacctaaaattgtctggaacaaaaaaggaaagaaagtcagcaatcagagatttgaggtaatagagtttgacgatgggtctggatcagttctcagaatacaacccttacggactccgagggatgag

SEQ ID NO: 290544 - DNA, 282 bp, Artificial Sequence
  derived and/or modified sequence
atggtgcacgtggccagactgctgctgctgctgctgaccttcttcctgagaaccgacgccgagaccccccccagattcaccagaacccccgtggaccagaccggcgtgagcggcggcgtggccagcttcatctgccaggccaccggcgaccccagacccaagatcgtgtggaacaagaagggcaagaaggtgagcaaccagagattcgaggtgatcgagttcgacgacggcagcggcagcgtgctgagaatccagcccctgagaacccccagagacgagtag

SEQ ID NO: 290545 - protein, 85 aa, Artificial Sequence
  derived and/or modified sequence
MQTSETGSDTGSTVTLQTSVASQAAVPTQVVQQVPVQQQVQQVQTVQQVQHVYPAQVQYVEGSDTVYTNGAMSRAPWSMILESSP

SEQ ID NO: 290546 - protein, 174 aa, Artificial Sequence
  derived and/or modified sequence
MCNCDHGMYQALVEILIPDVLRPIPSALTQAIRNFAKSLEGWLSNAMNNIPQRMIQTKVAAVSAFAQTLRRYTSLNHLAQAARAVLQNTSQINQMLSDLNRVDFANVQEQASWVCQCDDNMVQRLETDFKMTLQQQSTLEQWAAWLDNVMMQALKPYEGRPSFPKAARQFLLKW

SEQ ID NO: 290547 - DNA, 2292 bp, Artificial Sequence
  derived and/or modified sequence
cgtgcgagtgtctccctctccctctcgctctctctctctctccctctctctctctcttttgtgagttatagcaaccgttgccttgtgaatcaagcgccatagtcaccgtagtcctggcgactgttacccatcaacaacaactactcctctcctcctcctcctcctcttcctcctcctcctccccaccaccaccatctccatcacccaccaacaacaccacaataatccacagccaaggccacttggtcattctggcattttatggtagagaatacgttgagtttggctctggaaggaatatgagagaccatcatgcagacatcagagactgggtcggacacaggctcgacagtgaccttacaaacatctgtggctagtcaagcagcagtgcctacgcaggtggtacagcaagtaccagtacaacaacaggtacagcaggtacagactgtgcagcaggtacaacatgtctatcccgctcaggtgcagtatgtggaaggaagcgatactgtctataccaatggagcaatccgaacaacaacgtatccttacacagagacacagatgtacagccaaaatactggagggaattactttgatactcaagggagttccgcccaggtgactaccgtggtctcatcccacagtatggtgggcactggtgggattcagatgggcgtcacaggaggacaactcatcagcagctctggaggaacctatctgatcggcaactcaatggagaattctggtcactcagtgacacacacaactcgggcctccccagcgacaattgaaatggcgattgagacgctgcaaaagtctgacggtctgtccactcacagaagctctcttctcaacagccatctccagtggctgttggacaattatgagacagcagaaggagtgagccttcccagaagcactctgtacaaccactaccttcgacactgtcaggaacacaaactggacccagtcaatgctgcctcttttggaaaattaataagatcaatttttatggggctacgaaccaggagattgggcactagaggaaactccaaataccactactatgggattcgtgtcaagccagattcccctcttaatcgtctgcaagaagacatgcagtatatggctatgagacaacaacccatgcaacagaaacaaaggtacaagcctatgcagaaagtggatggggttgcagatggtttcacaggaagtggtcaacagacaggcacatctgttgagcaaactgtaattgcccaaagccaacatcatcaacagtttttagatgcatctcgagcacttccagagtttggagaagttgaaatctcttctctgccagatggtactacctttgaggatatcaagtcactgcagagtctttatagagagcactgtgaggcaatattggacgttgttgtgaatcttcaatttagcctgatagaaaaattgtggcaaacattctggcgctattctccctctactccaactgatggcactaccattaccgaatcgagcaatctgagtgaaatagaaagtcgacttccgaaagcaaagctgataactctgtgcaaacatgagtctatcctgaaatggatgtgtaactgtgaccatgggatgtaccaggctttggtggagattctcatccccgacgtccttagacctattcctagtgccttgacccaagccattcgaaattttgcaaaaagccttgaaggttggctttccaatgccatgaacaatattccacagagaatgatacaaaccaaggttgccgctgtaagtgcctttgcccagactctgcgaagatacacgtcgcttaatcacctggcccaggcagctcgtgcagtgcttcagaacacttcccaaatcaaccagatgcttagtgacctcaaccgtgtcgactttgccaatgtccaggagcaggcttcctgggtgtgccagtgtgatgacaacatggttcagagactagaaacagacttcaagatgactcttcagcagcagagcaccctggagcagtgggctgcgtggcttgacaatgtgatgatgcaagcactgaaaccctatgaaggaagacccagttttcctaaagccgccaggcagtttctgctaaaatggtctttctacagctcaatggttattcgggacttaaccttacgcagtgctgctagctttggctccttccacctgatccgtctactctacgacgaatatatgttttacttagtagaacatcgtgttgctcaggcaacaggagagactcctatagcagtcatgggcgaggtacctatgtaa

SEQ ID NO: 290548 - DNA, 417 bp, Artificial Sequence
  derived and/or modified sequence
atgctttcagacctaaatcgagtcgattttgcaaacgtgcaggaacaggctagctgggtatgtcagtgtgatgataatatggtgcagcgcctcgagaccgattttaaaatgaccctgcagcagcagagcactctggaacagtgggccgcgtggctggataatgtgatgatgcaggctctgaagccatatgaaggaaggccaagcttccccaaggcagcacgccagttcctactcaaatggagcttctactcctccatggtgattcgggatttgacgcttcgatcagccgcaagcttcgggtctttccaccttattcgcttactctatgacgagtacatgttttatttggtcgagcacagggtcgctcaggcaacaggcgaaactccaattgctgtcatgggtgaagtgcccatgtag

SEQ ID NO: 290549 - DNA, 375 bp, Artificial Sequence
  derived and/or modified sequence
gagcaagcctcctgggtgtgccagtgtgatgacaacatggtccagaggctggagactgattttaagatgacactgcagcagcagtcaacccttgagcaatgggcggcctggctggataatgtgatgatgcaggccctgaagccatatgaaggaagacctagtttcccgaaagccgccagacagtttttgctaaagtggtccttttatagttcaatggtaatcagggacctgacactgcgctccgcagcctcattcgggtccttccatctgatacggttgttgtatgacgagtacatgttttatctggtggagcaccgtgtcgcgcaggccactggggaaacaccaatcgcagtcatgggtgaagtacctatgtag

SEQ ID NO: 290550 - DNA, 525 bp, Artificial Sequence
  derived and/or modified sequence
atgtgcaactgtgatcatggcatgtatcaggccctcgtggagatactcattcctgacgtcctgcgcccgattccatctgccttaacccaagccatacgcaacttcgccaagtccctggaggggtggttatcaaacgccatgaacaacattccacagcgcatgatacagaccaaagtggccgcagtttctgcctttgctcaaacactcaggagatacacgagtcttaaccacttggcacaagccgcccgcgctgtattacaaaacacatcacaaatcaaccaaatgctgtccgacctcaatagggtggatttcgccaacgtgcaagagcaggcctcatgggtgtgccagtgcgacgataatatggtgcagcgattggaaaccgattttaaaatgacactgcagcaacaatcgacactggaacagtgggccgcctggctggacaacgttatgatgcaagccttaaaaccatatgaaggaagaccctctttccctaaggcagcaagacaattcttgctgaaatggtag

SEQ ID NO: 290551 - DNA, 417 bp, Artificial Sequence
  derived and/or modified sequence
atgctgagtgacctgaacagagtggactttgccaacgtgcaggagcaggcctcctgggtgtgccagtgtgatgacaacatggtgcagaggctggagacagacttcaagatgaccctgcagcagcagagcaccctggagcagtgggccgcctggctggacaacgtgatgatgcaggccctgaagccctatgagggccggcccagcttccccaaggccgcccggcagttcctgctgaagtggagcttctacagctccatggtgatccgggacctgaccctgcggtctgctgccagctttggcagcttccacctgatccggctgctgtatgatgagtacatgttctacctggtggagcaccgggtggcccaggccactggagagacccccatcgctgtgatgggagaggtgcccatgtag

SEQ ID NO: 290552 - DNA, 375 bp, Artificial Sequence
  derived and/or modified sequence
gagcaggcctcctgggtgtgccagtgtgatgacaacatggtgcagaggctggagacagacttcaagatgaccctgcagcagcagagcaccctggagcagtgggccgcctggctggacaacgtgatgatgcaggccctgaagccctatgagggccggcccagcttccccaaggccgcccggcagttcctgctgaagtggagcttctacagctccatggtgatccgggacctgaccctgcggtctgctgccagctttggcagcttccacctgatccggctgctgtatgatgagtacatgttctacctggtggagcaccgggtggcccaggccactggagagacccccatcgctgtgatgggagaggtgcccatgtag

SEQ ID NO: 290553 - DNA, 525 bp, Artificial Sequence
  derived and/or modified sequence
atgtgcaactgtgaccacggcatgtaccaggccctggtggagatcctgatcccagatgtgctgcggcccatccccagcgccctgacccaggccatccggaactttgccaagagcctggagggctggctgagcaatgccatgaacaacatcccccagaggatgatccagaccaaggtggccgctgtgtctgcctttgcccagaccctgcggcgctacaccagcctgaaccacctggcccaggccgcccgggctgtgctgcagaacaccagccagatcaaccagatgctgagtgacctgaacagagtggactttgccaacgtgcaggagcaggcctcctgggtgtgccagtgtgatgacaacatggtgcagaggctggagacagacttcaagatgaccctgcagcagcagagcaccctggagcagtgggccgcctggctggacaacgtgatgatgcaggccctgaagccctatgagggccggcccagcttccccaaggccgcccggcagttcctgctgaagtggtag

SEQ ID NO: 290554 - DNA, 633 bp, Artificial Sequence
  derived and/or modified sequence
gagcaggcttcctgggtgtgccagtgtgatgacaacatggttcagagactagaaacagacttcaagatgactcttcagcagcagagcaccctggagcagtgggctgcgtggcttgacaatgtgatgatgcaagcactgaaaccctatgaaggaagacccagttttcctaaagccgccaggcagtttctgctaaaatggtctttctacagctcaatggttattcgggacttaaccttacgcagtgctgctagctttggctccttccacctgatccgtctactctacgacgaatatatgttttacttagtagaacatcgtgttgctcaggcaacaggagagactcctatagcagtcatgggcgaggtacctatgtaaaagaaaaacttgagaaccactggaatatgaaaaatattttaagtgggaaaaagattggtgctcctgataaagcaaagggctgggaatacaatggaaaggattaaatatgtattttgtagactctttcccggtctccaagaacaaagtaaatgattctattttagaaggataaaaatggtaatgatgataactaacattttttggacacttactatgtgcgaggcacagttctatgttttttacatgtaataaagcact

SEQ ID NO: 290555 - DNA, 814 bp, Artificial Sequence
  derived and/or modified sequence
cagaaaatacaaatgtgcatagacagctctgggggagtgttttatatatctgtctgtctctctcggtatatatagccagctgtatggcaccagtgcaatggtggtatagttctaacctcagtaatatttggtaaacttaaactatttttaaagtccattttcttttttatcctcatttgccatctattcatttgctacatttattcacaccagcaatctgagtgaaatagaaagtcgacttccgaaagcaaagctgataactctgtgcaaacatgagtctatcctgaaatggatgtgtaactgtgaccatgggatgtaccaggctttggtggagattctcatccccgacgtccttagacctattcctagtgccttgacccaagccattcgaaattttgcaaaaagccttgaaggttggctttccaatgccatgaacaatattccacagagaatgatacaaaccaaggttgccgctgtaagtgcctttgcccagactctgcgaagatacacgtcgcttaatcacctggcccaggcagctcgtgcagtgcttcagaacacttcccaaatcaaccagatgcttagtgacctcaaccgtgtcgactttgccaatgtccaggagcaggcttcctgggtgtgccagtgtgatgacaacatggttcagagactagaaacagacttcaagatgactcttcagcagcagagcaccctggagcagtgggctgcgtggcttgacaatgtgatgatgcaagcactgaaaccctatgaaggaagacccagttttcctaaagccgccaggcagtttctgctaaaatgg

SEQ ID NO: 290556 - DNA, 417 bp, Artificial Sequence
  derived and/or modified sequence
atgctgagcgacctgaaccgggtggacttcgccaacgtgcaggagcaggccagttgggtgtgccagtgtgacgataatatggttcaaaggctggaaactgacttcaagatgacattgcagcagcaaagtaccttggagcagtgggctgcttggttagataacgtcatgatgcaggctctcaaaccctacgagggccgtccatcgtttccgaaagccgctcgacagttccttctcaagtggtccttctattcctccatggtgatcagggacctgactctgagaagtgctgcttcttttggttccttccatctcatcaggttgctctatgatgagtacatgttttacctggtggagcacagagttgcgcaggcaacaggggagaccccaattgctgtcatgggcgaggtcccgatgtag

SEQ ID NO: 290557 - DNA, 375 bp, Artificial Sequence
  derived and/or modified sequence
gagcaggccagctgggtgtgccagtgcgacgacaacatggtgcagcgcctagaaacggacttcaagatgacactacaacaacagagcactctcgaacagtgggcagcatggctcgacaatgtgatgatgcaagccctcaaaccatacgaaggtaggccttcgttccctaaggccgcccggcaatttctactaaagtggtctttctattcatccatggtgatcagggacttgacattaaggagcgccgcctcattcggttcattccatcttatcagactcctgtatgacgaatatatgttctatctggtcgagcacagggtagcacaggcaactggcgaaactccgatagcggtaatgggagaagtgccaatgtag

SEQ ID NO: 290558 - DNA, 525 bp, Artificial Sequence
  derived and/or modified sequence
atgtgcaactgcgaccacggcatgtaccaggccctggtggagatcctgattcctgacgtactcagacccatcccatcggctctgactcaggccatccgaaactttgcaaagtcacttgagggctggctttcaaacgccatgaataacatcccccaaaggatgatccagacaaaggtggccgccgtgagcgcctttgcgcagaccctgcgacggtacacctcacttaaccacctggcccaggctgctcgagcggtgctgcaaaatacctcacagatcaatcaaatgctcagcgaccttaacagggtggactttgccaatgtgcaggaacaagcctcctgggtctgccaatgcgacgacaatatggtccagcgtcttgaaacggatttcaaaatgacattacagcagcagagcaccttggagcagtgggccgcgtggctggacaatgtgatgatgcaagccctaaaaccttatgagggtcggccctcatttccaaaagcggctaggcaattcctactcaagtggtag

SEQ ID NO: 290559 - DNA, 417 bp, Artificial Sequence
  derived and/or modified sequence
atgttatctgacttaaatagagtggactttgccaatgtacaggagcaagccagctgggtatgccaatgtgatgataatatggttcagcgattagagaccgactttaagatgaccctacagcagcagtctactttagagcagtgggccgcttggctggacaacgtcatgatgcaagccctgaaaccctatgagggcagacccagcttccccaaggctgccagacagtttcttctgaaatggtccttttacagtagcatggtgatacgggatttgaccctgcggagtgctgcctcttttggcagctttcatctcatcagactcctgtacgacgagtatatgttctacctggtggagcaccgcgtggctcaggccacaggcgaaacgcccatcgcagtgatgggagaagtgccaatgtag

SEQ ID NO: 290560 - DNA, 375 bp, Artificial Sequence
  derived and/or modified sequence
gagcaggcatcctgggtttgccaatgtgacgacaatatggtacagcggttggagactgattttaaaatgaccctgcaacagcagagtaccctggagcaatgggctgcgtggctggataatgtgatgatgcaggcattgaagccctacgaaggcaggccctccttcccaaaagctgctcggcagttccttcttaagtggagtttttactcctctatggtcattcgtgatctaacactgcgctctgccgcttcattcggaagtttccatctgattaggctgctgtacgatgagtacatgttttatctagtggagcatcgggtcgctcaagccaccggtgagacccccatcgctgtcatgggggaagttcctatgtag

SEQ ID NO: 290561 - DNA, 525 bp, Artificial Sequence
  derived and/or modified sequence
atgtgtaattgtgaccatggaatgtaccaagctctcgtcgaaatcctgattcctgacgtattaagacccatcccatccgcccttactcaggccatccggaactttgccaaatctctcgaaggttggctcagtaacgcgatgaataatatccctcagcgaatgattcagactaaagttgccgcagtgtctgccttcgctcaaaccctgagaagatacacctctctaaaccacctggcacaggcggctagggccgtactgcagaatacatctcagataaatcaaatgctgtctgatttaaacagggtggacttcgctaatgtgcaagagcaggccagctgggtgtgccagtgtgacgacaatatggttcagagactggagactgattttaagatgacgctacagcagcaaagcactctggaacagtgggctgcctggctcgacaatgtgatgatgcaggctctcaagccttacgagggacgaccctcgtttccaaaagctgcaaggcagttcctgctcaaatggtag

SEQ ID NO: 290562 - DNA, 417 bp, Artificial Sequence
  derived and/or modified sequence
atgctgagcgacctgaacagagtggacttcgccaacgtgcaggagcaggccagctgggtgtgccagtgcgacgacaacatggtgcagagactggagaccgacttcaagatgaccctgcagcagcagagcaccctggagcagtgggccgcctggctggacaacgtgatgatgcaggccctgaagccctacgagggcagacccagcttccccaaggccgccagacagttcctgctgaagtggagcttctacagcagcatggtgatcagagacctgaccctgagaagcgccgccagcttcggcagcttccacctgatcagactgctgtacgacgagtacatgttctacctggtggagcacagagtggcccaggccaccggcgagacccccatcgccgtgatgggcgaggtgcccatgtag

SEQ ID NO: 290563 - DNA, 375 bp, Artificial Sequence
  derived and/or modified sequence
gagcaggccagctgggtgtgccagtgcgacgacaacatggtgcagagactggagaccgacttcaagatgaccctgcagcagcagagcaccctggagcagtgggccgcctggctggacaacgtgatgatgcaggccctgaagccctacgagggcagacccagcttccccaaggccgccagacagttcctgctgaagtggagcttctacagcagcatggtgatcagagacctgaccctgagaagcgccgccagcttcggcagcttccacctgatcagactgctgtacgacgagtacatgttctacctggtggagcacagagtggcccaggccaccggcgagacccccatcgccgtgatgggcgaggtgcccatgtag

SEQ ID NO: 290564 - DNA, 525 bp, Artificial Sequence
  derived and/or modified sequence
atgtgcaactgcgaccacggcatgtaccaggccctggtggagatcctgatccccgacgtgctgagacccatccccagcgccctgacccaggccatcagaaacttcgccaagagcctggagggctggctgagcaacgccatgaacaacatcccccagagaatgatccagaccaaggtggccgccgtgagcgccttcgcccagaccctgagaagatacaccagcctgaaccacctggcccaggccgccagagccgtgctgcagaacaccagccagatcaaccagatgctgagcgacctgaacagagtggacttcgccaacgtgcaggagcaggccagctgggtgtgccagtgcgacgacaacatggtgcagagactggagaccgacttcaagatgaccctgcagcagcagagcaccctggagcagtgggccgcctggctggacaacgtgatgatgcaggccctgaagccctacgagggcagacccagcttccccaaggccgccagacagttcctgctgaagtggtag

SEQ ID NO: 290565 - protein, 1207 aa, Artificial Sequence
  derived and/or modified sequence
MASVAWAVLKVLLLLPTQTWSPVGAGNPPDCDAPLASALPRSSFSSSSELSSSHGPGFSRLNRRDGAGGWTPLVSNKYQWLQIDLGERMEVTAVATQGGYGSSDWVTSYLLMFSDGGRNWKQYRREESIWGFPGNTNADSVVHYRLQPPFEARFLRFLPLAWNPRGRIGMRIEVYGCAYKSEVVYFDGQSALLYRLDKKPLKPIRDVISLKFKAMQSNGILLHREGQHGNHITLELIKGKLVFFLNSGNAKLPSTIAPVTLTLGSLLDDQHWHSVLIELLDTQVNFTVDKHTHHFQAKGDSSYLDLNFEISFGGIPTPGRSRAFRRKSFHGCLENLYYNGVDVTELAKKHKPQILMMGNVSFSCPQPQTVPVTFLSSRSYLALPGNSGEDKVSVTFQFRTWNRAGHLLFGELRRGSGSFVLFLKDGKLKLSLFQPGQSPRNVTAGAGLNDGQWHSVSFSAKWSHMNVVVDDDTAVQPLVAVLIDSGDTYYFGGCLDNSSGSGCKSPLGGFQGCLRLITIGDKAVDPILVQQGALGSFRDLQIDSCGITDRCLPSYCEHGGECSQSWDTFSCDCLGTGYTGETCHSSLYEQSCEAHKHRGNPSGLYYIDADGSGPLGPFLVYCNMTDAAWTVVQHGGPDAVTLRGAPSGHPRSAVSFAYAAGAGQLRSAVNLAERCEQRLALRCGTARRPDSRDGTPLSWWVGRTNETHTSWGGSLPDAQKCTCGLEGNCIDSQYYCNCDAGRNEWTSDTIVLSQKEHLPVTQIVMTDAGRPHSEAAYTLGPLLCRGDQSFWNSASFNTETSYLHFPAFHGELTADVCFFFKTTVSSGVFMENLGITDFIRIELRAPTEVTFSFDVGNGPCEVTVQSPTPFNDNQWHHVRAERNVKGASLQVDQLPQKMQPAPADGHVRLQLNSQLFIEISAYFATGSSMTYHFQEHYTLSENSSSLVSSLHRDVTLTREMITLSFRTTRTPSLLLYVSSFYEEYLSVILANNGSLQIRYKLDRHQNPDAFTFDFKNMADGQLHQVKINREEAVVMVEVNQSTKKQVILSSGTEFNAVKSLILGKVLEAAGADPDTRRAATSGFTGCLSAVRFGRAAPLKAALRPSGPSRVTVRGHVAPMARCAAGAASGSPARELAPRLAGGAGRSGPADEGEPLVNADRRDSAVIGGVIAVVIFILLCITAIAIRIYQQRKLRKENESKVSKKEEC

SEQ ID NO: 290566 - protein, 745 aa, Artificial Sequence
  derived and/or modified sequence
MASVAWAVLKVLLLLPTQTWSPVGAGNPPDCDAPLASALPRSSFSSSSELSSSHGPGFSRLNRRDGAGGWTPLVSNKYQWLQIDLGERMEVTAVATQGGYGSSDWVTSYLLMFSDGGRNWKQYRREESIWGFPGNTNADSVVHYRLQPPFEARFLRFLPLAWNPRGRIGMRIEVYGCAYKSEVVYFDGQSALLYRLDKKPLKPIRDVISLKFKAMQSNGILLHREGQHGNHITLELIKGKLVFFLNSGNAKLPSTIAPVTLTLGSLLDDQHWHSVLIELLDTQVNFTVDKHTHHFQAKGDSSYLDLNFEISFGGIPTPGRSRAFRRKSFHGCLENLYYNGVDVTELAKKHKPQILMMGNVSFSCPQPQTVPVTFLSSRSYLALPGNSGEDKVSVTFQFRTWNRAGHLLFGELRRGSGSFVLFLKDGKLKLSLFQPGQSPRNVTAGAGLNDGQWHSVSFSAKWSHMNVVVDDDTAVQPLVAVLIDSGDTYYFGGCLDNSSGSGCKSPLGGFQGCLRLITIGDKAVDPILVQQGALGSFRDLQIDSCGITDRCLPSYCEHGGECSQSWDTFSCDCLGTGYTGETCHSSLYEQSCEAHKHRGNPSGLYYIDADGSGPLGPFLVYCNMTDAAWTVVQHGGPDAVTLRGAPSGHPRSAVSFAYAAGAGQLRSAVNLAERCEQRLALRCGTARRPDSRDGTPLSWWVGRTNETHTSWGGSLPDAQKCTCGLEGNCIDSQYYCNCDAGRNEW

SEQ ID NO: 290567 - DNA, 3624 bp, Artificial Sequence
  derived and/or modified sequence
atggcaagtgtggcatgggccgtccttaaagtgctgcttctgttacctacccagacttggtctcccgtcggtgcgggtaatcccccagattgcgatgctcctcttgcctcagctctgcccaggtccagtttctcgtcctcttctgagttatcttcatcccatgggccaggtttttcgcgtcttaataggagagacggcgcaggaggatggacccctctagtcagtaataagtatcagtggctccaaatcgaccttggcgaacggatggaggtaacggctgtggccactcaaggagggtacggctcatcagactgggtgactagttatcttttgatgttttccgatggcggacgaaactggaaacagtatcgccgagaggagtctatatggggctttccaggtaataccaacgcagattcggttgtacattacagactccagcctccgtttgaagccagattcctcagattcctgccacttgcttggaatcccagaggcagaattgggatgcgaattgaggtgtacggctgcgcgtataagtccgaggtggtctattttgacgggcagtctgccctcttgtatcggttggataagaaacctctcaagcccatccgggacgtgataagcctgaagtttaaagccatgcagtccaacggaatcttgctgcacagagaaggccagcacggcaaccacataacccttgaattgattaaggggaagctggtgtttttcctgaatagtggaaatgcgaagctgccaagtaccatcgcacccgtgaccctgacgctcggctcattactggacgatcagcactggcatagcgtgctgatcgagcttctggacactcaagtgaattttaccgtggataaacacactcaccacttccaagccaagggcgatagctcgtatcttgacctaaactttgaaatctcatttggaggtatacccactcccggacggtcacgcgcatttagacggaaatctttccatgggtgcctggaaaacctgtactacaacggcgtagacgtaacagaactggctaagaagcataagcctcagatcctgatgatgggtaatgtctctttctcttgtccgcagccacaaacagtccccgtgacttttttatcctctcggtcatacctcgctcttccaggcaattccggggaggacaaagtatctgtgacctttcagttcaggacttggaatagagcaggacatctgcttttcggcgaattaaggcggggaagtggatcctttgtgctttttctgaaggacggaaaactcaaactgtcactcttccagcccggacagagtccgagaaatgttacagcgggtgcgggactgaacgacggacaatggcattctgtgtcattttcagctaagtggagccacatgaacgtcgtcgttgacgatgataccgctgtgcagcctctagtggctgtgcttattgattcaggggatacatactacttcggtggctgccttgataattcttctggctcagggtgtaaatcacccctcggagggttccagggctgtctcagattgatcactataggtgacaaggcagttgacccaatcttagtgcagcaaggagccctcggttctttccgcgaccttcagatagactcctgtggcatcacagacaggtgcctccctagctactgcgaacatggcggtgagtgctcccagtcttgggatacttttagttgcgattgccttgggacaggttacaccggggagacctgccactcctcgctctacgaacagagctgcgaggcacacaaacacagaggaaatccttccggtctttactacatcgacgcagacggtagtggccctctcgggcctttcctggtgtattgtaatatgaccgacgcggcttggacagtagtgcaacatggcggacctgatgcagtgacactccgcggtgcgccatctggtcacccacgtagtgctgtatccttcgcgtatgctgcgggagcgggtcagctgcgatccgccgtgaatcttgccgagcgctgcgaacagagactggccctcagatgcggaacagcgcgtcggcctgattctcgggacggaactccgttgagctggtgggtgggtagaaccaacgagacccatacatcgtggggaggctccctgcctgatgctcagaaatgtacatgcggcctggagggcaattgcatcgattcacagtactattgcaattgtgacgctggaagaaacgaatggacgtccgacacaatagtcctgtctcaaaaagagcacctccccgtcacgcagattgtgatgactgacgccggtcgaccacacagcgaggctgcgtacaccctcggaccactactgtgtcgaggggatcagtccttttggaatagcgcctcttttaacactgagacaagttacctccacttccctgcctttcacggcgagctgacagccgacgtttgcttctttttcaagactacggtgtcatctggcgtctttatggagaacttgggcatcactgattttattaggatagaactccgcgcaccaactgaagtaaccttcagctttgatgttggcaacggaccctgcgaggtgacggtccagagccctacgccgtttaatgacaaccaatggcatcatgtcagagcggaaaggaatgtgaagggcgcaagcctgcaggtggatcagctgccacaaaagatgcagcccgcaccagccgatggccatgtgcggttgcagctcaacagccagctcttcatcgaaatctcagcttatttcgccaccggaagctccatgacctatcattttcaggagcactacacactgtcagagaatagttcctccctcgtgtcttctttgcatcgggacgtaactctcacccgcgaaatgatcacactcagcttccggaccacccggactccaagcctcctgttatacgtgtcaagcttttacgaggaatatctgagtgtgatcctagctaacaatggctctttacagatccgctataaactcgacaggcatcagaacccggatgcatttaccttcgactttaaaaacatggctgacggtcaactgcaccaagttaagatcaaccgggaggaagcggtggtcatggtggaggtgaaccagagtactaaaaagcaggtgattctatcgagcgggaccgagttcaacgctgtaaaatcccttatcctcggcaaggtgctcgaagctgcaggagcagacccagacacccggcgtgcagctactagcggcttcaccggctgtctgtctgctgtgcggttcggcagggctgctcctctgaaggccgcattgcgaccgtctggaccatcgcgggtgaccgtgagaggccatgtggcgcctatggctaggtgcgcagcaggagccgcttcagggtcccctgctagggaattagcccctagactggcaggcggagccggaaggagcggccctgctgatgaaggagaaccattagtcaacgccgaccgtcgagacagcgcagtcatcggcggagtgatagccgttgtgattttcatcctcctgtgtatcaccgcaatagccatccgcatctaccagcagcgcaagctgcgaaaagagaacgagtctaaagtctccaagaaagaggagtgttag

SEQ ID NO: 290568 - DNA, 2238 bp, Artificial Sequence
  derived and/or modified sequence
atggcctcggtggcgtgggccgtgctgaaagtccttcttctgttgcccacccaaacctggagtcccgtcggagcaggaaacccacctgactgtgacgctcctctcgccagcgccctgccacgtagcagtttcagcagttccagtgagttgtccagcagccacgggccaggcttcagtcggctcaaccggcgagacggagcgggtggctggaccccgcttgtgtccaacaagtaccagtggctgcaaatagacttgggcgagcgaatggaagtaactgcagttgccacacagggaggatacggttcatcagattgggtcactagctatctcttgatgtttagtgacgggggaaggaactggaagcagtaccggagagaagagtcgatttggggattcccaggaaataccaacgccgactctgtcgtccattacagattgcaaccgccatttgaagccagatttttgagatttctgcccctggcatggaacccgcgaggaagaatcggaatgagaatcgaggtatacggttgtgcatacaaatccgaagttgtctacttcgatgggcaatcagctctgctctaccggttggataaaaagccgctgaagcctattcgggatgtgattagtcttaagttcaaggctatgcagtcgaacggtatcctactgcaccgagaagggcagcacggaaatcacatcactctggagctgattaaaggtaagctagtgtttttcttgaactccggaaacgccaaactgcccagtaccatcgcccctgttaccctgactctgggcagtctcctggatgaccagcattggcatagcgtcttgatcgagctgctggatacacaggtgaacttcactgtcgataagcatacgcatcacttccaagcaaaaggtgattccagctaccttgatcttaactttgagatcagtttcggaggcatacccacacctggccgatcccgagccttcaggagaaaatctttccacggctgcttggagaacctgtattataatggagttgatgtcaccgagctggcaaagaaacacaagcctcagatcctaatgatgggaaacgtgtcctttagttgtccgcagccccagaccgttcccgtgacatttctgagctcccggtcctatctcgctctgccaggaaactctggggaggacaaggtgtctgttacctttcagtttagaacctggaatagggctggccacctgctgtttggcgagctgcggcgtgggagtggctccttcgtgctgtttctgaaagatggaaaactgaagttgagtctgtttcagccgggacagtcacctagaaacgtgactgctggggcaggattaaatgacggacagtggcactctgtgtctttctccgcaaaatggtcccacatgaatgtcgtagtggacgatgatacagccgtccagcctctggtggctgtgctcatcgactccggagatacttattacttcggcggttgcctcgacaatagcagcggctccggatgtaaatctcccctcgggggatttcaaggctgcctccggctgattacgataggagacaaggctgtagacccgatcttggtgcagcagggggctttgggtagtttcagggatttacagatagactcttgcggtatcactgatcgatgcctgccatcttattgtgagcacggaggcgaatgttcccagtcctgggatactttcagctgcgactgcctaggcaccggatacacgggcgagacttgtcattcctctttgtatgaacagagctgcgaagcccacaagcaccgaggaaacccctccgggttgtactatattgatgctgatggctcggggccattgggtcccttcctcgtctactgcaatatgaccgatgcagcttggaccgtcgtccaacacggagggccagatgcagtcaccctgagaggggctcccagcggccatcctcgttcagcggtgagtttcgcctacgcagcgggagcaggtcagctgaggagcgcagtaaacttggcagaaagatgcgagcagagattagccttgcgctgcggaacggccagacgaccagattctcgggatggcacacccctgtcctggtgggtggggagaactaacgagacgcacacttcttgggggggtagtctccccgacgctcagaagtgcacatgcggactagagggaaactgcatcgacagccaatattactgtaattgcgacgccggacggaacgaatggtag

SEQ ID NO: 290569 - DNA, 3624 bp, Artificial Sequence
  derived and/or modified sequence
atggctagcgtagcgtgggctgtgttaaaggtgctgctgctgctgccaacacagacctggtctcctgttggggcaggaaaccctcccgactgcgacgcccctctggcatccgccctgcctcggtcttctttttcatcctcatctgagctttcctcatctcatggccccgggttctcccgtcttaaccgccgagacggtgctgggggctggacacctctggtcagcaacaagtatcagtggctgcagattgatctgggcgagagaatggaagtgaccgcagtagcaacacagggcggctacgggtcatccgactgggttactagttacctgttgatgttttcagacggcgggcgaaattggaagcaatacaggcgggaggaaagcatctggggtttcccagggaatacaaacgccgacagcgtagtacattacagattacagccacctttcgaagcgcgatttttaagattcttgcccctggcatggaatccaagaggtcgcatcgggatgaggatcgaggtttatgggtgcgcgtataagtctgaggtagtctacttcgacgggcagtccgccttgctgtacagactcgataagaagcccctgaagcccataagagatgtgataagcctgaaatttaaagccatgcagtcaaatggcattctgctccatagagagggtcaacacggtaatcacataacactggaactgataaaaggaaagttggtgttcttcctcaattcagggaacgcaaagcttccgtccacaattgctcctgtaacactcacactgggctccttactcgacgatcaacattggcattctgttctgatagagttacttgacacccaggtgaactttactgtcgacaagcacactcatcactttcaggctaaaggcgattctagttacttggacctaaactttgagattagcttcggcggaatccccacacccgggaggagtagagcattccggcgcaaaagcttccacggatgtcttgagaacctttattataatggtgtagatgtgactgaattagcaaaaaaacacaaaccacagattcttatgatggggaatgtgtcattcagctgtcctcaacctcaaacggtgcccgtcacgtttctgtcctctcgcagctacctggccctgcctggcaacagcggtgaggataaggtctcagtcacatttcagtttcgcacttggaatcgggcagggcatttgctgttcggggagctccgccggggtagcgggtccttcgttcttttcctcaaagacggaaagcttaaattgtccttattccaacctgggcaatcaccccgaaatgtcacggctggtgctggtttgaacgacgggcagtggcactccgtaagcttttctgccaagtggtcccacatgaatgtggtagtggatgacgacacggccgtgcagccgttagtggccgtgctgatcgactctggagacacatattacttcgggggctgtctcgataatagcagtggatctggatgcaaaagtcccctcggtggattccaggggtgcttgaggctgataacaataggggacaaagctgtcgatcccattctcgtacagcaaggggcactggggtcctttcgggacctgcaaatcgacagctgtggtatcacggacaggtgcttgccctcctactgtgaacatgggggagaatgcagccagagctgggacaccttttcatgtgattgtctggggacaggctatacaggagaaacatgccactcgtctctgtacgagcaaagctgcgaggcgcataagcacaggggcaacccttcagggttgtactatatagacgccgatgggtcagggccattaggcccttttctggtgtactgcaacatgacggacgctgcctggacagtggtgcagcacggcggtcccgatgctgtaacactgagaggcgcccccagcggacatcctaggagcgcagtctcctttgcctacgcagcaggtgccggccagttacgatcagccgttaatctggctgaacggtgcgagcagaggctggcgttaagatgcggtacagcgagacggccggattcacgcgacgggaccccattgagctggtgggtcggaagaaccaacgagacgcacacgtcttggggcggctctttacctgatgctcagaagtgtacatgcggactggaaggtaattgcatcgactcgcaatactattgcaactgcgacgcaggtagaaatgagtggacttcagacacaatcgtgctgagtcagaaggaacacctgcctgtcacccaaatcgtcatgactgacgctggaagaccgcattccgaagccgcttacactcttggacccttgctatgcaggggcgatcagagtttttggaattcagcctcctttaatacagagacgtcttacctgcatttcccggccttccacggcgaacttacggctgacgtctgcttcttttttaaaacgactgtttcaagcggcgtatttatggagaatctggggatcactgattttattagaatcgaactccgcgcaccaaccgaagtaacattttcctttgatgtcggtaatggcccatgcgaggtgacggtgcaatccccaacaccttttaacgacaatcagtggcatcatgtccgggcggaacgcaatgttaaaggagcaagccttcaggttgaccagctcccgcagaaaatgcagcccgccccggccgatgggcacgtaagactccaactgaatagccagctcttcatcgagatcagcgcctatttcgctacaggctcatccatgacataccatttccaggagcactacacgcttagcgagaattcctcaagcctcgtcagctcactccatcgtgatgtgactcttactagagaaatgattacattgagcttcaggaccacccgaaccccctcactgttgctttacgtgtcgagcttttacgaagaatatttatccgtcatattggcaaataacggaagcctccagatccgatacaaactggaccgtcaccagaatcctgacgcctttaccttcgatttcaaaaatatggccgacgggcagctccaccaggtgaagataaatcgagaagaggccgtcgtcatggtggaagtgaaccagagtaccaaaaaacaagtgatcctgtccagcggaactgagtttaacgccgtcaaaagcctgatactgggaaaggtcctggaggccgccggagcagatcccgatacacggcgggccgctacctcaggttttacaggttgcctatccgcagtccgattcgggcgtgccgcacctcttaaggccgccctacgaccaagcggtccgagcagagttactgtgagggggcatgtagcacctatggctcgttgcgccgcaggtgctgcttcaggatccccggctcgcgagctggctccaaggcttgccggtggagcgggacgcagtgggcctgccgacgaaggcgaaccacttgtgaatgctgatcggcgcgacagtgccgtgattgggggagtgatcgctgttgtaatcttcattttgttgtgtatcacagctatcgcgatcagaatttaccagcagaggaagctgcggaaggaaaacgaatccaaggtgagcaaaaaagaggagtgctag

SEQ ID NO: 290570 - DNA, 2238 bp, Artificial Sequence
  derived and/or modified sequence
atggcctccgtagcctgggctgtattaaaagtgctcttgcttctacctactcagacctggtcacctgtaggcgctggaaaccctcccgactgcgatgccccgctcgcgtcagcactgccgcggtcaagctttagctccagctctgaactctcctcctcccacggacccggattctctcgcctgaatcgacgcgatggagcgggtggctggactcccctcgtatcaaataaataccaatggttacagatcgacctaggagaaaggatggaggtgactgcagtagcgacgcaggggggctacggaagtagtgattgggtgaccagctatttacttatgttcagcgatggagggagaaattggaagcaataccgccgagaggagtccatctggggtttccctgggaacacaaacgccgacagcgtggtgcactacagactgcaaccgccctttgaggctagattcctgagattcctgcctttggcatggaaccccagaggtcgaattgggatgcgaattgaggtgtatggatgtgcatataaaagcgaggttgtctatttcgacggacagtccgccctgttgtatagacttgataaaaagccccttaagccgatccgggacgtgatctccctgaagttcaaggcgatgcagtcaaatggcattcttctgcatagggaagggcagcacgggaatcacatcaccctcgagttgatcaaaggaaagcttgtattttttctgaattctgggaatgctaaactcccctccaccatcgccccagtcacacttacactgggtagtcttctggacgaccagcattggcactccgtcctgattgagctgctggatacccaagtcaattttaccgttgacaaacacacccatcattttcaggcaaagggagactcatcctacctggatctgaattttgagatctcttttggaggaattccaacccccggacggagtcgcgctttccgacgaaaatcctttcatggctgccttgagaacctgtattacaacggagtcgacgtgactgagcttgctaagaaacacaaacctcagatactgatgatgggcaatgttagcttctcctgtccacagcctcagacagtgccggttacctttctgtcttctcgttcttatctcgccctacctgggaattcaggtgaggataaagtttccgttacgtttcagttcagaacttggaacagggcgggacacctcctcttcggtgaattgagacggggctccgggtcctttgtgctttttctcaaggacgggaaacttaagctctctctgttccaacccgggcaaagtcccagaaacgtaacagctggcgccgggctgaatgatggtcagtggcactccgtaagcttttccgccaagtggagccatatgaacgtggttgttgacgacgataccgctgttcagccactggtggcagtcctgatcgacagcggggacacgtactactttggcggatgtctggacaacagttctggcagcgggtgtaagagccctctcggcgggttccaggggtgccttcgattgattaccataggcgacaaagccgttgaccctattctggtgcagcaaggagcactgggtagctttagggacctacagatcgattcatgcgggattaccgaccgctgtctccctagctactgtgaacacggcggagaatgctcccagtcctgggacacgttctcctgtgactgtctgggcacaggctatactggggagacgtgccattcttcactgtacgagcaatcttgcgaagcacataagcaccgcgggaacccgtccgggctttattatatcgacgcggatggctctggccccctgggccctttccttgtgtactgcaatatgactgatgccgcatggacagtggtgcaacacggcggtcccgacgccgtaacgctccgaggagcaccctccggacacccgagatccgccgtatcttttgcttacgcggccggggctgggcaactcagatcagccgttaatctcgccgaaagatgcgaacagagacttgcactccgttgcggcacagcgagacgtcccgattccagagacggtactccactttcatggtgggtggggagaaccaacgagactcataccagctggggcgggtccctaccagatgcgcaaaagtgcacatgtggcctagagggcaattgtattgatagccaatactactgcaattgtgacgccgggcggaacgagtggtag

SEQ ID NO: 290571 - DNA, 3624 bp, Artificial Sequence
  derived and/or modified sequence
atggctagtgtcgcctgggctgtactcaaagtcttactgctgctccccacacagacctggagtccagtcggcgccggaaatcctcctgattgtgacgcccctcttgccagtgcgcttccacgctcctcattttcaagtagtagcgagctctctagttcccacggacctggatttagcagattgaaccggcgagacggcgcagggggatggacccccctagtttcaaataaataccagtggctacagatcgatcttggagagaggatggaggttacggccgtagctacccagggagggtacggtagcagcgattgggttacatcctatttactgatgtttagtgatgggggaaggaattggaagcagtaccggcgagaggaaagtatatggggttttcctggtaacaccaatgccgactctgtggttcactatagacttcagcccccattcgaagcccggttcctgagatttcttccactggcatggaatcctcgtggacgcataggaatgaggatagaggtatatggctgcgcatacaaatcagaagtggtctattttgacgggcagtctgcactcctgtataggcttgataagaaaccactgaaacccatccgggacgttataagcttgaaattcaaggccatgcaatccaatggtatcttacttcatagagagggccagcacggaaaccacatcacgcttgaactcattaaaggaaaactcgttttttttctgaactctggcaacgcaaaattgccgtcaacgatagcgccagttaccctaactctgggctcactactcgacgatcaacactggcattctgtcctcattgaacttctcgatacacaagtgaatttcaccgtggacaagcatacacatcacttccaggcgaaaggagacagttcctacctagacctgaattttgaaatatctttcggaggcattccaaccccaggtcggtcacgtgcatttagacgtaagtctttccatgggtgtttagaaaatctgtattacaacggtgtcgacgtaactgaactggccaagaagcacaaaccgcagatcctcatgatgggaaatgtgtctttttcatgtccccagccccaaaccgtacctgtgacgttcctttccagtcgatcctacctggctctgcctggaaattccggagaagataaagtgtctgttacttttcagtttagaacttggaaccgcgctggacacctactcttcggagagcttagaagaggctctggctccttcgttctgtttctaaaagatggaaaactgaagctgtctctcttccagccaggccaatctcctcggaacgttacggcaggggctggattaaacgacggtcagtggcactctgtgtctttttctgccaaatggagccacatgaatgtcgtggtagatgacgatactgctgtccagcctctcgtggccgtgcttattgatagcggggatacttactactttgggggctgtcttgacaattcgtctggatcagggtgcaagtcgcctttgggtggatttcaaggatgcctaaggttgatcacaattggagacaaagcggtagatcccatcctggtccagcagggtgccctcggtagcttcagagacctgcaaatagactcttgtggaataactgatcgatgccttccctcatattgcgaacatggtggtgaatgctctcagtcctgggacaccttctcatgtgattgtctgggaacggggtacaccggcgagacctgtcatagcagtctgtacgagcagtcgtgcgaggcccataagcatagaggtaacccatccggactgtattacatcgacgctgacggctcaggaccacttgggccttttttggtttactgcaacatgactgacgccgcctggactgtggtgcaacacggcggacccgatgctgtgactctcaggggcgcgccatctggacacccacggagcgcagtgagttttgcctatgctgcaggagctggacagctgagatccgccgttaatcttgccgagaggtgcgagcagagactggccctcaggtgcggaaccgcacgcagacccgattcccgagacggcacgcccctaagctggtgggtcggccgaacaaatgagactcatacgtcctggggcggcagcctcccggacgcacagaaatgcacatgcggcttagaagggaattgtattgactcccaatactactgcaactgcgatgctggtcggaatgaatggacatcggatacaattgttttatctcagaaagaacatttacctgtcacacagatcgtaatgacggacgctggaaggcctcatagtgaagctgcttacacgctgggcccattgttgtgtcgcggagaccagagcttctggaattctgccagcttcaacaccgaaacctcatacctacacttccctgcctttcacggagaactaacagccgatgtatgttttttttttaaaacgactgttagctccggggtctttatggagaaccttggcatcacggacttcatccgcatcgagctccgggcccctaccgaggttacattttcctttgatgtcggaaacggaccctgcgaagttaccgtgcagagccccacaccctttaatgacaaccaatggcatcacgtccgcgcagaaagaaatgtgaaaggcgccagtcttcaggtggatcagctaccacagaagatgcaaccggctcctgccgatggccacgttcggctgcaacttaattcacaattattcattgagattagcgcttattttgccacaggaagctcaatgacttaccactttcaggagcattacacactgtcagaaaattcatctagcctagtcagttctctccacagagatgtgaccctaacccgggagatgatcacgctcagctttaggaccacacgcaccccctcactgctcctttacgtttctagtttctacgaagaatatttaagcgtcatcctagctaacaacggcagcttacagatcagatataaactagaccgccaccaaaaccccgacgcttttactttcgactttaagaatatggcagacggacagctccatcaggtgaagataaatagagaagaggctgtagtcatggttgaagtcaaccaatctactaagaaacaggtgattctgtcttcaggtacggaatttaacgccgttaaatcactcatactcggcaaagtgttggaggccgccggtgccgatcccgatactaggagggccgcaacctctggttttacaggctgtctgagcgccgtccgttttggccgagccgctcctctaaaggctgccctcagaccgtcaggcccttcacgcgttacagtccgaggtcatgtggcaccaatggctcgatgtgcagccggtgcggcatctgggtcaccagccagggaactcgcaccccgactggcagggggagccggtcgctcaggccccgcagacgaaggagagccacttgtaaatgccgatagaagggacagcgctgtcattggcggggtaatcgctgttgttatctttattctcctgtgtataaccgccatcgccatccgaatctatcaacagcggaaactgagaaaggaaaacgaatcgaaggtcagcaaaaaagaggagtgttag

SEQ ID NO: 290572 - DNA, 2238 bp, Artificial Sequence
  derived and/or modified sequence
atggcctccgtagcctgggctgtattaaaagtgctcttgcttctacctactcagacctggtcacctgtaggcgctggaaaccctcccgactgcgatgccccgctcgcgtcagcactgccgcggtcaagctttagctccagctctgaactctcctcctcccacggacccggattctctcgcctgaatcgacgcgatggagcgggtggctggactcccctcgtatcaaataaataccaatggttacagatcgacctaggagaaaggatggaggtgactgcagtagcgacgcaggggggctacggatccagcgattgggtgacatcctacctcttaatgtttagcgacgggggccgcaactggaagcagtaccggagggaagagagcatatgggggtttcctggtaatactaatgccgactctgttgtgcattacagactgcagcctccatttgaagcacggtttctgaggttcctgcctcttgcctggaatcctagaggtagaattggcatgcgaattgaggtgtatggatgtgcttataagtctgaggtggtgtacttcgatggccaatctgctctgctgtatagactagacaagaaacctctgaagccaatccgggacgttatttccctcaaatttaaagcgatgcaatccaacggcatccttcttcacagggagggacagcacggaaatcacataacgctagaactgattaaaggaaaacttgtgttcttcctgaattctgggaatgccaaattaccctctacaatcgctccagtgactctcaccttgggctctctactagacgaccaacactggcatagcgtactcatcgaattgcttgacacccaggtaaactttacggttgataagcacacacaccattttcaggcaaaaggtgattcatcctacctggatctgaattttgagatctcttttggaggaattccaacccccggacggagtcgcgctttccgacgaaaatcctttcatggctgccttgagaacctgtattacaacggagtcgacgtgactgagcttgctaagaaacacaaacctcagatactgatgatgggcaatgttagcttctcctgtccacagcctcagacagtgccggttacctttctgtcttctcgttcttatctcgccctacctgggaattcaggtgaggataaagtttccgttacgtttcagttcagaacttggaatcgagctggccatctgttattcggagaacttcgaagagggtccggctcttttgtactctttttgaaggatggaaagctgaaactatcactgtttcagccaggacaaagcccaaggaacgtgaccgctggagcgggcttgaatgacggccaatggcactctgtttccttcagcgctaaatggagtcatatgaatgttgtcgttgatgatgatacagccgtgcaacctctcgtcgctgttctaattgattcaggcgacacctattattttggtggatgtttggataattcatcagggtccggctgcaagtcaccgttgggggggttccaaggctgccttcgactcattaccatcggagacaaggccgtagatcccattctcgttcaacaaggtgcattgggaagctttcgagacctccagatcgattcatgcggtattactgacagatgtctaccaagctactgcgagcacggaggagagtgttcccaaagctgggacacgttttcttgcgactgcctagggacaggatatacaggcgaaacctgccactcctctctgtacgaacagtcatgcgaggctcataaacatcgcggaaatccttctggactgtattacattgacgcagacggtagtggcccactcggtcccttcttggtctattgtaacatgacagatgccgcttggacagtcgtgcagcatggcgggccagacgctgtgacactgaggggcgcgccttccggtcatccccgcagcgcagtctcttttgcctacgcggccggagcaggccaactcagaagcgccgtcaatctagccgagcgatgtgagcagcggctcgccctcagatgcggaacagctcgaagacccgatagtagagatggaaccccactgagctggtgggttggacgaactaatgagacacacacttcttggggagggagcttgcctgatgcacagaagtgcacttgtgggctggaagggaattgtatagactctcagtactattgtaattgtgatgccggacgcaatgagtggtag

SEQ ID NO: 290573 - DNA, 3624 bp, Artificial Sequence
  derived and/or modified sequence
atggccagcgtggcctgggccgtgctgaaggtgctgctgctgctgcccacccagacctggagccccgtgggcgccggcaacccccccgactgcgacgcccccctggccagcgccctgcccagaagcagcttcagcagcagcagcgagctgagcagcagccacggccccggcttcagcagactgaacagaagagacggcgccggcggctggacccccctggtgagcaacaagtaccagtggctgcagatcgacctgggcgagagaatggaggtgaccgccgtggccacccagggcggctacggcagcagcgactgggtgaccagctacctgctgatgttcagcgacggcggcagaaactggaagcagtacagaagagaggagagcatctggggcttccccggcaacaccaacgccgacagcgtggtgcactacagactgcagccccccttcgaggccagattcctgagattcctgcccctggcctggaaccccagaggcagaatcggcatgagaatcgaggtgtacggctgcgcctacaagagcgaggtggtgtacttcgacggccagagcgccctgctgtacagactggacaagaagcccctgaagcccatcagagacgtgatcagcctgaagttcaaggccatgcagagcaacggcatcctgctgcacagagagggccagcacggcaaccacatcaccctggagctgatcaagggcaagctggtgttcttcctgaacagcggcaacgccaagctgcccagcaccatcgcccccgtgaccctgaccctgggcagcctgctggacgaccagcactggcacagcgtgctgatcgagctgctggacacccaggtgaacttcaccgtggacaagcacacccaccacttccaggccaagggcgacagcagctacctggacctgaacttcgagatcagcttcggcggcatccccacccccggcagaagcagagccttcagaagaaagagcttccacggctgcctggagaacctgtactacaacggcgtggacgtgaccgagctggccaagaagcacaagccccagatcctgatgatgggcaacgtgagcttcagctgcccccagccccagaccgtgcccgtgaccttcctgagcagcagaagctacctggccctgcccggcaacagcggcgaggacaaggtgagcgtgaccttccagttcagaacctggaacagagccggccacctgctgttcggcgagctgagaagaggcagcggcagcttcgtgctgttcctgaaggacggcaagctgaagctgagcctgttccagcccggccagagccccagaaacgtgaccgccggcgccggcctgaacgacggccagtggcacagcgtgagcttcagcgccaagtggagccacatgaacgtggtggtggacgacgacaccgccgtgcagcccctggtggccgtgctgatcgacagcggcgacacctactacttcggcggctgcctggacaacagcagcggcagcggctgcaagagccccctgggcggcttccagggctgcctgagactgatcaccatcggcgacaaggccgtggaccccatcctggtgcagcagggcgccctgggcagcttcagagacctgcagatcgacagctgcggcatcaccgacagatgcctgcccagctactgcgagcacggcggcgagtgcagccagagctgggacaccttcagctgcgactgcctgggcaccggctacaccggcgagacctgccacagcagcctgtacgagcagagctgcgaggcccacaagcacagaggcaaccccagcggcctgtactacatcgacgccgacggcagcggccccctgggccccttcctggtgtactgcaacatgaccgacgccgcctggaccgtggtgcagcacggcggccccgacgccgtgaccctgagaggcgcccccagcggccaccccagaagcgccgtgagcttcgcctacgccgccggcgccggccagctgagaagcgccgtgaacctggccgagagatgcgagcagagactggccctgagatgcggcaccgccagaagacccgacagcagagacggcacccccctgagctggtgggtgggcagaaccaacgagacccacaccagctggggcggcagcctgcccgacgcccagaagtgcacctgcggcctggagggcaactgcatcgacagccagtactactgcaactgcgacgccggcagaaacgagtggaccagcgacaccatcgtgctgagccagaaggagcacctgcccgtgacccagatcgtgatgaccgacgccggcagaccccacagcgaggccgcctacaccctgggccccctgctgtgcagaggcgaccagagcttctggaacagcgccagcttcaacaccgagaccagctacctgcacttccccgccttccacggcgagctgaccgccgacgtgtgcttcttcttcaagaccaccgtgagcagcggcgtgttcatggagaacctgggcatcaccgacttcatcagaatcgagctgagagcccccaccgaggtgaccttcagcttcgacgtgggcaacggcccctgcgaggtgaccgtgcagagccccacccccttcaacgacaaccagtggcaccacgtgagagccgagagaaacgtgaagggcgccagcctgcaggtggaccagctgccccagaagatgcagcccgcccccgccgacggccacgtgagactgcagctgaacagccagctgttcatcgagatcagcgcctacttcgccaccggcagcagcatgacctaccacttccaggagcactacaccctgagcgagaacagcagcagcctggtgagcagcctgcacagagacgtgaccctgaccagagagatgatcaccctgagcttcagaaccaccagaacccccagcctgctgctgtacgtgagcagcttctacgaggagtacctgagcgtgatcctggccaacaacggcagcctgcagatcagatacaagctggacagacaccagaaccccgacgccttcaccttcgacttcaagaacatggccgacggccagctgcaccaggtgaagatcaacagagaggaggccgtggtgatggtggaggtgaaccagagcaccaagaagcaggtgatcctgagcagcggcaccgagttcaacgccgtgaagagcctgatcctgggcaaggtgctggaggccgccggcgccgaccccgacaccagaagagccgccaccagcggcttcaccggctgcctgagcgccgtgagattcggcagagccgcccccctgaaggccgccctgagacccagcggccccagcagagtgaccgtgagaggccacgtggcccccatggccagatgcgccgccggcgccgccagcggcagccccgccagagagctggcccccagactggccggcggcgccggcagaagcggccccgccgacgagggcgagcccctggtgaacgccgacagaagagacagcgccgtgatcggcggcgtgatcgccgtggtgatcttcatcctgctgtgcatcaccgccatcgccatcagaatctaccagcagagaaagctgagaaaggagaacgagagcaaggtgagcaagaaggaggagtgctag

SEQ ID NO: 290574 - DNA, 2238 bp, Artificial Sequence
  derived and/or modified sequence
atggccagcgtggcctgggccgtgctgaaggtgctgctgctgctgcccacccagacctggagccccgtgggcgccggcaacccccccgactgcgacgcccccctggccagcgccctgcccagaagcagcttcagcagcagcagcgagctgagcagcagccacggccccggcttcagcagactgaacagaagagacggcgccggcggctggacccccctggtgagcaacaagtaccagtggctgcagatcgacctgggcgagagaatggaggtgaccgccgtggccacccagggcggctacggcagcagcgactgggtgaccagctacctgctgatgttcagcgacggcggcagaaactggaagcagtacagaagagaggagagcatctggggcttccccggcaacaccaacgccgacagcgtggtgcactacagactgcagccccccttcgaggccagattcctgagattcctgcccctggcctggaaccccagaggcagaatcggcatgagaatcgaggtgtacggctgcgcctacaagagcgaggtggtgtacttcgacggccagagcgccctgctgtacagactggacaagaagcccctgaagcccatcagagacgtgatcagcctgaagttcaaggccatgcagagcaacggcatcctgctgcacagagagggccagcacggcaaccacatcaccctggagctgatcaagggcaagctggtgttcttcctgaacagcggcaacgccaagctgcccagcaccatcgcccccgtgaccctgaccctgggcagcctgctggacgaccagcactggcacagcgtgctgatcgagctgctggacacccaggtgaacttcaccgtggacaagcacacccaccacttccaggccaagggcgacagcagctacctggacctgaacttcgagatcagcttcggcggcatccccacccccggcagaagcagagccttcagaagaaagagcttccacggctgcctggagaacctgtactacaacggcgtggacgtgaccgagctggccaagaagcacaagccccagatcctgatgatgggcaacgtgagcttcagctgcccccagccccagaccgtgcccgtgaccttcctgagcagcagaagctacctggccctgcccggcaacagcggcgaggacaaggtgagcgtgaccttccagttcagaacctggaacagagccggccacctgctgttcggcgagctgagaagaggcagcggcagcttcgtgctgttcctgaaggacggcaagctgaagctgagcctgttccagcccggccagagccccagaaacgtgaccgccggcgccggcctgaacgacggccagtggcacagcgtgagcttcagcgccaagtggagccacatgaacgtggtggtggacgacgacaccgccgtgcagcccctggtggccgtgctgatcgacagcggcgacacctactacttcggcggctgcctggacaacagcagcggcagcggctgcaagagccccctgggcggcttccagggctgcctgagactgatcaccatcggcgacaaggccgtggaccccatcctggtgcagcagggcgccctgggcagcttcagagacctgcagatcgacagctgcggcatcaccgacagatgcctgcccagctactgcgagcacggcggcgagtgcagccagagctgggacaccttcagctgcgactgcctgggcaccggctacaccggcgagacctgccacagcagcctgtacgagcagagctgcgaggcccacaagcacagaggcaaccccagcggcctgtactacatcgacgccgacggcagcggccccctgggccccttcctggtgtactgcaacatgaccgacgccgcctggaccgtggtgcagcacggcggccccgacgccgtgaccctgagaggcgcccccagcggccaccccagaagcgccgtgagcttcgcctacgccgccggcgccggccagctgagaagcgccgtgaacctggccgagagatgcgagcagagactggccctgagatgcggcaccgccagaagacccgacagcagagacggcacccccctgagctggtgggtgggcagaaccaacgagacccacaccagctggggcggcagcctgcccgacgcccagaagtgcacctgcggcctggagggcaactgcatcgacagccagtactactgcaactgcgacgccggcagaaacgagtggtag

SEQ ID NO: 290575 - DNA, 3624 bp, Artificial Sequence
  derived and/or modified sequence
atggcatcagtggcctgggccgtcctcaaagtgctcctactgctgcctacacaaacttggagcccggtcggggctggtaaccctcccgattgcgacgcgccactggcctctgcactgccccggtctagcttttcttcttcttccgaactgtccagctctcatggaccaggcttctccaggcttaaccgcagagacggcgccggtggttggacccccctggtttctaataaataccagtggctccagatagacctaggggagaggatggaagtgactgcagttgccacccagggcggctacgggtcttccgattgggtcaccagctatctgctgatgttttcggacggcgggaggaactggaagcagtaccggcgcgaggagtcaatttggggcttcccgggcaacactaacgcggattcagtcgtgcattaccgtctgcaacctcccttcgaagcgcgctttcttagatttcttcccctcgcatggaaccccaggggaaggattggaatgcggatagaagtctatgggtgtgcatataagtcagaagtagtgtactttgacggtcagagcgctctcctataccgcttggacaaaaagccgctcaagccaatcagggatgtaatttccctgaagtttaaagcgatgcagagcaatggaatcctcttacatcgggagggacagcacgggaatcacatcaccttagagctgatcaagggtaagctggtgttcttcctcaattccggaaacgccaaactgccatctaccatcgcgccggtcacactcactctcggtagcctcctggatgaccagcactggcactcagtcctcatcgagctgctcgacactcaagtgaatttcacagttgataaacatacccatcacttccaggcaaaaggggacagttcctaccttgacctgaacttcgagatcagcttcggcggcatcccaaccccaggacggtcgagagcctttcggaggaagtcctttcacgggtgtctggaaaacctttattacaacggggttgacgttacagaacttgccaaaaagcataaaccacaaatcctgatgatgggcaacgtatcattctcgtgcccacaaccgcagacagtgcccgtaacgttcctgtcatcgcggagttacctggcactgcccgggaattctggcgaagataaagtaagcgtgaccttccagtttagaacctggaatagggccggacacctgttatttggggaattaagacggggaagcgggagcttcgtcctgtttctgaaagacgggaaactgaagttatctctattccagcccggacagagcccacgaaacgtgactgcaggagctggtctgaacgacggacagtggcactcggttagtttctctgcaaaatggagccacatgaacgtggtggtggatgacgacaccgccgtacagcctttagtggctgtccttattgatagtggggatacctattactttggggggtgtctcgataattcatccggttccggttgcaagagcccgttaggcggatttcaaggatgccttcgactgatcaccatcggcgacaaagcagtggatcccatcctggtccagcaaggcgcacttggatcatttagggacttgcaaatcgactcctgtgggatcacagaccgatgcctgccaagctactgtgaacacggaggcgagtgtagccaatcctgggataccttctcgtgtgactgcctcggtacagggtacaccggcgaaacttgccacagctctctctacgagcagagctgcgaggcccataaacacagaggaaatcctagcgggctatactacatcgatgcagacgggtcagggcccctggggccctttttagtttactgtaatatgacagacgcagcgtggaccgtagtccaacacggaggtccggatgctgtcaccctgagaggcgctcccagcgggcatccgcggtccgcagtatcctttgcctatgccgctggagcgggccagctgaggagcgcagtcaacctagccgaacgttgtgaacagcgccttgcacttcgttgcggtaccgcccggcgccctgattccagggacggtacgcccctatcctggtgggtggggcggaccaacgagacacacacctcctgggggggctcactccccgacgcccagaagtgcacatgcggtctagagggaaattgtatcgactctcagtactattgcaattgtgacgccggcagaaatgagtggacctctgacactatcgtactgtcgcaaaaagagcacctccccgtaacccagattgttatgaccgatgcaggtcgcccacactctgaggctgcctatactctgggacctctactatgcagaggagatcaatccttctggaactctgcttctttcaataccgagacaagctatttgcacttcccagctttccacggtgaattgaccgcggatgtatgtttttttttcaaaactaccgtcagctcgggtgtgtttatggagaatttaggaatcacagattttattaggatcgagctccgcgctcccactgaggtgactttctcgttcgacgtaggtaacggcccctgtgaggtgacggttcagagcccaacgccctttaacgacaatcagtggcaccatgttcgcgctgagcgcaatgtgaagggtgccagtctccaagtggaccagctcccccaaaagatgcagccagccccggcagacggtcatgtgcgcctgcaactgaacagtcagctgttcatcgagatcagtgcctattttgccactggcagttcaatgacataccattttcaggaacactatacactgagtgagaactcctcttcactggtgtcttccctccatagagacgtcaccttgacccgagaaatgattactctgagcttccgaacaacccgtactccctcgcttctgctgtacgtatcctcgttctatgaagagtacctgagcgtgatattagccaataacggctcgctgcagatccgatataagttagaccgccaccagaatcctgacgcatttacttttgattttaaaaatatggcagacggtcaacttcaccaggtcaaaatcaatcgggaggaagctgtggtgatggtggaagtgaaccagtctaccaagaaacaagttattctctcctccggaactgaattcaatgccgtcaagtcactgattttgggaaaagtgctggaagcggcaggcgccgatccagacacccgccgggcagccacgtcagggttcacaggctgcctcagtgctgttaggttcggccgcgcagcaccactcaaagccgctctgagaccatcaggtccatcacgggtgaccgtccggggccatgtcgcccctatggctcgctgcgccgccggtgccgcatcaggatcgcctgctcgggagctcgctccacggctggccggtggggccggccggagcggccctgcagacgaaggtgaacccttagttaacgctgaccgaagggatagtgccgttataggaggggtcattgccgtggtgatttttatccttctctgtatcaccgcaatagccattaggatttatcagcagcgcaagttaagaaaagaaaatgagtccaaagtgagcaaaaaggaagaatgctag

SEQ ID NO: 290576 - DNA, 2238 bp, Artificial Sequence
  derived and/or modified sequence
atggccagtgtagcgtgggctgtcctcaaggttctactgctcctaccaacccaaacctggtcaccagtgggagccgggaaccctccagactgcgacgcccccctggcctccgccctgccaaggtcgtcattttccagttcatcagaactttcgtcctcacatggacctggcttcagtcggctaaataggcgggacggcgccggcgggtggactcctttagtctcaaacaagtaccagtggctgcagattgatctcggggagcgcatggaggtgactgccgtggctacacaggggggttacggctcatcagactgggttacctcctatttactgatgttttccgatggtggccggaactggaagcagtatcgccgcgaggagagcatttggggatttcccgggaacacaaacgcagactccgtggttcactacaggctccagcctcccttcgaggcgaggtttctgagattcctgcctctggcctggaatcccagaggccggatcggaatgcgtattgaagtatatggctgtgcttataagtcagaggttgtctactttgacggtcaatccgcactcctgtacaggctggacaagaagccgctgaaacctatacgggacgtgatctctctcaagtttaaggcaatgcaaagtaatggaatcctcctgcatcgcgaaggacaacacggaaatcacataacgctggaactgatcaagggaaagcttgttttttttcttaactcaggcaatgcaaagttgcctagtaccattgccccagtgaccctgactctgggctccctgttggacgaccagcactggcacagcgtgttgattgaacttctggatactcaagtgaattttaccgttgacaagcatacccaccatttccaggccaaaggggacagctcatacctggatttaaacttcgagatcagcttcgggggaattccgacccctgggcgcagccgggccttccggaggaagtcctttcacggatgcttggaaaacctctactataacggggtcgacgtcaccgaactggccaagaagcataaaccccaaatcctaatgatgggtaacgtgtccttttcctgcccccagccacaaacggttcctgtcacattcctcagctcacggtcttatctcgccctgcccggcaacagcggggaggataaggttagtgttacatttcagtttcgaacctggaacagagccgggcacctgctcttcggggagctccgcaggggttcaggtagtttcgtcttgtttctgaaggatggcaagctcaaacttagcctcttccagcccgggcagagcccccgaaacgttaccgccggtgctgggcttaacgatggacagtggcattctgtgtcgttctcggccaagtggagtcacatgaacgttgtcgtagatgatgacactgccgtccagcctcttgtggcggtgcttatcgactcaggtgacacttactacttcggtggttgccttgataattcgtcaggttcaggctgcaagtcgcctctgggtggatttcaaggatgtttgagattgataacgatcggggacaaggcagtggacccaatactggtgcaacaaggtgcactgggaagcttccgcgaccttcagattgactcttgtgggatcacggaccgttgccttccttcctactgtgagcacggaggagaatgcagtcagtcctgggacactttctcttgcgattgtctgggcacaggctacactggcgagacatgccactcttccctgtatgaacagagctgcgaagcccataagcacagaggaaacccctctgggctctattatatcgacgccgacggctcagggcccctgggccctttcttggtctactgtaacatgaccgatgccgcctggacagttgttcagcacggcggacccgacgcagtgacactgcgcggggctcctagtggccaccctaggtctgccgtaagttttgcctacgctgcaggtgcaggtcagctccggtcagccgtcaatctggcggaaaggtgcgagcagcgtctggccttgcgttgcggtactgctaggaggccggatagccgcgatggtacccctctgtcatggtgggtaggacggacaaacgaaacccatactagttgggggggatcgctccctgatgcacaaaaatgcacctgcggcctggagggcaattgtatcgatagccagtattactgtaactgtgatgcaggaaggaatgagtggtag

SEQ ID NO: 290577 - DNA, 3624 bp, Artificial Sequence
  derived and/or modified sequence
atggcctctgtggcctgggccgtgctgaaggtgctgctgctgctgcccacccagacctggagccctgtgggcgccggcaaccccccagactgtgatgcccccctggccagcgccctgcccaggagcagcttcagcagcagcagcgagctgagcagcagccacggccctggcttcagccggctgaacagaagagatggagctgggggctggacccccctggtgagcaacaagtaccagtggctgcagattgacctgggggagaggatggaggtgacagctgtggccacccagggcggctacggcagcagtgactgggtgaccagctacctgctgatgttcagtgatggcggcaggaactggaagcagtaccgccgggaggagagcatctggggcttccctggcaacaccaatgctgacagcgtggtgcactaccgcctgcagcccccatttgaggcccgcttcctgcgcttcctgcccctggcctggaacccccggggccgcatcggcatgagaattgaggtgtatggctgtgcctacaagtctgaggtggtgtactttgatggccagagcgccctgctgtaccgcctggacaagaagcccctgaagcccatcagagatgtgatcagcctgaagttcaaggccatgcagagcaatggcatcctgctgcaccgggagggccagcacggcaaccacatcaccctggagctgatcaagggcaagctggtgttcttcctgaacagcggaaatgccaagctgcccagcaccatcgcccctgtgaccctgaccctgggcagcctgctggatgaccagcactggcacagcgtgctgattgagctgctggacacccaggtgaacttcaccgtggacaagcacacccaccacttccaggccaagggggacagcagctacctggacctgaactttgagatcagctttggaggcatccccaccccaggccgcagccgggccttccggaggaagagcttccacggctgcctggagaacctgtactacaatggagtggatgtgacagagctggccaagaagcacaagccccagatcctgatgatgggaaatgtgtccttcagctgcccccagccccagacagtgcctgtgaccttcctgagcagccgcagctacctggccctgcccggcaacagcggggaggacaaggtgtctgtgaccttccagttccgcacctggaacagagctggccacctgctgtttggagagctgcggcggggcagcggcagctttgtgctcttcctgaaggatggcaagctgaagctgagcctcttccagcccggccagagccccagaaatgtgacagctggggccggcctgaatgatggccagtggcacagcgtgtccttcagcgccaagtggagccacatgaatgtggtggtggatgatgacacagctgtgcagcccctggtggccgtgctgattgattctggggacacctactactttggaggctgcctggacaacagcagcggcagcggctgcaagagccccctgggcggcttccagggctgcctgcggctcatcaccatcggggacaaggctgtggaccccatcctggtgcagcagggcgccctgggcagcttccgggacctgcagattgacagctgtggcatcacagaccgctgcctgcccagctactgtgagcacggcggagaatgttcccagagctgggacaccttcagctgtgactgcctgggcaccggctacacaggagagacctgccacagcagcctgtatgagcagagctgtgaggcccacaagcaccggggcaaccccagcggcctgtactacattgatgctgatggcagcggccccctgggccccttcctggtgtactgcaacatgacagatgctgcctggacagtggtgcagcacggcggcccagatgctgtgaccctgcggggggcccccagcggccaccccaggtctgctgtgtcctttgcctatgctgctggggccggccagctgcggtctgctgtgaacctggccgagcgctgtgagcagaggctggccctgcgctgtggcacagcccggcggccagacagcagagatggcacccccctgtcctggtgggtgggccgcaccaatgagacccacacctcctggggcggcagcctgcctgatgcccagaagtgcacctgtggcctggagggcaactgcatcgacagccagtactactgcaactgtgatgctggaagaaatgagtggaccagtgacaccatcgtgctgagccagaaggagcacctgcctgtgacccagatcgtgatgacagatgctggccggccccacagcgaggccgcctacaccctgggccccctgctgtgccgcggggaccagagcttctggaacagcgccagcttcaacacagagaccagctacctgcacttccctgccttccatggagagctgacagcagatgtgtgcttcttcttcaagaccaccgtgagcagcggggtcttcatggagaacctgggcatcacagacttcatcagaattgagctgcgggcccccacagaggtgaccttctcctttgatgtgggcaatggcccctgtgaggtgacagtgcagagccccacccccttcaatgacaaccagtggcaccacgtgcgggcagagagaaatgtgaagggggccagcctgcaggtggaccagctgccccagaagatgcagcctgccccagcagatggccacgtgcggctgcagctgaacagccagctgttcatcgagatcagcgcctactttgccaccggcagctccatgacctaccacttccaggagcactacaccctgtctgagaacagcagcagcctggtgagcagcctgcacagagatgtgaccctgacccgggagatgatcaccctgtccttccgcaccaccaggacccccagcctgctgctgtatgtgtcctccttctatgaggagtacctgagcgtcatcctggccaacaacggcagcctgcagatccgctacaagctggacagacaccagaacccagatgccttcacctttgacttcaagaacatggctgatggccagctgcaccaggtgaagatcaaccgggaggaggccgtggtgatggtggaggtgaaccagagcaccaagaagcaggtgatcctgagcagcggcacagagttcaatgctgtgaagagcctcatcctgggcaaggtgctggaggccgccggggctgaccctgacacccggcgggccgccaccagcggcttcaccggctgcctgtctgctgtgcgcttcggccgggccgcccccctgaaggccgccctgcggcccagcggccccagccgggtgacagtgcggggccacgtggcccccatggcccgctgtgccgccggggccgccagcggcagccctgcccgggagctggccccccggctggccggcggggccggccgcagcggccctgcagatgaaggagagcccctggtgaatgctgaccggcgggacagcgctgtgattggaggagtgattgctgtggtgatcttcatcctgctgtgcatcacagccatcgccatccgcatctaccagcagaggaagctgaggaaagaaaatgaaagcaaggtgtccaagaaggaggagtgctag

SEQ ID NO: 290578 - DNA, 2238 bp, Artificial Sequence
  derived and/or modified sequence
atggcctctgtggcctgggccgtgctgaaggtgctgctgctgctgcccacccagacctggagccctgtgggcgccggcaaccccccagactgtgatgcccccctggccagcgccctgcccaggagcagcttcagcagcagcagcgagctgagcagcagccacggccctggcttcagccggctgaacagaagagatggagctgggggctggacccccctggtgagcaacaagtaccagtggctgcagattgacctgggggagaggatggaggtgacagctgtggccacccagggcggctacggcagcagtgactgggtgaccagctacctgctgatgttcagtgatggcggcaggaactggaagcagtaccgccgggaggagagcatctggggcttccctggcaacaccaatgctgacagcgtggtgcactaccgcctgcagcccccatttgaggcccgcttcctgcgcttcctgcccctggcctggaacccccggggccgcatcggcatgagaattgaggtgtatggctgtgcctacaagtctgaggtggtgtactttgatggccagagcgccctgctgtaccgcctggacaagaagcccctgaagcccatcagagatgtgatcagcctgaagttcaaggccatgcagagcaatggcatcctgctgcaccgggagggccagcacggcaaccacatcaccctggagctgatcaagggcaagctggtgttcttcctgaacagcggaaatgccaagctgcccagcaccatcgcccctgtgaccctgaccctgggcagcctgctggatgaccagcactggcacagcgtgctgattgagctgctggacacccaggtgaacttcaccgtggacaagcacacccaccacttccaggccaagggggacagcagctacctggacctgaactttgagatcagctttggaggcatccccaccccaggccgcagccgggccttccggaggaagagcttccacggctgcctggagaacctgtactacaatggagtggatgtgacagagctggccaagaagcacaagccccagatcctgatgatgggaaatgtgtccttcagctgcccccagccccagacagtgcctgtgaccttcctgagcagccgcagctacctggccctgcccggcaacagcggggaggacaaggtgtctgtgaccttccagttccgcacctggaacagagctggccacctgctgtttggagagctgcggcggggcagcggcagctttgtgctcttcctgaaggatggcaagctgaagctgagcctcttccagcccggccagagccccagaaatgtgacagctggggccggcctgaatgatggccagtggcacagcgtgtccttcagcgccaagtggagccacatgaatgtggtggtggatgatgacacagctgtgcagcccctggtggccgtgctgattgattctggggacacctactactttggaggctgcctggacaacagcagcggcagcggctgcaagagccccctgggcggcttccagggctgcctgcggctcatcaccatcggggacaaggctgtggaccccatcctggtgcagcagggcgccctgggcagcttccgggacctgcagattgacagctgtggcatcacagaccgctgcctgcccagctactgtgagcacggcggagaatgttcccagagctgggacaccttcagctgtgactgcctgggcaccggctacacaggagagacctgccacagcagcctgtatgagcagagctgtgaggcccacaagcaccggggcaaccccagcggcctgtactacattgatgctgatggcagcggccccctgggccccttcctggtgtactgcaacatgacagatgctgcctggacagtggtgcagcacggcggcccagatgctgtgaccctgcggggggcccccagcggccaccccaggtctgctgtgtcctttgcctatgctgctggggccggccagctgcggtctgctgtgaacctggccgagcgctgtgagcagaggctggccctgcgctgtggcacagcccggcggccagacagcagagatggcacccccctgtcctggtgggtgggccgcaccaatgagacccacacctcctggggcggcagcctgcctgatgcccagaagtgcacctgtggcctggagggcaactgcatcgacagccagtactactgcaactgtgatgctggaagaaatgagtggtag

SEQ ID NO: 290579 - DNA, 3921 bp, Artificial Sequence
  derived and/or modified sequence
gctggtgcgtgaggaagagagctagagactggacaggggaggcagagcagcgtcagagccgcgcaggggacgggagtgagagcaggagcgacgcagagcggccgtcgccgtgcccgggtctcagggcgcctggctgaagtgagcatggcttcagtggcctgggccgtcctcaaggtgctgctgcttctccccactcagacttggagccccgtgggagcaggaaatccacctgactgtgatgccccactggcctctgccttgcctaggtcatccttcagcagctcctcagagctgtccagcagccacggcccggggttttcaaggcttaatcgaagagatggagctggtggctggactccacttgtgtcaaataaataccaatggctgcaaattgaccttggagagagaatggaggtcactgctgtcgccacccaaggaggatatgggagctctgactgggtgaccagctacctcctgatgttcagtgatggtgggagaaactggaagcagtatcgccgagaagaaagcatctggggttttccaggaaacacaaacgcagacagtgtggtgcactacagactccagcctccctttgaagccaggttcctgcgctttctccctttagcctggaaccctaggggcaggattgggatgcggatcgaagtgtacggatgtgcatataaatctgaggtggtttattttgatggacaaagtgctctgctgtatagacttgataaaaaacctttaaaaccaataagagacgttatttctttgaaatttaaagccatgcagagcaatggaattctacttcacagagaaggacaacatggaaatcacattactctggaattaattaaaggaaagcttgtcttttttcttaattcaggcaatgctaagctgccttccactattgctcctgtgaccctcaccctgggcagcctgctggacgaccagcactggcattccgtcctcatcgagctcctcgacacgcaggtcaacttcaccgtggacaaacacactcatcatttccaagcaaagggagattccagttacttggatcttaattttgagatcagctttgggggaattccgacacccggaagatcgcgggcattcagacgtaaaagctttcatgggtgtttagaaaatctttattataatggagtggatgttaccgaattagccaagaaacacaaaccacagatcctcatgatgggaaatgtgtccttctcatgtccacagccacagactgtccctgtgacttttctgagctccaggagttatctggctctgccaggcaactctggggaggacaaagtgtctgtcacttttcaatttcgaacgtggaacagagcaggacatttgcttttcggcgaacttcgacgtggttcagggagtttcgtcctctttcttaaggatggcaagctcaaactgagtctcttccagccgggacagtcaccaaggaatgtcacagcaggtgctggattaaacgatgggcagtggcactctgtgtccttctctgccaagtggagccatatgaatgtggtggtggacgatgacacagctgttcagcccctggtggctgtgctcattgattcaggtgacacctattattttggaggctgcctggacaacagctctggctctggatgtaaaagccccctgggagggtttcagggctgcctaaggctcatcaccattggtgacaaagcggtggatcccatcttagtacagcagggggcgctggggagtttcagggacctccagatagactcctgcggcatcacagacaggtgcttgcccagctactgtgagcatgggggcgagtgttcccagtcgtgggacaccttctcctgtgactgtctaggcacaggctatacgggcgagacctgccattcctctctctacgagcagtcttgtgaagcccacaagcaccgagggaacccgtctgggctttactatattgatgcagatggaagtggccccctgggaccatttcttgtgtactgcaatatgacagacgccgcgtggacggtggtgcagcacggtggccccgacgcggtgaccctccgaggtgcccccagcgggcacccgcgctcggctgtgtccttcgcgtacgcagcgggcgcggggcagctgcggtccgcggtgaacctggcggagcgctgcgagcagcggctggctctgcgctgcgggacggcgcggcgcccggactcacgagatggaaccccactgagctggtgggttggaagaaccaatgaaacacacacttcctggggaggttctctgcctgatgctcaaaagtgtacttgtggattagaggggaactgcattgattctcagtattactgcaactgtgatgctggccggaatgaatggactagtgacacaatagtcctttcccaaaaggagcacctgccagtcactcagattgtgatgacagacgcaggccgaccacattccgaagcagcttatacactggggccactgctctgccgcggagatcagtcattctggaattcagcttccttcaacactgagacttcataccttcatttccctgctttccacggagaactcactgctgacgtgtgcttcttttttaagaccacagtttcctccggggtgtttatggagaacctggggatcacagatttcatcaggattgagctgcgtgctcccacagaagtgaccttttccttcgatgtggggaatggaccttgtgaggtcacggtgcagtcacccactccctttaatgacaatcagtggcaccacgtgagggcagagagaaatgttaaaggagcgtctcttcaagttgatcagcttcctcagaagatgcagcctgcccctgctgatgggcacgttcgtttacagctcaacagccagctcttcattgagatttccgcatattttgcaactggctcctcaatgacataccattttcaagaacattacactttaagtgaaaactccagctctctcgtttcttcattacacagagatgtaacattgaccagagaaatgatcacactgagcttccgaaccacacgaactccgagcttattgctgtatgtgagctctttctatgaggaatacctttcagttatcctcgccaacaatggaagtttgcagattaggtacaagctagatagacatcaaaatcctgatgcatttacctttgattttaaaaacatggctgatgggcaacttcaccaagtgaagattaacagagaagaagctgtggtcatggtagaggttaaccagagcacaaagaaacaagtcatcttgtcctcagggacagaattcaacgccgtcaaatctctcatattgggaaaggttttagaggctgccggcgcggacccggacacaaggcgggcggcgactagtggcttcactggctgcctctcggcggtgcgcttcggccgcgctgctcccctgaaggcggcgctgcgccccagcggcccctcccgggtcaccgtccgcggccacgtggcccctatggcccgctgcgcagcgggggcggcgtccggctccccggcgcgggaactggctccccgactcgcggggggcgcaggtcgttctggaccagcggatgagggagagcccttggttaatgcagacagaagagactctgctgtcatcggaggtgtgatagcagtggtgatatttattttgctttgcatcactgccatagccatacgcatctatcaacagagaaagttacgcaaagaaaatgagtcaaaagtctcaaaaaaagaagagtgctaggacagctctaaacagtgagctcgatgtgcaaaacgcagtccatgaaaaccagaaagagcgagtcttctgattggcagctgtggctgtctctatcatcgtgactgtggacttccctgctgttgccatcagggtgcacacaagcaggtgcagtgc

SEQ ID NO: 290580 - DNA, 2649 bp, Artificial Sequence
  derived and/or modified sequence
agaaagctgcggcgcgagtccgcggggccgacctcggagacgcagctggggccgggcgcggcttggcgggagggtctgcagcgccgagggaggctgctggtgcgtgaggaagagagctagagactggacaggggaggcagagcagcgtcagagccgcgcaggggacgggagtgagagcaggagcgacgcagagcggccgtcgccgtgcccgggtctcagggcgcctggctgaagtgagcatggcttcagtggcctgggccgtcctcaaggtgctgctgcttctccccactcagacttggagccccgtgggagcaggaaatccacctgactgtgatgccccactggcctctgccttgcctaggtcatccttcagcagctcctcagagctgtccagcagccacggcccggggttttcaaggcttaatcgaagagatggagctggtggctggactccacttgtgtcaaataaataccaatggctgcaaattgaccttggagagagaatggaggtcactgctgtcgccacccaaggaggatatgggagctctgactgggtgaccagctacctcctgatgttcagtgatggtgggagaaactggaagcagtatcgccgagaagaaagcatctggggttttccaggaaacacaaacgcagacagtgtggtgcactacagactccagcctccctttgaagccaggttcctgcgctttctccctttagcctggaaccctaggggcaggattgggatgcggatcgaagtgtacggatgtgcatataaatctgaggtggtttattttgatggacaaagtgctctgctgtatagacttgataaaaaacctttaaaaccaataagagacgttatttctttgaaatttaaagccatgcagagcaatggaattctacttcacagagaaggacaacatggaaatcacattactctggaattaattaaaggaaagcttgtcttttttcttaattcaggcaatgctaagctgccttccactattgctcctgtgaccctcaccctgggcagcctgctggacgaccagcactggcattccgtcctcatcgagctcctcgacacgcaggtcaacttcaccgtggacaaacacactcatcatttccaagcaaagggagattccagttacttggatcttaattttgagatcagctttgggggaattccgacacccggaagatcgcgggcattcagacgtaaaagctttcatgggtgtttagaaaatctttattataatggagtggatgttaccgaattagccaagaaacacaaaccacagatcctcatgatgggaaatgtgtccttctcatgtccacagccacagactgtccctgtgacttttctgagctccaggagttatctggctctgccaggcaactctggggaggacaaagtgtctgtcacttttcaatttcgaacgtggaacagagcaggacatttgcttttcggcgaacttcgacgtggttcagggagtttcgtcctctttcttaaggatggcaagctcaaactgagtctcttccagccgggacagtcaccaaggaatgtcacagcaggtgctggattaaacgatgggcagtggcactctgtgtccttctctgccaagtggagccatatgaatgtggtggtggacgatgacacagctgttcagcccctggtggctgtgctcattgattcaggtgacacctattattttggaggctgcctggacaacagctctggctctggatgtaaaagccccctgggagggtttcagggctgcctaaggctcatcaccattggtgacaaagcggtggatcccatcttagtacagcagggggcgctggggagtttcagggacctccagatagactcctgcggcatcacagacaggtgcttgcccagctactgtgagcatgggggcgagtgttcccagtcgtgggacaccttctcctgtgactgtctaggcacaggctatacgggcgagacctgccattcctctctctacgagcagtcttgtgaagcccacaagcaccgagggaacccgtctgggctttactatattgatgcagatggaagtggccccctgggaccatttcttgtgtactgcaatatgacagacgccgcgtggacggtggtgcagcacggtggccccgacgcggtgaccctccgaggtgcccccagcgggcacccgcgctcggctgtgtccttcgcgtacgcagcgggcgcggggcagctgcggtccgcggtgaacctggcggagcgctgcgagcagcggctggctctgcgctgcgggacggcgcggcgcccggactcacgagatggaaccccactgagctggtgggttggaagaaccaatgaaacacacacttcctggggaggttctctgcctgatgctcaaaagtgtacttgtggattagaggggaactgcattgattctcagtattactgcaactgtgatgctggccggaatgaatggtgatttccacatgatttccctgcacaaaaatgtggtttttattctttaattatgcatagttaattaaatgtcagacaagctggtacaataaggtaactaaagtatgttcaagcaagctgaaatacaagttttgatgaaatatgatcagttaatctaaggattaaattttatgacc

SEQ ID NO: 290581 - DNA, 3624 bp, Artificial Sequence
  derived and/or modified sequence
atggccagcgtggcctgggccgtgctgaaggtgctgctgctgctgccgacccaaacatggtcacccgtgggagcggggaacccacccgattgcgacgccccactggcttcggccctgcccaggtccagtttctcctccagcagcgaattatcatcgagccacggtcctggcttttctaggcttaatcggcgggacggcgccggcggctggactccactagtgagcaataagtatcaatggctgcaaatagatctaggggaaagaatggaagtcacggcagtcgccacacagggcggctatggaagcagcgattgggtgactagctacttgctaatgtttagtgatggcggaagaaactggaagcagtataggagagaggagtcaatatggggattccccgggaacacaaacgccgactctgtcgtgcattacaggctccaaccacccttcgaggcacgttttttgcgctttcttcccctcgcctggaatcctcggggaagaatcggtatgcgaattgaagtatacgggtgtgcatataaatctgaggttgtctacttcgatgggcagtctgctctgctttatcgtctggataagaagccgctgaaacccattcgcgatgtcatctccctgaagtttaaagccatgcagtcaaacggaatcctgctccatagggagggccagcatggcaaccacattaccttagagctgatcaagggtaaacttgtgtttttcctgaacagcgggaatgcaaagttgccctccactatcgcccctgtgactttaactctggggagcctgctcgatgaccagcattggcactctgttctgatcgagctcctggatacccaggtgaattttaccgtcgacaagcacactcatcacttccaggccaagggagactcgagctatttggacttgaacttcgaaatcagctttggtggtatccctactccgggtcggagccgcgcattcagaagaaaatctttccacggctgcttagaaaatctatactacaatggcgtggacgtcaccgagttggctaaaaagcacaaaccccagatactaatgatgggcaatgtgtctttcagctgcccacagccacagaccgtcccagttaccttcctgtcaagtcggagttacttagcccttccaggaaacagtggcgaagataaagtttctgtgactttccagtttagaacctggaaccgcgctggacacctgctcttcggggagcttagaagagggtccggttcctttgtcttgttcctcaaagatgggaagctaaagttgtcgctgtttcagccaggccaatcacctagaaatgttacagcaggagccggtttgaacgacggccagtggcactccgtcagctttagtgctaagtggagtcatatgaatgtagtggtcgacgacgacaccgctgtgcagccactggtggccgtattaattgactccggagacacttattacttcggcggctgtctcgataattccagcggttctggttgcaagtcacctttgggggggttccaaggttgcctcagactcatcacaataggtgataaagcagtggaccctattttagtgcagcaaggggccctcgggtctttccgcgatctccagatcgattcctgcggcatcactgatagatgcttaccaagttactgcgagcacggtggggagtgctcccaatcatgggacaccttctcctgcgactgtctaggaacaggttacactggtgagacttgccactcttctctatacgaacagtcttgtgaggcccataagcatagggggaatccctccggactgtactatattgacgccgatgggagtgggccattgggcccctttctcgtctattgtaacatgactgatgcggcatggactgtggtgcaacacgggggtcctgacgcagtgacactaaggggagccccttcagggcaccccaggtctgctgtatcttttgcatacgcagccggtgcaggccagctccgctctgccgtaaatcttgcggagcgctgtgagcaacgcttggccctccggtgtgggactgccaggcggccggactccagggatgggacccctctcagctggtgggtgggcagaactaacgagacccacacttcttggggcggaagcctgcctgatgcacaaaagtgcacgtgtgggctggaaggaaactgcatcgattctcaatattactgtaactgtgatgcgggccggaatgagtggacaagcgacaccatcgtcttgtcacaaaaggaacacctccctgttacacaaattgttatgacggatgcggggcgacctcacagcgaggctgcatatacactcggcccattgctgtgccggggtgaccagtccttctggaactctgccagtttcaataccgagacctcttacctgcacttccccgccttccacggtgaactaaccgctgatgtgtgctttttctttaaaactacagtctcgagcggcgtctttatggagaaccttgggatcaccgacttcatcagaattgaactccgcgcccctacagaagtcaccttttcatttgacgtggggaacggtccgtgcgaggtcacggtgcagagcccgactcccttcaacgacaatcagtggcaccatgtccgggcagagcggaatgtaaagggagcatctttgcaggtggaccaacttcctcagaagatgcagcctgccccggctgacggacatgtgcgtctgcagctgaattcccagctgtttatagagattagtgcttacttcgccaccggcagttcaatgacctatcacttccaggaacattatactctgtctgaaaatagtagtagcctcgtctcctccctgcatcgggacgtcaccctcacaagagaaatgattacactctcttttaggaccacgcgcaccccttcactgcttctgtacgtatccagcttctacgaagagtatttgtcagttatcctcgcaaataacgggtcgctacagattcgttataaactggaccggcaccaaaatcctgatgcgtttacatttgactttaagaacatggccgatgggcagctccatcaggtcaagatcaatagagaagaagcggttgtgatggtggaggttaaccagagcaccaagaagcaggtgatcctgtctagcggaaccgaattcaacgccgtcaaatccttgatcctgggaaaggtcctcgaggctgcgggcgccgacccagatactaggagggctgccaccagcggatttactggctgcctcagtgccgtgaggtttgggagggccgcacctctcaaagctgcgcttcgtccgtctgggccctcaagggtgactgtgcgcgggcacgtggcaccgatggcccggtgcgcagccggcgccgcatccggttctcctgcccgggagctggcccctcgattagctggcggagccggccggtccggcccagccgatgagggtgagcccctggtgaatgctgaccgcagggacagcgcggtcatcggaggagtcattgctgtcgttatcttcatactcctgtgcatcactgcgattgctattagaatctaccaacaacggaagctgcgcaaggagaatgaatctaaggtgtcaaagaaagaagagtgctag

SEQ ID NO: 290582 - DNA, 2238 bp, Artificial Sequence
  derived and/or modified sequence
atggccagcgtggcctgggccgtgctgaaggtgctgctgctgctgcccacccagacctggtcaccggttggagccgggaatcctcccgactgcgacgccccgcttgcgtcggcgctcccaaggagtagcttctcaagtagcagtgaactgtcctcttcccacgggcccgggttcagtcgccttaacaggagggacggagccgggggatggacccctctggtctcaaataaataccagtggctgcagatcgacttgggagagcggatggaagtgaccgccgtggcgacccaaggcgggtatggctcctctgattgggttaccagttacttgttaatgttcagcgacggaggccggaactggaagcagtacaggcgcgaagaaagtatctggggctttcccggaaataccaatgcagattctgtagtacactacaggctgcaaccaccatttgaggcccggttcctcagatttctcccattggcttggaaccctagaggacgcattggcatgcgtatcgaagtgtacggatgcgcctacaagtctgaggtcgtgtacttcgatgggcagtcggccctcttgtaccgcctcgataagaaaccccttaagcctatcagagatgtgatcagccttaagttcaaagcgatgcagtccaacggtatcctgctccacagagagggccaacatggcaaccatattactctggagttaatcaaagggaaactggtgttcttcctaaactccggaaatgctaagctgccctcgactattgccccagtaactctgaccctgggcagtctcttggatgaccagcactggcactctgtgcttatcgaactgctagacacgcaagtcaatttcaccgtcgataagcacacacatcactttcaggccaagggagactcgtcctatcttgatctgaacttcgagatttccttcggtggcatccccacacctggccgctccagagcattcaggagaaaatcctttcatgggtgtctggagaacctatactataacggcgttgacgtaacagagctagccaaaaagcacaagcctcagattctaatgatgggtaatgtaagcttctcctgtccgcagccccagaccgtgcccgtcacgtttctatccagccgaagctatctggccttgcctgggaacagtggcgaagataaagtctctgtgacattccagtttcgaacgtggaatcgcgcagggcacctcctttttggcgaattgaggcggggttccggcagctttgtgctgtttctgaaagacggtaagctgaagctgtccttgtttcagcctggtcaatcaccacgaaatgtcaccgccggcgcaggactgaacgatgggcagtggcactcagtgagtttttccgctaagtggagtcacatgaacgttgtcgtggacgacgatactgccgtgcaaccgcttgttgctgtcctcattgatagcggggatacatattatttcggcggttgcttggataactcttccggttctggttgcaaatcgccccttggcggcttccaaggttgccttcgcttaattactatcggggataaggctgtcgaccccattctcgtgcagcagggcgctcttggcagtttcagagaccttcagatcgactcttgcggcatcaccgatcgttgtctgccttcttactgcgagcacggcggggaatgttcccagtcttgggatacattctcttgcgattgtctgggcactggctacacaggtgagacatgccatagcagcctatatgaacagtcttgtgaggcccacaagcatagaggtaaccccagcggactgtattacatcgatgccgacgggtccggtccgttgggtccgttcctcgtctattgcaacatgaccgatgcagcctggaccgtagttcagcacggagggcccgatgctgttactctgcgcggggcaccatccggtcaccctcggtctgcagtgtctttcgcgtatgctgcgggcgctggtcaactccggtctgcagttaaccttgccgagcgctgtgagcaacggctagcgctgaggtgtggcactgcacgtcggccagacagccgtgatggaactccactaagctggtgggttggccggactaatgagacccatacctcatggggaggctcactgccagacgcacaaaagtgcacgtgcggacttgagggcaattgtattgattctcaatactactgcaactgtgacgccggacgtaatgaatggtag

SEQ ID NO: 290583 - RNA, 3624 nt, Artificial Sequence
  derived and/or modified sequence
auggcuagcguagcgugggcuguguuaaaggugcugcugcugcugccaacacagaccuggucuccuguuggggcaggaaacccucccgacugcgacgccccucuggcauccgcccugccucggucuucuuuuucauccucaucugagcuuuccucaucucauggccccggguucucccgucuuaaccgccgagacggugcugggggcuggacaccucuggucagcaacaaguaucaguggcugcagauugaucugggcgagagaauggaagugaccgcaguagcaacacagggcggcuacgggucauccgacuggguuacuaguuaccuguugauguuuucagacggcgggcgaaauuggaagcaauacaggcgggaggaaagcaucugggguuucccagggaauacaaacgccgacagcguaguacauuacagauuacagccaccuuucgaagcgcgauuuuuaagauucuugccccuggcauggaauccaagaggucgcaucgggaugaggaucgagguuuaugggugcgcguauaagucugagguagucuacuucgacgggcaguccgccuugcuguacagacucgauaagaagccccugaagcccauaagagaugugauaagccugaaauuuaaagccaugcagucaaauggcauucugcuccauagagagggucaacacgguaaucacauaacacuggaacugauaaaaggaaaguugguguucuuccucaauucagggaacgcaaagcuuccguccacaauugcuccuguaacacucacacugggcuccuuacucgacgaucaacauuggcauucuguucugauagaguuacuugacacccaggugaacuuuacugucgacaagcacacucaucacuuucaggcuaaaggcgauucuaguuacuuggaccuaaacuuugagauuagcuucggcggaauccccacacccgggaggaguagagcauuccggcgcaaaagcuuccacggaugucuugagaaccuuuauuauaaugguguagaugugacugaauuagcaaaaaaacacaaaccacagauucuuaugauggggaaugugucauucagcuguccucaaccucaaacggugcccgucacguuucuguccucucgcagcuaccuggcccugccuggcaacagcggugaggauaaggucucagucacauuucaguuucgcacuuggaaucgggcagggcauuugcuguucggggagcuccgccgggguagcggguccuucguucuuuuccucaaagacggaaagcuuaaauuguccuuauuccaaccugggcaaucaccccgaaaugucacggcuggugcugguuugaacgacgggcaguggcacuccguaagcuuuucugccaaguggucccacaugaaugugguaguggaugacgacacggccgugcagccguuaguggccgugcugaucgacucuggagacacauauuacuucgggggcugucucgauaauagcaguggaucuggaugcaaaaguccccucgguggauuccaggggugcuugaggcugauaacaauaggggacaaagcugucgaucccauucucguacagcaaggggcacugggguccuuucgggaccugcaaaucgacagcugugguaucacggacaggugcuugcccuccuacugugaacaugggggagaaugcagccagagcugggacaccuuuucaugugauugucuggggacaggcuauacaggagaaacaugccacucgucucuguacgagcaaagcugcgaggcgcauaagcacaggggcaacccuucaggguuguacuauauagacgccgaugggucagggccauuaggcccuuuucugguguacugcaacaugacggacgcugccuggacaguggugcagcacggcggucccgaugcuguaacacugagaggcgcccccagcggacauccuaggagcgcagucuccuuugccuacgcagcaggugccggccaguuacgaucagccguuaaucuggcugaacggugcgagcagaggcuggcguuaagaugcgguacagcgagacggccggauucacgcgacgggaccccauugagcuggugggucggaagaaccaacgagacgcacacgucuuggggcggcucuuuaccugaugcucagaaguguacaugcggacuggaagguaauugcaucgacucgcaauacuauugcaacugcgacgcagguagaaaugaguggacuucagacacaaucgugcugagucagaaggaacaccugccugucacccaaaucgucaugacugacgcuggaagaccgcauuccgaagccgcuuacacucuuggacccuugcuaugcaggggcgaucagaguuuuuggaauucagccuccuuuaauacagagacgucuuaccugcauuucccggccuuccacggcgaacuuacggcugacgucugcuucuuuuuuaaaacgacuguuucaagcggcguauuuauggagaaucuggggaucacugauuuuauuagaaucgaacuccgcgcaccaaccgaaguaacauuuuccuuugaugucgguaauggcccaugcgaggugacggugcaauccccaacaccuuuuaacgacaaucaguggcaucauguccgggcggaacgcaauguuaaaggagcaagccuucagguugaccagcucccgcagaaaaugcagcccgccccggccgaugggcacguaagacuccaacugaauagccagcucuucaucgagaucagcgccuauuucgcuacaggcucauccaugacauaccauuuccaggagcacuacacgcuuagcgagaauuccucaagccucgucagcucacuccaucgugaugugacucuuacuagagaaaugauuacauugagcuucaggaccacccgaacccccucacuguugcuuuacgugucgagcuuuuacgaagaauauuuauccgucauauuggcaaauaacggaagccuccagauccgauacaaacuggaccgucaccagaauccugacgccuuuaccuucgauuucaaaaauauggccgacgggcagcuccaccaggugaagauaaaucgagaagaggccgucgucaugguggaagugaaccagaguaccaaaaaacaagugauccuguccagcggaacugaguuuaacgccgucaaaagccugauacugggaaagguccuggaggccgccggagcagaucccgauacacggcgggccgcuaccucagguuuuacagguugccuauccgcaguccgauucgggcgugccgcaccucuuaaggccgcccuacgaccaagcgguccgagcagaguuacugugagggggcauguagcaccuauggcucguugcgccgcaggugcugcuucaggauccccggcucgcgagcuggcuccaaggcuugccgguggagcgggacgcagugggccugccgacgaaggcgaaccacuugugaaugcugaucggcgcgacagugccgugauugggggagugaucgcuguuguaaucuucauuuuguuguguaucacagcuaucgcgaucagaauuuaccagcagaggaagcugcggaaggaaaacgaauccaaggugagcaaaaaagaggagugcuag

SEQ ID NO: 290584 - RNA, 2238 nt, Artificial Sequence
  derived and/or modified sequence
auggccuccguagccugggcuguauuaaaagugcucuugcuucuaccuacucagaccuggucaccuguaggcgcuggaaacccucccgacugcgaugccccgcucgcgucagcacugccgcggucaagcuuuagcuccagcucugaacucuccuccucccacggacccggauucucucgccugaaucgacgcgauggagcggguggcuggacuccccucguaucaaauaaauaccaaugguuacagaucgaccuaggagaaaggauggaggugacugcaguagcgacgcaggggggcuacggaaguagugauugggugaccagcuauuuacuuauguucagcgauggagggagaaauuggaagcaauaccgccgagaggaguccaucugggguuucccugggaacacaaacgccgacagcguggugcacuacagacugcaaccgcccuuugaggcuagauuccugagauuccugccuuuggcauggaaccccagaggucgaauugggaugcgaauugagguguauggaugugcauauaaaagcgagguugucuauuucgacggacaguccgcccuguuguauagacuugauaaaaagccccuuaagccgauccgggacgugaucucccugaaguucaaggcgaugcagucaaauggcauucuucugcauagggaagggcagcacgggaaucacaucacccucgaguugaucaaaggaaagcuuguauuuuuucugaauucugggaaugcuaaacuccccuccaccaucgccccagucacacuuacacuggguagucuucuggacgaccagcauuggcacuccguccugauugagcugcuggauacccaagucaauuuuaccguugacaaacacacccaucauuuucaggcaaagggagacucauccuaccuggaucugaauuuugagaucucuuuuggaggaauuccaacccccggacggagucgcgcuuuccgacgaaaauccuuucauggcugccuugagaaccuguauuacaacggagucgacgugacugagcuugcuaagaaacacaaaccucagauacugaugaugggcaauguuagcuucuccuguccacagccucagacagugccgguuaccuuucugucuucucguucuuaucucgcccuaccugggaauucaggugaggauaaaguuuccguuacguuucaguucagaacuuggaacagggcgggacaccuccucuucggugaauugagacggggcuccggguccuuugugcuuuuucucaaggacgggaaacuuaagcucucucuguuccaacccgggcaaagucccagaaacguaacagcuggcgccgggcugaaugauggucaguggcacuccguaagcuuuuccgccaaguggagccauaugaacgugguuguugacgacgauaccgcuguucagccacugguggcaguccugaucgacagcggggacacguacuacuuuggcggaugucuggacaacaguucuggcagcggguguaagagcccucucggcggguuccaggggugccuucgauugauuaccauaggcgacaaagccguugacccuauucuggugcagcaaggagcacuggguagcuuuagggaccuacagaucgauucaugcgggauuaccgaccgcugucucccuagcuacugugaacacggcggagaaugcucccaguccugggacacguucuccugugacugucugggcacaggcuauacuggggagacgugccauucuucacuguacgagcaaucuugcgaagcacauaagcaccgcgggaacccguccgggcuuuauuauaucgacgcggauggcucuggcccccugggcccuuuccuuguguacugcaauaugacugaugccgcauggacaguggugcaacacggcggucccgacgccguaacgcuccgaggagcacccuccggacacccgagauccgccguaucuuuugcuuacgcggccggggcugggcaacucagaucagccguuaaucucgccgaaagaugcgaacagagacuugcacuccguugcggcacagcgagacgucccgauuccagagacgguacuccacuuucaugguggguggggagaaccaacgagacucauaccagcuggggcgggucccuaccagaugcgcaaaagugcacauguggccuagagggcaauuguauugauagccaauacuacugcaauugugacgccgggcggaacgagugguag

SEQ ID NO: 290585 - RNA, 3624 nt, Artificial Sequence
  derived and/or modified sequence
auggcuagugucgccugggcuguacucaaagucuuacugcugcuccccacacagaccuggaguccagucggcgccggaaauccuccugauugugacgccccucuugccagugcgcuuccacgcuccucauuuucaaguaguagcgagcucucuaguucccacggaccuggauuuagcagauugaaccggcgagacggcgcagggggauggaccccccuaguuucaaauaaauaccaguggcuacagaucgaucuuggagagaggauggagguuacggccguagcuacccagggaggguacgguagcagcgauuggguuacauccuauuuacugauguuuagugaugggggaaggaauuggaagcaguaccggcgagaggaaaguauaugggguuuuccugguaacaccaaugccgacucugugguucacuauagacuucagcccccauucgaagcccgguuccugagauuucuuccacuggcauggaauccucguggacgcauaggaaugaggauagagguauauggcugcgcauacaaaucagaaguggucuauuuugacgggcagucugcacuccuguauaggcuugauaagaaaccacugaaacccauccgggacguuauaagcuugaaauucaaggccaugcaauccaaugguaucuuacuucauagagagggccagcacggaaaccacaucacgcuugaacucauuaaaggaaaacucguuuuuuuucugaacucuggcaacgcaaaauugccgucaacgauagcgccaguuacccuaacucugggcucacuacucgacgaucaacacuggcauucuguccucauugaacuucucgauacacaagugaauuucaccguggacaagcauacacaucacuuccaggcgaaaggagacaguuccuaccuagaccugaauuuugaaauaucuuucggaggcauuccaaccccaggucggucacgugcauuuagacguaagucuuuccauggguguuuagaaaaucuguauuacaacggugucgacguaacugaacuggccaagaagcacaaaccgcagauccucaugaugggaaaugugucuuuuucauguccccagccccaaaccguaccugugacguuccuuuccagucgauccuaccuggcucugccuggaaauuccggagaagauaaagugucuguuacuuuucaguuuagaacuuggaaccgcgcuggacaccuacucuucggagagcuuagaagaggcucuggcuccuucguucuguuucuaaaagauggaaaacugaagcugucucucuuccagccaggccaaucuccucggaacguuacggcaggggcuggauuaaacgacggucaguggcacucugugucuuuuucugccaaauggagccacaugaaugucgugguagaugacgauacugcuguccagccucucguggccgugcuuauugauagcggggauacuuacuacuuugggggcugucuugacaauucgucuggaucagggugcaagucgccuuuggguggauuucaaggaugccuaagguugaucacaauuggagacaaagcgguagaucccauccugguccagcagggugcccucgguagcuucagagaccugcaaauagacucuuguggaauaacugaucgaugccuucccucauauugcgaacaugguggugaaugcucucaguccugggacaccuucucaugugauugucugggaacgggguacaccggcgagaccugucauagcagucuguacgagcagucgugcgaggcccauaagcauagagguaacccauccggacuguauuacaucgacgcugacggcucaggaccacuugggccuuuuuugguuuacugcaacaugacugacgccgccuggacuguggugcaacacggcggacccgaugcugugacucucaggggcgcgccaucuggacacccacggagcgcagugaguuuugccuaugcugcaggagcuggacagcugagauccgccguuaaucuugccgagaggugcgagcagagacuggcccucaggugcggaaccgcacgcagacccgauucccgagacggcacgccccuaagcuggugggucggccgaacaaaugagacucauacguccuggggcggcagccucccggacgcacagaaaugcacaugcggcuuagaagggaauuguauugacucccaauacuacugcaacugcgaugcuggucggaaugaauggacaucggauacaauuguuuuaucucagaaagaacauuuaccugucacacagaucguaaugacggacgcuggaaggccucauagugaagcugcuuacacgcugggcccauuguugugucgcggagaccagagcuucuggaauucugccagcuucaacaccgaaaccucauaccuacacuucccugccuuucacggagaacuaacagccgauguauguuuuuuuuuuaaaacgacuguuagcuccggggucuuuauggagaaccuuggcaucacggacuucauccgcaucgagcuccgggccccuaccgagguuacauuuuccuuugaugucggaaacggacccugcgaaguuaccgugcagagccccacacccuuuaaugacaaccaauggcaucacguccgcgcagaaagaaaugugaaaggcgccagucuucagguggaucagcuaccacagaagaugcaaccggcuccugccgauggccacguucggcugcaacuuaauucacaauuauucauugagauuagcgcuuauuuugccacaggaagcucaaugacuuaccacuuucaggagcauuacacacugucagaaaauucaucuagccuagucaguucucuccacagagaugugacccuaacccgggagaugaucacgcucagcuuuaggaccacacgcacccccucacugcuccuuuacguuucuaguuucuacgaagaauauuuaagcgucauccuagcuaacaacggcagcuuacagaucagauauaaacuagaccgccaccaaaaccccgacgcuuuuacuuucgacuuuaagaauauggcagacggacagcuccaucaggugaagauaaauagagaagaggcuguagucaugguugaagucaaccaaucuacuaagaaacaggugauucugucuucagguacggaauuuaacgccguuaaaucacucauacucggcaaaguguuggaggccgccggugccgaucccgauacuaggagggccgcaaccucugguuuuacaggcugucugagcgccguccguuuuggccgagccgcuccucuaaaggcugcccucagaccgucaggcccuucacgcguuacaguccgaggucauguggcaccaauggcucgaugugcagccggugcggcaucugggucaccagccagggaacucgcaccccgacuggcagggggagccggucgcucaggccccgcagacgaaggagagccacuuguaaaugccgauagaagggacagcgcugucauuggcgggguaaucgcuguuguuaucuuuauucuccuguguauaaccgccaucgccauccgaaucuaucaacagcggaaacugagaaaggaaaacgaaucgaaggucagcaaaaaagaggaguguuag

SEQ ID NO: 290586 - RNA, 2238 nt, Artificial Sequence
  derived and/or modified sequence
auggccuccguagccugggcuguauuaaaagugcucuugcuucuaccuacucagaccuggucaccuguaggcgcuggaaacccucccgacugcgaugccccgcucgcgucagcacugccgcggucaagcuuuagcuccagcucugaacucuccuccucccacggacccggauucucucgccugaaucgacgcgauggagcggguggcuggacuccccucguaucaaauaaauaccaaugguuacagaucgaccuaggagaaaggauggaggugacugcaguagcgacgcaggggggcuacggauccagcgauugggugacauccuaccucuuaauguuuagcgacgggggccgcaacuggaagcaguaccggagggaagagagcauauggggguuuccugguaauacuaaugccgacucuguugugcauuacagacugcagccuccauuugaagcacgguuucugagguuccugccucuugccuggaauccuagagguagaauuggcaugcgaauugagguguauggaugugcuuauaagucugaggugguguacuucgauggccaaucugcucugcuguauagacuagacaagaaaccucugaagccaauccgggacguuauuucccucaaauuuaaagcgaugcaauccaacggcauccuucuucacagggagggacagcacggaaaucacauaacgcuagaacugauuaaaggaaaacuuguguucuuccugaauucugggaaugccaaauuacccucuacaaucgcuccagugacucucaccuugggcucucuacuagacgaccaacacuggcauagcguacucaucgaauugcuugacacccagguaaacuuuacgguugauaagcacacacaccauuuucaggcaaaaggugauucauccuaccuggaucugaauuuugagaucucuuuuggaggaauuccaacccccggacggagucgcgcuuuccgacgaaaauccuuucauggcugccuugagaaccuguauuacaacggagucgacgugacugagcuugcuaagaaacacaaaccucagauacugaugaugggcaauguuagcuucuccuguccacagccucagacagugccgguuaccuuucugucuucucguucuuaucucgcccuaccugggaauucaggugaggauaaaguuuccguuacguuucaguucagaacuuggaaucgagcuggccaucuguuauucggagaacuucgaagaggguccggcucuuuuguacucuuuuugaaggauggaaagcugaaacuaucacuguuucagccaggacaaagcccaaggaacgugaccgcuggagcgggcuugaaugacggccaauggcacucuguuuccuucagcgcuaaauggagucauaugaauguugucguugaugaugauacagccgugcaaccucucgucgcuguucuaauugauucaggcgacaccuauuauuuugguggauguuuggauaauucaucaggguccggcugcaagucaccguuggggggguuccaaggcugccuucgacucauuaccaucggagacaaggccguagaucccauucucguucaacaaggugcauugggaagcuuucgagaccuccagaucgauucaugcgguauuacugacagaugucuaccaagcuacugcgagcacggaggagaguguucccaaagcugggacacguuuucuugcgacugccuagggacaggauauacaggcgaaaccugccacuccucucuguacgaacagucaugcgaggcucauaaacaucgcggaaauccuucuggacuguauuacauugacgcagacgguaguggcccacucggucccuucuuggucuauuguaacaugacagaugccgcuuggacagucgugcagcauggcgggccagacgcugugacacugaggggcgcgccuuccggucauccccgcagcgcagucucuuuugccuacgcggccggagcaggccaacucagaagcgccgucaaucuagccgagcgaugugagcagcggcucgcccucagaugcggaacagcucgaagacccgauaguagagauggaaccccacugagcugguggguuggacgaacuaaugagacacacacuucuuggggagggagcuugccugaugcacagaagugcacuugugggcuggaagggaauuguauagacucucaguacuauuguaauugugaugccggacgcaaugagugguag

SEQ ID NO: 290587 - protein, 652 aa, Artificial Sequence
  derived and/or modified sequence
MASVAWAVLKVLLLLPTQTWSPVGAGNPPDCDAPLASALPRSSFSSSSELSSSHGPGFSRLNRRDGAGGWTPLVSNKYQWLQIDLGERMEVTAVATQGGYGSSDWVTSYLLMFSDGGRNWKQYRREESIWGFPGNTNADSVVHYRLQPPFEARFLRFLPLAWNPRGRIGMRIEVYGCAYKSEVVYFDGQSALLYRLDKKPLKPIRDVISLKFKAMQSNGILLHREGQHGNHITLELIKGKLVFFLNSGNAKLPSTIAPVTLTLGSLLDDQHWHSVLIELLDTQVNFTVDKHTHHFQAKGDSSYLDLNFEISFGGIPTPGRSRAFRRKSFHGCLENLYYNGVDVTELAKKHKPQILMMGNVSFSCPQPQTVPVTFLSSRSYLALPGNSGEDKVSVTFQFRTWNRAGHLLFGELRRGSGSFVLFLKDGKLKLSLFQPGQSPRNVTAGAGLNDGQWHSVSFSAKWSHMNVVVDDDTAVQPLVAVLIDSGDTYYFGALYEQSCEAHKHRGNPSGLYYIDADGSGPLGPFLVYCNMTDAAWTVVQHGGPDAVTLRGAPSGHPRSAVSFAYAAGAGQLRSAVNLAERCEQRLALRCGTARRPDSRDGTPLSWWVGRTNETHTSWGGSLPDAQKCTCGLEGNCIDSQYYCNCDAGRNEW

SEQ ID NO: 290588 - DNA, 1959 bp, Artificial Sequence
  derived and/or modified sequence
atggcatcagtggcatgggccgtactgaaggttcttctcctccttccaacgcagacttggagccctgtgggggctggtaatccccctgactgcgacgcacccctagccagcgcactgcccagatcgagcttttcgagctcaagtgagctcagcagctcccacggcccagggttcagtagactaaaccgaagggatggcgctgggggatggacgccgctggtatctaataaatatcaatggttgcagatagacttaggggagcgcatggaggtgactgccgtggctacgcaaggcggatacgggtcgagcgattgggtgaccagctatctcctgatgttttcagacggcggacgcaattggaagcagtacagacgggaagaatccatttgggggttccccggaaataccaatgccgattcggtggtgcactacagactgcagccaccgttcgaggcccgtttcctgcgctttctccccctggcctggaatcccagaggacggataggtatgcgtattgaagtctacggatgcgcctacaagtcagaggtggtgtacttcgacggccagagcgccctgctctacaggcttgataaaaaaccactcaagcctatcagggacgtaatttctctgaaattcaaagcgatgcaaagcaatggaatcctgttgcaccgagagggccagcacggaaatcatatcaccctggagctgataaaagggaagctggtctttttccttaactcagggaatgccaagctcccctcaactatcgcccctgtgaccttgacgttggggagcctgctggatgatcaacactggcactccgtgctgatcgaactcctcgacactcaggttaattttactgtagacaaacatacccaccattttcaggcaaagggcgactcctcttacctggatctaaatttcgaaatttcatttgggggaatccctacaccgggtcgaagccgggcttttaggagaaagtcatttcacggctgcctggaaaatctgtattataacggcgtcgacgtgaccgaactggctaaaaagcacaagcctcaaatacttatgatgggcaacgtttccttctcatgccctcagccccagaccgtgcctgtgaccttcctctctagcaggtcttatttggccctgcctgggaacagtggcgaggataaagtgtctgttacttttcagttccgaacttggaaccgggctggacatttactatttggagagctgcgcagggggtccggtagcttcgtgctgttcctgaaagacggaaagctgaaactctcactcttccagcccggacagagtcctagaaatgtgaccgcaggcgctgggctgaacgatggacagtggcattcggtgtcattttctgccaaatggagccacatgaatgtcgtagttgacgatgatacagcggtgcagccccttgtggcagtacttatagacagcggtgacacctattacttcggcgctctgtacgagcaatcctgtgaggcacataagcacagggggaacccctcaggcctgtactacattgacgcagacgggagcggcccactcggcccattcctggtgtactgcaatatgaccgatgcagcctggaccgttgtccaacacggaggacccgatgccgttactctgaggggggctccatctggccacccccgtagtgcagtgtcattcgcttatgctgcgggagccggtcagctgagatccgccgtgaatctcgctgagaggtgcgaacagcggctggcactccggtgtggcacggcccgaaggccagattctcgggacggtacacccctgtcatggtgggtgggcagaacaaatgagacacacacgtcgtggggtggatctctgcccgacgcccagaagtgcacttgtggtctagagggaaattgcatagactcccagtattactgcaattgcgatgccggaaggaatgagtggtag

SEQ ID NO: 290589 - DNA, 1959 bp, Artificial Sequence
  derived and/or modified sequence
atggcttcagtggcgtgggccgtcctgaaagtgcttctgctgcttcctacacagacatggtcaccagttggcgccggtaaccctccagactgcgatgcccccctggcttcggctctaccaagaagctctttctcatcttcctctgaacttagtagctcacacggtcccgggttcagtaggttgaatcggagagatggggccggcggttggacccccctggtaagtaataaatatcagtggctgcagattgatctcggggagaggatggaagtgacagcagttgccacccagggagggtacgggtcatctgactgggtcacatcctatcttttaatgtttagcgatgggggcagaaactggaagcagtatagacgcgaggaatcgatatgggggtttccgggcaacaccaacgccgactccgtcgtccactatcggttacaacccccatttgaagcgcgattcctaaggtttctccccctggcatggaacccacgcgggagaattggaatgcggattgaggtatacggctgtgcatacaaaagtgaagtcgtttacttcgatggacagagcgccttactgtaccgattagataagaagcccctgaagcctattagggatgtgatcagtttaaaattcaaggctatgcagtccaacgggatcctgctgcatagggaaggacagcacggcaatcacattacattagagctaattaaaggtaagttggttttttttctgaactccggtaacgcaaaactgccctccacaatcgcaccagtgactctaaccttggggtccctgctggatgatcagcattggcatagcgttctgattgagttgctggatacacaagtgaactttaccgtggacaagcatacacaccatttccaggccaagggcgattccagctacctagacctgaatttcgagatcagtttcggaggaatacctaccccaggccggagccgcgcgtttcggagaaagtcattccacggctgcctggaaaatctctactacaacggcgtggacgtaaccgagctggctaaaaaacacaagccccagatcctcatgatgggtaacgtgtccttcagctgtcctcagccccaaactgtgccagtcaccttcctctccagtcgctcatatctcgcacttcctggcaattcaggagaagataaggtcagcgtcacgtttcagttccggacttggaaccgcgcgggccatttactattcggagagctgcggcgcggttctgggagcttcgttctgtttctcaaggatgggaaactgaagttgtccctgtttcagccaggacagagtccgaggaacgtaactgcaggagctgggctgaacgatgggcagtggcatagtgtgtcattctcggctaagtggtcccatatgaatgtggtcgtggatgatgacactgctgtgcagcccctggtggccgttctgatcgattcaggcgatacatactatttcggagctctgtacgaacaatcctgcgaggcccataagcaccgcggcaatcccagtggactgtactacatcgatgccgacggatccggcccgttaggaccttttctggtctactgtaacatgacagatgcagcctggacagtcgtccagcacggcggacctgacgccgtcacgctgcggggggcaccaagtggccatcctcgttcggccgtttctttcgcctacgccgccggcgctgggcagctgcgttcggcagtgaatctggcagaaagatgcgagcaacgcttagctttgaggtgcggcaccgcccgaaggcccgatagccgtgatggtactccgctcagttggtgggtaggccggactaatgagacacacacatcttggggaggcagcctgccagatgcccagaagtgtacttgtggccttgaaggtaactgtatcgactcacagtattactgtaattgtgatgccggccgtaatgagtggtag

SEQ ID NO: 290590 - DNA, 1959 bp, Artificial Sequence
  derived and/or modified sequence
atggcaagcgtggcatgggccgtcctgaaagtcctcttactgcttccgacccagacatggtcacccgtgggagccggcaatcctcccgactgtgacgcacccctcgcttcagccctaccacgcagctcgtttagtagttcatctgaactctccagtagccacggcccgggattctcacgactcaatagacgggacggcgccgggggctggacaccccttgttagtaacaaataccagtggctccagatcgatcttggcgagcgtatggaggtgaccgccgttgccacccagggcgggtacggttcatcagattgggtgacttcttacctcctaatgttcagcgatggcggtcggaattggaagcagtatagacgcgaggagtctatatggggatttccaggaaatactaacgccgattctgtggttcattaccgtctgcagcccccctttgaggcccgctttcttagattccttccacttgcatggaatccacgaggtcggatcggaatgcgaatcgaagtgtacggatgcgcgtacaagagtgaagtcgtgtattttgacggccaaagtgccctgttgtacagacttgataaaaagcccctgaaacccataagagatgttatcagcctcaaattcaaagctatgcaaagtaacggtatcctgctgcatcgcgaaggacagcatggaaatcacataacactcgaactaattaagggtaaactggtcttctttcttaatagtggaaacgcaaaactaccgtccactattgcccccgtgaccctaactctcggatccctgctcgatgaccagcactggcactctgttctcatcgagctactcgacactcaggtgaacttcactgttgataaacacactcatcattttcaggccaagggagattccagttatctcgaccttaactttgagatctcttttggcggaatacctactccggggcgctctagagcatttcgcagaaagtcctttcatggctgcctcgagaatctgtactataacggcgtcgatgtgacagaacttgccaagaaacataaacctcagatattgatgatggggaacgtttccttttcatgcccccagccccaaaccgtgccagtaacctttttgtcttcgagaagctatctcgccctcccagggaacagtggtgaggacaaagttagtgtgacctttcagttcaggacctggaatagagcgggtcatctgctgttcggcgagctgaggcgcggaagcgggagcttcgtgttgtttctgaaggacggtaagctcaagctgagtcttttccaacctggacaatcccctcgcaatgttaccgctggagccggcttgaatgacgggcagtggcactccgtgtctttttcagctaaatggagccacatgaacgtggttgttgatgacgataccgccgtccagccactagtcgcggtcttaatcgattcaggcgatacctactattttggtgccctctacgaacaatcatgtgaagcacataaacatcgagggaacccgtcagggctgtattatatcgacgcagacgggagcggccccctcggcccgttcctggtttattgtaacatgacagatgccgcgtggactgttgtgcagcacggaggcccggacgcagtgacattgaggggagctcctagtggtcatcctaggtcggccgtgagttttgcatacgcagccggtgctgggcaattgcggtcagccgttaatcttgctgagaggtgtgagcagagactcgccctgagatgcggaactgcaagacggccagattccagggacggcactccgctgagttggtgggtgggcagaacaaacgaaacgcatacaagctggggtgggagcttgcctgacgcacagaagtgtacttgtggactggaggggaattgtatagacagtcagtattattgtaattgcgatgccggaagaaatgagtggtag

SEQ ID NO: 290591 - DNA, 1959 bp, Artificial Sequence
  derived and/or modified sequence
atggccagcgtggcctgggccgtgctgaaggtgctgctgctgctgcccacccagacctggagccccgtgggcgccggcaacccccccgactgcgacgcccccctggccagcgccctgcccagaagcagcttcagcagcagcagcgagctgagcagcagccacggccccggcttcagcagactgaacagaagagacggcgccggcggctggacccccctggtgagcaacaagtaccagtggctgcagatcgacctgggcgagagaatggaggtgaccgccgtggccacccagggcggctacggcagcagcgactgggtgaccagctacctgctgatgttcagcgacggcggcagaaactggaagcagtacagaagagaggagagcatctggggcttccccggcaacaccaacgccgacagcgtggtgcactacagactgcagccccccttcgaggccagattcctgagattcctgcccctggcctggaaccccagaggcagaatcggcatgagaatcgaggtgtacggctgcgcctacaagagcgaggtggtgtacttcgacggccagagcgccctgctgtacagactggacaagaagcccctgaagcccatcagagacgtgatcagcctgaagttcaaggccatgcagagcaacggcatcctgctgcacagagagggccagcacggcaaccacatcaccctggagctgatcaagggcaagctggtgttcttcctgaacagcggcaacgccaagctgcccagcaccatcgcccccgtgaccctgaccctgggcagcctgctggacgaccagcactggcacagcgtgctgatcgagctgctggacacccaggtgaacttcaccgtggacaagcacacccaccacttccaggccaagggcgacagcagctacctggacctgaacttcgagatcagcttcggcggcatccccacccccggcagaagcagagccttcagaagaaagagcttccacggctgcctggagaacctgtactacaacggcgtggacgtgaccgagctggccaagaagcacaagccccagatcctgatgatgggcaacgtgagcttcagctgcccccagccccagaccgtgcccgtgaccttcctgagcagcagaagctacctggccctgcccggcaacagcggcgaggacaaggtgagcgtgaccttccagttcagaacctggaacagagccggccacctgctgttcggcgagctgagaagaggcagcggcagcttcgtgctgttcctgaaggacggcaagctgaagctgagcctgttccagcccggccagagccccagaaacgtgaccgccggcgccggcctgaacgacggccagtggcacagcgtgagcttcagcgccaagtggagccacatgaacgtggtggtggacgacgacaccgccgtgcagcccctggtggccgtgctgatcgacagcggcgacacctactacttcggcgccctgtacgagcagagctgcgaggcccacaagcacagaggcaaccccagcggcctgtactacatcgacgccgacggcagcggccccctgggccccttcctggtgtactgcaacatgaccgacgccgcctggaccgtggtgcagcacggcggccccgacgccgtgaccctgagaggcgcccccagcggccaccccagaagcgccgtgagcttcgcctacgccgccggcgccggccagctgagaagcgccgtgaacctggccgagagatgcgagcagagactggccctgagatgcggcaccgccagaagacccgacagcagagacggcacccccctgagctggtgggtgggcagaaccaacgagacccacaccagctggggcggcagcctgcccgacgcccagaagtgcacctgcggcctggagggcaactgcatcgacagccagtactactgcaactgcgacgccggcagaaacgagtggtag

SEQ ID NO: 290592 - DNA, 2166 bp, Artificial Sequence
  derived and/or modified sequence
ccgggtctcagggcgcctggctgaagtgagcatggcttcagtggcctgggccgtcctcaaggtgctgctgcttctccccactcagacttggagccccgtgggagcaggaaatccacctgactgtgatgccccactggcctctgccttgcctaggtcatccttcagcagctcctcagagctgtccagcagccacggcccggggttttcaaggcttaatcgaagagatggagctggtggctggactccacttgtgtcaaataaataccaatggctgcaaattgaccttggagagagaatggaggtcactgctgtcgccacccaaggaggatatgggagctctgactgggtgaccagctacctcctgatgttcagtgatggtgggagaaactggaagcagtatcgccgagaagaaagcatctggggttttccaggaaacacaaacgcagacagtgtggtgcactacagactccagcctccctttgaagccaggttcctgcgctttctccctttagcctggaaccctaggggcaggattgggatgcggatcgaagtgtacggatgtgcatataaatctgaggtggtttattttgatggacaaagtgctctgctgtatagacttgataaaaaacctttaaaaccaataagagacgttatttctttgaaatttaaagccatgcagagcaatggaattctacttcacagagaaggacaacatggaaatcacattactctggaattaattaaaggaaagcttgtcttttttcttaattcaggcaatgctaagctgccttccactattgctcctgtgaccctcaccctgggcagcctgctggacgaccagcactggcattccgtcctcatcgagctcctcgacacgcaggtcaacttcaccgtggacaaacacactcatcatttccaagcaaagggagattccagttacttggatcttaattttgagatcagctttgggggaattccgacacccggaagatcgcgggcattcagacgtaaaagctttcatgggtgtttagaaaatctttattataatggagtggatgttaccgaattagccaagaaacacaaaccacagatcctcatgatgggaaatgtgtccttctcatgtccacagccacagactgtccctgtgacttttctgagctccaggagttatctggctctgccaggcaactctggggaggacaaagtgtctgtcacttttcaatttcgaacgtggaacagagcaggacatttgcttttcggcgaacttcgacgtggttcagggagtttcgtcctctttcttaaggatggcaagctcaaactgagtctcttccagccgggacagtcaccaaggaatgtcacagcaggtgctggattaaacgatgggcagtggcactctgtgtccttctctgccaagtggagccatatgaatgtggtggtggacgatgacacagctgttcagcccctggtggctgtgctcattgattcaggtgacacctattattttggagctctctacgagcagtcttgtgaagcccacaagcaccgagggaacccgtctgggctttactatattgatgcagatggaagtggccccctgggaccatttcttgtgtactgcaatatgacagacgccgcgtggacggtggtgcagcacggtggccccgacgcggtgaccctccgaggtgcccccagcgggcacccgcgctcggctgtgtccttcgcgtacgcagcgggcgcggggcagctgcggtccgcggtgaacctggcggagcgctgcgagcagcggctggctctgcgctgcgggacggcgcggcgcccggactcacgagatggaaccccactgagctggtgggttggaagaaccaatgaaacacacacttcctggggaggttctctgcctgatgctcaaaagtgtacttgtggattagaggggaactgcattgattctcagtattactgcaactgtgatgctggccggaatgaatggtgatttccacatgatttccctgcacaaaaatgtggtttttattctttaattatgcatagttaattaaatgtcagacaagctggtacaataaggtaactaaagtatgttcaagcaagctgaaatacaagttttgatgaaatatgatcagttaatctaaggattaaattttatgaccaaag

SEQ ID NO: 290593 - DNA, 1959 bp, Artificial Sequence
  derived and/or modified sequence
atggcctcagttgcatgggccgtcctcaaagtcctgttactgctccctacccagacttggtccccggtaggggcaggcaaccctccagattgtgacgcccccctggcctcagctctccctcgaagcagtttctctagctcatccgaactgtcatcctcccacgggccagggttttcccgactcaacaggagagatggggcaggcggatggactccactcgtgtctaacaaatatcaatggctccagattgatttgggagagcgcatggaagtaactgccgttgccacacagggaggctacggctctagcgattgggttacctcttatctgcttatgttctctgacgggggcaggaactggaaacagtatcggcgtgaggaatccatatggggtttcccaggcaacactaacgcagacagcgtcgtgcattaccgtctgcagcctccttttgaagcccgcttcctgaggtttctgcctctcgcttggaatcccagaggtagaattggaatgcggatcgaagtgtatggttgcgcctacaagagcgaggtagtgtatttcgatggtcagtccgccctgctgtaccgactggacaagaagccattaaaacccatcagagacgtgatcagtctgaaatttaaggcaatgcagagcaatggaatcctgttacatcgcgaggggcagcatgggaaccacattacgcttgagcttatcaaaggcaaactggtctttttcctcaactctggcaacgctaagttgccttccactatagctccagtgactcttacattaggctctctgttagatgaccagcactggcacagtgttctgattgaacttctggacacgcaagtaaattttactgttgataagcatactcatcatttccaggccaaaggagattcctcatacctggatttgaactttgaaatcagtttcgggggcatccccacccccggacgcagtagggcgttcagacgcaagtctttccacgggtgtctagagaatctatactacaacggggtggacgtgacggaattagccaagaaacataagccacagattctcatgatggggaatgtcagcttctcctgtccgcaaccacagaccgttccagtgacatttttaagctcacggtcctatttggcactaccggggaatagtggggaagacaaggtgtcggtcacctttcaatttcgcacctggaaccgcgcgggccacctcttgttcggagagttaagacgcggcagcggttcgtttgtcctgttcctcaaagatggcaaactgaaactgagcttgtttcagcccggccaaagccccaggaacgtaactgctggcgccgggctcaacgacggccaatggcatagcgtgagctttagcgctaagtggtcgcacatgaatgtcgtggtcgatgacgatacagccgtgcagccgctggtggctgtcttaatcgattccggcgacacttattatttcggggcactctacgaacaatcttgcgaggctcacaagcatcggggtaaccctagcggcctgtattacatcgatgccgatgggagcgggcctctgggaccatttttggtgtattgcaacatgactgacgccgcttggacagtagtgcagcatgggggtcccgacgctgtgactctcagaggcgctccttctggccatcctcgctctgccgttagttttgcctacgctgctggagctggacagctgcgatcagcagtgaaccttgctgaacgctgtgaacagcggctggctttacgctgtgggacagccagaaggcccgacagccgggatggtacacctttgtcatggtgggtcggaagaactaacgaaacacataccagttggggaggtagtttacctgacgcacaaaagtgcacatgcgggcttgagggtaattgtatcgattcccagtattactgcaactgtgatgccggaagaaacgaatggtag

SEQ ID NO: 290594 - DNA, 1959 bp, Artificial Sequence
  derived and/or modified sequence
atggcctctgtggcctgggccgtgctgaaggtgctgctgctgctgcccacccagacctggagccctgtgggcgccggcaaccccccagactgtgatgcccccctggccagcgccctgcccaggagcagcttcagcagcagcagcgagctgagcagcagccacggccctggcttcagccggctgaacagaagagatggagctgggggctggacccccctggtgagcaacaagtaccagtggctgcagattgacctgggggagaggatggaggtgacagctgtggccacccagggcggctacggcagcagtgactgggtgaccagctacctgctgatgttcagtgatggcggcaggaactggaagcagtaccgccgggaggagagcatctggggcttccctggcaacaccaatgctgacagcgtggtgcactaccgcctgcagcccccatttgaggcccgcttcctgcgcttcctgcccctggcctggaacccccggggccgcatcggcatgagaattgaggtgtatggctgtgcctacaagtctgaggtggtgtactttgatggccagagcgccctgctgtaccgcctggacaagaagcccctgaagcccatcagagatgtgatcagcctgaagttcaaggccatgcagagcaatggcatcctgctgcaccgggagggccagcacggcaaccacatcaccctggagctgatcaagggcaagctggtgttcttcctgaacagcggaaatgccaagctgcccagcaccatcgcccctgtgaccctgaccctgggcagcctgctggatgaccagcactggcacagcgtgctgattgagctgctggacacccaggtgaacttcaccgtggacaagcacacccaccacttccaggccaagggggacagcagctacctggacctgaactttgagatcagctttggaggcatccccaccccaggccgcagccgggccttccggaggaagagcttccacggctgcctggagaacctgtactacaatggagtggatgtgacagagctggccaagaagcacaagccccagatcctgatgatgggaaatgtgtccttcagctgcccccagccccagacagtgcctgtgaccttcctgagcagccgcagctacctggccctgcccggcaacagcggggaggacaaggtgtctgtgaccttccagttccgcacctggaacagagctggccacctgctgtttggagagctgcggcggggcagcggcagctttgtgctcttcctgaaggatggcaagctgaagctgagcctcttccagcccggccagagccccagaaatgtgacagctggggccggcctgaatgatggccagtggcacagcgtgtccttcagcgccaagtggagccacatgaatgtggtggtggatgatgacacagctgtgcagcccctggtggccgtgctgattgattctggggacacctactactttggagccctgtatgagcagagctgtgaggcccacaagcaccggggcaaccccagcggcctgtactacattgatgctgatggcagcggccccctgggccccttcctggtgtactgcaacatgacagatgctgcctggacagtggtgcagcacggcggcccagatgctgtgaccctgcggggggcccccagcggccaccccaggtctgctgtgtcctttgcctatgctgctggagctggccagctgcggtctgctgtgaacctggccgagcgctgtgagcagaggctggccctgcgctgtggcacagcccggcggccagacagcagagatggcacccccctgtcctggtgggtgggccgcaccaatgagacccacacctcctggggcggcagcctgcctgatgcccagaagtgcacctgtggcctggagggcaactgcatcgacagccagtactactgcaactgtgatgctggaagaaatgagtggtag

SEQ ID NO: 290595 - DNA, 1959 bp, Artificial Sequence
  derived and/or modified sequence
atggccagcgtggcctgggccgtgctgaaggtgctgctgctgctgcccactcaaacatggtctccagtcggtgcaggtaatccacctgactgtgacgctccacttgcttccgcgcttcctcgatcctccttttcaagcagctcagagctcagttcttcccatggccccggattctctaggctgaacagacgggacggggccggcgggtggacccctctcgtgagcaacaagtaccagtggctgcagattgatttgggcgaacgtatggaagttactgcggtggcaactcagggcggatacggctcttcagactgggtcaccagttatctgcttatgtttagtgacggtggccgaaactggaaacagtaccgtagagaagagtctatctggggattccccgggaacacgaatgccgattcggtggtccactatcggttacagccaccgttcgaggcacgattcctgcggtttctgcctctggcttggaaccccaggggaagaattggaatgagaatcgaggtttacggttgcgcgtataagtccgaggttgtgtatttcgacggacagtctgccctcctgtatcgtcttgataagaagcctttaaagccaataagagacgtgataagcctcaaatttaaggcaatgcagtccaatggaatcctgctgcacagagaggggcagcacggcaatcatatcacactggagcttattaagggaaagttggtttttttcctgaacagcggcaatgctaagctccctagcactatagccccagtgactctgactctgggttcattgttggacgaccagcattggcactccgtgctgattgaattattagatactcaagttaatttcacggttgataagcatacccaccatttccaggcaaagggagactccagttacctagatttgaatttcgaaattagctttggcgggattccgactccaggaaggtcccgggcttttcgaaggaaatcattccacggctgtctagaaaacttgtattataacggtgtggatgtaaccgagcttgcgaaaaaacacaagcctcagatcttgatgatgggcaacgtcagcttttcttgcccacagccacagaccgtgccggtcactttcctgtcatcccggtcttatctggccttgcccgggaattccggagaagacaaggttagcgtgaccttccagttccggacgtggaatagggcaggacatctactgtttggcgagctgaggcgaggctccggcagctttgtactgtttctcaaagacggcaaactgaagctctctctgtttcaacctgggcagtcccctaggaacgtcacagctggggctggattgaatgatggccagtggcattccgtcagctttagcgcgaaatggagtcacatgaatgtggtcgtcgacgatgatactgctgtgcagcccctggttgctgttctgattgattcgggcgacacatactacttcggcgcactgtacgagcagagctgcgaagcgcacaagcacagaggaaacccttccggcctctactacattgatgccgatggctccggtcccttggggcctttccttgtctactgtaatatgaccgacgccgcctggactgtggtgcagcatggtggtcctgatgctgtgacactccggggagctccaagtgggcaccccaggtccgctgtctcttttgcttacgccgccggggctggccagttgcgctcagcagtgaatttagcagagagatgtgagcagagactggcactgcggtgtgggaccgctcgacggccagattcccgcgacggaaccccgttatcatggtgggtgggtagaaccaacgaaacgcacacgtcttggggcggttccttgcctgatgctcagaaatgtacatgcggccttgagggcaattgcattgacagtcagtattattgcaattgcgacgctggacggaatgagtggtag

SEQ ID NO: 290596 - RNA, 1959 nt, Artificial Sequence
  derived and/or modified sequence
auggcuucaguggcgugggccguccugaaagugcuucugcugcuuccuacacagacauggucaccaguuggcgccgguaacccuccagacugcgaugccccccuggcuucggcucuaccaagaagcucuuucucaucuuccucugaacuuaguagcucacacggucccggguucaguagguugaaucggagagauggggccggcgguuggaccccccugguaaguaauaaauaucaguggcugcagauugaucucggggagaggauggaagugacagcaguugccacccagggaggguacgggucaucugacugggucacauccuaucuuuuaauguuuagcgaugggggcagaaacuggaagcaguauagacgcgaggaaucgauauggggguuuccgggcaacaccaacgccgacuccgucguccacuaucgguuacaacccccauuugaagcgcgauuccuaagguuucucccccuggcauggaacccacgcgggagaauuggaaugcggauugagguauacggcugugcauacaaaagugaagucguuuacuucgauggacagagcgccuuacuguaccgauuagauaagaagccccugaagccuauuagggaugugaucaguuuaaaauucaaggcuaugcaguccaacgggauccugcugcauagggaaggacagcacggcaaucacauuacauuagagcuaauuaaagguaaguugguuuuuuuucugaacuccgguaacgcaaaacugcccuccacaaucgcaccagugacucuaaccuuggggucccugcuggaugaucagcauuggcauagcguucugauugaguugcuggauacacaagugaacuuuaccguggacaagcauacacaccauuuccaggccaagggcgauuccagcuaccuagaccugaauuucgagaucaguuucggaggaauaccuaccccaggccggagccgcgcguuucggagaaagucauuccacggcugccuggaaaaucucuacuacaacggcguggacguaaccgagcuggcuaaaaaacacaagccccagauccucaugauggguaacguguccuucagcuguccucagccccaaacugugccagucaccuuccucuccagucgcucauaucucgcacuuccuggcaauucaggagaagauaaggucagcgucacguuucaguuccggacuuggaaccgcgcgggccauuuacuauucggagagcugcggcgcgguucugggagcuucguucuguuucucaaggaugggaaacugaaguugucccuguuucagccaggacagaguccgaggaacguaacugcaggagcugggcugaacgaugggcaguggcauagugugucauucucggcuaaguggucccauaugaauguggucguggaugaugacacugcugugcagccccugguggccguucugaucgauucaggcgauacauacuauuucggagcucuguacgaacaauccugcgaggcccauaagcaccgcggcaaucccaguggacuguacuacaucgaugccgacggauccggcccguuaggaccuuuucuggucuacuguaacaugacagaugcagccuggacagucguccagcacggcggaccugacgccgucacgcugcggggggcaccaaguggccauccucguucggccguuucuuucgccuacgccgccggcgcugggcagcugcguucggcagugaaucuggcagaaagaugcgagcaacgcuuagcuuugaggugcggcaccgcccgaaggcccgauagccgugaugguacuccgcucaguugguggguaggccggacuaaugagacacacacaucuuggggaggcagccugccagaugcccagaaguguacuuguggccuugaagguaacuguaucgacucacaguauuacuguaauugugaugccggccguaaugagugguag

SEQ ID NO: 290597 - RNA, 1959 nt, Artificial Sequence
  derived and/or modified sequence
auggcaagcguggcaugggccguccugaaaguccucuuacugcuuccgacccagacauggucacccgugggagccggcaauccucccgacugugacgcaccccucgcuucagcccuaccacgcagcucguuuaguaguucaucugaacucuccaguagccacggcccgggauucucacgacucaauagacgggacggcgccgggggcuggacaccccuuguuaguaacaaauaccaguggcuccagaucgaucuuggcgagcguauggaggugaccgccguugccacccagggcggguacgguucaucagauugggugacuucuuaccuccuaauguucagcgauggcggucggaauuggaagcaguauagacgcgaggagucuauauggggauuuccaggaaauacuaacgccgauucugugguucauuaccgucugcagccccccuuugaggcccgcuuucuuagauuccuuccacuugcauggaauccacgaggucggaucggaaugcgaaucgaaguguacggaugcgcguacaagagugaagucguguauuuugacggccaaagugcccuguuguacagacuugauaaaaagccccugaaacccauaagagauguuaucagccucaaauucaaagcuaugcaaaguaacgguauccugcugcaucgcgaaggacagcauggaaaucacauaacacucgaacuaauuaaggguaaacuggucuucuuucuuaauaguggaaacgcaaaacuaccguccacuauugcccccgugacccuaacucucggaucccugcucgaugaccagcacuggcacucuguucucaucgagcuacucgacacucaggugaacuucacuguugauaaacacacucaucauuuucaggccaagggagauuccaguuaucucgaccuuaacuuugagaucucuuuuggcggaauaccuacuccggggcgcucuagagcauuucgcagaaaguccuuucauggcugccucgagaaucuguacuauaacggcgucgaugugacagaacuugccaagaaacauaaaccucagauauugaugauggggaacguuuccuuuucaugcccccagccccaaaccgugccaguaaccuuuuugucuucgagaagcuaucucgcccucccagggaacaguggugaggacaaaguuagugugaccuuucaguucaggaccuggaauagagcgggucaucugcuguucggcgagcugaggcgcggaagcgggagcuucguguuguuucugaaggacgguaagcucaagcugagucuuuuccaaccuggacaauccccucgcaauguuaccgcuggagccggcuugaaugacgggcaguggcacuccgugucuuuuucagcuaaauggagccacaugaacgugguuguugaugacgauaccgccguccagccacuagucgcggucuuaaucgauucaggcgauaccuacuauuuuggugcccucuacgaacaaucaugugaagcacauaaacaucgagggaacccgucagggcuguauuauaucgacgcagacgggagcggcccccucggcccguuccugguuuauuguaacaugacagaugccgcguggacuguugugcagcacggaggcccggacgcagugacauugaggggagcuccuaguggucauccuaggucggccgugaguuuugcauacgcagccggugcugggcaauugcggucagccguuaaucuugcugagaggugugagcagagacucgcccugagaugcggaacugcaagacggccagauuccagggacggcacuccgcugaguuggugggugggcagaacaaacgaaacgcauacaagcuggggugggagcuugccugacgcacagaaguguacuuguggacuggaggggaauuguauagacagucaguauuauuguaauugcgaugccggaagaaaugagugguag

SEQ ID NO: 290598 - protein, 2070 aa, Artificial Sequence
  derived and/or modified sequence
MLEAIDKNRALHAAERLQTKLRERGDVANEDKLSLLKSVLQSPLFSQILSLQTSVQQLKDQVNIATSATSNIEYAHVPHLSPAVIPTLQNESFLLSPNNGNLEALTGPGIPHINGKPACDEFDQLIKNMAQGRHVEVFELLKPPSGGLGFSVVGLRSENRGELGIFVQEIQEGSVAHRDGRLKETDQILAINGQALDQTITHQQAISILQKAKDTVQLVIARGSLPQLVSPIVSRSPSAASTISAHSNPVHWQHMETIELVNDGSGLGFGIIGGKATGVIVKTILPGGVADQHGRLCSGDHILKIGDTDLAGMSSEQVAQVLRQCGNRVKLMIARGAIEERTAPTALGITLSSSPTSTPELRVDASTQKGEESETFDVELTKNVQGLGITIAGYIGDKKLEPSGIFVKSITKSSAVEHDGRIQIGDQIIAVDGTNLQGFTNQQAVEVLRHTGQTVLLTLMRRGMKQEAELMSREDVTKDADLSPVNASIIKENYEKDEDFLSSTRNTNILPTEEEGYPLLSAEIEEIEDAQKQEAALLTKWQRIMGINYEIVVAHVSKFSENSGLGISLEATVGHHFIRSVLPEGPVGHSGKLFSGDELLEVNGITLLGENHQDVVNILKELPIEVTMVCCRRTVPPTTQSELDSLDLCDIELTEKPHVDLGEFIGSSETEDPVLAMTDAGQSTEEVQAPLAMWEAGIQHIELEKGSKGLGFSILDYQDPIDPASTVIIIRSLVPGGIAEKDGRLLPGDRLMFVNDVNLENSSLEEAVEALKGAPSGTVRIGVAKPLPLSPEEGYVSAKEDSFLYPPHSCEEAGLADKPLFRADLALVGTNDADLVDESTFESPYSPENDSIYSTQASILSLHGSSCGDGLNYGSSLPSSPPKDVIENSCDPVLDLHMSLEELYTQNLLQRQDENTPSVDISMGPASGFTINDYTPANAIEQQYECENTIVWTESHLPSEVISSAELPSVLPDSAGKGSEYLLEQSSLACNAECVMLQNVSKESFERTINIAKGNSSLGMTVSANKDGLGMIVRSIIHGGAISRDGRIAIGDCILSINEESTISVTNAQARAMLRRHSLIGPDIKITYVPAEHLEEFKISLGQQSGRVMALDIFSSYTGRDIPELPEREEGEGEESELQNTAYSNWNQPRRVELWREPSKSLGISIVGGRGMGSRLSNGEVMRGIFIKHVLEDSPAGKNGTLKPGDRIVEVDGMDLRDASHEQAVEAIRKAGNPVVFMVQSIINRPRKSPLPSLLHNLYPKYNFSSTNPFADSLQINADKAPSQSESEPEKAPLCSVPPPPPSAFAEMGSDHTQSSASKISQDVDKEDEFGYSWKNIRERYGTLTGELHMIELEKGHSGLGLSLAGNKDRSRMSVFIVGIDPNGAAGKDGRLQIADELLEINGQILYGRSHQNASSIIKCAPSKVKIIFIRNKDAVNQMAVCPGNAVEPLPSNSENLQNKETEPTVTTSDAAVDLSSFKNVQHLELPKDQGGLGIAISEEDTLSGVIIKSLTEHGVAATDGRLKVGDQILAVDDEIVVGYPIEKFISLLKTAKMTVKLTIHAENPDSQAVPSAAGAASGEKKNSSQSLMVPQSGSPEPESIRNTSRSSTPAIFASDPATCPIIPGCETTIEISKGRTGLGLSIVGGSDTLLGAIIIHEVYEEGAACKDGRLWAGDQILEVNGIDLRKATHDEAINVLRQTPQRVRLTLYRDEAPYKEEEVCDTLTIELQKKPGKGLGLSIVGKRNDTGVFVSDIVKGGIADADGRLMQGDQILMVNGEDVRNATQEAVAALLKCSLGTVTLEVGRIKAGPFHSERRPSQSSQVSEGSLSSFTFPLSGSSTSESLESSSKKNALASEIQGLRTVEMKKGPTDSLGISIAGGVGSPLGDVPIFIAMMHPTGVAAQTQKLRVGDRIVTICGTSTEGMTHTQAVNLLKNASGSIEMQVVAGGDVSVVTGHQQEPASSSLSFTGLTSSSIFQDDLGPPQCKSITLERGPDGLGFSIVGGYGSPHGDLPIYVKTVFAKGAASEDGRLKRGDQIIAVNGQSLEGVTHEEAVAILKRTKGTVTLMVLS

SEQ ID NO: 290599 - DNA, 6213 bp, Artificial Sequence
  derived and/or modified sequence
atgctcgaggcaatcgacaagaaccgcgccctccacgccgcagaaaggctgcagacaaaactgagagagagaggagatgtggccaacgaggataagctctctctcctgaagagtgtattgcagagtccactgttttcacaaatcttatctttacagacttcggttcaacagctcaaagaccaggtgaacatcgctacctcagcaacctccaatatagagtatgcacacgtgcctcatctgtcaccagctgtgattccgacgttacagaacgagagcttcctgctcagccccaacaacggtaatttagaagccctgaccggtccaggaataccgcacataaatggcaagccggcttgcgatgaattcgaccagctgataaaaaacatggctcagggcagacacgtcgaggtctttgaattgctgaagcctcctagcggagggctcggctttagcgttgttggcctacgttccgaaaacagaggtgaactaggaatttttgtgcaggagattcaggaaggctcagttgcacatcgggatggccggctcaaggaaaccgaccagatactcgcaatcaacgggcaggcccttgatcagactataacccatcagcaggcgatctcaatccttcaaaaagcaaaggatactgtacagttggtcatagccaggggatccttgcctcagttagtgtcccccattgtgtcccggagtccttccgcagcctctactataagtgctcattcaaatcccgtgcattggcagcatatggaaaccatcgaacttgtgaacgacgggtccggcctgggatttggcatcataggggggaaagctacaggcgttattgtgaagaccatcctgccgggaggagtggctgatcaacatggcagattgtgctctggggatcacatattaaagattggagataccgatctggccgggatgtcctccgaacaggtggcccaagtactccggcagtgcgggaacagagtgaaactcatgatagcccgcggtgctatcgaggagcggaccgcccctaccgccctaggcatcacactgagtagttcaccgacgtccacaccagaactaagagtcgatgcctctacacagaagggcgaggaaagtgagacttttgacgtggagctaactaagaatgttcaaggtctgggaataacaattgcggggtatatcggcgataagaaactggaacccagtgggattttcgtgaaatccatcaccaaaagctctgccgtagagcatgatggcagaattcagatcggcgaccaaatcattgcagtcgatggcactaacttacaggggttcacaaaccagcaggcagtcgaggtgcttcggcacacgggccagaccgttttgctgacccttatgagacgaggcatgaaacaggaagccgagctaatgagcagggaggacgtgaccaaagatgccgacttatctcctgtcaatgccagcattattaaggaaaattacgaaaaggatgaggactttctctccagcaccaggaacactaacatccttccaaccgaggaggaaggctaccccctgctgagcgccgagatagaggaaatagaggatgcacagaaacaggaggccgcgctgctcacaaaatggcagcgcatcatgggaatcaactatgagattgtggtggcccacgtctcaaagttcagcgagaattccgggctggggatctcactggaagccactgtagggcaccatttcatacggtccgtattgcctgaaggacccgtgggacacagcggcaagctattctccggcgacgagctacttgaggtcaacgggattacactgctcggtgaaaaccaccaagatgtcgttaatattctgaaggagttgccaatagaggtcaccatggtctgctgtagacgtaccgtccctcccacgacccagtcagagttggactcgctcgacttatgtgatatcgaactgaccgaaaaaccccacgttgatcttggggagtttataggcagttcggagactgaggaccctgttctcgctatgacagatgcgggacagtccacggaggaggttcaggcacccttggccatgtgggaggcaggtattcagcatattgaattggagaaagggtctaagggccttggtttttccatcctggactaccaggaccccatcgatcccgctagtacggtgattatcattcggagtctggtgcccgggggcattgcagagaaggatggcaggttgttacctggagatcgcctaatgtttgtcaacgatgttaacctggagaactccagccttgaagaggccgtcgaggccctgaagggtgccccaagtggaacggttagaatcggggtagcgaaaccgctgcccctgtcccctgaggaggggtacgtcagcgctaaagaggattcttttctctacccccctcacagctgtgaggaagctggcctggccgataaaccattgttccgtgctgaccttgcactcgtggggactaacgacgctgatctagtggacgaatctacattcgagtctccctattctccggagaacgactctatctacagcacgcaagcttccatcctgagcctgcacggtagcagctgtggagatggactgaattatgggtcgtcacttcccagtagccctcccaaggacgtaatagagaattcctgtgaccccgtgctggacctccatatgtctctggaagagttgtacacccagaacttgcttcagcgacaagacgaaaacactccttctgttgacatctccatgggccctgccagtggattcaccatcaatgattacacccccgccaatgccatcgaacagcagtatgagtgcgaaaatacgatcgtgtggaccgagtcacaccttccgtcagaagtgatctcgagtgccgagctcccaagcgtgctgcctgactctgccggtaagggtagtgaatacttactggagcagagttccctggcatgcaatgcagagtgtgtgatgctccagaatgtttctaaggagtcttttgaacggactatcaatatagctaagggaaacagcagcctcgggatgacggtctctgcaaataaagatggattaggaatgatcgtcaggagcatcatccatggaggagccatctcacgagatgggaggattgcaatcggcgattgtattctgagcatcaatgaggagtcgactatttctgttacaaacgcccaggcacgtgccatgctacgaaggcattctctcattggcccagacatcaagataacctacgtgccagcagagcatttagaagaattcaagattagtcttgggcagcagagcggcagggtcatggctctggatattttctcatcgtacacaggccgtgacatcccggagctgcctgagagggaggaaggggagggggaagagtctgagctccagaatactgcgtactctaactggaatcagccgagaagagtggagctctggcgtgaaccatcaaaatccctaggaattagtattgtgggcggacgcggcatgggaagccgcctgtccaatggggaggttatgcgcggtattttcataaaacacgtcctggaggattcccccgccgggaaaaacggaaccctgaagccaggggatcgcattgtagaggtggacggaatggacctgcgggatgcttcccacgaacaggccgtcgaggccatcaggaaggccggtaaccccgtggttttcatggtccaatccattattaaccggccacgaaaaagcccactgcccagcttgctccacaacctgtatcccaagtataacttttcttccaccaatcctttcgcggactctctccagatcaatgccgacaaggccccatcccagtctgagagtgagcctgaaaaggcaccactatgttccgtgccaccccctccaccttccgctttcgctgagatgggttctgaccacactcaatcatccgcatctaaaatttcacaggatgtggataaggaagacgagtttgggtatagttggaaaaatattcgtgaacggtacggcaccttgactggagagttgcatatgatagaactggagaaggggcactcagggctggggctgagtctcgctgggaataaagaccggagtcgcatgtccgtcttcattgtgggtattgatccaaacggcgccgctgggaaggatggtcggctccagatcgctgacgaactgttggagatcaatgggcagatcctgtacgggcgtagccaccagaatgcttcttcaatcattaagtgcgctcctagcaaggtcaaaattatttttatacgaaacaaggacgctgtaaaccaaatggcagtgtgccctggcaatgccgtggagcccttgccctcaaatagcgagaacctgcagaataaagagaccgaaccgacagtcaccacatcagacgcggccgtggatttaagttcttttaagaatgtgcaacatcttgagttgcctaaggaccaaggaggtctgggtattgcaatcagtgaagaggacacgctcagcggtgtcatcattaagtccctgacagagcacggcgtagccgccaccgacggacgtctgaaggttggggaccaaatcctggccgtagacgatgagatcgtggtcggctaccctattgaaaagtttatcagcctgctgaagaccgccaagatgacagtgaaactcaccatacatgcagagaatcccgatagccaggcagtgccttctgctgctggcgcagcctccggggagaaaaagaactccagccagagcctgatggtcccgcagagcggatctccagaacccgagtccatacgcaatacatctaggtcatccactcctgctatattcgcgagtgaccccgccacatgccctataatccctggctgcgaaaccaccattgaaatttccaaggggcgtaccggattgggcctgagcatcgttggaggtagcgatacactgctcggcgcgataattatccatgaagtgtacgaagaaggggctgcctgcaaggatggaagactttgggctggcgaccagatcctggaggtgaatgggatcgacctaagaaaggccactcatgatgaggcaatcaacgtcctgcgacagacccctcaaagggtcagattgaccctttatagggatgaggccccatataaagaggaggaggtttgtgatacgctgacgatcgaactccagaaaaaacccggcaaaggcctgggactctccatagtaggtaaaaggaacgacactggcgtatttgtaagtgatatcgtgaagggagggattgctgacgccgacggtaggttgatgcagggagatcagatcttaatggtgaatggtgaagacgtacgtaatgcaactcaggaagctgtcgcagccctactcaaatgctccctcggcaccgttacccttgaagtcgggaggattaaggccggtccttttcattccgagagaaggccctctcaatcctcccaggtttccgaaggatctctaagcagttttactttccccctcagtggatctagcacttcagagagcctagagagcagttctaaaaaaaatgctctggcgtctgaaatccaaggtttgcgaacagtagagatgaaaaaggggcctacagactcactggggatttccatcgcaggaggcgtcgggtcgccgttgggcgacgtcccaatatttatcgcgatgatgcaccccacgggggtggccgcacagactcagaagctgcgcgtgggggatcgtattgtgacgatttgcggaacaagtaccgaggggatgactcatacgcaggcggtgaatctgttaaaaaatgcctccggctcaatcgaaatgcaggtggtggcaggcggcgacgtatcggttgtgaccggccatcagcaggagcctgcctcaagctccttgtcctttacagggctaacgtcctcctctatttttcaggatgacttggggcccccccagtgcaagtctatcacccttgagcggggaccagatggattggggttttccatcgtaggcggttatggttctccccacggggaccttccaatctacgtaaagactgtgttcgccaagggtgccgcgtctgaggatggccggctgaagcgtggagatcaaattatcgctgtaaacggacagtccttagagggggttacccacgaggaagcagttgccatcctgaaacgaaccaaaggtacggtgactctgatggtactctcctag

SEQ ID NO: 290600 - DNA, 6213 bp, Artificial Sequence
  derived and/or modified sequence
atgttggaggcaatcgataagaatagggccctccacgctgccgaacgactgcagaccaaactgcgtgagaggggagacgtcgccaacgaagacaagctcagcctgttaaagagcgtgctgcagtccccactcttctcacagatcctcagcctgcagacaagcgtccagcagctgaaggatcaggtgaatattgccacctccgcaacaagcaacatcgaatatgctcacgtaccacacctgagtcctgccgtgattcccacactgcaaaacgaatcatttctgttgtcaccaaataacggcaacctcgaagccctgaccggccctggtattcctcacatcaacgggaagccagcttgcgacgagtttgaccagctgattaaaaacatggcacagggtcgccacgttgaggtttttgaattactcaagccaccgtcgggtggccttggattctccgttgtgggtctgagatctgagaacaggggagaactgggcatatttgtgcaggagatccaggaggggagtgtggcccatcgcgacggtcgtctaaaagagaccgatcaaatcctggccattaacggccaggctttggaccaaacaatcacccaccagcaggccatttctatcctgcagaaagccaaggatactgtgcagctcgttatcgcccggggctccctcccccagctagtgagtcctatcgtgtcacgtagtcctagcgcagcctccacgatttcagcacattctaatcctgttcattggcaacatatggaaaccattgaactcgtgaacgatggcagtggcctgggcttcgggatcattgggggcaaagctaccggggttattgtcaaaaccatattgcctgggggggtggctgaccagcacgggaggctgtgcagcggtgaccatatcctgaaaattggcgatacagacctggctggtatgagtagtgagcaagttgcccaggttttaagacagtgtggcaaccgagtgaagttgatgatagctagaggcgcaatagaggagagaacagcacctacagccttgggaattactctgtcgtcgtcaccaactagcacacccgagctgagagtagacgcttctacacagaaaggcgaggaatccgagacttttgacgttgagcttactaagaacgtccagggcttaggcattaccatcgccggatatattggagataagaaactcgaacctagcggtatctttgtaaaaagtattacaaagagtagcgccgtagaacacgatggcagaatccagattggggaccagattattgctgttgacggaaccaatctacagggcttcacgaatcaacaggccgtggaggtgcttaggcataccggccagaccgtcttactgactctaatgagaagaggcatgaagcaagaggccgagctaatgagccgggaagacgttaccaaagacgccgacttgagccccgttaatgctagcattatcaaggagaactacgagaaagacgaggacttcttgagcagcacgcgcaacaccaacatactgcccactgaggaggagggttacccactgttgtccgctgagatcgaagagattgaagacgctcaaaaacaggaggccgcgttgctcaccaagtggcagcgcattatgggtatcaactatgagatcgtcgtggctcacgtatctaagtttagcgaaaattccgggctggggatttcattggaggctacagtcggccaccacttcattcggtcagtgctgccggaggggccggttggtcatagtggcaagctcttttcaggcgacgagcttctcgaagtcaatggaattactctgctgggagaaaaccatcaggatgtggtcaacatactgaaggaattgcccatcgaagtcacgatggtctgctgtaggagaaccgtgcctccaactacacagagcgaattggactctctggatctatgtgacattgagctgactgaaaagccgcacgttgacctgggcgaattcattggtagtagcgaaaccgaggatcctgtgctggctatgaccgatgcaggtcagtcaactgaagaagtgcaagcgccactcgccatgtgggaggccgggatccagcacattgaacttgagaagggcagcaagggcctcgggttctccatcctcgactatcaggaccccatcgatcccgccagtaccgtaatcataattaggtcactggtgccaggcggtattgcggagaaggacgggcggctgttgccaggagacagactcatgttcgtcaatgatgtaaacctagaaaacagcagtctcgaggaagccgtggaagccctgaaaggtgccccaagcggcacagtgcgcatcggagtggctaaacctctccctctttcaccggaggagggctatgtgtctgccaaagaggattccttcctttaccccccccacagctgtgaggaagcagggcttgcggataaaccgttatttagagccgatctcgccctagtgggtaccaacgacgctgatttagttgatgagtccacttttgagtccccttatagccccgagaatgattccatctacagcactcaagctagtatcttgtcattacacggctctagctgtggggacgggctgaactacggatcatctctccctagtagcccacctaaagacgtgatcgaaaatagttgtgatccggtcctagaccttcacatgtccctcgaagagctgtacacgcagaacctcctgcagaggcaggatgagaatacacctagcgtcgacatcagtatgggtcctgccagtggttttactataaatgactacacacctgctaatgccatcgagcaacagtacgagtgtgaaaatacaatcgtctggaccgaaagccatcttcccagtgaagtcatctcgagcgcagaactcccaagcgtccttcctgacagcgcggggaagggttctgaatatctgctggaacaatcctccctggcgtgtaacgccgagtgtgttatgttacagaatgtgagcaaagaatcttttgagaggacaattaatattgcgaaagggaattctagcttgggcatgacggtgagtgctaataaggacggcctgggaatgatagttaggagtatcattcacgggggcgccatcagtcgggacggacgaatcgcgatcggagattgcattctgtctataaatgaagagagtaccatttcagtcactaatgcccaagcacgcgctatgcttcgccggcacagcctgataggacccgacattaagataacatacgtacctgctgagcaccttgaagaattcaagatctcattgggccagcagtccgggcgggttatggcacttgatatcttttcatcttatactggtcgggacattcccgaattaccggagcgggaagaaggtgagggcgaggaaagtgaactgcagaatacggcctactcaaactggaatcaacccaggagagtcgagctttggcgtgagccatcaaaatcactggggatttctattgttgggggccgtggaatggggagcaggctctcaaacggcgaagtcatgagggggatcttcattaagcacgtgctcgaagattccccggccggcaagaacggtaccctcaagccaggtgaccggatcgtagaagtcgacgggatggatcttcgggatgcttcacacgagcaagccgtggaggctatccgtaaagctggcaaccctgtagtgttcatggtacaatccattattaatcgtcctaggaaatctcccctgccttccctgctgcacaatctctatccaaaatataatttttccagcacgaacccctttgccgattccttgcaaattaatgctgacaaggccccctcgcaaagcgagagtgaaccggaaaaggctcctctatgtagcgtgccaccgcccccaccatccgccttcgcagagatgggtagcgatcatactcagtcctcagcctctaagattagtcaggatgttgataaggaggatgaattcggctattcatggaagaatataagagagaggtatgggacactgactggcgagcttcacatgatcgaactggaaaagggccactcagggctggggctcagcctcgctgggaataaagacagatctagaatgtctgtttttatcgttggcatagacccaaacggcgcagctggaaaggatggtcgcctgcagatcgccgacgaactgctcgagatcaacggacagattctgtacgggaggagtcaccagaatgccagctcaattatcaaatgtgctccgagcaaggtcaaaattatttttattaggaacaaagatgccgttaaccagatggccgtgtgccccggaaatgctgttgaacctctgcctagtaactccgagaacctccaaaataaagagaccgagccaaccgtgactacctctgacgcagccgttgatctcagctcattcaagaacgtccagcacctggagttaccaaaggaccagggcggcttgggcatcgccattagcgaagaggacactctctcaggggtgattattaaatcgcttacggagcacggagtcgcagcaacggacggacgcctcaaagtgggagatcagatactagctgtagacgacgaaattgtcgtgggctatcctatcgaaaagttcatctcacttctgaaaaccgcgaagatgacagtgaaattgactattcatgcagaaaatccagactcccaagctgtgcccagcgccgcaggggccgctagcggtgaaaagaagaacagctcgcagtcgctgatggtgcctcagtcaggatcccccgagcccgaaagtattcggaacacttccagatcaagcacccccgccatttttgccagcgacccagcaacctgccctattattcctgggtgcgagaccaccatagagatttccaagggccgcacgggactggggttaagcattgtgggggggtctgatacccttttgggagcaattattattcatgaagtttacgaagaaggggccgcctgtaaagatggacgtctctgggctggagatcagatcctggaagtgaacggcatcgacctgcggaaggccacccatgatgaggctataaacgtgctgagacagacaccgcagcgagtgagactgacactctaccgagatgaagcaccttacaaggaggaagaagtctgcgacacgctcacaattgaactacaaaagaagcctggtaaaggactgggactctcaatcgttggcaagagaaacgacaccggtgtcttcgtgtccgacatagtgaaaggcgggatagccgacgccgacggaagactgatgcagggtgatcagatacttatggttaacggagaagatgtgaggaacgcaacccaggaggccgtggccgccctgctgaagtgtagtctgggcacagtcacattagaagttggccgcatcaaagccggcccctttcatagcgaacgcagaccgtcgcagagcagccaggtatctgaaggcagtctgagcagctttacctttcctcttagtggttcctccacatcagagtccctggaatccagcagcaaaaagaatgccttagctagtgaaatacaggggctccgcactgtggagatgaagaaggggcccactgattcactagggatctccatagccggtggcgttggatctcctctgggcgacgtgcccatatttattgctatgatgcaccccacgggagtggccgctcagacccagaaacttcgggtaggagatagaattgtgacaatctgtggaacctcaacagagggaatgacccatacacaggccgtgaacctccttaagaatgcaagcggctctatcgagatgcaagttgtggcgggcggcgacgtgtcagtcgtgactgggcaccagcaggaaccagcgtcgagcagcctctccttcactggactgacgagctccagtatctttcaagatgatttagggcctccacagtgcaagtctatcacacttgagaggggccctgacggtctagggttctcaatcgtaggcggatatggttcacctcacggtgatcttccgatttacgtaaaaactgtgtttgcaaaaggcgcagccagtgaggatggacggttgaagcgcggtgatcagataattgccgtaaacgggcaatcgctcgagggtgttacacacgaagaggctgtggccattttaaagcgcacaaagggaactgtaacactgatggtcctgagctag

SEQ ID NO: 290601 - DNA, 6213 bp, Artificial Sequence
  derived and/or modified sequence
atgctggaggccatcgacaagaacagagccctgcatgctgctgagcggctgcagaccaagctgcgggagagaggagatgtggccaatgaagacaagctgagcctgctgaagtctgtgctgcagagccccctcttcagccagatcctgagcctgcagacctctgtgcagcagctgaaggaccaggtgaacatcgccaccagcgccaccagcaacatcgagtatgcccacgtgccccacctgagccctgctgtgatccccaccctgcagaatgaaagcttcctgctgagccccaacaatggaaacctggaggccctgaccggccctggcatcccccacatcaacgggaagccagcctgtgatgaatttgaccagctgatcaagaacatggcccagggccgccacgtggaggtgtttgagctgctgaagcccccatctgggggcctgggcttctctgtggtgggcctgcggtctgagaacagaggagagctgggcatctttgtgcaggagatccaggagggctctgtggcccacagagatggccgcctgaaggagacagaccagatcctggccatcaatggccaggccctggaccagaccatcacccaccagcaggccatcagcatcctgcagaaggccaaggacacagtgcagctggtgattgcccggggcagcctgccccagctggtgagccccatcgtgagccgcagccccagcgctgccagcaccatcagcgcccacagcaaccctgtgcactggcagcacatggagaccatcgagctggtgaatgatggcagcggcctgggcttcggcatcatcggcggcaaggccactggagtcatcgtgaagaccatcctgcccggcggcgtggccgaccagcacggccgcctgtgcagcggggaccacatcctgaagattggagacacagacctggccggcatgagcagcgagcaggtggcccaggtgctgcggcagtgtggcaacagagtgaagctgatgattgcccggggggccatcgaggagaggacagcccccacagccctgggcatcaccctgagcagcagccccaccagcaccccagagctgcgggtggatgccagcacccagaagggggaggagagcgagacctttgatgtggagctgaccaagaatgtgcagggcctgggcatcaccatcgccggctacatcggggacaagaagctggagcccagcggcatctttgtgaagagcatcaccaagagcagcgctgtggagcatgatggccgcatccagatcggggaccagatcatcgctgtggatggcaccaacctgcagggcttcaccaaccagcaggccgtggaggtgctgcggcacacaggccagacagtgctgctgaccctgatgagaagaggcatgaagcaggaggccgagctgatgagccgggaggatgtgaccaaggatgctgacctgagccctgtgaatgccagcatcatcaaggagaactatgagaaggatgaggacttcctgagcagcaccaggaacaccaacatcctgcccacagaggaggagggctaccccctgctgtctgctgagattgaggagattgaagatgcccagaagcaggaggccgccctgctgaccaagtggcagaggatcatgggcatcaactatgaaattgtggtggcccacgtgtccaagttctctgaaaattctggcctgggcatcagcctggaggccaccgtgggccaccacttcatccgctctgtgctgcctgagggccctgtgggccacagcggcaagctgttctctggagatgagctgctggaggtgaatggcatcaccctgctgggggagaaccaccaggatgtggtgaacatcctgaaggagctgcccatcgaggtgaccatggtgtgctgcagaagaacagtgccccccaccacccagagcgagctggacagcctggacctgtgtgacatcgagctgacagagaagccccacgtggacctgggggagttcatcggcagcagcgagacagaagatcctgtgctggccatgacagatgctggccagagcacagaggaggtgcaggcccccctggccatgtgggaggccggcatccagcacatcgagctggagaagggcagcaagggcctgggcttcagcatcctggactaccaggaccccattgatcctgccagcaccgtcatcatcatccgcagcctggtgcctgggggcattgctgagaaggatggccgcctgctgcccggggaccggctgatgtttgtgaatgatgtgaacctggagaacagcagcctggaggaggccgtggaggccctgaagggggcccccagcggcaccgtgagaattggagtggccaagcccctgcccctgagccctgaggagggctacgtgtctgccaaggaggacagcttcctgtacccaccccacagctgtgaggaggccggcctggccgacaagcccctcttccgggctgacctggccctggtgggcaccaatgatgctgacctggtggatgagagcacctttgagagcccctacagcccagaaaatgacagcatctacagcacccaggccagcatcctgagcctgcacggcagcagctgtggagatggcctgaactacggcagcagcctgcccagcagcccccccaaggatgtgattgagaacagctgtgaccctgtgctggacctgcacatgagcctggaggagctgtacacccagaacctgctgcagaggcaggatgagaacacccccagcgtggacatctccatgggccctgccagcggcttcaccatcaatgactacaccccagccaatgccatcgagcagcagtatgaatgtgagaacaccatcgtgtggacagagagccacctgcccagcgaggtgatcagcagcgctgagctgcccagcgtgctgcctgacagcgctggaaaaggaagtgagtacctgctggagcagagcagcctggcctgcaatgcagaatgtgtgatgctgcagaatgtgtccaaggagagctttgagaggaccatcaacatcgccaagggcaacagcagcctgggcatgacagtgtctgccaacaaggatggcctgggcatgattgtgcgcagcatcatccacggcggggccatcagcagagatggccgcatcgccatcggggactgcatcctgagcatcaatgaggagagcaccatctctgtgaccaatgcccaggcccgggccatgctgcggcggcacagcctcatcggccctgacatcaagatcacctacgtgcctgctgagcacctggaggagttcaagatcagcctgggccagcagagcggccgggtgatggccctggacatcttcagcagctacacaggccgggacatccctgagctgcctgagcgggaggagggggagggggaggagagcgagctgcagaacacagcctacagcaactggaaccagccccggcgggtggagctgtggagggagcccagcaagagcctgggcatcagcatcgtgggcggccggggcatgggcagccggctgagcaatggagaggtgatgaggggcatcttcatcaagcacgtgctggaggacagccctgctgggaagaatggcaccctgaagccaggggaccgcatcgtggaggtggatggcatggacctgagagatgccagccatgagcaggccgtggaggccatcaggaaggccggcaaccctgtggtgttcatggtgcagagcatcatcaaccggcccaggaagagccccctgcccagcctgctgcacaacctgtaccccaagtacaacttcagcagcaccaacccctttgctgacagcctgcagatcaatgctgacaaggcccccagccagagcgagagcgagcctgagaaggcccccctgtgcagcgtgcccccacctcctccttctgcctttgctgagatgggcagtgaccacacccagagcagcgccagcaagatcagccaggatgtggacaaggaggatgaatttggctacagctggaagaacatccgggagagatatggcaccctgactggagagctgcacatgattgagctggagaagggccacagcggcctgggcctgagcctggccggcaacaaggacaggagcaggatgtctgtgttcatcgtgggcatcgaccccaatggagctgctgggaaggatggccgcctgcagattgctgatgagctgctggagatcaatggccagatcctgtatggccgcagccaccagaatgccagcagcatcatcaagtgtgcccccagcaaggtgaagatcatcttcatccggaacaaggatgctgtgaaccagatggctgtgtgccctggaaatgctgtggagcccctgcccagcaacagcgagaacctgcagaacaaggagacagagcccaccgtgaccaccagtgatgctgctgtggacctgagcagcttcaagaatgtgcagcacctggagctgcccaaggaccagggcggcctgggcatcgccatcagcgaggaggacaccctgagcggggtcatcatcaagagcctgacagagcacggcgtggccgccacagatggccgcctgaaggtgggggaccagatcctggccgtggatgatgagatcgtggtgggctaccccatcgagaagttcatcagcctgctgaagacagccaagatgacagtgaagctgaccatccacgcagaaaatccagacagccaggccgtgcccagcgctgctggggccgccagcggggagaagaagaacagcagccagagcctgatggtgccccagagcggcagccctgagcctgagagcatccggaacaccagccgcagcagcaccccagccatctttgccagtgaccctgccacctgccccatcatccctggctgtgagaccaccatcgagatcagcaagggccgcacaggcctgggcctgagcatcgtgggcggcagtgacaccctgctgggcgccatcatcatccacgaggtgtatgaggagggcgccgcctgcaaggatggccgcctgtgggccggggaccagatcctggaggtgaatggaattgacctgaggaaggccacccatgatgaggccatcaacgtgctgcggcagaccccccagagggtgcggctgaccctgtacagagatgaggccccctacaaggaggaggaggtgtgtgacaccctgaccatcgagctgcagaagaagccaggcaagggcctgggcctgagcatcgtgggcaagagaaatgacacaggagtgtttgtgtctgacatcgtgaagggcggcattgctgatgctgatggccgcctgatgcagggcgaccagatcctgatggtgaatggagaagatgtgagaaatgccacccaggaggccgtggccgccctgctgaagtgcagcctgggcaccgtgaccctggaggtgggccgcatcaaggccggccccttccacagcgagcggcggcccagccagagcagccaggtgtctgagggcagcctgagcagcttcaccttccccctgagcggcagcagcaccagcgagagcctggagagcagcagcaagaagaatgccctggccagcgagatccagggcctgaggacagtggagatgaagaagggccccacagacagcctgggcatcagcattgctgggggcgtgggcagccccctgggagatgtgcccatcttcatcgccatgatgcaccccaccggggtggccgcccagacccagaagctgcgggtgggggacagaattgtgaccatctgtggcaccagcacagagggcatgacccacacccaggccgtgaacctgctgaagaatgccagcggcagcattgagatgcaggtggtggccggaggagatgtgtctgtggtgacaggccaccagcaggagcccgccagcagcagcctgtccttcaccggcctgaccagcagcagcatcttccaggatgacctgggccccccccagtgcaagagcatcaccctggagcggggcccagatggcctgggcttcagcatcgtgggcggctacggcagcccccatggagacctgcccatctacgtgaagacagtgtttgccaagggggccgcctctgaagatggccgcctgaagagaggagaccagatcatcgctgtgaatggccagagcctggagggcgtgacccatgaggaggccgtggccatcctgaagaggaccaagggcaccgtgaccctgatggtgctgtcctag

SEQ ID NO: 290602 - DNA, 7722 bp, Artificial Sequence
  derived and/or modified sequence
ccgcgggattaagtttctcagtcacgcgtgagtgtctgtgcgttttgatccgaagctcctcgccgggtcgttacttcagaagagaagacagtgagcgtgggcgaggcgaggcatccagaggccccggcgacccctgctccccagtcctccgccccctcgcgtcgcggccctgggcgggcgccgcgagccggagttccattttaattgctgttaatcatttcagagaagaacactgaactttgaaaaaaatgttggaagccattgacaaaaatcgggccctgcatgcagcagagcgcttgcaaaccaagctgcgagaacgtggggatgtagcaaatgaagacaaactgagccttctgaagtcagtcctgcagagccctctcttcagtcagattctgagccttcagacttctgtacagcagctgaaagaccaggtaaatattgcaacttcagcaacttcaaatattgaatatgcccacgttcctcatctcagcccagctgtgattcctactctgcaaaatgaatcgtttttattatccccaaacaatgggaatctggaagcacttacaggacctggtattccacacattaatgggaaacctgcttgtgatgaatttgatcagcttatcaaaaatatggcccagggtcgccatgtagaagtttttgagctcctcaaacctccatctggaggccttgggtttagtgttgtgggactaagaagtgaaaacagaggagagctgggaatatttgttcaagagatacaagagggcagtgtggcccatagagatggaagattgaaagaaactgatcaaattcttgctatcaatggacaggctcttgatcagacaattacacatcagcaggctatcagcatcctgcagaaagccaaagatactgtccagctagttattgccagaggctcattgcctcagcttgtcagccccatagtttcccgttctccatctgcagccagcacaatttcagctcactctaatccggttcactggcaacacatggaaacgattgaattggtgaatgatggatctggtttgggatttggcatcataggaggaaaagcaactggtgtgatagtaaaaaccattctgcctggaggagtagctgatcagcatgggcgtttatgcagtggagaccacattctaaagattggtgacacagatctagcaggaatgagcagtgagcaagtagcacaagtccttaggcaatgtggaaatagagttaagttgatgattgcaagaggtgccatagaagaacgtacagcacccactgctttgggcatcaccctctcctcatccccaacttcaacaccagagttgcgggttgatgcttctactcagaaaggtgaagaaagtgagacatttgatgtagaactcactaaaaatgtccaaggattaggaattaccattgctggctacattggagataaaaaattggaaccttcaggaatctttgtaaagagcattacaaaaagcagtgccgttgagcatgatggaagaatccaaattggagaccaaattatagcagtagatggcacaaaccttcagggttttactaatcagcaagcagtagaggtattgcgacatacaggacaaactgtgctcctgacactaatgaggagaggaatgaagcaggaagccgagctcatgtcaagggaagacgtcacaaaagatgcagatttgtctcctgttaatgccagcataatcaaagaaaattatgaaaaagatgaagattttttatcttcgacgagaaacaccaacatattaccaactgaagaagaagggtatccattactgtcagctgagatagaagaaatagaagatgcacaaaaacaagaagctgctctgctgacaaaatggcaaaggattatgggaattaactatgaaatagtggtggcccatgtgagcaagtttagtgagaacagtggattggggataagcctggaagcgacagtgggacatcattttatccgatctgttctaccagagggtcctgttggacacagcgggaagctcttcagtggagacgagctattggaagtaaatggcataactttacttggggaaaatcaccaagatgtggtgaatatcttaaaagaactgcctatagaagtgacaatggtgtgctgtcgtcgaactgtgccacccaccacccaatcagaattggatagcctggacttatgtgatattgagctaacagaaaagcctcacgtagatctaggtgagttcatcgggtcatcagagacagaggatccagtgctggcgatgactgatgcgggtcagagtacagaagaggttcaagcacctttggccatgtgggaggctggcattcagcacatagagctggagaaagggagcaaaggacttggttttagcattttagattatcaggatccaattgatccagcaagcactgtgattataattcgttctttggtgcctggcggcattgctgaaaaggatggacgacttcttcctggtgaccgactcatgtttgtaaacgatgttaacttggaaaacagcagtcttgaggaagctgtagaagcactgaagggagcaccgtcagggactgtgagaataggagttgctaagcctttacccctttcaccagaagaaggttatgtttctgctaaggaggattcctttctctacccaccacactcctgtgaggaagcagggctggctgacaaacccctcttcagggctgacttggctctggtgggcacaaatgatgctgacttagtagatgaatccacatttgagtctccatactctcctgaaaatgacagcatctactctactcaagcctctattttatctcttcatggcagttcttgtggtgatggcctgaactatggttcttcccttccatcatctcctcctaaggatgttattgaaaattcttgtgatccagtacttgatctgcatatgtctctggaggaactatatacccagaatctcctgcaaagacaggatgagaatacaccttcggtggacataagtatggggcctgcttctggctttactataaatgactacacacctgcaaatgctattgaacaacaatatgaatgtgaaaacacaatagtgtggactgaatctcatttaccaagtgaagttatatcaagtgcagaacttccttctgtgctacccgattcagctggaaagggctctgagtacctgcttgaacagagctccctggcctgtaatgctgagtgtgtcatgcttcaaaatgtatctaaagaatcttttgaaaggactattaatatagcaaaaggcaattctagcctaggaatgacagttagtgctaataaagatggcttggggatgatcgttcgaagcattattcatggaggtgccattagtcgagatggccggattgccattggggactgcatcttgtccattaatgaagagtctaccatcagtgtaaccaatgcccaggcacgagctatgttgagaagacattctctcattggccctgacataaaaattacttatgtgcctgcagaacatttggaagagttcaaaataagcttgggacaacaatctggaagagtaatggcactggatattttttcttcatacactggcagagacattccagaattaccagagcgagaagagggagagggtgaagaaagcgaacttcaaaacacagcatatagcaattggaatcagcccaggcgggtggaactctggagagaaccaagcaaatccttaggcatcagcattgttggtggacgagggatggggagtcggctaagcaatggagaagtgatgaggggcattttcatcaaacatgttctggaagatagtccagctggcaaaaatggaaccttgaaacctggagatagaatcgtagaggtggatggaatggacctcagagatgcaagccatgaacaagctgtggaagccattcggaaagcaggcaaccctgtagtctttatggtacagagcattataaacagaccaaggaaatcccctttgccttccttgctgcacaacctttaccctaagtacaacttcagcagcactaacccatttgctgactctctacaaatcaacgccgacaaggcacccagtcagtcagagtcagagccagagaaggctccattgtgcagtgtgcccccaccccctccttcagcctttgccgaaatgggtagtgatcacacacagtcatctgcaagcaaaatctcacaagatgtggacaaagaggatgagtttggttacagctggaaaaatatcagagagcgttatggaaccctaacaggcgagctgcatatgattgaactggagaaaggtcatagtggtttgggcctaagtcttgctgggaacaaagaccgatccaggatgagtgtcttcatagtggggattgatccaaatggagctgcaggaaaagatggtcgattgcaaattgcagatgagcttctagagatcaatggtcagattttatatggaagaagtcatcagaatgcctcatcaatcattaaatgtgccccttctaaagtgaaaataatttttatcagaaataaagatgcagtgaatcagatggccgtatgtcctggaaatgcagtagaacctttgccttctaactcagaaaatcttcaaaataaggagacagagccaactgttactacttctgatgcagctgtggacctcagttcatttaaaaatgtgcaacatctggagcttcccaaggatcaggggggtttgggtattgctatcagcgaagaagatacactcagtggagtcatcataaagagcttaacagagcatggggtagcagccacggatggacgactcaaagtcggagatcagatactggctgtagatgatgaaattgttgttggttaccctattgaaaagtttattagccttctgaagacagcaaagatgacagtaaaacttaccatccatgctgagaatccagattcccaggctgttccttcagcagctggtgcagccagtggagaaaaaaagaacagctcccagtctctgatggtcccacagtctggctccccagaaccggagtccatccgaaatacaagcagatcatcaacaccagcaatttttgcttctgatcctgcaacctgccccattatccctggctgcgaaacaaccatcgagatttccaaagggcgaacagggctgggcctgagcatcgttgggggttcagacacgctgctgggtgccattattatccatgaagtttatgaagaaggagcagcatgtaaagatggaagactctgggctggagatcagatcttagaggtgaatggaattgacttgagaaaggccacacatgatgaagcaatcaatgtcctgagacagacgccacagagagtgcgcctgacactctacagagatgaggccccatacaaagaggaggaagtgtgtgacaccctcactattgagctgcagaagaagccgggaaaaggcctaggattaagtattgttggtaaaagaaacgatactggagtatttgtgtcagacattgtcaaaggaggaattgcagatgccgatggaagactgatgcagggagaccagatattaatggtgaatggggaagacgttcgtaatgccacccaagaagcggttgccgctttgctaaagtgttccctaggcacagtaaccttggaagttggaagaatcaaagctggtccattccattcagagaggaggccatctcaaagcagccaggtgagtgaaggcagcctgtcatctttcacttttccactctctggatccagtacatctgagtcactggaaagtagctcaaagaagaatgcattggcatctgaaatacagggattaagaacagtcgaaatgaaaaagggccctactgactcactgggaatcagcattgctggaggagtaggcagcccacttggtgatgtgcctatatttattgcaatgatgcacccaactggagttgcagcacagacccaaaaactcagagttggggataggattgtcaccatctgtggcacatccactgagggcatgactcacacccaagcagttaacctactgaaaaatgcatctggctccattgaaatgcaggtggttgctggaggagacgtgagtgtggtcacaggtcatcagcaggagcctgcaagttccagtctttctttcactgggctgacgtcaagcagtatatttcaggatgatttaggacctcctcaatgtaagtctattacactagagcgaggaccagatggcttaggcttcagtatagttggaggatatggcagccctcatggagacttacccatttatgttaaaacagtgtttgcaaagggagcagcctctgaagacggacgtctgaaaaggggcgatcagatcattgctgtcaatgggcagagtctagaaggagtcacccatgaagaagctgttgccatccttaaacggacaaaaggcactgtcactttgatggttctctcttgaattggctgccagaattgaaccaacccaacccctagctcacctcctactgtaaagagaatgcactggtcctgacaatttttatgctgtgttcagccgggtcttcaaaactgtaggggggaaataacacttaagtttctttttctcatctagaaatgctttccttactgacaacctaacatcatttttcttttcttcttgcattttgtgaacttaaagagaaggaatatttgtgtaggtgaatctcgtttttatttgtggagatatctaatgttttgtagtcacatgggcaagaattattacatgctaagctggttagtataaagaaagataattctaaagctaaccaaagaaaatggcttcagtaaattaggatgaaaaatgaaaatataaaataaagaagaaaatctcggggagtttaaaaaaaatgcctcaatttggcaatctacctcctctccccaccccaaactaaaaaaagaaaaaaaggttttctaatgaaaatctttaaaaatactgtcagtattttaaaattttcaacagtattataaaaacattgcatctccccacctctaatatgcatatatatttttcctgctaaaattggtttctacaattgagtaaatggcaaatacatgaagcaatgtccctaaattttataaagaaattatatttaatgcacatttcaattttcattcttatttttgaccttttgtaaaatattttcatgttgctataagtaaatgatgatgccaccccatgttgactatggtttttctagaaagcaactatgctgctaaccatagaggaacatagaagggttccagaatctttagtgctggttttaacaaccgatgcaacattaaaaatgtgttagtgtgctgtgcaattggttttcaattcatattaatcttaatgacagagaacaatgtgttactaattattttggttgtatgccattagtaaattgatagaaaaattaaggggattaacataacttcatttcattgacttatattaacatcttataatacaatagtttaagactaagggaaacagatggagctgtttattgagacaactggtgaggaattatcatgtgttcattcccattttagagcgtgaaactcctacattagaatatataaagtcactttaaatatctatatttgtaacagaagtagtgtacagatattttattacagcatttttgtgtaaatgcagaattaaagtgaataaataagaattttcagtggtgcacaaataa

SEQ ID NO: 290603 - DNA, 6361 bp, Artificial Sequence
  derived and/or modified sequence
tgctgttaatcatttcagagaagaacactgaactttgaaaaaaatgttggaagccattgacaaaaatcgggccctgcatgcagcagagcgcttgcaaaccaagctgcgagaacgtggggatgtagcaaatgaagacaaactgagccttctgaagtcagtcctgcagagccctctcttcagtcagattctgagccttcagacttctgtacagcagctgaaagaccaggtaaatattgcaacttcagcaacttcaaatattgaatatgcccacgttcctcatctcagcccagctgtgattcctactctgcaaaatgaatcgtttttattatccccaaacaatgggaatctggaagcacttacaggacctggtattccacacattaatgggaaacctgcttgtgatgaatttgatcagcttatcaaaaatatggcccagggtcgccatgtagaagtttttgagctcctcaaacctccatctggaggccttgggtttagtgttgtgggactaagaagtgaaaacagaggagagctgggaatatttgttcaagagatacaagagggcagtgtggcccatagagatggaagattgaaagaaactgatcaaattcttgctatcaatggacaggctcttgatcagacaattacacatcagcaggctatcagcatcctgcagaaagccaaagatactgtccagctagttattgccagaggctcattgcctcagcttgtcagccccatagtttcccgttctccatctgcagccagcacaatttcagctcactctaatccggttcactggcaacacatggaaacgattgaattggtgaatgatggatctggtttgggatttggcatcataggaggaaaagcaactggtgtgatagtaaaaaccattctgcctggaggagtagctgatcagcatgggcgtttatgcagtggagaccacattctaaagattggtgacacagatctagcaggaatgagcagtgagcaagtagcacaagtccttaggcaatgtggaaatagagttaagttgatgattgcaagaggtgccatagaagaacgtacagcacccactgctttgggcatcaccctctcctcatccccaacttcaacaccagagttgcgggttgatgcttctactcagaaaggtgaagaaagtgagacatttgatgtagaactcactaaaaatgtccaaggattaggaattaccattgctggctacattggagataaaaaattggaaccttcaggaatctttgtaaagagcattacaaaaagcagtgccgttgagcatgatggaagaatccaaattggagaccaaattatagcagtagatggcacaaaccttcagggttttactaatcagcaagcagtagaggtattgcgacatacaggacaaactgtgctcctgacactaatgaggagaggaatgaagcaggaagccgagctcatgtcaagggaagacgtcacaaaagatgcagatttgtctcctgttaatgccagcataatcaaagaaaattatgaaaaagatgaagattttttatcttcgacgagaaacaccaacatattaccaactgaagaagaagggtatccattactgtcagctgagatagaagaaatagaagatgcacaaaaacaagaagctgctctgctgacaaaatggcaaaggattatgggaattaactatgaaatagtggtggcccatgtgagcaagtttagtgagaacagtggattggggataagcctggaagcgacagtgggacatcattttatccgatctgttctaccagagggtcctgttggacacagcgggaagctcttcagtggagacgagctattggaagtaaatggcataactttacttggggaaaatcaccaagatgtggtgaatatcttaaaagaactgcctatagaagtgacaatggtgtgctgtcgtcgaactgtgccacccaccacccaatcagaattggatagcctggacttatgtgatattgagctaacagaaaagcctcacgtagatctaggtgagttcatcgggtcatcagagacagaggatccagtgctggcgatgactgatgcgggtcagagtacagaagaggttcaagcacctttggccatgtgggaggctggcattcagcacatagagctggagaaagggagcaaaggacttggttttagcattttagattatcaggatccaattgatccagcaagcactgtgattataattcgttctttggtgcctggcggcattgctgaaaaggatggacgacttcttcctggtgaccgactcatgtttgtaaacgatgttaacttggaaaacagcagtcttgaggaagctgtagaagcactgaagggagcaccgtcagggactgtgagaataggagttgctaagcctttacccctttcaccagaagaaggttatgtttctgctaaggaggattcctttctctacccaccacactcctgtgaggaagcagggctggctgacaaacccctcttcagggctgacttggctctggtgggcacaaatgatgctgacttagtagatgaatccacatttgagtctccatactctcctgaaaatgacagcatctactctactcaagcctctattttatctcttcatggcagttcttgtggtgatggcctgaactatggttcttcccttccatcatctcctcctaaggatgttattgaaaattcttgtgatccagtacttgatctgcatatgtctctggaggaactatatacccagaatctcctgcaaagacaggatgagaatacaccttcggtggacataagtatggggcctgcttctggctttactataaatgactacacacctgcaaatgctattgaacaacaatatgaatgtgaaaacacaatagtgtggactgaatctcatttaccaagtgaagttatatcaagtgcagaacttccttctgtgctacccgattcagctggaaagggctctgagtacctgcttgaacagagctccctggcctgtaatgctgagtgtgtcatgcttcaaaatgtatctaaagaatcttttgaaaggactattaatatagcaaaaggcaattctagcctaggaatgacagttagtgctaataaagatggcttggggatgatcgttcgaagcattattcatggaggtgccattagtcgagatggccggattgccattggggactgcatcttgtccattaatgaagagtctaccatcagtgtaaccaatgcccaggcacgagctatgttgagaagacattctctcattggccctgacataaaaattacttatgtgcctgcagaacatttggaagagttcaaaataagcttgggacaacaatctggaagagtaatggcactggatattttttcttcatacactggcagagacattccagaattaccagagcgagaagagggagagggtgaagaaagcgaacttcaaaacacagcatatagcaattggaatcagcccaggcgggtggaactctggagagaaccaagcaaatccttaggcatcagcattgttggtggacgagggatggggagtcggctaagcaatggagaagtgatgaggggcattttcatcaaacatgttctggaagatagtccagctggcaaaaatggaaccttgaaacctggagatagaatcgtagaggtggatggaatggacctcagagatgcaagccatgaacaagctgtggaagccattcggaaagcaggcaaccctgtagtctttatggtacagagcattataaacagaccaaggaaatcccctttgccttccttgctgcacaacctttaccctaagtacaacttcagcagcactaacccatttgctgactctctacaaatcaacgccgacaaggcacccagtcagtcagagtcagagccagagaaggctccattgtgcagtgtgcccccaccccctccttcagcctttgccgaaatgggtagtgatcacacacagtcatctgcaagcaaaatctcacaagatgtggacaaagaggatgagtttggttacagctggaaaaatatcagagagcgttatggaaccctaacaggcgagctgcatatgattgaactggagaaaggtcatagtggtttgggcctaagtcttgctgggaacaaagaccgatccaggatgagtgtcttcatagtggggattgatccaaatggagctgcaggaaaagatggtcgattgcaaattgcagatgagcttctagagatcaatggtcagattttatatggaagaagtcatcagaatgcctcatcaatcattaaatgtgccccttctaaagtgaaaataatttttatcagaaataaagatgcagtgaatcagatggccgtatgtcctggaaatgcagtagaacctttgccttctaactcagaaaatcttcaaaataaggagacagagccaactgttactacttctgatgcagctgtggacctcagttcatttaaaaatgtgcaacatctggagcttcccaaggatcaggggggtttgggtattgctatcagcgaagaagatacactcagtggagtcatcataaagagcttaacagagcatggggtagcagccacggatggacgactcaaagtcggagatcagatactggctgtagatgatgaaattgttgttggttaccctattgaaaagtttattagccttctgaagacagcaaagatgacagtaaaacttaccatccatgctgagaatccagattcccaggctgttccttcagcagctggtgcagccagtggagaaaaaaagaacagctcccagtctctgatggtcccacagtctggctccccagaaccggagtccatccgaaatacaagcagatcatcaacaccagcaatttttgcttctgatcctgcaacctgccccattatccctggctgcgaaacaaccatcgagatttccaaagggcgaacagggctgggcctgagcatcgttgggggttcagacacgctgctgggtgccattattatccatgaagtttatgaagaaggagcagcatgtaaagatggaagactctgggctggagatcagatcttagaggtgaatggaattgacttgagaaaggccacacatgatgaagcaatcaatgtcctgagacagacgccacagagagtgcgcctgacactctacagagatgaggccccatacaaagaggaggaagtgtgtgacaccctcactattgagctgcagaagaagccgggaaaaggcctaggattaagtattgttggtaaaagaaacgatactggagtatttgtgtcagacattgtcaaaggaggaattgcagatgccgatggaagactgatgcagggagaccagatattaatggtgaatggggaagacgttcgtaatgccacccaagaagcggttgccgctttgctaaagtgttccctaggcacagtaaccttggaagttggaagaatcaaagctggtccattccattcagagaggaggccatctcaaagcagccaggtgagtgaaggcagcctgtcatctttcacttttccactctctggatccagtacatctgagtcactggaaagtagctcaaagaagaatgcattggcatctgaaatacagggattaagaacagtcgaaatgaaaaagggccctactgactcactgggaatcagcattgctggaggagtaggcagcccacttggtgatgtgcctatatttattgcaatgatgcacccaactggagttgcagcacagacccaaaaactcagagttggggataggattgtcaccatctgtggcacatccactgagggcatgactcacacccaagcagttaacctactgaaaaatgcatctggctccattgaaatgcaggtggttgctggaggagacgtgagtgtggtcacaggtcatcagcaggagcctgcaagttccagtctttctttcactgggctgacgtcaagcagtatatttcaggatgatttaggacctcctcaatgtaagtctattacactagagcgaggaccagatggcttaggcttcagtatagttggaggatatggcagccctcatggagacttacccatttatgttaaaacagtgtttgcaaagggagcagcctctgaagacggacgtctgaaaaggggcgatcagatcattgctgtcaatgggcagagtctagaaggagtcacccatgaagaagctgttgccatccttaaacggacaaaaggcactgtcactttgatggttctctcttgaattggctgccagaattgaaccaacccaacccctagctcacctcctactgtaaagagaatgcactggtcctgacaatttttatgctgtgttcagccgggtcttcaa

SEQ ID NO: 290604 - DNA, 6213 bp, Artificial Sequence
  derived and/or modified sequence
atgctggaggccatcgacaagaaccgggccctgcacgccgccgagaggctacagacaaaactgcgcgaacgaggcgatgttgcgaacgaagataagttgtcattgctaaaaagtgtgttgcagtcccccctcttctctcaaatcctgtcccttcaaacttctgtccagcaactcaaagatcaggtcaacatcgcaaccagcgccacatctaatattgaatacgcacacgtcccgcacctttcacctgcggtgatccccactctgcagaatgaatctttcctgctcagccctaacaatggcaacctggaagccctgacgggacccgggatcccccacattaacgggaagccagcctgcgatgaatttgaccaactgataaaaaacatggctcaaggtcgccacgtggaagtgttcgagctgctgaaacccccttctggcggcttgggcttttctgtggtgggcttgagaagcgagaataggggtgaactcggcatttttgtccaggagatccaggaagggtctgtggcccatcgggacggaagactgaaagagacagaccagatccttgctattaacgggcaggcactggaccagacaattacccaccaacaggccattagtatcttgcagaaggccaaagacaccgtgcaacttgtgatcgcacgcggctccttgccccaactggtatctccgattgtctctaggtctccctctgccgcctcaactatctccgcccatagcaatcctgtgcactggcagcacatggagaccatcgagttggtgaacgatggctcaggactgggcttcggaataattggcggtaaagcaactggggtgattgtcaaaactatcctgccaggcggggtggctgaccagcatggcaggctgtgctctggggaccatatacttaagatcggcgacaccgacttagccgggatgtccagcgagcaggtggcccaggtccttagacagtgtggcaatagagttaagttgatgatcgccagaggagccatcgaggaacgcactgctccgaccgcgctggggattaccctttcctcaagcccgacgtccactcctgagctgcgagtcgatgccagtacacagaaaggtgaagaatctgagacctttgacgtggaactaacaaagaacgtgcaaggcctcggcattacgattgccggttatattggcgacaagaaattggaaccctcaggtatttttgtgaagagtattactaaaagctccgctgtagaacatgacgggcgcatacagatcggtgatcaaatcattgccgtcgatggaaccaatctgcaggggtttaccaaccagcaggcagtggaggtgctacgacataccgggcagaccgttctgttgaccctgatgcgcaggggcatgaaacaagaggccgagctcatgagccgggaggacgtgaccaaagatgccgacttatctccagttaatgcatcaatcatcaaggagaattacgagaaggacgaggacttcttatccagtactaggaacacaaacattctgcctacagaggaggagggttacccactcctgagtgcagaaatcgaagaaatagaggacgcccagaaacaggaagccgccctactcactaagtggcagaggatcatgggcattaattacgagattgttgtggcgcatgtgtctaagttttcagaaaatagcggactcgggatctcgctcgaggctacagtgggacaccatttcatcaggtccgtcctgcccgagggcccagtcggacactcgggtaaactattctccggggacgagttgctggaggtcaacgggattacgcttctcggcgagaaccaccaagatgtagtgaatatcctgaaagaactccccatagaagtgactatggtctgttgtcggagaacagtgccacccaccactcagtcagagctggatagcttggacctatgcgatatcgaactgacagagaagcctcacgtggacctcggtgagtttataggcagctccgagactgaagatcctgtgctggccatgacagatgcaggccaatcaactgaggaagttcaggctcctctcgccatgtgggaggctgggattcagcatatcgaattagagaagggcagcaaggggttaggcttttccatcttggattaccaggatccaattgatcctgcctcgacggtgataattatcagatcactagtgcccggcggcatcgccgaaaaagacggacgcttactgcccggcgacaggcttatgttcgtaaacgatgtcaatttagagaattcatccctcgaagaagcagtcgaggccctcaaaggcgcacctagcgggacggttcggatcggggtggcaaagccactgccactgagcccggaagagggatatgtgagcgccaaagaagactccttcctctatccgcctcactcctgtgaggaagctgggcttgccgacaagccacttttccgcgccgatctggcgttggtggggacaaacgatgcggacttagtggacgagtcgacattcgaatcaccctatagcccagaaaatgattcaatttactcaacacaggcgtccattctgtcgctgcacggatccagttgtggtgacgggctgaattacggcagcagcctgccttcgagcccgccgaaagacgtgattgagaatagctgcgatcccgtgttggacttgcacatgagtctagaagaactgtacacacaaaacctgttacagaggcaggatgaaaatactccaagtgttgacatttccatggggcctgcctccggctttaccatcaacgactatactccagccaacgccatcgagcaacagtatgaatgcgagaacactatcgtgtggactgagtcccatctgccgtccgaggtcatttcgtctgccgaacttccgtcagtgctgcccgacagtgcgggcaaggggagtgagtacctgctcgagcagtcctcactggcatgtaacgcagagtgcgtgatgctgcagaacgttagtaaggaatcatttgaaaggaccattaacatcgcaaaaggcaactcctcactggggatgactgtctccgcaaataaagatgggcttggaatgatcgtgaggagtattatccacggaggcgctatttcccgggatgggcgaatagccatcggtgattgcatcctcagcatcaacgaagaaagcacaatcagcgttacaaatgcccaggctcgggccatgctgcgaaggcatagtctgataggtccggacatcaaaatcacatatgtccctgctgagcacctggaggagttcaaaatttccctcgggcagcaatccggccgcgtcatggcccttgacatattctcctcctacacaggacgagacatccccgaactgcccgagcgggaagagggggaaggcgaggagagtgagctgcagaataccgcgtacagcaattggaatcaacctaggagggtcgagctgtggagggagccaagtaaaagcctgggaatttcaattgtcggcggccgcggcatgggtagcagactgagcaacggtgaggtaatgcgaggtattttcattaaacatgtgctggaagactcgcctgctgggaagaacgggaccctgaaacctggagatcgtatagtcgaagtagatgggatggacctgcgtgatgcgagtcatgaacaggcggtcgaggcgatcaggaaagccggaaatccggttgtttttatggtgcaaagtattattaacagaccgcggaagagcccgctcccatccttactgcacaacctttacccaaagtataacttctcctcgaccaatccattcgcagattcactccaaatcaacgcggataaagcccctagccaaagtgaatccgaacctgaaaaagcgcccctctgctcagttccaccccccccaccgtcagcattcgcagaaatgggtagtgaccatacgcaatcatccgcttcgaagatttcccaagatgttgacaaggaggatgagttcgggtatagctggaagaatattcgggaacggtacgggaccttgacaggcgaattgcacatgattgagctcgagaaaggtcacagcggccttggtctttcccttgccgggaacaaagacaggtccaggatgtcagttttcatagtcgggatagaccccaacggcgcagccggcaaagatgggcggctgcaaatcgccgatgaactgctggagattaacggccagatcctctacggacgctctcaccagaatgccagctctatcattaaatgcgcaccctccaaggtgaaaattatattcattcggaataaggatgccgtgaatcaaatggccgtgtgccctgggaatgcggtggaacccttgcctagcaactccgagaaccttcaaaacaaggaaacagagcccaccgtaacaaccagcgatgccgctgtggatctttcttctttcaagaatgtccaacacctcgagctccccaaggatcaaggcgggttaggaatcgcaatcagtgaggaagacaccttgtctggcgtgatcattaagagcctgactgagcacggagtggcagcaacagatggaaggctcaaagtgggcgatcagattctggcggttgatgatgagatcgttgtgggataccccattgagaagttcatttctctcctgaaaactgctaagatgacagtgaagctgactattcacgccgaaaatcctgactcacaggccgtcccatctgcagcaggcgccgcttccggggagaagaaaaattccagccagtccctaatggtgccacagtcaggaagtccagagcccgagtctattcgcaatacttcccggagcagcacgccagcaatcttcgctagtgacccagcgacttgtccgattataccagggtgcgagacaaccatcgagatttccaagggtaggacgggtcttgggctctcaattgtgggcgggtcagataccttgctgggcgcgattatcatacatgaggtttatgaggagggcgcagcatgcaaggacggaaggctctgggcaggcgaccaaattttggaggtgaacggtattgatctccgtaaagcaacacatgatgaggctattaacgttctgcgacagaccccccagcgggtgcggctgacactgtatcgagacgaagccccctataaagaagaagaagtctgcgataccctcaccattgaactgcagaaaaaaccaggcaaaggactcggcttaagtatcgtgggtaagcgaaatgacactggtgtctttgtgtcggacatcgtaaaaggtgggatcgctgacgctgacggccggttgatgcagggtgaccaaattctcatggttaacggagaagatgtgcgcaacgcaacacaggaggccgttgccgcactgctgaagtgttctctgggcactgttaccctggaggtgggccgcatcaaggctggccctttccacagtgaacgcagaccaagccagagctcccaggtttccgagggcagtctctcctcttttaccttccctctctcaggcagttccacctcggagtcactagaatcttcatcgaaaaaaaacgcgctagcttcggaaattcaagggttaaggaccgtcgaaatgaaaaaaggacctaccgattcgttgggcatatctattgccggaggcgtgggaagtcccctgggtgatgttcccatcttcatcgctatgatgcaccccactggcgttgctgcacaaacccagaagctaagagtgggagatagaatcgtaactatttgcgggacatcaacggagggaatgacccatacacaagcagtaaatctcctgaagaatgcctcgggatcaatcgaaatgcaggtggtggccggcggagacgtgtccgtggtgacggggcaccagcaggagcccgctagttcttctctctccttcacaggcctgaccagttcgtctatctttcaggacgatttgggtcctccccagtgcaaatcgatcaccctggaaagaggcccagatgggctggggttttcgattgttggcggctacggctcccctcatggtgaccttccgatctatgttaaaaccgtgtttgctaaaggcgccgcatccgaagatgggaggctgaaaaggggtgaccaaatcatcgcagtcaacgggcagtcccttgagggagttacgcatgaggaggcggtggcaattctcaaaagaactaagggaaccgttaccctgatggtactgagttag

SEQ ID NO: 290605 - DNA, 6213 bp, Artificial Sequence
  derived and/or modified sequence
atgctggaggccatcgacaagaaccgggccctgcacgccgccgagcggctccaaaccaaactgcgggagcgcggagacgtcgcgaacgaagataaactgtctcttctgaaatctgttttgcagagtcccctctttagtcaaatactctccttgcaaaccagcgtgcagcaactcaaagaccaggtgaatatcgctacatctgcgactagtaacatcgaatacgctcacgtcccacatctctctcccgctgtgatccccactttgcaaaacgaatccttcctgctgtctcccaataatgggaatctggaagcgcttaccggcccaggtattcctcacataaatggaaagcctgcgtgcgacgagttcgatcagcttattaagaacatggctcaagggagacacgtagaggtatttgaattgctgaaaccaccatccgggggattaggcttttccgtcgtcggactccgctctgagaatcgcggcgaactggggatttttgtgcaagaaattcaggaaggctccgtggcccatagggatggccgcctgaaagagaccgaccagatcttagctatcaatggccaggcattggaccagaccatcacacaccagcaagcaatttccatcctgcagaaggcaaaagatactgtccagctagttatcgcacgtggctccctgccccagctggtcagccctatcgtttctcggtctccatccgccgcatcaactatctctgcccattccaacccagtgcactggcaacacatggaaaccattgagctggtgaacgacggctcaggtctggggtttggcataatcggtggaaaagctacgggggtgatcgtcaagaccatactgccagggggtgtcgctgaccagcacggtcgcctttgtagcggagaccatattctgaaaatcggggacacagacctcgctggcatgagcagtgaacaggtggcacaggttctcagacagtgcggcaaccgcgtcaagctcatgatcgcccggggcgctatagaggagagaacagcccccaccgccctcggcatcaccttaagttcaagccctacatccacccctgaactgcgagtagacgcgtccacacagaaaggagaagagtcagaaacttttgatgtggagctaaccaaaaatgtgcagggacttgggataactatagccgggtatattggtgacaaaaagcttgagccatccggcatctttgtcaaatccattactaaatcctctgcagtcgagcatgatgggcggatacagatcggggaccagatcatcgccgtggacggcacgaacctccagggattcactaatcagcaggccgtcgaggtcctgcgtcacacgggtcagactgttctgctaacactgatgcggagagggatgaagcaagaggctgagctgatgtcacgcgaggatgtgaccaaagacgccgacctctcaccggtgaacgcctctatcataaaggaaaactacgaaaaggacgaggacttcttgtctagcactcgtaatactaacatcctgcctaccgaagaagaaggatatcctctcttatctgcagagatagaggaaattgaagatgcccaaaagcaggaggcagcgttgcttactaaatggcagaggattatgggtattaactacgagatagtggtggctcacgtgtcaaagttttcagagaactctggtctcgggatatcgctagaggcgacagtgggacatcactttatacggagcgtactgcccgaggggcccgttgggcatagcgggaaactcttttctggcgacgagcttctggaggtcaacggcattacattgctcggagaaaaccatcaggatgtggtaaatattctgaaggaactccccatcgaagttaccatggtgtgctgccgacggaccgtccctcctactacacagtccgaactggactctcttgatttatgtgacatcgagctgaccgagaaaccacatgttgacctgggcgagttcatcgggtcctcagagaccgaggatccggtgcttgcaatgacagacgctggtcagtctacggaagaagtacaggcccctttggctatgtgggaagccggcattcaacacatcgaactcgagaaaggatctaagggcttgggattttcaattctcgactaccaagaccccattgaccccgcatccacagtcatcattatacggagcctggtaccgggcggcatcgcggaaaaggacggcaggctgctccctggcgatcggctcatgtttgtgaacgacgtgaacctggaaaacagtagtttggaggaagccgtggaggcccttaagggtgctccttcggggactgtcaggataggcgtagccaaacctctgcccctcagtccagaggaaggttacgtgtctgccaaggaggacagcttcttgtatccacctcactcctgtgaagaggccggcctcgcagacaaacccttgttcagggccgatttggcccttgtggggactaatgatgcagaccttgtggatgagtccacattcgaaagtccttacagccctgagaatgacagtatctatagtacccaagcctctatcctgtccttgcacggctccagttgcggggatggcctgaattatggctccagcctccctagttcaccccctaaagacgtaatagagaactcctgtgatcctgttctggatctacatatgagtctagaggaattatatacccaaaacctactgcagagacaagatgagaataccccatctgtcgatatttcaatgggccccgccagcggattcactatcaatgactacacaccagccaacgcgatagaacagcagtatgagtgtgaaaatacaatcgtctggacggaaagccacctgccgtcggaggttataagctccgctgaactcccaagtgtgttgccggattccgctggaaagggatctgagtaccttcttgaacagtcttcactcgcatgtaacgccgaatgtgtaatgctgcagaacgtgtccaaagaaagttttgagcggacaataaacatcgccaagggaaatagctcgctgggaatgaccgtttctgctaataaggacggcttaggcatgatcgtgagatccattattcacggaggggcaattagtagagatggcaggatagccataggcgactgtatactatccattaacgaggagtcaaccataagtgtcactaacgcccaagcccgagctatgctgcgaagacactcactgattggccctgacattaagatcacttatgtcccagccgagcatctggaggagtttaaaatttctctcggccaacagtccggacgggtcatggcacttgatatcttctcaagctacacaggcagagatatacctgaattacctgaaagggaagagggggaaggagaggagagcgagctgcagaatacggcctatagcaattggaatcagccgagacgggttgagctttggcgggagccatctaaaagcctgggcatcagtatcgttggcgggcggggcatggggagccgcctaagtaacggtgaggtgatgcgggggatctttattaagcacgtcctggaggattctcccgctggaaaaaatggaacgttgaaacccggtgatcgaatcgttgaagtcgacggaatggatttacgtgacgcatcacatgagcaggcggtggaagcaattcgcaaggcaggcaatcctgtcgtgttcatggtgcagagcatcatcaataggccacggaagagtccattaccaagtctgctgcataatttgtaccccaagtacaacttttcaagcacaaacccttttgctgacagcctccagatcaacgccgataaagccccttcccagagtgaaagtgagccagaaaaagcccctctctgctccgtaccaccacctcccccctctgcatttgcagagatggggtcagaccatacgcagagttctgctagcaaaataagccaggacgtcgataaggaagatgagtttggttactcttggaaaaatattagggagcgctatggtacactaactggggaacttcacatgattgaacttgagaaagggcactctggcctgggtttgtcgttagccggcaataaggaccgctctaggatgtcagtctttattgtgggaatagaccctaacggcgcagctggcaaggacggcaggcttcagatcgccgacgaattactggagataaacggacagatactttacggtcgcagtcatcagaatgcctctagtatcatcaagtgtgccccttccaaggttaaaatcatatttatccggaacaaggacgccgtgaaccagatggcagtgtgtcctggcaatgccgtggaacccttgccaagcaattccgaaaatcttcagaataaggaaactgagcccaccgtgactaccagcgatgccgccgtggacctgtccagcttcaagaatgtgcaacacttagaactgcctaaagaccaaggcgggctgggcatcgctatcagcgaggaagataccttaagtggagtgatcatcaaatctctgacggaacacggagtggctgctactgacggcaggctgaaagttggagaccagatcctggctgtggatgacgaaatcgtcgtaggatacccaattgagaaatttataagcctcctgaagacagcaaagatgactgtcaagctaacaattcacgcagaaaacccagacagtcaggccgtcccttccgcagctggcgccgcatccggggagaagaagaactcttcccagtctctgatggtgccccagagcgggtctcccgaacctgagtctatccggaacacctcaagaagttctactcctgccatttttgctagtgacccggctacatgccctatcatccccggatgcgagactactatcgaaatctccaagggtaggacgggtctgggattgtctattgtgggcggttctgatactttgctgggcgctatcattatccatgaagtgtatgaggagggggctgcttgcaaagacggtagactgtgggcgggtgatcaaattctggaggtcaacggaattgacctgaggaaagcgactcatgacgaggccataaacgtgctgcgtcagacaccacaaagggtgcgcttaaccctgtatcgggatgaagcaccctacaaagaggaggaagtttgcgatacactaaccatcgagctgcaaaaaaagcccggcaaaggactgggtctgagcatcgtcggaaaacgcaacgacaccggcgtatttgtgtccgatatcgtaaaaggtggtattgcagatgcagacggcagactaatgcaaggcgatcagatcctgatggtaaatggcgaggacgtgaggaatgcaacacaggaagcagtggcggcgttgctgaagtgctcactcggtaccgttacccttgaggtgggaaggatcaaagccggtcctttccattctgagcgccggcccagccagagcagtcaggtctccgaagggtccctttcctcttttacatttccactctccggctccagcaccagtgagtccctcgaatcttcatcaaaaaaaaatgccctggccagcgagattcagggcttgcgaacagtggaaatgaaaaaggggccgaccgactccttgggaatatctatcgccggaggggtgggatcaccgctgggtgatgtgcctattttcatcgctatgatgcatcccacaggcgtggctgcgcagacccagaaactgcgggttggcgatcggattgtcactatatgtggaactagtactgagggtatgacacacacacaggcggtgaacctgcttaaaaacgcctctgggagcatcgagatgcaggttgtcgccgggggagacgttagcgtagttaccgggcaccagcaggagccggcatccagctctctcagttttacaggccttacttcttccagtatcttccaagacgatctaggccccccccagtgcaagagcattacacttgagagggggccagatggactgggcttcagcatcgtgggcgggtacggcagtcctcatggggaccttcctatttatgtgaagaccgtgtttgcaaaaggggccgctagcgaagacggacggctcaaaagaggtgaccagatcatagcagtgaacggtcagtctctggagggagtgacacatgaggaggctgtagcaatcctgaaacgtacaaagggcactgtgacgcttatggttttgagttag

SEQ ID NO: 290606 - DNA, 6212 bp, Artificial Sequence
  derived and/or modified sequence
atgctggaggcaattgacaagaatagagctctgcacgccgcagaaagattgcagactaagctgagagagcgcggtgacgtggcaaatgaggacaaactgagcctgttgaaaagtgtccttcaatcccccctttttagccaaattctaagtctacagacatccgtccagcaactcaaagatcaggtcaatatcgctaccagcgcaacgtccaacatcgaatacgcccatgtaccccatctgtcgccagccgtcattccaactctccagaatgaaagtttcctcctgtcccccaacaacggcaatttagaggcacttacagggccaggcatcccacatatcaacgggaaaccggcttgtgacgaatttgatcaactgataaagaatatggcgcagggcagacatgttgaagtgttcgaattgctgaaaccgccttctgggggattaggattctccgtagttggcttgagatctgagaaccgaggtgagctggggatattcgtgcaggaaattcaggaagggagcgtagcccacagagatgggaggcttaaggaaacggaccaaattctcgctatcaacggccaggccctggaccaaacaatcacacaccagcaagcaatctctattctgcagaaggccaaagacactgtgcagttggtgatagccagagggagtctcccgcagttggtctctcccatcgtaagcaggtctccatccgccgctagtaccattagcgcccacagcaaccctgtgcattggcagcatatggagacgatcgaactggtaaacgatgggtcaggcttgggcttcggtatcatcggagggaaagcaaccggggtgatcgtgaaaacaatactacccggaggggtggccgatcaacacggtcgcctctgcagcggtgaccacattctgaagatcggcgacacagacctagcaggaatgagttccgaacaggtcgcccaagtcttgagacagtgtggcaaccgcgtcaaactgatgatcgcaagaggcgcaatcgaggagaggaccgctccaacagccctcggcattaccctgtcctcttcacccaccagtacacccgagctccgtgttgacgcaagtacccaaaagggggaagagtcggaaacgtttgacgtggaactgactaagaacgtccagggactgggtattaccatcgccggttacatcggagacaaaaagctggaaccgagcggcatctttgtaaaatcaatcactaagtctagcgctgttgaacacgatgggagaattcagatcggagaccagatcatcgcagtcgatggcacgaacctccaggggtttaccaatcaacaggccgtggaggtcctccggcacaccggtcaaaccgttttgctcacactcatgaggagaggcatgaagcaggaggcagagctcatgagccgggaagacgtgacaaaggacgccgatctgtcacctgtgaatgctagcattataaaagaaaactatgaaaaagacgaagatttcctgagctcaaccaggaacactaacatactcccaactgaggaagaagggtacccactcctgagcgctgagatcgaggagatcgaggacgcccaaaagcaggaggccgcactgctgaccaaatggcaaagaatcatgggaatcaattatgagatcgtcgtcgctcatgtcagcaaattctccgagaattccggactcggcatatccttggaggccacggtgggccaccacttcattagaagtgtactccccgaaggcccagtgggccacagcgggaagctgttctctggcgacgagctcctagaagtgaacggtataactctgcttggggaaaaccaccaggatgtggtgaacatcctgaaggagctgcccatcgaggttacaatggtttgttgtcggagaacagtccccccaacaacacaaagcgagctggattcactcgacttgtgcgacatcgaactaacagaaaagccccacgtggatttaggggaatttattgggtcctccgagacagaggatcctgtgctggcaatgacagatgccggacagtctacagaggaggtgcaggctccactcgctatgtgggaagcaggtattcagcacatcgaactggagaagggatcaaagggcttgggcttcagtatactggattaccaagacccaattgatccagccagtaccgttattatcatcaggtctttggtgccaggcggtatcgccgaaaaggatggcaggctgctgcctggagaccgcctgatgtttgtcaacgatgtaaatctggagaatagcagtctggaagaggctgtggaggccttgaaaggagctcctagcggtacagtcaggatcggggttgcgaagccactgcccttatctccagaagagggttacgtctccgctaaggaagatagtttcctctaccctccacactcatgtgaagaggcaggactggccgataagcccctcttcagagccgaccttgccctcgtgggcacaaatgatgcggatctggtagatgaaagcacctttgaatctccttattcaccagagaatgatagcatctactccacccaggcaagtatcctgtcactgcatggaagctcatgtggcgatgggctcaattacggttcaagtctgccgtcctcacccccaaaggacgtgatcgaaaacagctgcgaccccgttctggacttacacatgagtctagaagaactgtacacacagaacctgctacagagacaggacgaaaatactccttccgtggacatctctatgggccctgcaagcggattcacaattaatgactacacacccgctaatgcaattgagcaacagtacgaatgtgaaaacactattgtttggaccgaatctcatttgcccagcgaggtgattagcagcgccgaactgccaagcgtgctgccagatagtgcgggaaaggggtccgagtacctcttggagcaatctagcctggcttgcaacgctgaatgcgtcatgctgcagaatgttagcaaggaatcttttgaaagaacaattaacattgcgaaggggaactcatctctagggatgacggtctcagcaaataaagatgggctggggatgattgtgcgaagtatcatccatggaggagccatctcccgtgacggcagaatcgcaattggggattgtatactgagcataaatgaggagtctactatcagtgtgacaaatgctcaggcacgggcaatgttaagacggcactcccttatcggtcctgacatcaagatcacctatgtccccgctgaacatctggaggagtttaaaatcagtcttggacagcagagtggcagggtgatggccctcgatatattttccagctacacgggcagagacattcctgaactgcccgagcgggaagaaggcgagggggaagaaagtgagctgcaaaatactgcctactcaaactggaaccaacccagacgggttgaactctggcgcgaaccctctaaatctctgggaatctccatagtaggtggtcgcggaatgggcagtcgcctcagtaatggggaagtgatgcgtggaattttcattaagcacgttctggaagactcccccgctggcaagaacggcactttgaagcccggtgaccgtattgttgaggtcgatggcatggatctgcgggatgcttctcacgagcaagccgtcgaagccataagaaaagcagggaatccagtggtgtttatggttcagtctattattaatcgtccgaggaagagtccacttccatccctccttcacaacctttaccccaagtataattttagtagtactaaccccttcgctgactctctacagatcaatgcggataaagccccatcacaaagtgagtcagagcctgagaaggctccactttgtagtgtacctccaccaccgccttcagccttcgcagaaatgggctccgaccacacccagagttccgccagcaagatatctcaagacgtggacaaagaagatgagtttggctatagctggaagaatatccgcgagaggtacgggactcttactggagagttgcacatgatcgagctggagaagggccactccgggctcggtcttagcctggcaggaaacaaggacagaagccggatgtctgtgtttatcgtggggattgaccccaacggggctgctggcaaagacggcaggctgcagattgccgatgaactgttagagatcaacgggcagatcctctatggcaggagtcatcagaacgcttcatcaatcataaaatgtgcacccagcaaagtgaagatcatttttattcgaaacaaggatgccgtgaatcaaatggcagtctgccccggtaacgcagtggagcccttgccttctaatagcgagaatttgcagaacaaggagaccgaaccaaccgtcacaacatctgatgctgcagttgacctgtctagttttaagaatgttcagcacctcgagttgcccaaggaccaggggggtcttggaatcgccatctctgaagaggataccctgagtggcgtgatcatcaagtcactcactgaacacggcgtggcagctactgatggcagactgaaagtgggggaccaaatactggcggtggacgacgagattgtggtcggctaccccatcgagaaatttatttctcttctcaaaacagcgaagatgacagtgaaactgaccattcacgccgaaaatcctgacagtcaggccgtgccttccgccgctggcgctgcctctggagaaaaaaagaattcttcccaaagcctgatggtacctcaaagtggcagtcccgaaccagaaagtatacgcaatacctctcgcagctccaccccagcaatttttgcgtcagaccccgctacatgcccaattatacctggctgcgagaccaccatcgaaattagtaaggggagaaccggcctcggcctgtccatcgttggaggctccgatactctcctcggcgcaatcattattcacgaagtgtatgaggaaggagctgcatgtaaggatgggagattatgggccggagaccaaatcctggaagtgaatggcatcgatttgaggaaggccacccatgatgaagctatcaacgttctccgccagacaccgcagcgagtcaggctgactctatacagagacgaagcaccctataaggaagaagaagtgtgtgacactcttaccattgaactccagaagaaacccggaaaaggactgggcctatctattgtcggaaagcgaaacgacactggtgtcttcgtctctgatattgtgaagggaggaatcgctgatgccgacgggagacttatgcagggcgatcagattttaatggtcaatggggaagacgtcagaaatgccactcaggaggcagtagccgcactcttgaaatgttcgctgggaacagtgactctcgaggtgggcaggatcaaggcaggaccttttcactcagaaagacggccatctcagtccagccaggtgtcagagggaagcctcagctcctttacttttcccctgtctgggtcctccacatcagagagcctggagagcagttccaaaaaaaatgccttggcgagtgaaattcagggtctccgaaccgtagagatgaaaaaggggcctaccgacagtctcggaatttcaattgcaggtggcgtgggaagtcctctgggagacgtgccaattttcatcgcaatgatgcatcccaccggcgtagcagcccagactcaaaagcttagggtgggcgatagaattgtcaccatctgcgggacctcaacagagggcatgactcacacgcaagccgtgaacctcctgaagaacgccagcggatctatcgagatgcaggtggtagccggaggggacgtaagtgttgttacagggcatcagcaggagccggcttctagtagtctaagcttcactgggttgacctcaagttcaattttccaggatgatctgggaccaccacaatgcaaaagtatcacgcttgaacgagggccagacggtctaggtttctcgatagtcggcggttatggcagcccgcacggagacttacccatttacgtcaaaactgtcttcgccaagggcgctgcatctgaagacggtcgacttaaaaggggagatcaaataattgccgtgaatggacagagcctggagggcgtcacacacgaggaggcagtcgccatcctgaaacgtacgaagggtacagttacccttatggtgctgagtta

SEQ ID NO: 290607 - DNA, 6212 bp, Artificial Sequence
  derived and/or modified sequence
atgcttgaagcaatcgataagaaccgcgctctgcatgcagcagaaagactccaaacaaagctccgggaacgaggagatgtagccaatgaagacaagctgtcgcttttgaagtcggtgctgcaatccccactcttcagtcagatcctgtcattacaaacatcagtccagcagctgaaggatcaagtaaacattgccacctccgctacaagcaatatcgagtatgcacatgtgccacatttatcccctgccgtgattcccacgctgcagaacgagtctttcttactgtctcccaataatgggaacctggaggcactcacgggcccagggatcccacatatcaatggaaagcccgcttgtgacgagtttgaccagctgataaagaatatggctcagggacgccatgtggaagtgttcgagctcctcaagcccccatccggagggcttgggttttccgtggttgggctgagaagcgagaacaggggtgagctcgggatattcgtgcaagagatccaggagggttccgtagcacaccgggacggacgactgaaggagacagatcagatcttggctatcaacggacaagcactcgaccaaacgattacacaccaacaggctatcagtattctgcagaaggcgaaagataccgtccagctggtcattgctcgcggaagtttacctcagctagtgtctcccatcgtctcgagatcaccaagtgctgcctccacaatctccgcgcatagtaaccccgtgcattggcagcacatggaaactatcgagctcgtgaatgacggatctggcctaggatttggcattatcgggggtaaggcaaccggcgtcatcgtcaaaaccattcttcccggaggcgttgccgaccagcatggacgcttatgttccggcgaccatatcctgaaaattggggacacagatctggccggaatgagcagtgagcaggttgcccaggttctccgccagtgtggcaaccgggtcaagctcatgatagccagaggagcaatcgaagagcgtacagcacccacggctctgggaatcaccctcagcagttctcctactagcacgcccgaactcagagtcgatgccagcacccagaaaggcgaagagagcgaaaccttcgatgttgagctgaccaaaaatgtccagggactgggcattacaatagctggatacataggcgacaagaagctcgaaccttctggaatcttcgtaaaatctatcactaagagcagcgctgtggaacatgacggaaggattcagatcggcgaccagatcatcgctgtcgacggcaccaatctgcagggatttacaaatcagcaagcggtcgaggtgctgcggcacactggacaaaccgtgctactaactctgatgagacgcggaatgaagcaagaagccgaattgatgagtcgcgaggatgtcaccaaagacgcggatctgagccccgtaaacgcgagtatcattaaggaaaattatgagaaagacgaagacttcctttcgtctacccggaacacaaatatcctaccaactgaggaagagggttaccctttgctgtctgccgagatcgaggaaatagaggatgctcagaaacaggaagcagctttactgacaaagtggcagcgtatcatgggaattaactacgagatcgttgtggcacacgtcagtaaatttagtgaaaatagcggcttgggcatttccttagaagctaccgtcggccatcacttcattagaagtgtgttacctgagggccctgtggggcattcaggaaaattgttctcaggggatgaactgttggaagttaatggcattactctgttgggagagaaccaccaggacgtcgtcaatatattgaaggagttaccgatcgaagtaacaatggtgtgctgccgccgtacagtccccccaacgacccagagcgagttggacagtctggacctgtgtgacatagaacttacagagaaaccgcacgtcgatcttggggaatttattggatcaagtgagactgaggatcccgtcttggctatgacggatgctgggcagagtacagaggaggtgcaggccccactggctatgtgggaagctgggatacagcatatcgaactagagaaaggttctaaaggcctcgggttcagcatcttagactatcaggaccccattgacccagcttcgaccgtgatcattatccggtctctggttcctggtggtattgcagagaaagatggacgtctattgcccggagaccgattaatgttcgtgaatgatgtgaacctagaaaattcctccctggaggaggccgtggaggcattaaagggggcaccctcgggcacagttcgcattggagtggccaagccactgccactaagccccgaggaagggtacgtaagcgcaaaggaggactcgttcctctatcctccacatagctgcgaggaggcaggtttggcagacaagcctttgttccgagctgatctcgctctggttggtaccaatgacgcggatctggtggatgagagcacctttgagtcaccctatagccccgaaaacgactcaatctattcaacacaggcctccattctctcactccacggtagctcatgtggtgatggcctcaactacgggagctcattgcccagttcccccccaaaggacgtcatcgaaaatagctgtgatccggtgctggatctccacatgtccctggaggaattatacactcagaatttgctacaaagacaggacgaaaatacccctagcgttgatattagtatgggcccagctagtggatttacgatcaatgattatacaccagctaatgcaatagagcaacagtacgaatgtgagaataccatcgtgtggaccgagtcacacctgccctcggaagtgatttccagcgctgaattgccttctgtcttgccagattcagctggaaaaggcagcgaatacctactagagcagagcagtttggcgtgtaacgctgaatgcgtgatgctgcagaatgtaagcaaggaatcctttgaaagaaccattaacatcgccaaagggaactcctctctgggtatgacggtaagtgctaacaaggatggattgggtatgatagtacgcagcattatccacggcggagctatttctcgggacgggcgaattgccatcggtgactgcatcctcagcattaacgaagagagtacaatttcggtgacgaacgcccaggcccgagccatgctgaggcgccacagcctgatcgggcctgacattaagattacatacgtgcccgctgaacacctggaggaattcaagatttctcttggccagcagagtgggagagtcatggccctcgatatatttagtagctacaccggccgtgacattcctgagctgcccgaaagagaggagggggaaggtgaggagtctgagctgcagaacacagcctattccaactggaaccaaccccgtagggtggagttgtggcgggagccctccaagagtctgggaatctctattgtgggaggcaggggcatgggaagcagactctccaatggtgaggtcatgcggggtatctttatcaaacacgtgttagaggactctccagccggaaagaacgggactctgaagccaggagatcgaatcgtggaggtagacggaatggacctgagggatgccagccacgagcaagcagtggaagctatcaggaaggccggaaacccagtcgttttcatggtccagtccatcattaacagacccagaaagagtccattgcctagcctcctccataacctttatccaaaatacaacttttccagcacaaatcctttcgccgatagtctgcaaattaatgccgacaaagctccctcacagtctgagtccgaaccagaaaaggctcccctgtgctcagtgccgccaccaccaccctctgcgttcgccgagatgggttcagaccacacacagtcctcggccagcaagatctcgcaggacgtcgataaggaggacgagtttggatattcttggaagaacatcagagaacgatacggtacactcactggagaactacacatgattgagctggagaaggggcatagcggcttgggtttgtctctggctggaaacaaggatcggtcccgcatgtcggtgttcatagttggcatcgacccaaacggggctgctgggaaggatggcagattacagattgcggatgagctgctggagatcaacgggcagatcctgtacgggaggagtcatcagaatgcaagttctattatcaaatgtgctccctcaaaagtgaagatcatcttcattcgcaataaagacgctgtaaatcagatggctgtatgtcctggtaacgctgtagagcctttgccatcaaactctgagaaccttcagaacaaggagactgagccgacagttactacatccgacgccgctgtggatctcagcagttttaagaatgtgcagcaccttgagctgcctaaagatcaaggtggccttggcattgccatttctgaggaagacaccctcagcggagttatcatcaagagccttaccgagcatggcgttgctgccacagatggccgattaaaggttggagatcaaatcctcgcagtcgatgacgagatagtggtgggttatcctattgagaaattcatcagtcttcttaaaaccgcgaaaatgaccgttaagttgacgatccacgccgaaaaccctgattctcaggccgtgccctccgctgctggggcagccagcggcgaaaaaaaaaattcctcccagagccttatggtgcctcagtcagggtctccagagccagagagcattagaaacacatcccggagcagtacgcctgcaatcttcgctagcgatccagccacatgcccaatcatacctggatgcgagaccacaattgagatttctaaagggcgtaccgggctcggcctttcgattgtagggggatcagacacactactgggggcaatcatcatccacgaagtgtatgaggagggtgctgcatgcaaggatggaagactctgggccggagaccagatcttggaagttaacgggattgatctccgcaaggcaacccacgatgaggcgatcaacgtgttaaggcaaacaccccagcgcgtacgcctcaccctatatagggacgaagccccttataaagaagaggaggtgtgtgacacactgaccatcgagttacaaaaaaaaccagggaagggcctgggacttagtattgtggggaaaaggaacgatacaggcgtgttcgttagcgatattgtgaaagggggaatcgccgatgccgacggcagactaatgcagggcgatcagatcctgatggttaacggggaagacgtgagaaatgctacgcaggaagcagtggccgctctcctcaagtgctcactggggactgttactctggaagtgggcaggatcaaagccggtcctttccattctgagcggagacctagtcagtcatctcaagtttctgaaggcagtctctcaagcttcaccttccccctttccggatccagtaccagcgagagcctggagtcatcttccaaaaaaaatgcactggcatccgagattcagggtctgcgcaccgtggaaatgaagaagggtcctaccgatagcttgggcatctccatcgccggtggagttggctcacctctcggcgatgtgcccatttttatagcgatgatgcatcctaccggagtggccgctcagacccagaagctgcgtgtgggcgaccgtattgttaccatctgcgggacgagcacggagggaatgacacacacccaggctgtgaacctgttaaagaacgctagtggatcaatcgagatgcaggtagtggcgggtggcgatgttagcgtcgtcacgggacaccagcaggaacccgcatcttcctccctgagtttcacaggactaaccagcagttcaatttttcaggatgatctcggaccgccacagtgtaaaagcattactctggagagaggcccagacggtcttggtttctccattgtggggggatatggctccccccacggggatctgccaatctacgtgaagacggtgttcgccaagggcgctgcgagcgaagacggacggctgaaacggggtgatcaaataatagccgtaaatgggcagtctcttgagggcgtaacccatgaagaggcagtcgctatattgaaacgtactaagggaactgtaaccctcatggtattgtctta

SEQ ID NO: 290608 - DNA, 6213 bp, Artificial Sequence
  derived and/or modified sequence
atgctggaggccatcgacaagaacagagccctgcacgccgccgagagactgcagaccaagctgagagagagaggcgacgtggccaacgaggacaagctgagcctgctgaagagcgtgctgcagagccccctgttcagccagatcctgagcctgcagaccagcgtgcagcagctgaaggaccaggtgaacatcgccaccagcgccaccagcaacatcgagtacgcccacgtgccccacctgagccccgccgtgatccccaccctgcagaacgagagcttcctgctgagccccaacaacggcaacctggaggccctgaccggccccggcatcccccacatcaacggcaagcccgcctgcgacgagttcgaccagctgatcaagaacatggcccagggcagacacgtggaggtgttcgagctgctgaagccccccagcggcggcctgggcttcagcgtggtgggcctgagaagcgagaacagaggcgagctgggcatcttcgtgcaggagatccaggagggcagcgtggcccacagagacggcagactgaaggagaccgaccagatcctggccatcaacggccaggccctggaccagaccatcacccaccagcaggccatcagcatcctgcagaaggccaaggacaccgtgcagctggtgatcgccagaggcagcctgccccagctggtgagccccatcgtgagcagaagccccagcgccgccagcaccatcagcgcccacagcaaccccgtgcactggcagcacatggagaccatcgagctggtgaacgacggcagcggcctgggcttcggcatcatcggcggcaaggccaccggcgtgatcgtgaagaccatcctgcccggcggcgtggccgaccagcacggcagactgtgcagcggcgaccacatcctgaagatcggcgacaccgacctggccggcatgagcagcgagcaggtggcccaggtgctgagacagtgcggcaacagagtgaagctgatgatcgccagaggcgccatcgaggagagaaccgcccccaccgccctgggcatcaccctgagcagcagccccaccagcacccccgagctgagagtggacgccagcacccagaagggcgaggagagcgagaccttcgacgtggagctgaccaagaacgtgcagggcctgggcatcaccatcgccggctacatcggcgacaagaagctggagcccagcggcatcttcgtgaagagcatcaccaagagcagcgccgtggagcacgacggcagaatccagatcggcgaccagatcatcgccgtggacggcaccaacctgcagggcttcaccaaccagcaggccgtggaggtgctgagacacaccggccagaccgtgctgctgaccctgatgagaagaggcatgaagcaggaggccgagctgatgagcagagaggacgtgaccaaggacgccgacctgagccccgtgaacgccagcatcatcaaggagaactacgagaaggacgaggacttcctgagcagcaccagaaacaccaacatcctgcccaccgaggaggagggctaccccctgctgagcgccgagatcgaggagatcgaggacgcccagaagcaggaggccgccctgctgaccaagtggcagagaatcatgggcatcaactacgagatcgtggtggcccacgtgagcaagttcagcgagaacagcggcctgggcatcagcctggaggccaccgtgggccaccacttcatcagaagcgtgctgcccgagggccccgtgggccacagcggcaagctgttcagcggcgacgagctgctggaggtgaacggcatcaccctgctgggcgagaaccaccaggacgtggtgaacatcctgaaggagctgcccatcgaggtgaccatggtgtgctgcagaagaaccgtgccccccaccacccagagcgagctggacagcctggacctgtgcgacatcgagctgaccgagaagccccacgtggacctgggcgagttcatcggcagcagcgagaccgaggaccccgtgctggccatgaccgacgccggccagagcaccgaggaggtgcaggcccccctggccatgtgggaggccggcatccagcacatcgagctggagaagggcagcaagggcctgggcttcagcatcctggactaccaggaccccatcgaccccgccagcaccgtgatcatcatcagaagcctggtgcccggcggcatcgccgagaaggacggcagactgctgcccggcgacagactgatgttcgtgaacgacgtgaacctggagaacagcagcctggaggaggccgtggaggccctgaagggcgcccccagcggcaccgtgagaatcggcgtggccaagcccctgcccctgagccccgaggagggctacgtgagcgccaaggaggacagcttcctgtaccccccccacagctgcgaggaggccggcctggccgacaagcccctgttcagagccgacctggccctggtgggcaccaacgacgccgacctggtggacgagagcaccttcgagagcccctacagccccgagaacgacagcatctacagcacccaggccagcatcctgagcctgcacggcagcagctgcggcgacggcctgaactacggcagcagcctgcccagcagcccccccaaggacgtgatcgagaacagctgcgaccccgtgctggacctgcacatgagcctggaggagctgtacacccagaacctgctgcagagacaggacgagaacacccccagcgtggacatcagcatgggccccgccagcggcttcaccatcaacgactacacccccgccaacgccatcgagcagcagtacgagtgcgagaacaccatcgtgtggaccgagagccacctgcccagcgaggtgatcagcagcgccgagctgcccagcgtgctgcccgacagcgccggcaagggcagcgagtacctgctggagcagagcagcctggcctgcaacgccgagtgcgtgatgctgcagaacgtgagcaaggagagcttcgagagaaccatcaacatcgccaagggcaacagcagcctgggcatgaccgtgagcgccaacaaggacggcctgggcatgatcgtgagaagcatcatccacggcggcgccatcagcagagacggcagaatcgccatcggcgactgcatcctgagcatcaacgaggagagcaccatcagcgtgaccaacgcccaggccagagccatgctgagaagacacagcctgatcggccccgacatcaagatcacctacgtgcccgccgagcacctggaggagttcaagatcagcctgggccagcagagcggcagagtgatggccctggacatcttcagcagctacaccggcagagacatccccgagctgcccgagagagaggagggcgagggcgaggagagcgagctgcagaacaccgcctacagcaactggaaccagcccagaagagtggagctgtggagagagcccagcaagagcctgggcatcagcatcgtgggcggcagaggcatgggcagcagactgagcaacggcgaggtgatgagaggcatcttcatcaagcacgtgctggaggacagccccgccggcaagaacggcaccctgaagcccggcgacagaatcgtggaggtggacggcatggacctgagagacgccagccacgagcaggccgtggaggccatcagaaaggccggcaaccccgtggtgttcatggtgcagagcatcatcaacagacccagaaagagccccctgcccagcctgctgcacaacctgtaccccaagtacaacttcagcagcaccaaccccttcgccgacagcctgcagatcaacgccgacaaggcccccagccagagcgagagcgagcccgagaaggcccccctgtgcagcgtgcccccccccccccccagcgccttcgccgagatgggcagcgaccacacccagagcagcgccagcaagatcagccaggacgtggacaaggaggacgagttcggctacagctggaagaacatcagagagagatacggcaccctgaccggcgagctgcacatgatcgagctggagaagggccacagcggcctgggcctgagcctggccggcaacaaggacagaagcagaatgagcgtgttcatcgtgggcatcgaccccaacggcgccgccggcaaggacggcagactgcagatcgccgacgagctgctggagatcaacggccagatcctgtacggcagaagccaccagaacgccagcagcatcatcaagtgcgcccccagcaaggtgaagatcatcttcatcagaaacaaggacgccgtgaaccagatggccgtgtgccccggcaacgccgtggagcccctgcccagcaacagcgagaacctgcagaacaaggagaccgagcccaccgtgaccaccagcgacgccgccgtggacctgagcagcttcaagaacgtgcagcacctggagctgcccaaggaccagggcggcctgggcatcgccatcagcgaggaggacaccctgagcggcgtgatcatcaagagcctgaccgagcacggcgtggccgccaccgacggcagactgaaggtgggcgaccagatcctggccgtggacgacgagatcgtggtgggctaccccatcgagaagttcatcagcctgctgaagaccgccaagatgaccgtgaagctgaccatccacgccgagaaccccgacagccaggccgtgcccagcgccgccggcgccgccagcggcgagaagaagaacagcagccagagcctgatggtgccccagagcggcagccccgagcccgagagcatcagaaacaccagcagaagcagcacccccgccatcttcgccagcgaccccgccacctgccccatcatccccggctgcgagaccaccatcgagatcagcaagggcagaaccggcctgggcctgagcatcgtgggcggcagcgacaccctgctgggcgccatcatcatccacgaggtgtacgaggagggcgccgcctgcaaggacggcagactgtgggccggcgaccagatcctggaggtgaacggcatcgacctgagaaaggccacccacgacgaggccatcaacgtgctgagacagaccccccagagagtgagactgaccctgtacagagacgaggccccctacaaggaggaggaggtgtgcgacaccctgaccatcgagctgcagaagaagcccggcaagggcctgggcctgagcatcgtgggcaagagaaacgacaccggcgtgttcgtgagcgacatcgtgaagggcggcatcgccgacgccgacggcagactgatgcagggcgaccagatcctgatggtgaacggcgaggacgtgagaaacgccacccaggaggccgtggccgccctgctgaagtgcagcctgggcaccgtgaccctggaggtgggcagaatcaaggccggccccttccacagcgagagaagacccagccagagcagccaggtgagcgagggcagcctgagcagcttcaccttccccctgagcggcagcagcaccagcgagagcctggagagcagcagcaagaagaacgccctggccagcgagatccagggcctgagaaccgtggagatgaagaagggccccaccgacagcctgggcatcagcatcgccggcggcgtgggcagccccctgggcgacgtgcccatcttcatcgccatgatgcaccccaccggcgtggccgcccagacccagaagctgagagtgggcgacagaatcgtgaccatctgcggcaccagcaccgagggcatgacccacacccaggccgtgaacctgctgaagaacgccagcggcagcatcgagatgcaggtggtggccggcggcgacgtgagcgtggtgaccggccaccagcaggagcccgccagcagcagcctgagcttcaccggcctgaccagcagcagcatcttccaggacgacctgggccccccccagtgcaagagcatcaccctggagagaggccccgacggcctgggcttcagcatcgtgggcggctacggcagcccccacggcgacctgcccatctacgtgaagaccgtgttcgccaagggcgccgccagcgaggacggcagactgaagagaggcgaccagatcatcgccgtgaacggccagagcctggagggcgtgacccacgaggaggccgtggccatcctgaagagaaccaagggcaccgtgaccctgatggtgctgagctag

SEQ ID NO: 290609 - protein, 297 aa, Artificial Sequence
  derived and/or modified sequence
MAYQIVLELHFSHCAAMGAALLMLIENALITQSRLMLLESVLIFFNLLAVLSYLKFFNCQKHSPFSLSWWFWLTLTGVACSCAVGIKYMGVFTYVLVLGVAAVHAWHLLGDQTLSNVGADVQCCMRPACMGQMQMSQGVCVFCHLLARAVALLVIPVVLYLLFFYVHLILVFRSGPHDQIMSSAFQASLEGGLARITQGQPLEVAFGSQVTLRNVFGKPVPCWLHSHQDTYPMIYENGRGSSHQQQVTCYPFKDVNNWWIVKDPRRHQLVVSSPPRPVRHGDMVQLVHGMTTRSLNT

SEQ ID NO: 290610 - DNA, 942 bp, Artificial Sequence
  derived and/or modified sequence
atggccggacaaccaggacacatgccccacggcggaagctccaataacctgtgtcacacattggggcccgttcatccgccagacccccaaagacaccctaacacgctgagcttccggtgttcactggccgactttcagatcgaaaaaaagatcggtagaggtcaatttagcgaggtttacaaagccacttgcctgctggaccggaagaccgtggccctgaagaaggtccagatctttgagatgatggacgcaaaagcccgacaggattgcgtaaaggagatcggcctgctgaaacagctcaatcaccctaatatcataaagtatctggatagtttcatagaggacaatgagctgaacattgtcctcgagctggcagacgctggcgatctttcccaaatgattaagtattttaagaagcaaaaacgattaattcctgaaagaaccgtgtggaaatacttcgtacagctatgcagtgcggtggagcacatgcacagtagacgggttatgcatcgtgatatcaagcccgcgaacgttttcataaccgcgacgggcgtcgtgaagcttggagacctgggcctcggtagattcttcagctctgaaacaactgctgcgcatagtcttgttggtacaccatactatatgtcaccggagcggatccacgagaatggctacaatttcaaatcagatatctggtcacttggctgcttactctacgagatggccgcgctccagagtcctttctacggtgataagatgaaccttttttccctgtgtcagaaaatcgagcagtgtgactatccgccactgccaggcgagcattattccgagaaactgcgggaactggtctcaatgtgtatctgccccgatcctcaccagcgacccgatatcgggtatgttcaccaggtggcaaaacaaatgcatatttggatgagtagcacatag

SEQ ID NO: 290611 - DNA, 738 bp, Artificial Sequence
  derived and/or modified sequence
atggctggccagcctgggcatatgccacacgggggatctagtaacaacctgtgtcatactttagggcccgtccacccccctgatccacagcagctgaaccaccctaatataatcaagtacctagatagcttcattgaggataacgagttgaacattgtgctcgaattagctgacgccggggaccttagccagatgatcaaatattttaagaagcagaaacggctaatcccagagcggacggtgtggaagtacttcgtgcagctgtgcagcgccgttgaacacatgcactctcgccgggtaatgcaccgggacattaagcccgccaacgtgtttataactgccaccggggtcgtgaagctcggcgaccttgggttgggaagatttttctcgagcgaaaccactgctgctcacagtcttgtaggcacgccctactacatgtcgccggaacggatacatgaaaatggttataatttcaaaagcgatatctggtccctgggatgcctgctgtatgagatggccgcactccaatctcctttttacggagacaaaatgaatctcttctctctttgccagaagatcgagcaatgtgactatcctccattgcccggcgagcattactccgagaagctgcgggagctggtatccatgtgcatctgccctgatccccaccagaggccagatattggctatgttcaccaggtggccaagcaaatgcacatttggatgagctccacttag

SEQ ID NO: 290612 - DNA, 942 bp, Artificial Sequence
  derived and/or modified sequence
atggctggccagcccggtcacatgccccacggagggagttcaaataacctatgccatactctgggccccgtgcaccctccggacccacaacggcaccccaacactctgtcatttcgatgtagtcttgcagacttccagatagagaaaaagatcggacgcggccagttttctgaagtctacaaggccacatgcctgctggatcggaaaaccgtggctctgaagaaggtgcagatatttgagatgatggacgcaaaggctcgacaggattgtgtgaaggagatcggacttctgaagcagctgaaccatccaaacatcattaaatacttagactcctttattgaagataatgagctaaacattgtgctggagctggccgatgccggcgatctgtcgcagatgatcaaatattttaagaagcagaagcggctgatcccagaacggacggtctggaaatatttcgttcagctgtgttcagcggtggaacacatgcacagccggcgcgtcatgcaccgagacattaaacccgccaatgtctttatcaccgcaacgggcgtcgttaaactgggtgatctgggtctgggtcggttctttagcagcgaaacgactgccgcgcactctcttgtgggtacaccctattatatgtcgcccgagcgaatccacgagaatggatacaactttaaatcagacatatggagcctgggatgtctgctgtacgagatggccgccctgcagtcgcctttttacggtgataaaatgaatttgtttagcttatgtcagaagattgagcagtgcgactacccccctctcccgggtgagcactacagcgagaaactgagagagctcgtttctatgtgcatatgccctgatcctcatcagaggccagatatcggctacgtgcatcaagtcgcgaaacagatgcacatctggatgagttcaacatag

SEQ ID NO: 290613 - DNA, 942 bp, Artificial Sequence
  derived and/or modified sequence
atggccggccagcccggccatatgccccacggtggttcttcaaataatctctgccacacgttgggaccggtccacccacccgaccctcagagacatcctaatacactttccttcaggtgcagcctggccgattttcagatcgaaaagaagatcgggcgagggcaattttcggaggtgtacaaggccacttgcctgcttgaccgtaagactgtggccctgaagaaagtgcagatcttcgaaatgatggacgccaaagcccgtcaggactgcgtgaaagagataggactgctgaagcaattaaaccatcccaacatcattaagtacctggattcattcatcgaagacaatgagctcaatattgtgctggaacttgccgacgccggggacctgtcccagatgataaagtatttcaagaagcagaaacgactgataccggagagaactgtgtggaagtactttgttcagctttgttctgcagtcgagcacatgcactccagacgggtaatgcatcgcgacataaagccagccaacgtgttcataaccgccactggggtggtgaagctcggggaccttggactaggccgatttttctcctcagagaccaccgcagcccactcactcgtgggtacgccttactatatgagccccgagcgcattcatgagaacggatacaacttcaaatctgacatttggtccctgggatgcctgctctatgagatggccgcgttgcagagcccattctacggcgacaagatgaatctctttagtctctgccagaagatcgaacagtgtgactacccccctctgcctggcgagcattatagcgaaaaactccgggagcttgtttcaatgtgtatatgtcctgatccacatcagagacctgacatcggctacgtgcatcaagttgctaagcaaatgcacatctggatgagcagtacatag

SEQ ID NO: 290614 - DNA, 942 bp, Artificial Sequence
  derived and/or modified sequence
atggccggacagcctgggcacatgcctcacggaggaagttccaataacctttgtcacaccctggggcccgttcatccaccagatccacagcggcacccgaacaccctttccttcagatgttcactggccgactttcaaattgaaaaaaagatcggacgcgggcagttctccgaggtgtataaagctacatgcctattggaccgcaaaaccgtggcactgaagaaggtgcagattttcgagatgatggacgccaaagccaggcaggactgcgtgaaagaaatcggactgctgaaacagctgaaccaccccaatataattaagtatcttgacagcttcattgaagacaatgagctgaatattgtcttggaactcgccgacgccggagatttatcacagatgattaaatattttaagaagcaaaagaggctgatccctgagaggaccgtctggaaatattttgtacagctgtgctctgccgtcgagcacatgcacagtaggcgggtaatgcatcgcgatattaaaccggctaatgttttcattacagcaaccggagtggtgaagcttggcgacctcggcctgggccgattcttcagtagtgagaccaccgccgcgcattccttggtcggcaccccatattatatgagtcctgagcggattcacgagaacggatacaacttcaaaagtgacatctggtccctcggttgcctcctgtatgaaatggctgctctgcagtcacctttttatggggataagatgaatctgttctccctatgtcagaaaattgagcagtgtgactatccgcccttgccaggtgagcattatagcgaaaaactgagggaactggtgagtatgtgcatttgtcccgatccccaccaaaggccggatataggctatgtgcaccaggtcgctaagcagatgcacatttggatgagcagcacctag

SEQ ID NO: 290615 - DNA, 942 bp, Artificial Sequence
  derived and/or modified sequence
atggccggccagcccggccacatgccccacggcggcagcagcaacaacctgtgccacaccctgggccctgtgcaccccccagacccccagaggcaccccaacaccctgtccttccgctgcagcctggccgacttccagatcgagaagaagattggccggggccagttcagcgaggtgtacaaggccacctgcctgctggacaggaagacagtggccctgaagaaggtgcagatctttgagatgatggatgccaaggcccggcaggactgtgtgaaggagatcggcctgctgaagcagctgaaccaccccaacatcatcaagtacctggacagcttcatcgaggacaatgagctgaacatcgtgctggagctggctgatgctggggacctgagccagatgatcaagtacttcaagaagcagaagaggctcatccctgagaggacagtgtggaagtactttgtgcagctgtgcagcgctgtggagcacatgcacagccggcgggtgatgcaccgggacatcaagccagccaacgtgttcatcacagccactggagtggtgaagctgggggacctgggcctgggccgcttcttcagcagcgagaccacagctgcccacagcctggtgggcaccccctactacatgagccctgagcgcatccatgaaaatggctacaacttcaagagtgacatctggagcctgggctgcctgctgtatgagatggccgccctgcagagccccttctacggggacaagatgaacctcttcagcctgtgccagaagattgagcagtgtgactacccacccctgcccggggagcactacagcgagaagctgcgggagctggtgtccatgtgcatctgcccagacccccaccagaggccagacatcggctacgtgcaccaggtggccaagcagatgcacatctggatgagcagcacctag

SEQ ID NO: 290616 - DNA, 738 bp, Artificial Sequence
  derived and/or modified sequence
atggccggccagcccggccacatgccccacggcggcagcagcaacaacctgtgccacaccctgggccctgtgcaccccccagacccccagcagctgaaccaccccaacatcatcaagtacctggacagcttcatcgaggacaatgagctgaacatcgtgctggagctggctgatgctggggacctgagccagatgatcaagtacttcaagaagcagaagaggctcatccctgagaggacagtgtggaagtactttgtgcagctgtgcagcgctgtggagcacatgcacagccggcgggtgatgcaccgggacatcaagccagccaacgtgttcatcacagccactggagtggtgaagctgggggacctgggcctgggccgcttcttcagcagcgagaccacagctgcccacagcctggtgggcaccccctactacatgagccctgagcgcatccatgaaaatggctacaacttcaagagtgacatctggagcctgggctgcctgctgtatgagatggccgccctgcagagccccttctacggggacaagatgaacctcttcagcctgtgccagaagattgagcagtgtgactacccacccctgcccggggagcactacagcgagaagctgcgggagctggtgtccatgtgcatctgcccagacccccaccagaggccagacatcggctacgtgcaccaggtggccaagcagatgcacatctggatgagcagcacctag

SEQ ID NO: 290617 - DNA, 942 bp, Artificial Sequence
  derived and/or modified sequence
atggccggccagcccggccacatgccccacggcggcagcagcaacaacctgtgtcacacattaggccctgttcaccctccagatcctcagcgccatccaaatacgctgtcattcaggtgcagcctggcagacttccagatcgaaaagaagatcgggcggggacagtttagcgaggtgtataaggcaacctgcctactggatagaaaaactgtcgccctgaaaaaagtacagattttcgagatgatggacgcaaaggctaggcaagattgtgtgaaggaaatcggtttgcttaagcagcttaaccacccgaatattattaagtatcttgattccttcatagaggataacgaactcaacatagtgctggaactggctgacgcaggcgacctgtcccagatgattaaatattttaaaaaacaaaagcgcctgattccggaacggaccgtctggaaatactttgtgcagctgtgcagtgcagtggaacatatgcactctcgaagagtgatgcatagagatatcaagccagccaacgtgtttataacagccaccggcgtcgtgaaactgggagatctgggtctcgggaggtttttctcatcagaaaccacagcggcccactcactggtcggcaccccttactatatgagtcccgaacgcattcacgagaacggctataacttcaagtccgatatttggagcctggggtgtctgctgtatgaaatggccgccctacagtcaccattctatggagacaagatgaatctgttctcattatgtcagaagatcgagcaatgtgattatcctccattgcctggcgaacactatagtgagaaactgagagagctggtttctatgtgcatctgccccgacccccatcaacgacctgacatcggctacgtccatcaggttgccaagcagatgcatatctggatgtccagtacttag

SEQ ID NO: 290618 - DNA, 738 bp, Artificial Sequence
  derived and/or modified sequence
atggccggccagcccggccacatgccccacggcggcagcagcaacaacttgtgccataccctgggtcctgtccaccctccagaccctcagcaactcaatcaccctaatattatcaaatatctggatagtttcatcgaagacaacgaactcaacattgtgttggagctcgccgacgctggcgatctttcgcaaatgatcaaatatttcaaaaaacagaagagactgatacctgaaaggaccgtctggaagtattttgtgcagctgtgctctgctgtggagcacatgcactcaaggcgtgtgatgcacagagatattaaaccagccaacgttttcatcactgcaaccggcgtggtgaagctgggggacctaggcctgggaagatttttctctagcgagacaacagctgcacattccctggtgggaactccttattacatgtctccagagcgcattcacgaaaatggctacaacttcaaatcggatatctggagtctggggtgtctgctgtacgagatggcagcgctgcaatcacccttctatggcgataaaatgaacctcttttccctgtgtcagaaaatcgaacagtgcgactatcccccgttacccggggaacactactccgagaagctgagggagttggtgagcatgtgcatatgccccgacccgcaccagaggcccgacattgggtatgttcatcaggtggcaaagcagatgcatatctggatgagctctacttag

SEQ ID NO: 290619 - DNA, 942 bp, Artificial Sequence
  derived and/or modified sequence
atggccggccagcccggccacatgccccacggcggcagcagcaacaacttgtgccacactttgggacccgtacatccgccggacccacagaggcacccaaataccctgagttttaggtgctccctagcagacttccagattgaaaaaaaaataggtaggggtcagtttagcgaggtctacaaggccacatgccttctggacaggaaaactgtggcactcaaaaaagttcaaatattcgaaatgatggacgcaaaggcgcggcaagactgtgtgaaggagattggtctgcttaaacaacttaatcaccccaacatcatcaaatatctggattcattcatcgaggataatgagttgaacatcgtgctggagctggcggatgcaggcgatctttcgcagatgattaagtacttcaagaagcagaagcgtttgatccccgagagaaccgtgtggaaatacttcgtgcagctatgctctgctgttgagcacatgcattcaaggcgtgtcatgcatagagatattaagccggctaatgtctttatcacagccactggggtcgtgaagctgggcgatctcggtctgggtcgctttttcagttcagaaacaacagccgcgcacagccttgtcgggaccccctattacatgagccccgaaagaatacacgagaatgggtacaactttaagtccgacatatggtccctcgggtgtttgctttatgagatggccgccctccagagccccttttatggggataaaatgaacctgttttccctgtgtcagaagattgagcaatgtgactatcctccccttcctggggagcactacagcgagaagcttagagaactcgtcagcatgtgcatttgtccggaccctcaccagcgcccagacatcggctacgtccaccaggtcgcaaagcagatgcatatttggatgtcctccacttag

SEQ ID NO: 290620 - DNA, 942 bp, Artificial Sequence
  derived and/or modified sequence
atggccggccagcccggccacatgccccacggcggcagcagcaacaatctgtgtcacacacttgggccagtgcatccacccgatcctcagcgccaccccaacaccctcagcttcaggtgctccctggccgatttccaaatagagaaaaagatcggccgaggccaattcagcgaggtttataaggctacctgtctactcgacaggaagaccgtcgcacttaagaaggtgcagatctttgagatgatggatgctaaggcccggcaggactgtgtgaaagaaatcggcctcctcaaacaactgaaccacccgaacattatcaaatacttggatagcttcatcgaggacaatgagctgaacattgtcctggagttggctgacgccggtgacctgagtcagatgataaaatacttcaaaaagcagaaacgattaatcccggaacgcacagtgtggaaatattttgttcagctgtgtagcgctgttgagcatatgcacagccggcgagtaatgcacagggacattaaacctgctaatgttttcatcactgccacaggcgtggttaagctgggggatctgggtctgggccgcttcttctcttcagagacgactgctgcacattccctcgtcggtacgccttactacatgagcccagagaggatccacgagaatgggtacaactttaagtctgacatctggagcctggggtgcctactctacgagatggctgccctgcagtccccgttctatggggataaaatgaacctctttagcttgtgccagaaaattgagcagtgcgattaccctccactgccaggagaacactattccgagaagctgcgcgagttggtgtccatgtgcatctgtccagacccacaccagagaccagacatcggatatgtccatcaggtggcgaagcagatgcacatttggatgagttccacttag

SEQ ID NO: 290621 - DNA, 942 bp, Artificial Sequence
  derived and/or modified sequence
atggccggccagcccggccacatgccccacggcggcagcagcaacaatctttgtcataccctcggccccgttcacccccccgacccacagcgccaccctaacacactgtcctttcgctgctctctcgccgacttccagatcgaaaaaaagatcggccgcggacaatttagcgaggtctacaaggccacttgcctgttagatcggaaaacggtcgcactgaaaaaggtgcaaattttcgaaatgatggacgctaaggcccgccaggactgtgtgaaggaaatcggccttctgaaacaattgaatcatcccaatatcatcaagtatctggacagtttcattgaggacaatgagttaaacatcgttttagagctggctgacgcaggcgacctgagccagatgataaagtacttcaagaaacagaaacggcttatacctgaacgaacagtttggaagtacttcgtgcagctgtgcagtgcagtggaacatatgcattcccgtcgtgtgatgcacagggacataaaacccgcgaatgtgttcatcaccgccaccggtgtcgtgaaactcggagacttgggtctcggaaggttcttttcaagtgagacaaccgccgcccacagcctggtggggactccatactacatgtcccctgagcggatccacgaaaacggatacaatttcaaatcagatatatggtctctcgggtgcctgctgtacgagatggccgctctgcaatcaccgttctacggagataagatgaacctttttagcttgtgccaaaagatcgagcagtgcgattaccctccacttcctggggagcactattccgagaagttgcgcgaattagtctccatgtgtatttgccctgacccacaccagaggccagacattggctatgtccaccaggtagcgaaacaaatgcatatttggatgtcctctacatag

SEQ ID NO: 290622 - DNA, 3447 bp, Artificial Sequence
  derived and/or modified sequence
ccgagctgacgggcgtgcggccgctgcgccgcaaactcgtgtgggacgcaccgctccagccgcccgcgggccagcgcaccggtcccccagcggcagccgagcccgcccgcgcgccgttcgtgccctcgtgaggctggcatgcaggatggcaggacagcccggccacatgccccatggagggagttccaacaacctctgccacaccctggggcctgtgcatcctcctgacccacagaggcatcccaacacgctgtcttttcgctgctcgctggcggacttccagatcgaaaagaagataggccgaggacagttcagcgaggtgtacaaggccacctgcctgctggacaggaagacagtggctctgaagaaggtgcagatctttgagatgatggacgccaaggcgaggcaggactgtgtcaaggagatcggcctcttgaagcaactgaaccacccaaatatcatcaagtatttggactcgtttatcgaagacaacgagctgaacattgtgctggagttggctgacgcaggggacctctcgcagatgatcaagtactttaagaagcagaagcggctcatcccggagaggacagtatggaagtactttgtgcagctgtgcagcgccgtggagcacatgcattcacgccgggtgatgcaccgagacatcaagcctgccaacgtgttcatcacagccacgggcgtcgtgaagctcggtgaccttggtctgggccgcttcttcagctctgagaccaccgcagcccactccctagtggggacgccctactacatgtcaccggagaggatccatgagaacggctacaacttcaagtccgacatctggtccctgggctgtctgctgtacgagatggcagccctccagagccccttctatggagataagatgaatctcttctccctgtgccagaagatcgagcagtgtgactaccccccactccccggggagcactactccgagaagttacgagaactggtcagcatgtgcatctgccctgacccccaccagagacctgacatcggatacgtgcaccaggtggccaagcagatgcacatctggatgtccagcacctgagcgtggatgcaccgtgccttatcaaagccagcaccactttgccttacttgagtcgtcttctcttcgagtggccacctggtagcctagaacagctaagaccacagggttcagcaggttccccaaaaggctgcccagccttacagcagatgctgaaggcagagcagctgagggaggggcgctggccacatgtcactgatggtcagattccaaagtcctttctttatactgttgtggacaatctcagctgggtcaataagggcaggtggttcagcgagccacggcagccccctgtatctggattgtaatgtgaatctttagggtaattcctccagtgacctgtcaaggcttatgctaacaggagacttgcaggagaccgtgtgatttgtgtagtgagcctttgaaaatggttagtaccgggttcagtttagttcttagtatcttttcaatcaagctgtgtgcttaatttactctgttgtaaagggataaagtggaaatcatttttttccgtggagtggtgattctgctaacatttttatctacgttttataacttggtgagtgacgatgagagccctgcacctggccagagtgtcacaggcaaaaggcatcgggaagcaggagcatcttcttggcagccaggctgggccatcttctcctggacacctgctgtgtaccaggaacttcgtcacctccttgaatgctggcggttcatttcatgatcagtgttaagcattttcctccatgggaaggaagcatgggatatagaaaagcgaagggctgtcctttacaaattctggttctgcaacttcctagcgtgactttgggcttgggcaagtttcttagccgttctgagccttcatttcctcatctgtacaatgagattaatagtacctatcatctaccttcaggattgctgacagacagaatttgaaataaaatatgcaagttagctaatacaaaaagtagatgatccaaaaatggtagccactcacccttcacaaactgaagtccatggaccacggaagtcgagaattaatgtacacctgtatcatgtgtaggaaaccagaaatgtgttccttatttcttgttcccaaacaggattaactgtgaagactaatttataaatgtgaacctaagaaaactccacctctgaaggaaatcatttgaattttgtttttgtacgtaaagttaaccttccaattgtctgagctgtcgtcactgacttcatgacagtctggccctccagacaagagcagcgctggcatcgggcaggtgattcctgacacctgctgcctgcaggcattcactgaccaggcctttcctggaggaaacacccagggccgggcggctgctgtttccacacgtggactcggatctgctgtgacaccgtcagcccgacagtctctccatatgcagcctttcctctgtacttttctccatggttgaaataaaacagggtgactgggagttacttagaattcatgaagattttaaaatggctttggagattttgcttttaaaccagtagattcaaaacttaaacagcgtctgcagcacaatttcttgaggaaccttgaaaaacacaacttcccaggccccattcagtaatcccaggatttctttaagctccccaaataattttgaaactcatcatcagccgagtttctgccctcatgaggtaattccatcgttctccccagcctgcccctggcagctgtaacacaggagctggcctgagagcagattcaccctggaatgttctctccacagaacaatcaagtccctgtcgcctgcctagtgcttaccactgaagatttttctgattccagaccaactttttgccaacattctgcttccagctctctgagcccctgccgtgtctccccaacactgccagccccagcacgcaatcaacctactttgtgcatgccacccgctttccacactgtgagaacaatctgcccaactggaccctctggaggcgcacgatctcagccactcaccaggcctgagtgtttgtgaaatgatcatgtcctacttattacaaaaccgtaaccccaaaacattccttttatttctgtgaaaccggccaaagtgaggtccacccaccttcacacagctctggcggtgcacctgctcaccttctcttggttctcagaactgagctgggcttgagaacacagctttggctttgccatttttttcctacttggctgctgaggtggagggtgtgctgcacttatcaccccatttcaaaaccaaaccaaacctgaggccaccccaaacaaattcagccagcaaaaagggtaggtatcgatggtcacctgaagcctcaagggagtccactctgacttctgacag

SEQ ID NO: 290623 - DNA, 2374 bp, Artificial Sequence
  derived and/or modified sequence
ccgagctgacgggcgtgcggccgctgcgccgcaaactcgtgtgggacgcaccgctccagccgcccgcgggccagcgcaccggtcccccagcggcagccgagcccgcccgcgcgccgttcgtgccctcgtgaggctggcatgcaggatggcaggacagcccggccacatgccccatggagggagttccaacaacctctgccacaccctggggcctgtgcatcctcctgacccacagcaactgaaccacccaaatatcatcaagtatttggactcgtttatcgaagacaacgagctgaacattgtgctggagttggctgacgcaggggacctctcgcagatgatcaagtactttaagaagcagaagcggctcatcccggagaggacagtatggaagtactttgtgcagctgtgcagcgccgtggagcacatgcattcacgccgggtgatgcaccgagacatcaagcctgccaacgtgttcatcacagccacgggcgtcgtgaagctcggtgaccttggtctgggccgcttcttcagctctgagaccaccgcagcccactccctagtggggacgccctactacatgtcaccggagaggatccatgagaacggctacaacttcaagtccgacatctggtccctgggctgtctgctgtacgagatggcagccctccagagccccttctatggagataagatgaatctcttctccctgtgccagaagatcgagcagtgtgactaccccccactccccggggagcactactccgagaagttacgagaactggtcagcatgtgcatctgccctgacccccaccagagacctgacatcggatacgtgcaccaggtggccaagcagatgcacatctggatgtccagcacctgagcgtggatgcaccgtgccttatcaaagccagcaccactttgccttacttgagtcgtcttctcttcgagtggccacctggtagcctagaacagctaagaccacagggttcagcaggttccccaaaaggctgcccagccttacagcagatgctgaaggcagagcagctgagggaggggcgctggccacatgtcactgatggtcagattccaaagtcctttctttatactgttgtggacaatctcagctgggtcaataagggcaggtggttcagcgagccacggcagccccctgtatctggattgtaatgtgaatctttagggtaattcctccagtgacctgtcaaggcttatgctaacaggagacttgcaggagaccgtgtgatttgtgtagtgagcctttgaaaatggttagtaccgggttcagtttagttcttagtatcttttcaatcaagctgtgtgcttaatttactctgttgtaaagggataaagtggaaatcatttttttccgtggagtggtgattctgctaacatttttatctacgttttataacttggtgagtgacgatgagagccctgcacctggccagagtgtcacaggcaaaaggcatcgggaagcaggagcatcttcttggcagccaggctgggccatcttctcctggacacctgctgtgtaccaggaacttcgtcacctccttgaatgctggcggttcatttcatgatcagtgttaagcattttcctccatgggaaggaagcatgggatatagaaaagcgaagggctgtcctttacaaattctggttctgcaacttcctagcgtgactttgggcttgggcaagtttcttagccgttctgagccttcatttcctcatctgtacaatgagattaatagtacctatcatctaccttcaggattgctgacagacagaatttgaaataaaatatgcaagttagctaatacaaaaagtagatgatccaaaaatggtagccactcacccttcacaaactgaagtccatggaccacggaagtcgagaattaatgtacacctgtatcatgtgtaggaaaccagaaatgtgttccttatttcttgttcccaaacaggattaactgtgaagactaatttataaatgtgaacctaagaaaactccacctctgaaggaaatcatttgaattttgtttttgtacgtaaagttaaccttccaattgtctgagctgtcgtcactgacttcatgacagtctggccctccagacaagagcagcgctggcatcgggcaggtgattcctgacacctgctgcctgcaggcattcactgaccaggcctttcctggaggaaacacccagggccgggcggctgctgtttccacacgtggactcggatctgctgtgacaccgtcagcccgacagtctctccatatgcagcctttcctctgtacttttctccatggttgaaataaaacagggtgactgggagttacttagaattcatgaagatttt

SEQ ID NO: 290624 - DNA, 942 bp, Artificial Sequence
  derived and/or modified sequence
atggcgggacaaccgggacatatgcctcacgggggaagctcgaacaacctgtgccacaccctgggtccagtgcatccaccggacccccagaggcacccaaacaccctgagctttagatgcagtttggcggactttcagatagagaaaaaaattggccgagggcaatttagcgaagtctataaggccacctgcctacttgatcgaaagactgttgccctgaagaaggtacagatattcgagatgatggatgctaaggcgagacaggattgcgtgaaggagatcggcctgctgaaacagctcaaccatccgaacattatcaagtacctcgatagctttatagaagacaatgagctgaatattgtcctggagctagcagacgcaggcgatctgagtcaaatgatcaagtacttcaaaaagcagaaaaggctgatcccagaacggactgtctggaagtacttcgtgcagttatgctctgctgtcgaacacatgcactctcggagggtgatgcatcgggacatcaaacctgccaatgtattcataacagccacaggggtagtgaagttgggcgatcttggactgggaaggttcttctcatccgaaacgacagccgcacactcactggtgggcacaccctactatatgtcacccgagaggatccacgaaaatggctataacttcaagtccgatatatggagtcttggatgtcttctttacgagatggccgctttgcaatcccccttctatggtgacaagatgaacctcttctccctatgccagaagatagagcagtgtgactaccctcctctgcctggggaacactactccgaaaagttaagggagctggtgagtatgtgcatttgccccgacccccaccaacgtcctgatatcggctatgttcatcaagtcgctaagcaaatgcacatatggatgagttccacttag

SEQ ID NO: 290625 - DNA, 738 bp, Artificial Sequence
  derived and/or modified sequence
atggctggccagcccggacacatgccgcacggcggtagctcaaataacttgtgccacacactgggaccggtccatcccccagatccgcaacaactaaatcacccaaacatcatcaaatatctggatagttttattgaggacaacgagctcaacatagtgctggagctagcggacgcgggtgatctgtctcagatgattaagtatttcaagaagcaaaaacgtcttatccccgagcgcacagtgtggaaatattttgtgcagctgtgctctgctgtggagcacatgcatagcagaagggtgatgcacagggatattaaaccagcaaacgtctttattactgccacaggcgtcgttaaactcggagatctgggcctaggtagattcttttcttccgaaaccacagccgcacactccctggtgggcaccccatactacatgagtccggaaaggatccacgagaacggctacaatttcaagagcgacatttggagtctagggtgcctcctctatgagatggcggctttgcaaagcccattttatggcgacaaaatgaatttattttcactgtgccagaagatcgaacaatgtgattatcctccgttgcctggggaacactacagcgagaaactgcgggagttagtgagtatgtgtatctgcccagacccccatcaacgcccagacatagggtacgtgcatcaagtggccaaacaaatgcatatctggatgtcttccacctag

SEQ ID NO: 290626 - DNA, 942 bp, Artificial Sequence
  derived and/or modified sequence
atggcaggacagcccggtcacatgcctcacggcggtagctccaacaatctgtgccatactttaggccctgtgcatccccctgacccccagcgtcatccgaacacacttagtttccggtgtagcttagcagactttcaaatcgagaaaaaaattggtagaggccagtttagcgaggtgtacaaggccacctgtctgctcgacagaaagactgtcgccctgaagaaggtgcagatattcgagatgatggacgcgaaggccagacaggactgcgttaaggaaatagggctgttgaagcagctgaatcacccaaatataatcaagtatcttgatagctttatagaagataatgagttgaacatcgtcttagagctagccgacgctggtgacctttcacagatgatcaaatatttcaaaaaacagaagagactcattcctgagagaactgtctggaagtattttgtgcaactatgcagcgcagtggagcacatgcattcccggagggttatgcacagggacattaagcctgccaatgtgtttatcacggcaacaggcgtggtaaagcttggagacctcggactaggacggttcttctcatccgagactacagcagcacattctctggtggggacaccatattacatgtctcctgagagaatccatgagaacggctacaactttaaatccgacatctggtctctgggttgccttctgtatgagatggcggcattgcagtcccccttctatggtgacaagatgaatttattttcgctatgtcaaaaaattgagcaatgtgactaccctcctttgcccggagagcactatagcgaaaaactgcgcgaactggtctctatgtgtatctgccccgacccacatcagcgtcctgacatcggctatgttcatcaggtggctaaacagatgcacatttggatgtctagcacatag

SEQ ID NO: 290627 - DNA, 942 bp, Artificial Sequence
  derived and/or modified sequence
atggcaggtcaacctggacacatgccccatggcggatccagtaacaacctctgtcacaccctgggcccagtacacccccctgatcctcagcgtcaccctaatacgttgtcttttaggtgcagtctcgccgacttccaaatcgaaaagaagattggcagggggcagttctctgaggtatacaaagcaacatgtttactcgatcgcaagacagtcgccctgaagaaggtgcagatttttgagatgatggacgccaaggctaggcaagactgcgttaaagagatcgggctgctgaagcagctcaaccatcccaatatcattaagtatctagacagctttatcgaagacaacgagttaaacatcgtcctggaattagctgacgctggggatctgtcccagatgattaaatacttcaagaaacagaagagactcatccccgagcgtacggtgtggaagtacttcgtacaactctgctccgcagtcgagcacatgcactcaaggcgggtgatgcatcgggatatcaagccggctaacgtcttcataaccgctaccggcgtcgtcaaactgggggacctgggcctcggcaggttctttagctccgagaccacagccgctcattccttggtaggaactccctactatatgtcccccgagcgcattcatgagaacgggtacaacttcaagtcagatatatggtcactggggtgtctgctgtatgaaatggctgctttgcagtccccattctatggagataaaatgaacctcttctccctttgtcagaagatcgagcagtgtgattatcccccactaccgggagaacattattctgagaaacttagagagctggtgtcaatgtgcatttgtcccgacccccaccagcgacctgacatcggatatgttcatcaggtcgcaaagcaaatgcatatttggatgtccagtacatag

SEQ ID NO: 290628 - DNA, 942 bp, Artificial Sequence
  derived and/or modified sequence
atggccggacagcccggacatatgccccatggcggttctagcaacaacctgtgccacacgctggggcctgtgcacccaccggatccccagcgacaccctaacaccctctccttcaggtgtagtctcgctgatttccaaatcgagaaaaagattggcaggggacagttttccgaggtctacaaagcaacctgcctcttagacaggaagactgtggccttgaagaaagtgcagatcttcgagatgatggacgccaaggcaaggcaggactgtgtcaaagagattggcctccttaagcaactgaaccacccgaatattatcaagtatttagattcgttcatcgaggacaatgagctcaatatagtgctcgagttagccgacgctggagatctgagtcaaatgatcaaatacttcaaaaaacagaagagacttataccagaacgaacggtgtggaagtatttcgtacaactgtgctccgctgtggaacatatgcattccagacgcgttatgcatagagatatcaagcctgcgaacgtgtttataaccgccacgggggtcgtgaaactgggagacctgggtctgggacgattcttttcatccgagacgaccgccgcacactctctggtggggactccctactatatgtcccccgagaggatccacgaaaatggctacaacttcaagtccgacatttggtccctaggttgtctgctttatgagatggccgctctgcaatctccattctacggagataagatgaacctattcagcttgtgccagaagatcgagcagtgcgactacccccctctgcctggcgagcactattccgagaaactgagggagttggtatctatgtgtatttgcccagaccctcaccagcggcctgacattggatatgtgcatcaggtggccaaacaaatgcatatttggatgtcttcaacatag

SEQ ID NO: 290629 - DNA, 942 bp, Artificial Sequence
  derived and/or modified sequence
atggccggccagcccggccacatgccccacggcggcagcagcaacaacctgtgccacaccctgggccccgtgcacccccccgacccccagagacaccccaacaccctgagcttcagatgcagcctggccgacttccagatcgagaagaagatcggcagaggccagttcagcgaggtgtacaaggccacctgcctgctggacagaaagaccgtggccctgaagaaggtgcagatcttcgagatgatggacgccaaggccagacaggactgcgtgaaggagatcggcctgctgaagcagctgaaccaccccaacatcatcaagtacctggacagcttcatcgaggacaacgagctgaacatcgtgctggagctggccgacgccggcgacctgagccagatgatcaagtacttcaagaagcagaagagactgatccccgagagaaccgtgtggaagtacttcgtgcagctgtgcagcgccgtggagcacatgcacagcagaagagtgatgcacagagacatcaagcccgccaacgtgttcatcaccgccaccggcgtggtgaagctgggcgacctgggcctgggcagattcttcagcagcgagaccaccgccgcccacagcctggtgggcaccccctactacatgagccccgagagaatccacgagaacggctacaacttcaagagcgacatctggagcctgggctgcctgctgtacgagatggccgccctgcagagccccttctacggcgacaagatgaacctgttcagcctgtgccagaagatcgagcagtgcgactacccccccctgcccggcgagcactacagcgagaagctgagagagctggtgagcatgtgcatctgccccgacccccaccagagacccgacatcggctacgtgcaccaggtggccaagcagatgcacatctggatgagcagcacctag

SEQ ID NO: 290630 - DNA, 738 bp, Artificial Sequence
  derived and/or modified sequence
atggccggccagcccggccacatgccccacggcggcagcagcaacaacctgtgccacaccctgggccccgtgcacccccccgacccccagcagctgaaccaccccaacatcatcaagtacctggacagcttcatcgaggacaacgagctgaacatcgtgctggagctggccgacgccggcgacctgagccagatgatcaagtacttcaagaagcagaagagactgatccccgagagaaccgtgtggaagtacttcgtgcagctgtgcagcgccgtggagcacatgcacagcagaagagtgatgcacagagacatcaagcccgccaacgtgttcatcaccgccaccggcgtggtgaagctgggcgacctgggcctgggcagattcttcagcagcgagaccaccgccgcccacagcctggtgggcaccccctactacatgagccccgagagaatccacgagaacggctacaacttcaagagcgacatctggagcctgggctgcctgctgtacgagatggccgccctgcagagccccttctacggcgacaagatgaacctgttcagcctgtgccagaagatcgagcagtgcgactacccccccctgcccggcgagcactacagcgagaagctgagagagctggtgagcatgtgcatctgccccgacccccaccagagacccgacatcggctacgtgcaccaggtggccaagcagatgcacatctggatgagcagcacctag

SEQ ID NO: 290631 - DNA, 2628 bp, Artificial Sequence
  derived and/or modified sequence
atgatgtacaccgtgctgcccgacggcagccccgtgccccagggcatggccctgtacgccccccccccccccctgcccaacaacagcagacccctgacccccggcaccgtggtgtacggccccccccccgccggcgcccccatggtgtacggcccccccccccccaacttcagcatccccttcatccccatgggcgtgctgcactgcaacgtgcccgagcaccacaacctggagaacgaggtgagcagactggaggacatcatgcagcacctgaagagcaagaagagagaggagagatggatgagagccagcaagagacagagcgagaaggagatggaggagctgcaccacaacatcgacgacctgctgcaggagaagaagagcctggagtgcgaggtggaggagctgcacagaaccgtgcagaagagacagcagcagaaggacttcatcgacggcaacgtggagagcctgatgaccgagctggagatcgagaagagcctgaagcaccacgaggacatcgtggacgagatcgagtgcatcgagaagaccctgctgaagagaagaagcgagctgagagaggccgacagactgctggccgaggccgagagcgagctgagctgcaccaaggagaagaccaagaacgccgtggagaagttcaccgacgccaagagaagcctgctgcagaccgagagcgacgccgaggagctggagagaagagcccaggagaccgccgtgaacctggtgaaggccgaccagcagctgagaagcctgcaggccgacgccaaggacctggagcagcacaagatcaagcaggaggagatcctgaaggagatcaacaagatcgtggccgccaaggacagcgacttccagtgcctgagcaagaagaaggagaagctgaccgaggagctgcagaagctgcagaaggacatcgagatggccgagagaaacgaggaccaccacctgcaggtgctgaaggagagcgaggtgctgctgcaggccaagagagccgagctggagaagctgaagagccaggtgaccagccagcagcaggagatggccgtgctggacagacagctgggccacaagaaggaggagctgcacctgctgcagggcagcatggtgcaggccaaggccgacctgcaggaggccctgagactgggcgagaccgaggtgaccgagaagtgcaaccacatcagagaggtgaagagcctgctggaggagctgagcttccagaagggcgagctgaacgtgcagatcagcgagagaaagacccagctgaccctgatcaagcaggagatcgagaaggaggaggagaacctgcaggtggtgctgagacagatgagcaagcacaagaccgagctgaagaacatcctggacatgctgcagctggagaaccacgagctgcagggcctgaagctgcagcacgaccagagagtgagcgagctggagaagacccaggtggccgtgctggaggagaagctggagctggagaacctgcagcagatcagccagcagcagaagggcgagatcgagtggcagaagcagctgctggagagagacaagagagagatcgagagaatgaccgccgagagcagagccctgcagagctgcgtggagtgcctgagcaaggagaaggaggacctgcaggagaagtgcgacatctgggagaagaagctggcccagaccaagagagtgctggccgccgccgaggagaacagcaagatggagcagagcaacctggagaagctggagctgaacgtgagaaagctgcagcaggagctggaccagctgaacagagacaagctgagcctgcacaacgacatcagcgccatgcagcagcagctgcaggagaagagagaggccgtgaacagcctgcaggaggagctggccaacgtgcaggaccacctgaacctggccaagcaggacctgctgcacaccaccaagcaccaggacgtgctgctgagcgagcagaccagactgcagaaggacatcagcgagtgggccaacagattcgaggactgccagaaggaggaggagaccaagcagcagcagctgcaggtgctgcagaacgagatcgaggagaacaagctgaagctggtgcagcaggagatgatgttccagagactgcagaaggagagagagagcgaggagagcaagctggagaccagcaaggtgaccctgaaggagcagcagcaccagctggagaaggagctgaccgaccagaagagcaagctggaccaggtgctgagcaaggtgctggccgccgaggagagagtgagaaccctgcaggaggaggagagatggtgcgagagcctggagaagaccctgagccagaccaagagacagctgagcgagagagagcagcagctggtggagaagagcggcgagctgctggccctgcagaaggaggccgacagcatgagagccgacttcagcctgctgagaaaccagttcctgaccgagagaaagaaggccgagaagcaggtggccagcctgaaggaggccctgaagatccagagaagccagctggagaagaacctgctgaccgccagagaggccgaggcccagaagctgaagaagcaggtgtgcgcccagaaggcccagctggccagcctgggcagagagtag

SEQ ID NO: 290632 - DNA, 2628 bp, Artificial Sequence
  derived and/or modified sequence
atgatgtacactgttctgcccgatggatcaccggtgcctcagggtatggccctgtatgccccccccccacctctcccaaataacagcaggcccctaacacctggaacagtagtctatgggcctcctcctgctggagcacctatggtttatggcccaccaccccccaatttctccatcccttttatccccatgggggttctccactgtaacgttcctgagcaccacaatttagagaatgaagtgagccgcttagaggacataatgcagcatttaaagagcaagaaaagggaagagagatggatgcgcgcaagtaagagacagtcagagaaggagatggaggagctccatcataacattgacgatctgctacaggaaaagaagagtttggagtgcgaagtggaggagcttcatcggaccgtccaaaagcgccagcagcagaaagactttattgacggcaatgtggaatccctgatgacagagctggagattgaaaagtccctcaaacaccatgaggacattgtggatgagatcgagtgcattgagaagacactgctcaaacgccggtcagagctgagggaagcagaccgcctgctggcagaggccgagagcgagctctcctgtactaaggaaaaaaccaaaaatgccgtggagaaattcaccgatgctaagcgttccctgttacagactgagtctgatgcagaggaattagagcgtcgcgcacaagaaaccgctgtcaacctggtgaaggcggaccagcagttgagatctctgcaggccgacgccaaagatttagaacagcataaaatcaagcaggaggagatactcaaggaaattaacaaaattgtggcagctaaggattcagattttcagtgtctcagcaagaaaaaggagaaattgaccgaggagctgcagaaattacagaaggacatagaaatggccgaacgaaacgaggatcaccacctgcaagtgttgaaggagagtgaagtacttttgcaggccaaacgcgccgaactggagaagttgaaaagccaggtcacaagccaacagcaggagatggccgtgctggatcgacagttggggcataagaaggaggagttacatctgcttcagggcagcatggtgcaggcaaaagccgatctgcaggaggctctgcggttaggtgagacagaagtgaccgaaaagtgcaaccacattcgcgaggtgaagtctctattagaagagttaagtttccagaaaggcgaactaaacgtccaaatctctgagcgcaaaacacaactgacgctgatcaagcaggaaattgagaaggaggaagaaaacctgcaggtggtcttgcgacagatgagcaaacataaaacagaactgaagaatattttggacatgctgcagctggagaaccatgaattgcagggccttaaactgcagcacgaccagcgggtctctgagctggagaagacacaggtcgcagtgttggaagaaaagctggaattggagaatctccagcagatatctcagcagcaaaagggcgagatcgagtggcagaagcagctgcttgaaagggacaaacgagaaatcgagcgcatgacagcagagtccagggcactgcaatcatgcgtagagtgcctgtcaaaagagaaagaggatttgcaggaaaaatgcgacatctgggagaagaagctcgcccagacaaagcgggtattagccgcggccgaagagaattcaaaaatggagcagtctaacctagaaaaacttgaactgaatgtaaggaaactgcaacaggaactcgatcaattgaatcgcgataaactgagcctgcataacgatataagcgcaatgcagcagcagttgcaagagaagcgagaggctgtgaacagccttcaggaggaactggctaacgtccaggaccatctcaatctcgccaagcaggatctgctgcacactactaaacaccaagacgtgctgttgtccgagcagacgcgactccagaaggacatatcagaatgggcaaaccgcttcgaagactgccagaaggaggaagagaccaagcagcaacaactgcaggttctgcagaatgagatcgaggagaataaactcaagctggttcagcaggagatgatgtttcagagattgcagaaggagagggagtccgaggagagcaagctcgagacaagcaaggtcaccctgaaggagcaacaacatcaactggaaaaggagctgacagatcaaaaaagcaagctagatcaggtcttatctaaggtactggccgccgaggaacgggtgaggaccttacaggaagaggagcgctggtgcgaatcccttgagaagaccttgtctcagacgaagcggcagctgagcgagcgggagcagcagttagtggagaagtccggtgaactactcgcgttgcagaaggaagccgatagcatgcgcgcggactttagcttattacgaaaccagttcctcaccgaacgcaagaaggccgaaaagcaggtcgctagcctgaaggaggccctcaaaatccagcgaagccaactggagaagaatcttctaaccgctagggaagctgaggcccaaaagctgaagaagcaggtatgtgcccagaaagcccagctggcctctctcggtagagaatag

SEQ ID NO: 290633 - DNA, 2628 bp, Artificial Sequence
  derived and/or modified sequence
atgatgtacacagtgctgcctgatggcagccctgtgccccagggcatggccctgtatgcccctcctccacccctgcccaacaacagccggcccctgaccccaggcaccgtggtgtatggccccccacctgctggggcccccatggtgtatggccccccaccacccaacttcagcatccccttcatccccatgggcgtgctgcactgcaatgtgcctgagcaccacaacctggagaatgaggtgtcccggctggaggacatcatgcagcacctgaagagcaagaagcgggaggagcgctggatgagggccagcaagaggcagagcgagaaggagatggaggagctgcaccacaacattgatgacctgctgcaggagaagaagagcctggagtgtgaggtggaggagctgcacaggacagtgcagaagaggcagcagcagaaggacttcattgatggaaatgtggagagcctgatgacagagctggagattgagaagagcctgaagcaccatgaagatattgtggatgaaattgagtgcatcgagaagaccctgctgaagagaagaagtgagctgcgggaggccgaccggctgctggccgaggccgagagcgagctgagctgcaccaaggagaagaccaagaatgctgtggagaagttcacagatgccaagaggagcctgctgcagacagaaagtgatgctgaggagctggagcggcgggcccaggagacagctgtgaacctggtgaaggctgaccagcagctgcggagcctgcaggctgatgccaaggacctggagcagcacaagatcaagcaggaggagatcctgaaggagatcaacaagatcgtggccgccaaggacagcgacttccagtgcctgagcaagaagaaggagaagctgacagaggagctgcagaagctgcagaaggacatcgagatggccgagagaaatgaagaccaccacctgcaggtgctgaaggagagcgaggtgctgctgcaggccaagagagctgagctggagaagctgaagagccaggtgaccagccagcagcaggagatggctgtgctggaccggcagctgggccacaagaaggaggagctgcacctgctgcagggctccatggtgcaggccaaggctgacctgcaggaggccctgcggctgggggagacagaggtgacagagaagtgcaaccacatccgggaggtgaagagcctgctggaggagctgtccttccagaagggggagctgaatgtgcagatcagcgagaggaagacccagctgaccctcatcaagcaggagattgagaaggaggaggagaacctgcaggtggtgctgcggcagatgagcaagcacaagacagagctgaagaacatcctggacatgctgcagctggagaaccacgagctgcagggcctgaagctgcagcacgaccagagggtgtctgagctggagaagacccaggtggccgtgctggaggagaagctggagctggagaacctgcagcagatcagccagcagcagaagggggagattgagtggcagaagcagctgctggagcgggacaagcgggagattgaaagaatgacagctgagagccgggccctgcagagctgtgtggagtgcctgagcaaggagaaggaggacctgcaggagaagtgtgacatctgggagaagaagctggcccagaccaagagggtgctggccgctgctgaggagaacagcaagatggagcagagcaacctggagaagctggagctgaatgtgaggaagctgcagcaggagctggaccagctgaacagagacaagctgagcctgcacaatgacatcagcgccatgcagcagcagctgcaggagaagcgggaggccgtgaacagcctgcaggaggagctggccaacgtgcaggaccacctgaacctggccaagcaggacctgctgcacaccaccaagcaccaggatgtgctgctgtctgagcagacccggctgcagaaggacatcagcgagtgggccaacagatttgaggactgccagaaggaggaggagaccaagcagcagcagctgcaggtgctgcagaatgaaattgaggagaacaagctgaagctggtgcagcaggagatgatgttccagaggctgcagaaggagcgggagagcgaggagagcaagctggagaccagcaaggtgaccctgaaggagcagcagcaccagctggagaaggagctgacagaccagaagagcaagctggaccaggtgctgagcaaggtgctggccgctgaggagcgggtgaggaccctgcaggaggaggagcgctggtgtgagagcctggagaagaccctgagccagaccaagaggcagctgtctgagcgggagcagcagctggtggagaagagcggggagctgctggccctgcagaaggaggccgacagcatgagagctgacttcagcctgctgaggaaccagttcctgacagagaggaagaaggccgagaagcaggtggccagcctgaaggaggccctgaagatccagaggagccagctggagaagaacctgctgacagcccgggaggccgaggcccagaagctgaagaagcaggtgtgtgcccagaaggcccagctggccagcctgggccgggagtag

SEQ ID NO: 290634 - DNA, 2628 bp, Artificial Sequence
  derived and/or modified sequence
atgatgtacaccgtgctgcccgacggcagccccgtgccccagggcatggccctgtatgcaccacctccacccctgcctaacaacagccgtcctctgacaccaggtacagtcgtttacggccctcctcctgccggagctcctatggtgtacggccctcctcctccaaatttctctattcctttcatccctatgggcgtacttcactgcaatgtccctgaacatcacaatctcgaaaacgaagtttcacgcttggaagacatcatgcagcacctgaaatctaaaaagcgcgaagagagatggatgcgcgcttcaaagcggcaaagcgaaaaggaaatggaggaactgcaccacaacatcgatgatctcttacaggagaaaaagtctctggaatgtgaggttgaggagttacaccggaccgtccagaaacgccagcagcagaaagatttcattgacggaaatgtagaatcactcatgactgaactagagatcgagaaatcactcaaacaccacgaagacattgttgacgaaatagagtgtatcgaaaagaccctactcaaacgaaggtctgagctccgtgaagccgaccggctgttggcggaggctgaatccgaactgtcttgcacaaaggagaagaccaagaatgctgtcgaaaaattcacggatgctaagcggagcttgcttcagactgagtctgatgcagaagaactcgaacggagggcccaagagactgctgtcaacctggtgaaggccgaccagcagctaaggagcctccaggctgatgccaaagacctagagcaacataagatcaagcaagaagagatcctaaaggagataaataagatcgttgccgccaaggattccgattttcagtgcctgtctaagaagaaggaaaagctgaccgaagaactccagaagctccagaaggacatcgaaatggccgaaagaaatgaagaccatcatctgcaggtgctcaaggaatctgaggtcctgctccaggctaagcgcgccgagctggagaagctgaagagtcaagttaccagtcagcagcaggagatggccgtgctggaccggcagctcgggcacaagaaggaagaactccacctacttcagggctctatggtgcaagcaaaggccgatctccaagaagcactgcggctcggtgaaacagaggtcactgaaaaatgcaaccacattagagaggttaaatcactgctggaggagctgtcttttcaaaagggtgagctaaacgtgcagattagcgaacggaaaacacagttgactctgataaagcaggagattgagaaagaggaggagaacctgcaggtcgtattacgccaaatgagtaaacacaaaaccgaacttaaaaacatcctagacatgctgcaactcgaaaaccacgagctgcagggcctgaagctgcagcacgatcagagagtcagtgagctggaaaagacacaggtagctgtccttgaagagaagctggaactcgagaatctgcaacagatttcacagcagcagaagggagagattgaatggcagaagcagttgctcgagcgagataaacgggagatcgagcgcatgacagccgaaagcagagccctgcagagctgcgtcgaatgtctttcaaaggagaaagaagatctccaagaaaagtgcgacatttgggagaagaaactcgcccaaacaaagcgggtgctggccgctgctgaggagaactccaagatggaacagtctaatctcgaaaagctggagctaaacgtgcggaagttgcagcaggaactggaccagcttaatagggacaagctgtccctgcacaatgatatctctgccatgcagcagcagcttcaagaaaaacgcgaagctgtgaattcacttcaggaggagctcgcgaacgtgcaggatcatctcaacctggccaagcaagacttgctgcacacgactaagcatcaggatgtgctcctctccgagcagactcggcttcagaaagacatatccgagtgggctaaccggttcgaggactgtcaaaaggaggaggagaccaaacagcaacagctccaggttctccagaacgagattgaagagaataagttaaagttagttcagcaagagatgatgttccagagactgcagaaggagcgggaaagcgaggagagtaagttggagacttccaaagtcaccctgaaagaacagcagcatcaacttgagaaggaactgactgaccagaaaagtaaactcgatcaggtgctatctaaggtcctggcagcggaggagcgggttcggacgttgcaggaggaggaacggtggtgcgaatctttggaaaaaaccctgagtcaaacaaagagacagctttccgaacgggaacagcagctcgtggaaaagtctggcgagctgcttgcactccaaaaagaggccgatagtatgagggcggacttctccctgctgcgtaatcagtttctgacagagcggaagaaggccgagaagcaggtggcttcactgaaagaagccctgaagatccagcggtcacagcttgagaagaacctgctgacagcacgagaagccgaggctcaaaagctgaagaagcaggtgtgtgcccagaaggcgcagcttgctagcctgggtcgggaatag

SEQ ID NO: 290635 - DNA, 2628 bp, Artificial Sequence
  derived and/or modified sequence
atgatgtacacagtgctcccggatggttcgcccgttcctcaggggatggcattgtacgccccacctccccctttaccaaacaattcccggccactgactccaggtaccgtggtgtacggccctccgccagccggagcccctatggtctatggcccaccccctcccaatttttctattccgttcattcctatgggcgtcctacactgtaacgttcccgaacatcacaatttagagaatgaggtcagtaggctggaggacattatgcagcacctgaaaagtaaaaaacgggaggagaggtggatgagagcctctaaaagacagtccgaaaaggaaatggaagagctgcaccataacatagatgatctgctccaagagaagaagagccttgagtgcgaggtcgaggagctgcatcggactgtgcagaagcgccaacaacagaaggattttatcgacggaaacgtggagagcttgatgactgaactggaaattgagaagagcttgaagcaccacgaggatattgtggatgaaattgaatgtatagaaaaaacactcttgaaaagacggagcgagcttcgcgaggccgatcgactgctcgcagaggcggagagtgaactaagctgtactaaagagaagaccaagaatgccgtggagaaattcaccgatgctaaacggtccctactacagactgaatctgacgccgaggagctcgagagaagggcccaggagaccgcagtgaatcttgtgaaagccgaccaacaactgagaagcctccaggccgacgcgaaggatctagaacagcataagataaaacaggaagagatactgaaagagataaacaagatagtggccgctaaagattccgactttcagtgtctgtctaagaaaaaggagaagcttactgaggaactgcagaagttacaaaaagacatcgaaatggccgagcggaacgaagaccaccatcttcaagtgctgaaagagtctgaggtgctattacaggcgaagcgagcggagctggagaagctgaagtctcaggtcacctctcaacagcaggagatggccgtgctggataggcagttgggacataagaaagaagagttgcaccttcttcagggtagcatggtgcaagcaaaagcagacctgcaggaggcactgcggctcggggaaaccgaagtgactgaaaagtgtaaccacatccgcgaagtcaaatctctgcttgaggaattaagctttcagaaaggagaactgaacgtgcaaattagtgagcggaagacccagctcacgttaattaaacaggaaatagagaaagaagaagaaaatctgcaggtggtcctgcggcaaatgtcgaaacacaagactgaactgaaaaacattttggatatgcttcaactggagaaccacgagctgcagggcctgaaactgcagcacgatcagagggttagcgagttggagaagactcaggtggcagtacttgaggaaaagctcgagctggagaatcttcagcagatatcccagcagcagaagggcgagatcgaatggcaaaaacagcttctggagagagataagcgcgaaatcgaacggatgaccgcggaaagcagggctctgcaatcatgtgtggagtgtttgagtaaagagaaggaggatctgcaggagaaatgtgatatttgggaaaagaaacttgctcagaccaaaagagtcctggccgctgctgaagaaaatagtaaaatggaacagagtaacttggaaaagctggagctgaacgtgcgcaaacttcaacaggagctggaccaactcaaccgcgataagctctccctccataatgacatcagcgccatgcagcaacagttgcaagagaagcgagaagcggtgaactcactgcaggaggagctggcgaacgttcaggatcacctgaacctcgctaaacaggacttgctgcatactactaagcaccaggacgtgcttctgtcagaacagacccgcctgcaaaaagacatttctgagtgggccaacaggttcgaagactgccagaaggaggaggaaactaaacagcaacagctccaagtgctgcagaatgagatcgaagaaaataagctgaagttggtgcaacaggagatgatgttccaaagactccaaaaggaaagagagtcagaagaaagtaaactggagacaagtaaggtaacgctcaaggagcagcagcatcaattggagaaagagttgactgaccagaaaagcaagctggaccaggtactgtccaaggtacttgcggcagaagaacgtgtcagaaccctgcaagaagaagagagatggtgcgagtctctcgagaagaccctgtctcagactaagcgacagctgagcgaacgcgagcagcagcttgtagagaagagcggagagctgctggctcttcaaaaggaggctgactccatgagagcagatttcagtctccttcgcaaccagtttctcactgaacggaaaaaggcagagaagcaggtggccagcttgaaggaggccctgaaaatccagcgctcacaactcgagaagaatcttctgaccgcccgtgaggccgaggctcagaaactgaagaagcaggtgtgtgcgcaaaaggcacagctggcaagtttaggccgtgaatag

SEQ ID NO: 290636 - DNA, 6388 bp, Artificial Sequence
  derived and/or modified sequence
gttttgatgaacacctggctttattcttgcaatgaagaaaggttctcaacaaaaaatattctccaaagcaaagataccatcatcatctcactctcctatcccatcatctatgtccaatatgagatctaggtcactttcacctttgattggatcagagactctaccttttcattctggaggacagtggtgtgagcaagttgagattgcagatgaaaacaatatgcttttggactatcaagaccataaaggagctgattcacatgcaggagttagatatattacagaggccctcattaaaaaacttactaaacaggataatttggctttgataaaatctctgaacctttcactttctaaagacggtggcaagaaatttaagtatattgagaatttggaaaaatgtgttaaacttgaagtactgaatctcagctataatctaatagggaagattgaaaagttggacaagctgttaaaattacgtgaactcaacttatcatataacaaaatcagcaaaattgaaggcatagaaaatatgtgtaatctgcaaaagcttaaccttgcaggaaatgaaattgagcatattccagtatggttagggaagaagttaaaatctttgcgagtcctcaatttgaaaggcaacaagatatcatcgctccaagatataagcaagttgaaaccgcttcaagatttgatttctctgatcctagttgaaaatccagttgtgacccttcctcattacctccagtttaccattttccacctccgttcattggaaagtttggaaggtcagccagtaaccactcaggatagacaggaggcttttgagagattcagtttagaagaggtagaaagactggaaagagacctagaaaaaaagatgatagaaactgaagagcttaagagcaaacaaacaaggttccttgaggaaattaaaaatcaagataaattgaataaatcattaaaagaggaggccatgttacagaaacagagctgtgaggaactcaagagtgacttaaacacaaaaaatgaattgctaaaacagaagaccatagaattaacacgagcatgtcagaagcaatatgagctggaacaggaattggccttttataaaattgatgctaaatttgagccactaaattattatccatcagagtatgctgaaattgataaagccccagatgaaagcccttacattggcaaatccagatacaagagaaatatgtttgccacagagagttatattattgacagtgctcaggcagtacagatcaagaagatggagccagatgaacaacttagaaatgatcacatgaacttgagaggccacacaccactggacacgcaactggaagacaaagaaaaaaaaataagtgcagcacaaactcgactatcagaactgcatgatgaaatagaaaaggcagaacaacaaattttgagagctactgaagaatttaaacaactggaagaagctatacaactaaaaaagatttcagaagcagggaaagaccttctttacaagcagttgagtggtagactacaacttgtaaataaattacgccaggaagctctggatctagaactgcagatggaaaagcaaaagcaggaaattgccggaaagcagaaggagattaaggacctgcaaatagccatagatagcctggattccaaagacccaaaacattcccatatgaaggctcaaaagagcggtaaagaacaacagcttgacattatgaacaagcagtaccaacaacttgaaagtcgtttggatgagatactttctagaattgctaaggaaacggaagagattaaggaccttgaagaacagcttactgaaggccagatagcagcaaatgaagccctgaagaaggatttagaaggtgttatcagtgggttgcaagaatacctggggaccattaaaggccaggcaactcaggcccagaatgagtgcaggaagctgcgggatgagaaagagacattgttgcagagattgacagaagtcgagcaggagagagaccagctggaaatagttgccatggatgcagaaaatatgaggaaggagcttgcagagctagaaagtgccctccaagagcagcatgaggtgaatgcatctttgcagcagacccagggagatctcagtgcctatgaagctgagctagaggctcggctaaacctaagggatgctgaagccaaccagctcaaggaagagttggaaaaagtaacaagacttacccagttagaacaatcagcccttcaagcagaacttgagaaggaaaggcaagccctcaagaatgcccttggaaaagcccagttctcagaagaaaaggagcaagagaacagtgagctccatgcaaaacttaaacacttgcaggatgacaataatctgttaaaacagcaacttaaagatttccagaatcaccttaaccatgtggttgatggtttggttcgtccagaagaagtggcagctcgtgtggatgagctaagaagaaaactgaaattaggaactggggaaatgaacatccatagtccttcagatgtcttagggaaaagtcttgctgatttacagaaacaattcagtgaaattcttgcacgctccaagtgggaaagagatgaagcacaagttagagagagaaaactccaagaagaaatggctctgcagcaagagaaactggcaactggacaagaagagttcaggcaggcctgtgagagagccctggaagcaagaatgaattttgataagaggcaacatgaagcaagaatccagcaaatggagaatgaaattcactatttgcaagaaaatctaaaaagtatggaggaaatccaaggccttacagatctccaacttcaggaagctgatgaagagaaggagagaattctggcccaactccgagagttagagaaaaagaagaaacttgaagatgccaaatctcaggagcaagtttttggtttagataaagaactgaagaaactaaagaaagccgtggccacctctgataagctagccacagctgagctcaccattgccaaagaccagctgaagtcccttcatggaactgttatgaaaattaaccaggagcgagcagaggagttgcaggaagcagagaggttcagcagaaaggcagcacaagcagccagagatctcacccgagcagaagctgagatcgaactcctgcagaatctcctcaggcagaagggggagcagtttcgacttgagatggagaaaacaggtgtaggtactggagcaaactcacaggtcctagaaattgagaaactgaatgagacaatggaacgacaaaggacagagattgcaaggctgcagaatgtactagacctcactggaagtgacaacaaaggaggctttgaaaatgttttagaagaaattgctgaacttcgacgtgaagtttcttatcagaatgattacataagcagcatggcagatcctttcaaaagacgaggctattggtactttatgccaccaccaccatcatcaaaagtttccagccatagttcccaggccaccaaggactctggtgttggccttaagtactcagcctcaactcctgttagaaaaccacgccctgggcagcaggatgggaaggaaggcagtcaacctccccctgcctcaggatactgggtttattctcccatcaggagtgggttacataaactgtttccaagtagagatgcagacagtggaggagatagtcaggaagagagtgagctggatgaccaagaagaacccccatttgtgcctcctcctggatacatgatgtatactgtgcttcctgatggttctcctgtaccccagggcatggccctgtatgcaccacctcctcccttgccaaacaatagccgacctctcacccctggcactgttgtttatggcccacctcctgctggggcccccatggtgtatgggcctccaccccccaacttctccatccccttcatccctatgggtgtgctgcattgcaacgtccctgaacaccataacttagagaatgaagtttctagattagaagacataatgcagcatttaaaatcaaagaagcgggaagaaaggtggatgagagcatccaagcggcagtcggagaaagaaatggaagaactgcatcataatattgatgatcttttgcaagagaagaaaagcttagagtgtgaagtagaagaattacatagaactgtccagaaacgtcaacagcaaaaggacttcattgatggaaatgttgagagtcttatgactgaactagaaatagaaaaatcactcaaacatcatgaagatattgtagatgaaattgagtgcattgagaagactcttctgaaacgtcgctcagagctcagggaagctgaccgactcctggcagaggctgagagtgaactttcatgcactaaagaaaagacaaaaaatgctgttgaaaagttcactgatgccaagagaagtttattgcaaactgagtcagatgctgaggaattagaaaggagagctcaggaaactgctgttaacctcgtcaaagctgatcagcagctaagatcgctccaggctgatgcaaaggatttggagcagcacaaaatcaagcaagaagaaatcttgaaagaaataaacaaaattgtagcagcaaaagactcagacttccaatgtttaagcaagaagaaggaaaaactgacagaagagcttcagaaactacagaaagacatagagatggcagaacgcaatgaggatcaccacctgcaggtccttaaagaatctgaggtgcttcttcaggccaaaagagccgagctggaaaagctgaaaagccaggtgacaagtcagcagcaggagatggctgtcttggacaggcagttagggcataaaaaggaggagctgcatctactccaaggaagcatggtccaggcaaaagctgacctccaggaagctctgagactgggagagactgaagtaactgagaagtgcaatcacattagggaagtaaaatctcttctggaagaactgagttttcagaaaggagaactaaatgttcagattagtgaaagaaaaactcaacttacacttataaagcaggaaattgaaaaagaggaagaaaatcttcaggttgttttaaggcagatgtctaaacataaaaccgaactaaagaatattctggacatgttgcaacttgaaaaccatgagctacaaggtttgaagctacaacatgaccaaagggtatctgaattagagaagactcaggtggcagtgctagaggagaaactggagttagagaatttgcagcagatatcccagcagcagaaaggggaaatagagtggcagaagcagctccttgagagggataaacgagaaatagaacgaatgactgctgagtcccgagctttacaatcgtgtgttgagtgtttgagcaaagaaaaggaagatctccaagagaaatgtgacatttgggaaaaaaagttggcacaaaccaaaagggttttagcagcagcagaagaaaatagcaaaatggagcaatcaaacttagaaaagttggaattgaatgtcagaaaactgcagcaggaactagaccaactaaacagagacaagttgtcactgcataacgacatttcagcaatgcaacagcagctccaagaaaaacgagaagcagtaaactcactgcaggaggaactagctaatgtccaagaccatttgaacctagcaaaacaggacctgcttcacaccaccaagcatcaggatgtgttgctcagtgagcagacccgactccagaaggacatcagtgaatgggcaaataggtttgaagactgtcagaaagaagaggagacaaaacaacaacaacttcaagtgcttcagaatgagattgaagaaaacaagctcaaactagtccaacaagaaatgatgtttcagagactccagaaagagagagaaagtgaagaaagcaaattagaaaccagtaaagtgacactgaaggagcaacagcaccagctggaaaaggaattaacagaccagaaaagcaaactggaccaagtgctctcaaaggtgctggcagctgaagagcgtgttaggactctgcaggaagaggagaggtggtgtgagagcctggagaagacactctcccaaactaaacggcagctttcagaaagggagcagcaattggtggagaaatcaggtgagctgttggccctccagaaagaggcagattctatgagggcagacttcagccttctgcggaaccagttcttgacagaaagaaagaaagctgagaagcaggtggccagcctgaaggaagcacttaagatccagcggagccagctggagaaaaaccttcttacagctagagaagctgaggcccagaagctcaagaaacaggtgtgtgcccagaaagcccagctggccagcctggggagagag

SEQ ID NO: 290637 - protein, 994 aa, Artificial Sequence
  derived and/or modified sequence
MKAQKSGKEQQLDIMNKQYQQLESRLDEILSRIAKETEEIKDLEEQLTEGQIAANEALKKDLEGVISGLQEYLGTIKGQATQAQNECRKLRDEKETLLQRLTEVEQERDQLEIVAMDAENMRKELAELESALQEQHEVNASLQQTQGDLSAYEAELEARLNLRDAEANQLKEELEKVTRLTQLEQSALQAELEKERQALKNALGKAQFSEEKEQENSELHAKLKHLQDDNNLLKQQLKDFQNHLNHVVDGLVRPEEVAARVDELRRKLKLGTGEMNIHSPSDVLGKSLADLQKQFSEILARSKWERDEAQVRERKLQEEMALQQEKLATGQEEFRQACERALEARMNFDKRQHEARIQQMENEIHYLQENLKSMEEIQGLTDLQLQEADEEKERILAQLRELEKKKKLEDAKSQEQVFGLDKELKKLKKAVATSDKLATAELTIAKDQLKSLHGTVMKINQERAEELQEAERFSRKAAQAARDLTRAEAEIELLQNLLRQKGEQFRLEMEKTGVGTGANSQVLEIEKLNETMERQRTEIARLQNVLDLTGSDNKGGFENVLEEIAELRREVSYQNDYISSMADPFKRRGYWYFMPPPPSSKVSSHSSQATKDSGVGLKYSASTPVRKPRPGQQDGKEGSQPPPASGYWVYSPIRSGLHKLFPSRDADSGGDSQEESELDDQEEPPFVPPPGYMMYTVLPDGSPVPQGMALYAPPPPLPNNSRPLTPGTVVYGPPPAGAPMVYGPPPPNFSIPFIPMGVLHCNVPEHHNLENEVSRLEDIMQHLKSKKREERWMRASKRQSEKEMEELHHNIDDLLQEKKSLECEVEELHRTVQKRQQQKDFIDGNVESLMTELEIEKSLKHHEDIVDEIECIEKTLLKRRSELREADRLLAEAESELSCTKEKTKNAVEKFTDAKRSLLQTESDAEELERRAQETAVNLVKADQQLRSLQADAKDLEQHKIKQEEILKEINKIVAAKDSDFQCLSKKKEKLTEE

SEQ ID NO: 290638 - protein, 452 aa, Artificial Sequence
  derived and/or modified sequence
MKKGSQQKIFSKAKIPSSSHSPIPSSMSNMRSRSLSPLIGSETLPFHSGGQWCEQVEIADENNMLLDYQDHKGADSHAGVRYITEALIKKLTKQDNLALIKSLNLSLSKDGGKKFKYIENLEKCVKLEVLNLSYNLIGKIEKLDKLLKLRELNLSYNKISKIEGIENMCNLQKLNLAGNEIEHIPVWLGKKLKSLRVLNLKGNKISSLQDISKLKPLQDLISLILVENPVVTLPHYLQFTIFHLRSLESLEGQPVTTQDRQEAFERFSLEEVERLERDLEKKMIETEELKSKQTRFLEEIKNQDKLNKSLKEEAMLQKQSCEELKSDLNTKNELLKQKTIELTRACQKQYELEQELAFYKIDAKFEPLNYYPSEYAEIDKAPDESPYIGKSRYKRNMFATESYIIDSAQAVQIKKMEPDEQLRNDHMNLRGHTPLDTQLEDHKLDYQNCMMK

SEQ ID NO: 290639 - DNA, 2487 bp, Artificial Sequence
  derived and/or modified sequence
atggagaagcagaagcaggagatcgccggcaagcagaaggagatcaaggacctgcagatcgccatcgacagcctggacagcaaggaccccaagcacagccacatgaaggcccagaagagcggcaaggagcagcagctggacatcatgaacaagcagtaccagcagctggagagcagactggacgagatcctgagcagaatcgccaaggagaccgaggagatcaaggacctggaggagcagctgaccgagggccagatcgccgccaacgaggccctgaagaaggacctggagggcgtgatcagcggcctgcaggagtacctgggcaccatcaagggccaggccacccaggcccagaacgagtgcagaaagctgagagacgagaaggagaccctgctgcagagactgaccgaggtggagcaggagagagaccagctggagatcgtggccatggacgccgagaacatgagaaaggagctggccgagctggagagcgccctgcaggagcagcacgaggtgaacgccagcctgcagcagacccagggcgacctgagcgcctacgaggccgagctggaggccagactgaacctgagagacgccgaggccaaccagctgaaggaggagctggagaaggtgaccagactgacccagctggagcagagcgccctgcaggccgagctggagaaggagagacaggccctgaagaacgccctgggcaaggcccagttcagcgaggagaaggagcaggagaacagcgagctgcacgccaagctgaagcacctgcaggacgacaacaacctgctgaagcagcagctgaaggacttccagaaccacctgaaccacgtggtggacggcctggtgagacccgaggaggtggccgccagagtggacgagctgagaagaaagctgaagctgggcaccggcgagatgaacatccacagccccagcgacgtgctgggcaagagcctggccgacctgcagaagcagttcagcgagatcctggccagaagcaagtgggagagagacgaggcccaggtgagagagagaaagctgcaggaggagatggccctgcagcaggagaagctggccaccggccaggaggagttcagacaggcctgcgagagagccctggaggccagaatgaacttcgacaagagacagcacgaggccagaatccagcagatggagaacgagatccactacctgcaggagaacctgaagagcatggaggagatccagggcctgaccgacctgcagctgcaggaggccgacgaggagaaggagagaatcctggcccagctgagagagctggagaagaagaagaagctggaggacgccaagagccaggagcaggtgttcggcctggacaaggagctgaagaagctgaagaaggccgtggccaccagcgacaagctggccaccgccgagctgaccatcgccaaggaccagctgaagagcctgcacggcaccgtgatgaagatcaaccaggagagagccgaggagctgcaggaggccgagagattcagcagaaaggccgcccaggccgccagagacctgaccagagccgaggccgagatcgagctgctgcagaacctgctgagacagaagggcgagcagttcagactggagatggagaagaccggcgtgggcaccggcgccaacagccaggtgctggagatcgagaagctgaacgagaccatggagagacagagaaccgagatcgccagactgcagaacgtgctggacctgaccggcagcgacaacaagggcggcttcgagaacgtgctggaggagatcgccgagctgagaagagaggtgagctaccagaacgactacatcagcagcatggccgaccccttcaagagaagaggctactggtacttcatgccccccccccccagcagcaaggtgagcagccacagcagccaggccaccaaggacagcggcgtgggcctgaagtacagcgccagcacccccgtgagaaagcccagacccggccagcaggacggcaaggagggcagccagcccccccccgccagcggctactgggtgtacagccccatcagaagcggcctgcacaagctgttccccagcagagacgccgacagcggcggcgacagccaggaggagagcgagctggacgaccaggaggagccccccttcgtgcccccccccggctacatgatgtacaccgtgctgcccgacggcagccccgtgccccagggcatggccctgtacgccccccccccccccctgcccaacaacagcagacccctgacccccggcaccgtggtgtacggccccccccccgccggcgcccccatggtgtacggcccccccccccccaacttcagcatccccttcatccccatgggcgtgctgcactgcaacgtgcccgagcaccacaacctggtgagcggcaagacctacaacagcctgagcaccctgctgccctgggtgaccgacaaggtgatctacctgatgagctag

SEQ ID NO: 290640 - DNA, 1359 bp, Artificial Sequence
  derived and/or modified sequence
atgaagaagggcagccagcagaagatcttcagcaaggccaagatccccagcagcagccacagccccatccccagcagcatgagcaacatgagaagcagaagcctgagccccctgatcggcagcgagaccctgcccttccacagcggcggccagtggtgcgagcaggtggagatcgccgacgagaacaacatgctgctggactaccaggaccacaagggcgccgacagccacgccggcgtgagatacatcaccgaggccctgatcaagaagctgaccaagcaggacaacctggccctgatcaagagcctgaacctgagcctgagcaaggacggcggcaagaagttcaagtacatcgagaacctggagaagtgcgtgaagctggaggtgctgaacctgagctacaacctgatcggcaagatcgagaagctggacaagctgctgaagctgagagagctgaacctgagctacaacaagatcagcaagatcgagggcatcgagaacatgtgcaacctgcagaagctgaacctggccggcaacgagatcgagcacatccccgtgtggctgggcaagaagctgaagagcctgagagtgctgaacctgaagggcaacaagatcagcagcctgcaggacatcagcaagctgaagcccctgcaggacctgatcagcctgatcctggtggagaaccccgtggtgaccctgccccactacctgcagttcaccatcttccacctgagaagcctggagagcctggagggccagcccgtgaccacccaggacagacaggaggccttcgagagattcagcctggaggaggtggagagactggagagagacctggagaagaagatgatcgagaccgaggagctgaagagcaagcagaccagattcctggaggagatcaagaaccaggacaagctgaacaagagcctgaaggaggaggccatgctgcagaagcagagctgcgaggagctgaagagcgacctgaacaccaagaacgagctgctgaagcagaagaccatcgagctgaccagagcctgccagaagcagtacgagctggagcaggagctggccttctacaagatcgacgccaagttcgagcccctgaactactaccccagcgagtacgccgagatcgacaaggcccccgacgagagcccctacatcggcaagagcagatacaagagaaacatgttcgccaccgagagctacatcatcgacagcgcccaggccgtgcagatcaagaagatggagcccgacgagcagctgagaaacgaccacatgaacctgagaggccacacccccctggacacccagctggaggaccacaagctggactaccagaactgcatgatgaagtag

SEQ ID NO: 290641 - DNA, 2487 bp, Artificial Sequence
  derived and/or modified sequence
atggaaaagcagaagcaggagatcgcaggtaagcaaaaagaaatcaaagacctccagatcgctatagattctttagattcaaaggacccgaaacattcgcacatgaaagcccagaaaagcgggaaggagcagcagttagatattatgaacaagcagtaccagcagttggaaagccggctggacgagatcctgtccaggatagctaaggaaaccgaagagattaaggacctcgaggaacagctcactgaggggcagatcgcggctaacgaggctctgaagaaagatctggagggtgtcatctccgggctacaggagtacttggggacaatcaagggtcaagctactcaggcccagaatgaatgccgtaaactacgcgacgaaaaggagactttactccagagacttaccgaagtggaacaggagcgtgatcaactcgaaatagtggcaatggacgccgagaacatgaggaaggagcttgcggagcttgagtctgccctgcaagaacagcatgaagttaacgcaagcctacagcaaacccagggcgatctgagcgcgtatgaagcagagctggaggctcggcttaacctccgcgacgcggaggcgaatcagcttaaggaggaactggaaaaagtcacacgactgacacagctggaacagtccgcgctccaggcagaactggaaaaagaacggcaggccttgaagaacgccctgggaaaggcacaatttagtgaagaaaaagagcaggaaaacagtgagttgcatgctaagttaaaacatctgcaggacgacaataacctcttaaagcagcagctgaaggacttccagaatcacctgaatcacgtggtagatgggctggttagaccagaagaagtagctgcgcgagtcgatgaactacggcggaaactgaaactgggaacaggagagatgaacattcactcaccttccgacgtgctgggcaaatccctggccgatcttcaaaagcaattctcagaaatactggcccgttcaaaatgggagcgcgacgaggcacaggtcagagaacgcaaactccaggaggaaatggctctgcagcaggaaaaattggcaaccggccaggaggagttccgacaggcctgcgagcgcgctcttgaggcacgcatgaatttcgacaaacgacagcatgaggcaaggatacagcagatggagaacgaaatacactacctgcaggagaatttgaaaagtatggaggagatccaggggctcaccgacctccagctgcaggaagccgacgaagagaaggagcgaatcctggcacaattgagggaactggagaagaagaagaagctggaagacgcaaaatcacaggagcaagtattcggtctcgacaaggagctgaagaaattgaagaaggctgtggctacatccgataagttagctaccgctgaactaacaatcgctaaggaccagctaaaaagtctgcacggaaccgtaatgaaaataaatcaggagcgcgccgaggagctgcaggaggcagaacggttctctaggaaagctgctcaggccgcacgggacttgacccgggcggaagccgagatcgagctgctgcagaacctgttgcgccaaaaaggggaacagttcaggttggagatggaaaagaccggtgtgggtacaggggccaactcacaggtgcttgaaattgaaaagctgaatgaaaccatggaaagacagagaactgaaatcgcaagactccaaaacgttctcgatctgactggatcagacaataaagggggtttcgaaaatgtacttgaagagatagctgaattgaggagggaggtcagttaccagaatgattatatcagctctatggctgatccattcaagcgccgtggatactggtactttatgcctccacctccgtcaagcaaggtgtctagccacagtagccaggctacgaaggacagcggggtgggcctgaaatattctgcctccactccagtacgcaagccgcgccccggacagcaggacggcaaagagggttctcagcccccacccgccagcggatactgggtttactcccctattcgctccggccttcacaagctgtttccgtcaagagacgcagatagcggaggggatagccaggaggagagcgaactcgacgatcaggaagagccgccttttgtccccccccctggatacatgatgtacactgttttgcccgacggcagtccagtgccacagggcatggccctttatgcccctcccccacctctgccgaacaatagccggccactcacacccggcaccgtggtttacgggcctccacccgctggtgctcccatggtctatggaccgcctccacctaatttcagtattcctttcattcctatgggtgtccttcattgtaatgttccggagcatcacaacctcgtgagcgggaagacctacaattctctttctacccttctgccctgggtgaccgataaagtgatctacttgatgtcctag

SEQ ID NO: 290642 - DNA, 1359 bp, Artificial Sequence
  derived and/or modified sequence
atgaagaaaggatcccagcagaagatcttcagtaaagccaagatccccagttcgtcccacagcccaatcccctctagcatgtctaatatgcgaagccggtctctgtccccactgatagggagcgagaccctgccctttcacagtggcggccagtggtgcgagcaggttgagatcgccgatgaaaacaatatgcttcttgattaccaggatcacaagggggccgatagccatgccggagtgagatacattactgaagcgctcatcaagaagctgacaaagcaggacaacctcgccctgatcaaatccctgaacctctcacttagtaaagatgggggaaagaaatttaaatatatcgaaaacttggagaaatgcgtaaagctcgaagttctcaatctgtcttacaacctgatcggcaagatagagaagctggataaactgctgaagctgcgtgaactcaacctgagttacaataaaatatctaagatcgaaggaatcgagaacatgtgcaatcttcagaaactgaatctggctggcaacgagatcgagcacattccagtgtggctgggcaagaagctgaaatccctaagggtactcaatctcaagggcaacaaaatctcttccctgcaggacatctctaagctgaagccactacaggatctaatcagcctcattctggtggagaacccggttgtcacactcccccactatctgcagttcacgatcttccatttaaggtccctcgagtcactcgagggtcagccagtgaccacacaagacagacaagaggcattcgagaggttctccctggaagaggtcgagaggctggagcgggacctggagaagaagatgattgaaacggaggagctcaaatcaaaacagactaggtttctggaggaaattaaaaaccaggacaaactgaataaaagtttgaaggaggaagccatgctccaaaagcagtcatgcgaagaattaaaatcagacctcaacacgaaaaacgagctgttaaaacagaaaacaattgagttgacccgggcctgtcaaaagcaatatgaattagaacaggagctcgcattttacaaaatcgatgctaaatttgagcctctgaactattatcctagcgagtacgccgagatagataaagctcctgacgagagcccctacatcggcaaatcgcgatataaacgcaatatgtttgccacggaatcatacatcatcgacagcgcccaagctgtgcagatcaaaaagatggagccagacgaacagctgcgcaatgaccatatgaacttgcgcggacacactccgctcgacactcagctagaggaccataagctggattatcagaactgcatgatgaagtag

SEQ ID NO: 290643 - DNA, 3137 bp, Artificial Sequence
  derived and/or modified sequence
ctaaaacagaagaccatagaattaacacgagcatgtcagaagcaatatgagctggaacaggaattggccttttataaaattgatgctaaatttgagccactaaattattatccatcagagtatgctgaaattgataaagccccagatgaaagcccttacattggcaaatccagatacaagagaaatatgtttgccacagagagttatattattgacagtgctcaggcagtacagatcaagaagatggagccagatgaacaacttagaaatgatcacatgaacttgagaggccacacaccactggacacgcaactggaagacaaagaaaaaaaaataagtgcagcacaaactcgactatcagaactgcatgatgaaatagaaaaggcagaacaacaaattttgagagctactgaagaatttaaacaactggaagaagctatacaactaaaaaagattagatttcagaagcagggaaagaccttctttacaagcagttgagtggtagactacaacttgtaaataaattacgccaggaagctctggatctagaactgcagatggaaaagcaaaagcaggaaattgccggaaagcagaaggagattaaggacctgcaaatagccatagatagcctggattccaaagacccaaaacattcccatatgaaggctcaaaagagcggtaaagaacaacagcttgacattatgaacaagcagtaccaacaacttgaaagtcgtttggatgagatactttctagaattgctaaggaaacggaagagattaaggaccttgaagaacagcttactgaaggccagatagcagcaaatgaagccctgaagaaggatttagaaggtgttatcagtgggttgcaagaatacctggggaccattaaaggccaggcaactcaggcccagaatgagtgcaggaagctgcgggatgagaaagagacattgttgcagagattgacagaagtcgagcaggagagagaccagctggaaatagttgccatggatgcagaaaatatgaggaaggagcttgcagagctagaaagtgccctccaagagcagcatgaggtgaatgcatctttgcagcagacccagggagatctcagtgcctatgaagctgagctagaggctcggctaaacctaagggatgctgaagccaaccagctcaaggaagagttggaaaaagtaacaagacttacccagttagaacaatcagcccttcaagcagaacttgagaaggaaaggcaagccctcaagaatgcccttggaaaagcccagttctcagaagaaaaggagcaagagaacagtgagctccatgcaaaacttaaacacttgcaggatgacaataatctgttaaaacagcaacttaaagatttccagaatcaccttaaccatgtggttgatggtttggttcgtccagaagaagtggcagctcgtgtggatgagctaagaagaaaactgaaattaggaactggggaaatgaacatccatagtccttcagatgtcttagggaaaagtcttgctgatttacagaaacaattcagtgaaattcttgcacgctccaagtgggaaagagatgaagcacaagttagagagagaaaactccaagaagaaatggctctgcagcaagagaaactggcaactggacaagaagagttcaggcaggcctgtgagagagccctggaagcaagaatgaattttgataagaggcaacatgaagcaagaatccagcaaatggagaatgaaattcactatttgcaagaaaatctaaaaagtatggaggaaatccaaggccttacagatctccaacttcaggaagctgatgaagagaaggagagaattctggcccaactccgagagttagagaaaaagaagaaacttgaagatgccaaatctcaggagcaagtttttggtttagataaagaactgaagaaactaaagaaagccgtggccacctctgataagctagccacagctgagctcaccattgccaaagaccagctgaagtcccttcatggaactgttatgaaaattaaccaggagcgagcagaggagttgcaggaagcagagaggttcagcagaaaggcagcacaagcagccagagatctcacccgagcagaagctgagatcgaactcctgcagaatctcctcaggcagaagggggagcagtttcgacttgagatggagaaaacaggtgtaggtactggagcaaactcacaggtcctagaaattgagaaactgaatgagacaatggaacgacaaaggacagagattgcaaggctgcagaatgtactagacctcactggaagtgacaacaaaggaggctttgaaaatgttttagaagaaattgctgaacttcgacgtgaagtttcttatcagaatgattacataagcagcatggcagatcctttcaaaagacgaggctattggtactttatgccaccaccaccatcatcaaaagtttccagccatagttcccaggccaccaaggactctggtgttggccttaagtactcagcctcaactcctgttagaaaaccacgccctgggcagcaggatgggaaggaaggcagtcaacctccccctgcctcaggatactgggtttattctcccatcaggagtgggttacataaactgtttccaagtagagatgcagacagtggaggagatagtcaggaagagagtgagctggatgaccaagaagaacccccatttgtgcctcctcctggatacatgatgtatactgtgcttcctgatggttctcctgtaccccagggcatggccctgtatgcaccacctcctcccttgccaaacaatagccgacctctcacccctggcactgttgtttatggcccacctcctgctggggcccccatggtgtatgggcctccaccccccaacttctccatccccttcatccctatgggtgtgctgcattgcaacgtccctgaacaccataacttagtaagtggaaagacatacaactctctttccacactgcttccatgggtgactgataaggttatatacttaatgagttgacctatttatgactggattatatggcaaagtgtgtttgtaaggctgatgtttagaactgtgcaagcattctcttattaaaattctcttataaaa

SEQ ID NO: 290644 - DNA, 2487 bp, Artificial Sequence
  derived and/or modified sequence
atggagaagcagaagcaggagattgctgggaagcagaaggagatcaaggacctgcagatcgccatcgacagcctggacagcaaggaccccaagcacagccacatgaaggcccagaagagcggcaaggagcagcagctggacatcatgaacaagcagtaccagcagctggagagccggctggatgagatcctgagcagaattgccaaggagacagaggagatcaaggacctggaggagcagctgacagagggccagattgctgccaatgaggccctgaagaaggacctggagggcgtcatcagcggcctgcaggagtacctgggcaccatcaagggccaggccacccaggcccagaatgaatgtaggaagctgagagatgagaaggagaccctgctgcagaggctgacagaggtggagcaggagcgggaccagctggagatcgtggccatggatgctgagaacatgaggaaggagctggccgagctggagagcgccctgcaggagcagcacgaggtgaatgccagcctgcagcagacccagggcgacctgagcgcctatgaggccgagctggaggcccggctgaacctgagagatgctgaggccaaccagctgaaggaggagctggagaaggtgacccggctgacccagctggagcagagcgccctgcaggccgagctggagaaggagcggcaggccctgaagaatgccctgggcaaggcccagttcagcgaggagaaggagcaggagaacagcgagctgcacgccaagctgaagcacctgcaggatgacaacaacctgctgaagcagcagctgaaggacttccagaaccacctgaaccacgtggtggatggcctggtgcggcctgaggaggtggccgcccgggtggatgagctgcggaggaagctgaagctgggcaccggggagatgaacatccacagccccagtgatgtgctgggcaagagcctggccgacctgcagaagcagttcagcgagatcctggcccggagcaagtgggagagagatgaggcccaggtgcgggagaggaagctgcaggaggagatggccctgcagcaggagaagctggccaccggccaggaggagttccggcaggcctgtgagcgggccctggaggccaggatgaactttgacaagaggcagcacgaggcccgcatccagcagatggagaatgagatccactacctgcaggagaacctgaagtccatggaggagatccagggcctgacagacctgcagctgcaggaggctgatgaggagaaggagcgcatcctggcccagctgcgggagctggagaagaagaagaagctggaggatgccaagagccaggagcaggtgtttggcctggacaaggagctgaagaagctgaagaaggctgtggccaccagtgacaagctggccacagctgagctgaccatcgccaaggaccagctgaagagcctgcatggaacagtgatgaagatcaaccaggagcgggcagaggagctgcaggaggccgagcgcttcagcaggaaggccgcccaggccgcccgggacctgaccagggctgaggccgagattgagctgctgcagaacctgctgcggcagaagggggagcagttccggctggagatggagaagacaggagtgggcaccggggccaacagccaggtgctggagattgagaagctgaatgagaccatggagcggcagaggacagaaattgcccggctgcagaatgtgctggacctgactggaagtgacaacaagggcggctttgaaaatgtgctggaggagattgctgagctgcggcgggaggtgtcctaccagaatgactacatcagctccatggctgaccccttcaagagaagaggctactggtacttcatgcctcctccacccagcagcaaggtgagcagccacagcagccaggccaccaaggacagcggcgtgggcctgaagtacagcgccagcacccctgtgaggaagccccggcccggccagcaggacggcaaggagggcagccagcccccaccagccagcggctactgggtgtacagccccatccgcagcggcctgcacaagctgttccccagcagagatgctgacagcggcggggacagccaggaggagagcgagctggatgaccaggaggagcccccatttgtgcccccacctggctacatgatgtacacagtgctgcctgatggcagccctgtgccccagggcatggccctgtatgcccctcctccacccctgcccaacaacagccggcccctgaccccaggcaccgtggtgtatggccccccacctgctggggcccccatggtgtatggccccccaccacccaacttcagcatccccttcatccccatgggcgtgctgcactgcaatgtgcctgagcaccacaacctggtgtctgggaagacctacaacagcctgagcaccctgctgccctgggtgacagacaaggtgatctacctgatgtcctag

SEQ ID NO: 290645 - DNA, 1359 bp, Artificial Sequence
  derived and/or modified sequence
atgaagaagggcagccagcagaagatcttcagcaaggccaagatccccagcagcagccacagccccatccccagctccatgagcaacatgaggagccgcagcctgagccccctgattggcagcgagaccctgcccttccacagcggcggccagtggtgtgagcaggtggagattgctgatgagaacaacatgctgctggactaccaggaccacaagggagctgacagccacgccggcgtgcgctacatcacagaggccctgatcaagaagctgaccaagcaggacaacctggccctgatcaagagcctgaacctgagcctgagcaaggatggcggcaagaagttcaagtacatcgagaacctggagaagtgtgtgaagctggaggtgctgaacctgagctacaacctgattggcaagattgagaagctggacaagctgctgaagctgcgggagctgaacctgagctacaacaagatcagcaagattgagggcatcgagaacatgtgcaacctgcagaagctgaacctggccggaaatgaaattgagcacatccctgtgtggctgggcaagaagctgaagagcctgcgggtgctgaacctgaagggcaacaagatcagcagcctgcaggacatcagcaagctgaagcccctgcaggacctgatcagcctcatcctggtggagaaccctgtggtgaccctgccccactacctgcagttcaccatcttccacctgcggagcctggagagcctggagggccagcctgtgaccacccaggaccggcaggaggcctttgagcgcttcagcctggaggaggtggagcggctggagcgggacctggagaagaagatgattgaaacagaggagctgaagagcaagcagacccgcttcctggaggagatcaagaaccaggacaagctgaacaagagcctgaaggaggaggccatgctgcagaagcagagctgtgaggagctgaagagtgacctgaacaccaagaatgagctgctgaagcagaagaccatcgagctgacccgggcctgccagaagcagtatgagctggagcaggagctggccttctacaagattgatgccaagtttgagcccctgaactactaccccagtgaatatgcagaaattgacaaggccccagatgagagcccctacatcggcaagagccgctacaagaggaacatgtttgccacagagagctacatcattgattctgcccaggccgtgcagatcaagaagatggagccagatgagcagctgagaaatgaccacatgaacctgcggggccacacccccctggacacccagctggaggaccacaagctggactaccagaactgcatgatgaagtag

SEQ ID NO: 290646 - DNA, 2487 bp, Artificial Sequence
  derived and/or modified sequence
atggagaagcagaagcaggagatcgccggcaagcagaaggagatcaaggatctgcagatcgcaattgacagtcttgactctaaggatcccaagcacagtcacatgaaggctcagaagagcggcaaagagcagcagctggacattatgaataagcagtaccaacagctggaaagcaggctggacgaaattctcagtcgaattgccaaggagacagaagagattaaagacctggaggaacagctgacggaaggccagatcgctgccaatgaagctctcaagaaggacctggagggtgttattagtggactgcaggagtatttggggacgatcaagggacaggctactcaggcccagaacgaatgccgcaagcttagagacgaaaaggagaccctcctccaacgtctgactgaggttgaacaagagcgggaccagttggaaatcgtcgccatggatgctgaaaacatgcgtaaggagttggctgagctcgaatcagcgctccaggagcagcatgaagtgaatgcctccctacagcaaacacagggtgaccttagcgcttacgaagcagaactcgaggcccgcctgaatctaagggacgctgaggcaaatcaattaaaagaggagctcgagaaggttacccgactgacgcaacttgaacaaagcgcactccaagctgaattggagaaagagcgccaggcgttaaagaacgcactgggaaaggcacagttctccgaggagaaagagcaagaaaactctgagttgcatgccaagctgaagcacctgcaagatgataataacttgctgaaacagcagctgaaagactttcagaatcatctaaaccatgtggtggacggactcgttaggccggaagaggtggccgcacgcgtagacgagttgcgcaggaagctgaagctgggcactggagagatgaacattcatagtccttctgacgtactcggcaagtctctggcagatctgcaaaagcagttttcagaaatcctcgccaggtccaagtgggagcgagacgaagcccaggtgcgggaacgaaagctgcaggaggaaatggcactgcagcaggaaaaactggctacaggccaggaagagtttcgccaggcctgtgaacgcgcactcgaagctagaatgaactttgacaagagacagcacgaagcccggattcaacaaatggaaaatgagattcattacctgcaagagaacctgaagtcgatggaagaaattcagggccttaccgacctgcaactgcaggaggctgacgaggaaaaggaacggatcctggcccagctcagagaattggaaaagaaaaagaaactcgaggacgctaaatcccaagaacaggtgtttggcctagacaaggagttgaaaaaacttaagaaagctgtggccacgagcgataaactagcgactgctgagcttactatcgccaaagaccaactcaaaagcctgcacggaaccgtgatgaagattaaccaggagcgcgccgaagagctgcaggaggcagagcggttttctcgcaaggcagctcaggcagcccgggatttgacccgggctgaagcagagatagagcttcttcaaaatctcttgagacagaagggggaacagttccgcctggaaatggaaaaaacaggggtaggtacaggtgctaacagtcaggttttagagattgaaaaacttaacgagaccatggagagacaacggacggaaattgcgcgcctccagaatgtcctggacctgactggaagtgataacaaggggggattcgaaaacgtgctggaagagatcgcagagctccggcgtgaggtctcatatcagaatgactacatctcctcaatggccgatcccttcaagcgccgagggtactggtattttatgccccctccaccctcttctaaggtgagttcccattcctcccaggccaccaaggacagcggagtcggcctcaaatattctgcctctactcctgtgagaaagcccaggcctggccaacaagatggcaaggaaggcagccagcctccccctgcttccggatactgggtgtacagcccgatcaggtctgggcttcacaagctatttccttcaagagatgccgattctggaggggattcacaggaagagagcgaactggatgaccaggaggagcccccttttgtccctccgcccgggtatatgatgtataccgtgctgcctgacgggtcgcctgtcccccagggcatggcactttatgcccctcctccccccttgccaaataactctaggccgctgacccctggcacggtcgtgtatgggcccccccctgctggcgcgcccatggtctacggccccccgcccccgaatttttccatccccttcatcccaatgggggtgttgcactgcaacgttcctgagcaccacaacctggtgagcggcaaaacctacaactctctgagcactctgcttccctgggtcacggacaaagttatatacttaatgtcctag

SEQ ID NO: 290647 - DNA, 1359 bp, Artificial Sequence
  derived and/or modified sequence
atgaagaagggcagccagcagaagatcttcagcaaggccaagatcccttcctcatcacatagtcccatccctagctctatgtcaaacatgcgaagtcgaagtttgagtccattgatcggctccgaaactctccctttccattccggaggccaatggtgtgaacaggtcgagatcgcggacgaaaacaacatgctgctcgactatcaggatcataaaggagctgatagccacgcgggtgtgcggtatatcacagaggcccttattaagaagctgaccaaacaggacaatttggccctgatcaagtctctaaatctatccctgtcaaaagatggaggaaagaaatttaagtacatcgaaaacctggagaaatgtgttaaactcgaggtgcttaatttgtcatataacctcattgggaagattgagaaactagacaagctattaaaacttcgtgagcttaacctctcctataataaaatctctaaaatagagggaatcgaaaatatgtgcaatctccaaaagctgaatctggccggaaacgaaatcgagcacattcctgtttggctgggcaagaaacttaaatctttacgggtcctgaacctgaagggtaacaaaatatcctctttgcaggatatctccaaactgaaacccttgcaggacctgatctctctcatcttggtcgaaaatcctgtcgtgaccctgccacattatctacagttcaccatcttccacttgagatctttagagagtttggagggacagcccgttactacacaggacaggcaagaagcgttcgagcgtttcagccttgaggaggttgaacgactcgaaagagacctggaaaagaagatgattgaaaccgaagagctgaaatctaagcagaccaggttcctcgaggagattaaaaatcaggataagctgaacaaaagtctgaaggaggaggcaatgctgcagaagcagtcatgcgaagagctcaagtccgatttaaataccaaaaatgaattgctgaagcagaagaccatcgagctgacccgtgcttgtcaaaagcaatacgagttggagcaggagctcgccttttataagattgacgcaaagtttgaacctctgaattactacccatcggaatacgcagagatcgataaagccccagatgagtctccgtatatcggcaaatctcggtacaagaggaacatgtttgcaaccgagtcctacattatcgacagtgcacaagcagttcaaatcaaaaagatggaaccagacgagcagttgcgcaatgatcatatgaatctgcgtgggcacacacccctggatacacagttggaggaccacaagttagattatcagaattgcatgatgaaatag

SEQ ID NO: 290648 - DNA, 2487 bp, Artificial Sequence
  derived and/or modified sequence
atggaaaaacagaaacaggagatcgccggaaagcagaaggagataaaagacctgcagatcgccatcgattcattggacagcaaagacccaaaacactctcatatgaaggctcaaaagtcgggaaaggagcagcaactcgacataatgaataagcagtaccagcagttagagtcccgcctggatgaaattttgagtcgaatagctaaagagaccgaagaaatcaaagacttagaagagcagcttaccgaaggacaaatcgcagctaatgaagcacttaaaaaagacctcgaaggtgtcatttctggcctgcaggagtatctgggaaccataaagggacaggccacacaggcccaaaatgagtgcagaaaactccgggatgagaaggagacgttactccagagactgactgaggtggaacaggagagagaccaattagaaatcgtagccatggatgcagagaatatgcggaaggagcttgcagagctcgaaagtgctctccaagagcagcacgaggtgaacgcttcactccagcaaacccaaggagatttgtctgcatacgaagccgaactcgaggcaagactgaacctccgggacgccgaggcaaatcagttaaaagaggaacttgagaaggtgacacggttaacccagctggaacagtccgctctccaggcagagcttgagaaagagcgtcaggccctgaagaatgctcttggcaaagcccagttttcagaagaaaaagaacaggagaacagtgagctgcacgcaaaactgaagcatctgcaagatgacaataaccttctgaagcaacagctcaaggactttcagaaccacctcaaccacgtggtggatgggctagtaagacccgaggaggtcgccgctcgggtagatgagctgaggagaaagctgaagctggggacaggcgagatgaatatccactctccatcagatgtgctggggaagagcttggccgatctgcaaaagcagttctcagagatacttgcgcgttccaaatgggaaagggacgaggcgcaggtccgtgagcggaagctgcaggaagaaatggcgttgcagcaagagaagcttgccactggtcaggaggaatttagacaggcctgcgagcgcgctctggaggcgcgaatgaacttcgataagcggcagcacgaagcccgaattcaacagatggagaatgaaatacactatctgcaggagaatcttaagtcaatggaagagattcagggtctgactgatctgcagctccaagaggcagatgaagaaaaagaacgaatccttgctcagctgcgcgaactggagaagaagaaaaaactcgaagacgccaagtctcaggaacaggtcttcggtctcgacaaagaactgaaaaaattgaaaaaagccgtcgccacttcagataagctagccactgccgaacttacaattgcgaaggatcagttgaagagcttgcacggcactgttatgaagattaaccaagagagagcagaggaactgcaggaggctgagaggttctctcgaaaggctgcccaggccgcacgtgacctgacaagagcagaggccgagatagagctgttgcagaacctcctgcgccaaaagggggagcagtttcgactggaaatggagaagactggggtcggaaccggcgctaactcgcaggtgctggaaattgaaaagctgaatgagacaatggaaaggcaaagaactgagattgcgaggctgcagaacgtgttggacttgactggctctgacaataaagggggattcgagaacgtcctggaggagatcgcagaactgcgacgggaagtctcatatcaaaacgattacatatcttccatggcggatcccttcaagcgccgaggatactggtatttcatgcccccaccacccagctctaaggtgagctcacacagctcacaggcaactaaggattctggagttggtctgaagtatagcgctagcacaccggtcagaaagccaagacccggacaacaggacggcaaggaggggagtcaaccacctcctgccagcgggtactgggtttatagccccatacgaagtggactgcataagctgttcccctcgagggatgctgatagtggcggagattcacaagaggagagcgaactggacgatcaggaggaacctccgtttgtgccgccacctggatatatgatgtatacagttcttcccgacggaagtcctgttccccagggcatggcactttatgctccaccccctccgctccctaataatagcagacccctcactcccggtacagtggtgtacggaccacctcctgccggtgcgccaatggtttatggaccacctccacccaatttctctataccattcatcccgatgggcgtactccactgtaatgtgcccgagcaccacaacttagtgtctgggaaaacctacaactctctgtcgaccctcctgccttgggtgaccgacaaggtcatatatttgatgtcctag

SEQ ID NO: 290649 - DNA, 1359 bp, Artificial Sequence
  derived and/or modified sequence
atgaagaagggttctcagcagaaaatcttttcaaaggcgaagataccttcctccagccactcccccatcccctcttctatgtctaacatgcgcagtcgatctttgtccccactgatcggctctgagactcttcccttccactcagggggacaatggtgcgagcaggttgaaattgccgatgagaacaacatgctgttagattatcaagatcacaagggagctgattcacacgctggcgtccgttatatcaccgaggcactgataaagaaactcacaaagcaagacaacctggcactcattaagagtctcaatctgtcattatccaaggatgggggaaagaaatttaagtatattgagaatctagagaaatgtgtgaagctcgaggtgctgaacctgtcatacaacttaatcggcaagatagaaaaactcgacaagctcctgaaactgagagagctgaacttgtcctataacaagattagcaagattgaagggatcgagaacatgtgtaatctccagaagttgaacttggccggaaacgaaattgagcatatacccgtatggcttggaaagaaattgaagtctctgagggttctgaatttgaagggcaataaaatcagcagtctccaggacatttcgaagttgaagccccttcaggacctgatttctctcatacttgtggagaaccctgtggtgactttacctcattacctgcagttcacaatttttcacctccggagccttgaatcactggagggacaacccgtgaccacacaggacaggcaagaagccttcgagcgcttctccctagaggaagtcgagcgtttggagcgggatttggagaagaaaatgattgagactgaggaactcaaatctaagcaaacaaggtttcttgaagagatcaagaaccaggataagctgaacaaatcactcaaggaggaggcaatgcttcaaaaacagagttgcgaagagttaaagagcgatttgaataccaagaatgaactgcttaagcagaaaactatcgaactgacacgagcctgtcaaaaacaatacgagctcgagcaggagctcgccttttacaaaatcgacgccaaatttgaaccattgaattactacccaagcgagtacgccgaaatcgacaaggccccagacgagtccccttacatcggtaagtcaaggtataagagaaacatgtttgccacagagagctacatcattgacagtgctcaagccgtccaaatcaaaaaaatggaacctgatgagcagctgaggaatgaccatatgaatctgagaggtcatacgccgctggacacgcagttggaggatcacaaactggactaccagaactgcatgatgaaatag

SEQ ID NO: 290650 - protein, 705 aa, Artificial Sequence
  derived and/or modified sequence
  misc_feature (1)..(1): Xaa can be any naturally occurring amino acid
XPWAVATTVVMYPPPPPPPHRDFISVTLSFGENYDNSKSWRRRSCWRKWKQLSRLQRNMILFLLAFLLFCGLLFYINLADHWKALAFRLEEEQKMRPEIAGLKPANPPVLPAPQKADTDPENLPEISSQKTQRHIQRGPPHLQIRPPSQDLKDGTQEEATKRQEAPVDPRPEGDPQRTVISWRGAVIEPEQGTELPSRRAEVPTKPPLPPARTQGTPVHLNYRQKGVIDVFLHAWKGYRKFAWGHDELKPVSRSFSEWFGLGLTLIDALDTMWILGLRKEFEEARKWVSKKLHFEKDVDVNLFESTIRILGGLLSAYHLSGDSLFLRKAEDFGNRLMPAFRTPSKIPYSDVNIGTGVAHPPRWTSDSTVAEVTSIQLEFRELSRLTGDKKFQEAVEKVTQHIHGLSGKKDGLVPMFINTHSGLFTHLGVFTLGARADSYYEYLLKQWIQGGKQETQLLEDYVEAIEGVRTHLLRHSEPSKLTFVGELAHGRFSAKMDHLVCFLPGTLALGVYHGLPASHMELAQELMETCYQMNRQMETGLSPEIVHFNLYPQPGRRDVEVKPADRHNLLRPETVESLFYLYRVTGDRKYQDWGWEILQSFSRFTRVSTCPRPAWSRPPGHRHGWAVGLRLAPLLVVAVTWIREGRACRSLGVATLQLGGPGIPIPTELHGCGTQSTWRGWAPLIFISQGLSREGLCCGPSIPPV

SEQ ID NO: 290651 - DNA, 2118 bp, Artificial Sequence
  derived and/or modified sequence
tgaccatgggcagttgcgacaactgtcgtaatgtatccacctccccctcctccacctcatcgggacttcatctccgtaacccttagcttcggagaaaattacgacaacagtaaaagttggaggagacggagctgttggcgaaaatggaagcagctaagcaggctgcagaggaacatgatcttgtttctgctggctttcctgttattttgtgggttactgttttatataaatctcgctgaccattggaaggccctggcgttccgtctcgaggaggagcaaaaaatgaggcccgaaattgccgggttgaagcctgctaatccacctgttttgccagcgccacagaaggccgacaccgaccccgaaaatctccctgaaatctcctcgcaaaaaacccagagacatattcaacgagggccaccacaccttcagattaggcccccaagccaggaccttaaggacggcacacaagaggaagctaccaagagacaggaagcgcctgtcgacccaagacctgaaggagatccacagcgcacagtgatttcttggaggggtgcagtcatcgaacctgaacaaggaacggaactcccctccaggcgcgctgaggtgcccaccaaacctccccttcccccagcccgaacccagggaacccctgtgcacctgaattataggcagaagggagtgatcgacgtcttcctccatgcatggaaaggctaccgtaaatttgcttggggccacgatgagctgaagcccgtgtccagaagctttagtgagtggttcggattgggactgactcttatcgatgcacttgacaccatgtggatcttgggcctgcggaaagagttcgaggaagcccgcaagtgggtgtcaaagaagcttcactttgagaaggatgtagacgtgaacctgttcgagtctaccattcggatacttggcggactgctgtctgcttatcatctgtccggagactcgctattcctgcggaaagctgaagatttcggaaatagactgatgcccgctttccgcaccccaagtaaaatcccctattcagacgttaacattggcacaggagtggcccacccgccaaggtggacaagcgattcaactgtggcagaagtgacgtctatacaattggaattcagggagctatcgcgactgacgggcgataagaaattccaggaagcggttgagaaagttacccagcacatccatggactgagtggtaagaaggacgggctggtgcctatgttcatcaacactcactctggactgttcacacacttgggagtgttcaccctgggcgcacgtgccgactcgtattacgaatatctcctcaaacaatggatccagggggggaaacaggaaacacagctccttgaagactacgttgaggccattgagggcgtgagaacccatctgttgcggcacagcgaaccctccaagcttacttttgtcggcgaattggcccacggcagattcagcgccaaaatggatcatttggtttgcttcctgcctggaacacttgccctaggagtgtaccacggcttacctgcatcccacatggagctagcccaggagttaatggagacgtgttaccagatgaatcgtcagatggaaacgggattgtcaccagaaatagtgcatttcaatctgtacccgcagcctggacggcgagatgtagaggttaagccagctgataggcacaacttgttacgtcccgaaacagtggaaagcttattctacctgtatagagtgactggagatcgaaaatatcaggattgggggtgggaaatcctgcagtccttctccagatttacccgggtgagtacatgcccccggccagcatggtccagaccaccagggcatagacacggatgggccgtcgggctcaggctggctcccctgttggtggtggcggtaacctggattagagagggtagagcctgtcgctctctgggcgttgccaccctccagctggggggtcccggaatcccgataccgacggagctccacggttgcgggacacagagcacctggcgtgggtgggcgccgctcatatttatctcgcagggccttagcagggagggtctttgttgtggcccctccatccccccagtgtag

SEQ ID NO: 290652 - DNA, 2118 bp, Artificial Sequence
  derived and/or modified sequence
tgaccctgggccgtggccaccaccgtggtgatgtacccacctcctcctcctccaccccaccgggacttcatctctgtgaccctgagctttggagagaactatgacaacagcaagtcctggaggcggcgcagctgctggaggaagtggaagcagctgagccggctgcagaggaacatgatcctcttcctgctggccttcctgctcttctgtggcctgctcttctacatcaacctggccgaccactggaaggccctggccttccggctggaggaggagcagaagatgaggcctgagattgctggcctgaagccagccaacccccctgtgctgcctgccccccagaaggctgacacagatcctgagaacctgcctgagatcagcagccagaagacccagaggcacatccagaggggccccccccacctgcagatccggccccccagccaggacctgaaggatggcacccaggaggaggccaccaagaggcaggaggcccctgtggaccccaggcctgagggggacccccagaggacagtcatctcctggagaggagctgtgattgagcctgagcagggcacagagctgcccagccggcgggcagaggtgcccaccaagccacccctgcccccagcccggacccagggcacccctgtgcacctgaactaccggcagaagggcgtgattgatgtgttcctgcacgcctggaagggctacaggaagtttgcctggggccatgatgagctgaagcctgtgagccgctccttcagcgagtggtttggcctgggcctgaccctgattgatgccctggacaccatgtggatcctgggcctgaggaaggagtttgaggaggccaggaagtgggtgtccaagaagctgcactttgagaaggatgtggatgtgaacctgtttgagagcaccatccgcatcctgggcggcctgctgagcgcctaccacctgagcggggacagcctcttcctgaggaaggccgaggactttggaaaccggctgatgcctgccttccgcacccccagcaagatcccctacagtgatgtgaacattggaactggagtggcccaccccccacgctggaccagtgacagcacagtggccgaggtgaccagcatccagctggagttccgggagctgagccggctgaccggggacaagaagttccaggaggccgtggagaaggtgacccagcacatccacggcctgagcggcaagaaggatggcctggtgcccatgttcatcaacacccacagcggcctcttcacccacctgggcgtcttcaccctgggcgcccgggctgacagctactatgagtacctgctgaagcagtggatccagggcggcaagcaggagacccagctgctggaggactatgtggaggccattgaaggagtgaggacccacctgctgcggcacagcgagcccagcaagctgacctttgtgggggagctggcccacggccgcttcagcgccaagatggaccacctggtgtgcttcctgcccggcaccctggccctgggcgtgtaccacggcctgcctgccagccacatggagctggcccaggagctgatggagacctgctaccagatgaaccggcagatggagaccggcctgagccctgagatcgtgcacttcaacctgtacccccagcccggcagaagagatgtggaggtgaagccagctgacagacacaacctgctgcggcctgagaccgtggagagcctcttctacctgtacagagtgactggagacaggaagtaccaggactggggctgggagatcctgcagagcttcagccgcttcaccagggtgtccacctgccccaggcctgcctggagccggcccccaggccacagacatggctgggccgtgggcctgcggctggcccccctgctggtggtggccgtgacctggatccgggagggccgggcctgccgcagcctgggcgtggccaccctgcagctgggcggccctggcatccccatccccacagagctgcacggctgcggcacccagagcacctggaggggctgggcccccctcatcttcatcagccagggcctgagccgggagggcctgtgctgcggccccagcatcccccctgtgtag

SEQ ID NO: 290653 - DNA, 2296 bp, Artificial Sequence
  derived and/or modified sequence
cccttgggccgtcgccaccactgtagtcatgtacccaccgccgccgccgccgcctcatcgggacttcatctcggtgacgctgagctttggcgagaactatgacaacagcaagagttggcggcggcgctcgtgctggaggaaatggaagcaactgtcgagattgcagcggaatatgattctcttcctccttgcctttctgcttttctgtggactcctcttctacatcaacttggctgaccattggaaagctctggctttcaggctagaggaagagcagaagatgaggccagaaattgctgggttaaaaccagcaaatccacccgtcttaccagctcctcagaaggcggacaccgaccctgagaacttacctgagatttcgtcacagaagacacaaagacacatccagcggggaccacctcacctgcagattagacccccaagccaagacctgaaggatgggacccaggaggaggccacaaaaaggcaagaagcccctgtggatccccgcccggaaggagatccgcagaggacagtcatcagctggaggggagcggtgatcgagcctgagcagggcaccgagctcccttcaagaagagcagaagtgcccaccaagcctcccctgccaccggccaggacacagggcacaccagtgcatctgaactatcgccagaagggcgtgattgacgtcttcctgcatgcatggaaaggataccgcaagtttgcatggggccatgacgagctgaagcctgtgtccaggtccttcagtgagtggtttggcctcggtctcacactgatcgacgcgctggacaccatgtggatcttgggtctgaggaaagaatttgaggaagccaggaagtgggtgtcgaagaagttacactttgaaaaggacgtggacgtcaacctgtttgagagcacgatccgcatcctgggggggctcctgagtgcctaccacctgtctggggacagcctcttcctgaggaaagctgaggattttggaaatcggctaatgcctgccttcagaacaccatccaagattccttactcggatgtgaacatcggtactggagttgcccacccgccacggtggacctccgacagcactgtggccgaggtgaccagcattcagctggagttccgggagctctcccgtctcacaggggataagaagtttcaggaggcagtggagaaggtgacacagcacatccacggcctgtctgggaagaaggatgggctggtgcccatgttcatcaatacccacagtggcctcttcacccacctgggcgtattcacgctgggcgccagggccgacagctactatgagtacctgctgaagcagtggatccagggcgggaagcaggagacacagctgctggaagactacgtggaagccatcgagggtgtcagaacgcacctgctgcggcactccgagcccagtaagctcacctttgtgggggagcttgcccacggccgcttcagtgccaagatggaccacctggtgtgcttcctgccagggacgctggctctgggcgtctaccacggcctgcccgccagccacatggagctggcccaggagctcatggagacttgttaccagatgaaccggcagatggagacggggctgagtcccgagatcgtgcacttcaacctttacccccagccgggccgtcgggacgtggaggtcaagccagcagacaggcacaacctgctgcggccagagaccgtggagagcctgttctacctgtaccgcgtcacaggggaccgcaaataccaggactggggctgggagattctgcagagcttcagccgattcacacgggtgagcacctgtcctcgccccgcgtggtcacggccaccgggccacaggcacggctgggctgtggggctcaggctggctccgctcttggtggtggctgtgacctggatccgggaggggcgggcttgccgcagcctcggggtggccacactgcagcttgggggccctggcatccccatccccactgagcttcatggttgtgggacccagagtacttggaggggctgggcacccctcattttcatttctcagggcctgtctagggagggtctctgctgtgggcccagcatccccccagtttaggaggcacacgcacccatgactggggcaccatccccactgtggaccaggccctgttttaggtcacgccctccacgccagagtgtcacttcctggctctgctgtgatcttggcctgaggcccccgctgcctccgctcccaccgtctgccctgtgccctgtgccctgtgcggcaactgtgagg

SEQ ID NO: 290654 - DNA, 2118 bp, Artificial Sequence
  derived and/or modified sequence
tgaccctgggccgtggccaccaccgtggtgatgtaccccccccccccgcctccaccccatcgcgatttcatctctgtgaccttatcatttggagaaaattatgataactcaaagtcttggcggagacgcagttgttggcgcaaatggaagcagctgagtcggctgcagaggaatatgatcctattccttctggccttccttctgttctgtggtttactcttctacatcaacttggccgatcattggaaagctttggccttcaggctcgaggaggagcagaaaatgagacccgagatcgcgggactgaagcctgccaatccaccggtgctgcccgccccccaaaaggccgacacagatcccgagaacctaccggagatctcatctcagaaaacacagcgccatatacagaggggaccaccccacctacagatacgcccgccttcacaagacctgaaagacggcacacaagaagaggcgaccaagcggcaggaggctcctgttgatccccgacccgagggggacccccaacgcacagttattagctggaggggggcagtgatagaaccagaacaagggacagagctgcctagcaggcgcgccgaggttcccaccaaacctcccctccctccagcaagaacacagggaaccccagtgcaccttaattacagacagaagggcgtgattgacgtgtttctgcacgcatggaaaggttacagaaaattcgcatgggggcatgatgagctcaaacctgttagtaggagcttttccgagtggtttggcctcggcctgacattgatcgacgctctcgacacaatgtggattctgggactgcggaaggaattcgaagaagcccgcaagtgggtcagcaagaaacttcattttgagaaggacgttgatgtgaacttattcgagagcaccatacggatcctaggcggactccttagtgcttaccatctgagcggggactctctctttctgagaaaggctgaggatttcgggaaccgcctgatgccagcgtttagaaccccctccaagatcccatatagtgatgtgaacataggaactggcgtagcacatccaccacggtggacatcagactccaccgtggctgaggtcactagcatccagttggaatttcgggagctgagccggctgactggagacaagaaatttcaggaagcagtcgaaaaggtgacccagcatatacatgggctgtcaggaaaaaaggacggcctggtgccgatgttcattaatacccattccggcctattcacgcacctgggggtctttaccttaggcgcccgtgcagactcctactacgagtacctgcttaagcagtggatacagggaggtaagcaagaaactcagttgctcgaggactatgtggaggctatcgaaggagttcgcacccatcttctacgtcactccgagccatctaagctgacctttgtaggcgaactcgctcatggaaggttctcggcaaagatggaccacttggtgtgcttcctgcccggcactctcgcgctgggggtttatcacggtctgccggcatcccatatggagctggcccaggagctgatggaaacatgttaccagatgaacaggcagatggagacaggactgtccccagaaattgttcattttaatctataccctcagcccggaagacgagacgtggaggtgaaaccggcagatcgccacaatttattaaggcccgaaacagtagaatccctgttctatctgtacagggttactggtgaccggaagtaccaggattggggctgggaaatcctgcaaagcttctcccgatttaccagggtcagcacgtgccctaggccagcttggtcgcgcccacccggccatcggcacggctgggcagttgggctcagactggctcccttattagttgttgctgtcacttggattcgcgagggacgagcctgcagatccttgggcgtcgccacactacagttggggggtcccggaattcctatcccaaccgaactgcacggctgtggtactcaatccacatggcgtgggtgggcaccactcattttcatctcccaggggctgagcagagaagggctgtgctgcgggccaagtatccccccagtctag

SEQ ID NO: 290655 - DNA, 2118 bp, Artificial Sequence
  derived and/or modified sequence
taaccttgggcagtcgcaaccacagtagtgatgtaccccccaccaccacctccaccgcacagagacttcatttccgttacactgagttttggagagaattatgataattcaaagagctggcgcagacgaagctgttggcggaagtggaaacagctttcacggctgcaaaggaacatgatcctgttccttctcgcctttctcctgttctgtggattgttgttctacatcaacctagccgatcattggaaggccctggccttcaggttggaggaggagcagaagatgcggccagaaatcgccggactcaagccagctaaccctccagtactccccgcaccacagaaggccgacacagatcccgagaacctgcctgagatttcaagtcagaagacgcagcgtcacattcaaagaggtccacctcatcttcaaattcgcccaccttcccaggacctcaaggacggtacccaagaggaggcaaccaagcgccaagaggccccagtggaccctagaccagaaggagatcctcagcgcactgtcatctcctggagaggcgctgtgatagaacccgagcaaggtaccgaactgccctctaggcgtgcagaagtccccaccaagcctcccctgccacctgctcgaactcagggaacccctgttcacctgaattatcgccagaaaggggtaattgatgtgtttctgcatgcatggaagggataccgcaagtttgcttggggccacgatgagttaaaacccgtctctaggtcttttagcgagtggttcggcctgggattgaccctaattgatgctctggacactatgtggattctcggcctcaggaaggaattcgaggaagccagaaagtgggtatcaaagaaattgcatttcgagaaggacgttgacgtgaatttgtttgagagcaccatcaggattcttgggggtctgctctcagcataccacctgtctggggattctctctttctgcggaaagctgaagacttcgggaataggctgatgcctgcttttcggacgcccagcaaaatcccctacagcgacgtcaacattggaaccggggtggcacatcctcctcgctggacctccgactctactgtcgctgaggtgacatctattcaactagagtttagagagttatcccgcttgactggagataagaagttccaagaagccgttgaaaaagtcacacaacatatccacgggttatcagggaaaaaggacggtctggtgcccatgttcataaacacacactcaggcctgttcacacacctaggcgttttcacactcggagcccgagctgacagctattatgaatatcttctcaagcagtggatccagggcggaaaacaggaaacgcagttgctcgaagattatgtagaggcgatcgaaggcgtccgaacccatctcttgcgtcacagtgagccgagtaaactcacctttgtgggagagctggctcacggcagattctctgctaagatggatcacctggtatgcttccttcccggtacgctcgccttaggcgtgtatcatggcctccctgccagccatatggagctggcacaggaactaatggagacatgctaccagatgaataggcagatggagaccgggctgagccctgaaattgttcactttaatctgtacccgcagcctgggaggagagatgtcgaagttaagcccgctgatcgtcataacctgttacgacccgaaacagtcgagtccctgttttacttatatcgtgtcacaggggataggaagtatcaggattgggggtgggaaatccttcagtctttcagcagattcacaagagtcagcacctgtccccgtcccgcatggtctagacccccaggccacaggcatggttgggctgtgggattacgcctggcacccttgttggtagtggccgttacatggataagagaaggcagggcatgccgcagtcttggcgtcgccacgctgcagctgggcggaccgggaatccccatacctactgagttgcatggatgtggtacacaatccacttggaggggttgggcgcctctcatattcatctcacaaggcttgagccgggagggattatgctgcggtccttccatccctcccgtgtag

SEQ ID NO: 290656 - DNA, 2118 bp, Artificial Sequence
  derived and/or modified sequence
tgaccctgggccgtggccaccaccgtggtgatgtacccccccccccccccccccccccacagagacttcatcagcgtgaccctgagcttcggcgagaactacgacaacagcaagagctggagaagaagaagctgctggagaaagtggaagcagctgagcagactgcagagaaacatgatcctgttcctgctggccttcctgctgttctgcggcctgctgttctacatcaacctggccgaccactggaaggccctggccttcagactggaggaggagcagaagatgagacccgagatcgccggcctgaagcccgccaacccccccgtgctgcccgccccccagaaggccgacaccgaccccgagaacctgcccgagatcagcagccagaagacccagagacacatccagagaggccccccccacctgcagatcagaccccccagccaggacctgaaggacggcacccaggaggaggccaccaagagacaggaggcccccgtggaccccagacccgagggcgacccccagagaaccgtgatcagctggagaggcgccgtgatcgagcccgagcagggcaccgagctgcccagcagaagagccgaggtgcccaccaagccccccctgccccccgccagaacccagggcacccccgtgcacctgaactacagacagaagggcgtgatcgacgtgttcctgcacgcctggaagggctacagaaagttcgcctggggccacgacgagctgaagcccgtgagcagaagcttcagcgagtggttcggcctgggcctgaccctgatcgacgccctggacaccatgtggatcctgggcctgagaaaggagttcgaggaggccagaaagtgggtgagcaagaagctgcacttcgagaaggacgtggacgtgaacctgttcgagagcaccatcagaatcctgggcggcctgctgagcgcctaccacctgagcggcgacagcctgttcctgagaaaggccgaggacttcggcaacagactgatgcccgccttcagaacccccagcaagatcccctacagcgacgtgaacatcggcaccggcgtggcccacccccccagatggaccagcgacagcaccgtggccgaggtgaccagcatccagctggagttcagagagctgagcagactgaccggcgacaagaagttccaggaggccgtggagaaggtgacccagcacatccacggcctgagcggcaagaaggacggcctggtgcccatgttcatcaacacccacagcggcctgttcacccacctgggcgtgttcaccctgggcgccagagccgacagctactacgagtacctgctgaagcagtggatccagggcggcaagcaggagacccagctgctggaggactacgtggaggccatcgagggcgtgagaacccacctgctgagacacagcgagcccagcaagctgaccttcgtgggcgagctggcccacggcagattcagcgccaagatggaccacctggtgtgcttcctgcccggcaccctggccctgggcgtgtaccacggcctgcccgccagccacatggagctggcccaggagctgatggagacctgctaccagatgaacagacagatggagaccggcctgagccccgagatcgtgcacttcaacctgtacccccagcccggcagaagagacgtggaggtgaagcccgccgacagacacaacctgctgagacccgagaccgtggagagcctgttctacctgtacagagtgaccggcgacagaaagtaccaggactggggctgggagatcctgcagagcttcagcagattcaccagagtgagcacctgccccagacccgcctggagcagaccccccggccacagacacggctgggccgtgggcctgagactggcccccctgctggtggtggccgtgacctggatcagagagggcagagcctgcagaagcctgggcgtggccaccctgcagctgggcggccccggcatccccatccccaccgagctgcacggctgcggcacccagagcacctggagaggctgggcccccctgatcttcatcagccagggcctgagcagagagggcctgtgctgcggccccagcatcccccccgtgtag

SEQ ID NO: 290657 - protein, 2435 aa, Artificial Sequence
  derived and/or modified sequence
MGFLHQLQLLLWKNVTLKRRSPWVLAFEIFIPLVLFFILLGLRQKKPTISVKEAFYTAAPLTSAGILPVMQSLCPDGQRDEFGFLQYANSTVTQLLERLDRVVEEGNLFDPARPSLGSELEALRQHLEALSAGPGTSGSHLDRSTVSSFSLDSVARNPQELWRFLTQNLSLPNSTAQALLAARVDPPEVYHLLFGPSSALDSQSGLHKGQEPWSRLGGNPLFRMEELLLAPALLEQLTCTPGSGELGRILTVPESQKGALQGYRDAVCSGQAAARARRFSGLSAELRNQLDVAKVSQQLGLDAPNGSDSSPQAPPPRRLQALLGDLLDAQKVLQDVDVLSALALLLPQGACTGRTPGPPASGAGGAANGTGAGAVMGPNATAEEGAPSAAALATPDTLQGQCSAFVQLWAGLQPILCGNNRTIEPEALRRGNMSSLGFTSKEQRNLGLLVHLMTSNPKILYAPAGSEVDRVILKANETFAFVGNVTHYAQVWLNISAEIRSFLEQGRLQQHLRWLQQYVAELRLHPEALNLSLDELPPALRQDNFSLPSGMALLQQLDTIDNAACGWIQFMSKVSVDIFKGFHDEESIVNYTLNQAYQDNVTVFASVIFQTRKDGSLPPHVHYKIRQNSSFTEKTNEIRRAYWRPGPNTGGRFYFLYGFVWIQDMMERAIIDTFVGHDVVEPGSYVQMFPYPCYTRDDFLFVIEHMMPLCMVISWVYSVAMTIQHIVAEKEHRLKEVMKTMGLNNAVHWVAWFITGFVQLSISVTALTAILKYGQVLMHSHVVIIWLFLAVYAVATIMFCFLVSVLYSKAKLASACGGIIYFLSYVPYMYVAIREEVAHDKITAFEKCIASLMSTTAFGLGSKYFALYEVAGVGIQWHTFSQSPVEGDDFNLLLAVTMLMVDAVVYGILTWYIEAVHPGMYGLPRPWYFPLQKSYWLGSGRTEAWEWSWPWARTPRLSVMEEDQACAMESRRFEETRGMEEEPTHLPLVVCVDKLTKVYKDDKKLALNKLSLNLYENQVVSFLGHNGAGKTTTMSILTGLFPPTSGSATIYGHDIRTEMDEIRKNLGMCPQHNVLFDRLTVEEHLWFYSRLKSMAQEEIRREMDKMIEDLELSNKRHSLVQTLSGGMKRKLSVAIAFVGGSRAIILDEPTAGVDPYARRAIWDLILKYKPGRTILLSTHHMDEADLLGDRIAIISHGKLKCCGSPLFLKGTYGDGYRLTLVKRPAEPGGPQEPGLASSPPGRAPLSSCSELQVSQFIRKHVASCLLVSDTSTELSYILPSEAAKKGAFERLFQHLERSLDALHLSSFGLMDTTLEEVFLKVSEEDQSLENSEADVKESRKDVLPGAEGPASGEGHAGNLARCSELTQSQASLQSASSVGSARGDEGAGYTDVYGDYRPLFDNPQDPDNVSLQEVEAEALSRVGQGSRKLDGGWLKVRQFHGLLVKRFHCARRNSKALFSQILLPAFFVCVAMTVALSVPEIGDLPPLVLSPSQYHNYTQPRGNFIPYANEERREYRLRLSPDASPQQLVSTFRLPSGVGATCVLKSPANGSLGPTLNLSSGESRLLAARFFDSMCLESFTQGLPLSNFVPPPPSPAPSDSPASPDEDLQAWNVSLPPTAGPEMWTSAPSLPRLVREPVRCTCSAQGTGFSCPSSVGGHPPQMRVVTGDILTDITGHNVSEYLLFTSDRFRLHRYGAITFGNVLKSIPASFGTRAPPMVRKIAVRRAAQVFYNNKGYHSMPTYLNSLNNAILRANLPKSKGNPAAYGITVTNHPMNKTSASLSLDYLLQGTDVVIAIFIIVAMSFVPASFVVFLVAEKSTKAKHLQFVSGCNPIIYWLANYVWDMLNYLVPATCCVIILFVFDLPAYTSPTNFPAVLSLFLLYGWSITPIMYPASFWFEVPSSAYVFLIVINLFIGITATVATFLLQLFEHDKDLKVVNSYLKSCFLIFPNYNLGHGLMEMAYNEYINEYYAKIGQFDKMKSPFEWDIVTRGLVAMAVEGVVGFLLTIMCQYNFLRRPQRMPVSTKPVEDDVDVASERQRVLRGDADNDMVKIENLTKVYKSRKIGRILAVDRLCLGVRPGECFGLLGVNGAGKTSTFKMLTGDESTTGGEAFVNGHSVLKELLQVQQSLGYCPQCDALFDELTAREHLQLYTRLRGISWKDEARVVKWALEKLELTKYADKPAGTYSGGNKRKLSTAIALIGYPAFIFLDEPTTGMDPKARRFLWNLILDLIKTGRSVVLTSHSMEECEALCTRLAIMVNGRLRCLGSIQHLKNRFGDGYMITVRTKSSQSVKDVVRFFNRNFPEAMLKERHHTKVQYQLKSEHISLAQVFSKMEQVSGVLGIEDYSVSQTTLDNVFVNFAKKQSDNLEQQETEPPSALQSPLGCLLSLLRPRSAPTELRALVADEPEDLDTEDEGLISFEEERAQLSFNTDTLC

SEQ ID NO: 290658 - DNA, 7308 bp, Artificial Sequence
  derived and/or modified sequence
atgggctttttgcaccagctgcagctcttgctatggaagaatgttaccctgaaaaggagatccccatgggtgctcgcatttgagatcttcatcccactggtattgtttttcatcctcttgggactcagacagaagaagcccaccatatccgttaaggaggcattttacacagccgctccactgacaagcgctggtatcctgcccgtgatgcaaagcttgtgtcctgatgggcagcgcgatgagtttggattcctgcagtacgccaacagtacggtgacacagctcctcgagaggttagatagagtcgtagaggaggggaacctttttgaccccgcaagaccctcactcgggagcgagctcgaggcattacgtcaacacctggaggcgctttcagccggacccggcacttccgggtctcatctggataggtccacagtgtcctctttctccttggacagcgtggccaggaatccccaggaactttggcgattcctgactcagaaccttagcctgccgaattcaacggctcaggcgctcctggctgcacgagtggatcctcccgaggtttaccacctactcttcggcccttcaagcgccctggactctcaatccggactgcataaagggcaagaaccttggtctcgtttgggcggaaatcctctgtttaggatggaggagttgctgctcgcacccgccctgttggagcagttgacatgcactccagggtccggtgaactggggagaattctgactgtaccagaatctcagaagggcgctctgcaggggtacagagacgccgtttgtagtggccaggcggccgcccgagcccggagattcagtggcctaagtgctgaactgagaaatcagctggatgtggccaaagtgtctcaacaattgggtctagatgcaccgaatggttccgactccagtccccaggctcccccgccgcggcgattgcaggctctgctcggagacctgttggatgctcagaaggtgctccaggatgttgacgtcttgtctgctctggctctgctgttgcctcaaggagcttgtacaggcagaactcctggcccacctgcatcaggagctggcggagctgcaaatggaactggcgcaggcgccgtgatgggccctaacgcaacagctgaggagggggccccttccgctgctgccctggctacacccgatacgctccaagggcagtgcagcgcgtttgtgcagctttgggccggcctccagcctatcctgtgcgggaacaatagaacaattgagcccgaagccctgcggcgcggtaatatgtcctctttgggattcactagtaaggaacagaggaacctgggcctactcgtccacttgatgacaagcaacccgaagattctgtacgctccggcaggttctgaagtggatcgggtcattctcaaagccaatgaaactttcgctttcgtgggcaacgtgacacattacgcacaagtctggttgaatatctctgcggaaatccgaagctttttagagcaaggacgcctacagcagcacttgcgttggctgcagcagtacgtcgcagagctcaggctccaccctgaggccctgaacctgagtctcgatgagctgccgccagctctccgtcaagacaacttcagtctgccgtccggcatggcgctgctgcagcagctcgacaccatagacaacgcggcctgtggatggatccagttcatgtctaaggttagcgtggatatttttaaggggtttcatgacgaggagtcaatcgtcaactacactctcaatcaggcgtatcaggacaatgtaacggtcttcgcttccgtgatcttccaaacaaggaaggatggatccctgcctccccacgtgcactataaaattcgccaaaacagtagcttcactgagaagaccaatgagattagacgggcatactggcgcccagggccaaatacagggggcagattttatttcctgtacggattcgtctggatccaagacatgatggaaagagccataatcgacacatttgttgggcatgatgtggtagaacctggatcctacgtacagatgttcccttatccgtgttacacacgggatgatttcctgtttgtgattgagcatatgatgccattgtgcatggtgatttcctgggtctatagcgtggccatgacaattcaacacatcgtggccgaaaaagagcatcgcttgaaagaagtgatgaagacgatggggcttaacaacgctgttcactgggtcgcatggttcatcaccggtttcgtccagttgtccatctcagtgaccgcactgacagccattctgaagtacggtcaagtactgatgcacagccacgttgtcatcatctggctgttcctggccgtctatgccgtggctacaatcatgttttgttttctcgtatccgtgctctactccaaagctaagttggcctccgcctgcggaggaattatctatttcctgtcatacgtaccctatatgtatgttgccataagggaggaggtggctcacgataagataacagcttttgagaagtgcatcgcctctcttatgtctactacagcattcggcttgggttccaaatatttcgcgctgtatgaagtggcaggagtgggcatccagtggcataccttcagccagtcacccgtcgagggggatgatttcaatctgttgttggccgtgactatgctgatggttgatgccgtggtttacggtattttgacctggtacatcgaggcagttcaccctggcatgtacgggctgcctaggccatggtactttcccttgcagaagtcttactggcttggctcgggtcgtaccgaggcctgggaatggtcttggccctgggcccgcactcctaggctctccgtgatggaagaggatcaagcatgtgccatggagagcagaagattcgaggaaactcgcggaatggaggaggagccaacacacttaccgcttgtggtctgcgtggacaaactgactaaggtatataaagatgacaaaaagctggcactgaacaagttgtctctgaacttgtacgaaaatcaagtagtctcattcctgggccacaacggcgccggcaaaaccactaccatgtctatactcactggcctctttccaccaacatcaggatccgccactatatatggtcacgacatacggacagaaatggatgaaattagaaaaaatcttggcatgtgccctcagcacaatgtcctgtttgatagattgactgtcgaagagcacttatggttctatagtcgactcaagagcatggcccaggaagaaatccggagggaaatggacaaaatgatcgaagacttggagctgtctaacaaaaggcacagtcttgttcagacactcagcggcgggatgaagcgcaagctctcagtcgctatcgcctttgttggagggtctcgcgccatcatcctggacgaacccacagcaggggtcgacccctacgctaggcgggcgatttgggacctcatccttaagtataagccagggaggactattcttctctccactcaccatatggatgaggctgatttgttaggagatcggattgccattatttcccatggcaaactaaagtgctgcggatcgcccctcttcctgaagggaacatatggcgatggatatcgccttacactggtcaagaggccagccgagcccggcggcccccaagagcctgggctggcctcgagtcctccaggccgagctcctctgagctcttgctccgagctgcaggtttctcaatttattagaaagcacgttgccagctgtctgctcgtctcagacactagtaccgaattgtcctacatcctaccctcggaagccgccaagaagggcgcatttgaaaggctctttcaacacttggagcgttctctggacgcactccacttaagttcttttggcttaatggataccaccttggaggaagtgtttcttaaagtgagcgaggaagaccagtcccttgaaaactccgaagcagacgttaaagagagcagaaaggatgtgctccccggggcagagggccctgcatcaggtgagggacatgcgggaaatctcgccaggtgcagtgagctcacacagagtcaagcttctctgcaatcagcatccagcgtaggctcagctcggggggatgagggagccggttacacagacgtgtatggggattatcgacccctttttgacaaccctcaggaccccgataacgtcagcttacaggaagtggaggccgaagcactgtctcgggtcggtcaggggtcgcgcaagttggacggcggatggctgaaggtgagacaattccacggacttctggtgaaacgattccattgtgctagaaggaacagtaaggccctcttttcccagattctgctgccggcattcttcgtctgcgtggccatgacggttgctctttcagtgcccgagattggtgatcttcctccactggtcttgtctccttcacagtatcataactatacacaacctcgagggaacttcataccctatgccaacgaggaacgaagagagtatcgcctccgtctttcccccgatgcctcccctcagcagctagtgtcaacttttcggttaccctctggagtcggcgcaacatgtgtccttaaatcaccagccaatggcagcctcggccccacacttaacttgtcaagtggagaatcgagactgttagctgcccggttcttcgactctatgtgcctcgaatccttcacccagggcctgccgctgagcaattttgttcctccgccacccagccccgcgcctagcgatagcccagcctctcctgacgaggacttacaggcatggaacgttagtctcccccccacagctggcccagaaatgtggacgtcagccccgtctctccccaggctcgtcagagagcccgtgagatgcacgtgttcagcacagggcaccggcttctcttgccctagttcagtgggcggtcatcccccccagatgcgcgttgttacgggggatatactgaccgacatcaccgggcacaacgtctccgagtacttactgttcaccagcgaccgcttcaggctccaccgttacggcgccatcacctttggcaacgttctcaagtccattccagcgtcgttcggtactcgagctcctcccatggtacgcaaaatcgcggtgaggcgtgccgcacaggtgttttataacaacaaaggctaccatagcatgcccacatacttaaactctcttaataacgccatcctaagggcgaatcttcctaagtcaaaaggaaatcccgctgcctatgggatcacagtcacaaaccatcctatgaataaaacaagtgctagcctctctctcgattacctgctccagggcaccgacgttgtaattgctatattcatcattgttgccatgtcctttgtacccgcctcgtttgtcgtgttcctggtggcagagaagtccacaaaggctaaacatctgcagttcgtgtcgggttgtaaccctataatttattggctagcaaactacgtttgggacatgctgaattacctggtgccagcaacatgttgtgtaattatattgtttgtttttgacctgccggcgtacacgtctcctaccaactttcccgctgtgcttagtctgtttctcctgtacggatggtctattactcccataatgtatccagcaagcttctggttcgaggtcccatctagtgcatacgtctttctgatagtgattaacctgttcatcgggattaccgcaacagtagccactttccttctgcaattatttgagcacgacaaggatctgaaggtagttaacagctacctgaagtcatgctttctgattttccctaattataaccttgggcatggtctgatggaaatggcatacaacgagtacataaacgaatattatgcgaaaatcgggcagttcgataagatgaagtctccattcgagtgggacattgtcaccagggggcttgtggcaatggcagttgagggggtggtgggctttctgctgaccattatgtgccagtacaatttcctgagacgccctcagcgcatgccagtgagcactaaacctgttgaagatgatgttgacgttgcttcagaacgccagcgcgtgctccgcggcgatgcagataacgacatggtgaaaatcgaaaatctcacaaaagtgtacaagagccgcaaaatagggagaatactggccgtggaccgactgtgtctgggagtcaggccgggcgaatgttttggcctgttaggggtgaacggggcaggaaagacaagtactttcaaaatgctcaccggggatgaatctactacaggtggagaggcctttgtcaatggtcatagcgtcctgaaggaactgttgcaggttcagcagagcctgggttattgtccacagtgcgatgctctgttcgatgagttgacggcccgcgaacatctccaactgtatacaagattaagagggatttcctggaaagacgaagcgagggtggttaaatgggcccttgaaaagctcgagttaactaaatacgcagacaaaccagctgggacctattcaggaggcaataagcgaaagctaagcacagctatcgccctcattggctatcctgcctttatcttcctagatgagcctacaactgggatggacccaaaggcgcgcaggttcttatggaatctgatcttagacctcatcaagaccggccgctccgtggtgttgacaagccactccatggaagagtgtgaagctctctgtactagactggccattatggtgaacgggaggctgcgctgtcttggcagcattcagcacctcaagaaccggttcggtgacggatacatgataacagtacgcacaaaatcatctcagtccgtgaaagatgtggtgcgctttttcaatcgaaacttccccgaggctatgctgaaggagcgtcaccacaccaaagtgcagtatcagctgaagtccgaacatatttccctggcacaggtatttagcaaaatggagcaggtttctggtgtactgggtatcgaagactattccgtgtctcagaccaccttggataatgtctttgtgaacttcgccaagaaacaatctgataatttggagcaacaggagactgagcctcccagtgccttgcaatctccactggggtgcctgctgagcctgctgagacctcggtcggcccctaccgaactaagggctctggtagcggatgagcccgaggacctggatacggaagacgaagggctgattagctttgaagaggaaagagctcagctttctttcaacacagacacgctttgttag

SEQ ID NO: 290659 - DNA, 7308 bp, Artificial Sequence
  derived and/or modified sequence
atgggcttcctgcaccagctgcagctgctgctgtggaagaatgtgaccctgaagagaagaagcccctgggtgctggcctttgagatcttcatccccctggtgctcttcttcatcctgctgggcctgcggcagaagaagcccaccatctctgtgaaggaggccttctacacagctgcccccctgaccagcgctggcatcctgcctgtgatgcagagcctgtgcccagatggccagagagatgaatttggcttcctgcagtatgccaacagcacagtgacccagctgctggagcggctggacagagtggtggaggagggcaacctgtttgatcctgcccggcccagcctgggcagcgagctggaggccctgcggcagcacctggaggccctgtctgctggccctggcaccagcggcagccacctggacaggagcacagtgagcagcttcagcctggacagcgtggccaggaacccccaggagctgtggaggttcctgacccagaacctgagcctgcccaacagcacagcccaggccctgctggccgcccgggtggaccccccagaggtgtaccacctgctgtttggccccagcagcgccctggacagccagagcggcctgcacaagggccaggagccctggagccggctgggcggcaaccccctcttcaggatggaggagctgctgctggccccagccctgctggagcagctgacctgcaccccaggcagcggggagctgggccgcatcctgactgtgcctgagagccagaagggggccctgcagggctacagagatgctgtgtgcagcggccaggccgccgcccgggcccggcgcttcagcggcctgtctgctgagctgaggaaccagctggatgtggccaaggtgtcccagcagctgggcctggatgccccaaatggaagtgacagcagcccccaggcccccccaccccggcggctgcaggccctgctgggggacctgctggatgcccagaaggtgctgcaggatgtggatgtgctgagcgccctggccctgctgctgccccagggcgcctgcaccggccgcaccccaggccccccagccagcggggccggcggggccgccaacggcaccggggccggggctgtgatgggccccaatgccacagctgaggagggcgcccccagcgctgctgccctggccaccccagacaccctgcagggccagtgcagcgcctttgtgcagctgtgggccggcctgcagcccatcctgtgtggcaacaacagaaccatcgagcctgaggccctgcggcggggcaacatgagcagcctgggcttcaccagcaaggagcagaggaacctgggcctgctggtgcacctgatgaccagcaaccccaagatcctgtatgccccagctggcagcgaggtggacagagtcatcctgaaggccaatgagacctttgcctttgtgggcaatgtgacccactacgcccaggtgtggctgaacatctctgctgagatccgctccttcctggagcagggccgcctgcagcagcacctgcgctggctgcagcagtatgtggccgagctgcggctgcaccctgaggccctgaacctgagcctggatgagctgcccccagccctgcggcaggacaacttcagcctgcccagcggcatggccctgctgcagcagctggacaccatcgacaatgctgcctgtggctggatccagttcatgagcaaggtgtctgtggacatcttcaagggcttccatgatgaggagagcatcgtgaactacaccctgaaccaggcctaccaggacaacgtgacagtgtttgccagcgtcatcttccagaccaggaaggatggcagcctgcccccccacgtgcactacaagatccggcagaacagcagcttcacagagaagaccaatgagatcagaagagcctactggaggcctggccccaacacaggaggccgcttctacttcctgtatggctttgtgtggatccaggacatgatggagcgggccatcatcgacacctttgtgggccatgatgtggtggagcccggcagctatgtgcagatgttcccctacccctgctacaccagagatgacttcctgtttgtgattgagcacatgatgcccctgtgcatggtgatctcctgggtgtacagcgtggccatgaccatccagcacatcgtggccgagaaggagcaccggctgaaggaggtgatgaagaccatgggcctgaacaatgctgtgcactgggtggcctggttcatcactggatttgtgcagctgagcatctctgtgacagccctgacagccatcctgaagtatggccaggtgctgatgcacagccacgtggtgatcatctggctgttcctggccgtgtatgctgtggccaccatcatgttctgcttcctggtgtctgtgctgtacagcaaggccaagctggccagcgcctgtggcggcatcatctacttcctgtcctatgtgccctacatgtatgtggccatccgggaggaggtggcccatgacaagatcacagcctttgagaagtgcatcgccagcctgatgagcaccacagccttcggcctgggcagcaagtactttgccctgtatgaggtggccggcgtgggcatccagtggcacaccttcagccagagccctgtggagggagatgacttcaacctgctgctggccgtgaccatgctgatggtggatgctgtggtgtatggcatcctgacctggtacattgaagctgtgcaccctggcatgtatggcctgccccggccctggtacttccccctgcagaagagctactggctgggcagcggccgcacagaggcctgggagtggagctggccctgggcccggaccccccggctgtctgtgatggaggaggaccaggcctgtgccatggagagcagaagatttgaggagacccggggcatggaggaggagcccacccacctgcccctggtggtgtgtgtggacaagctgaccaaggtgtacaaggatgacaagaagctggccctgaacaagctgagcctgaacctgtatgagaaccaggtggtgtccttcctgggccacaacggggccggcaagaccaccaccatgagcatcctgaccggcctcttcccccccaccagcggcagcgccaccatctacggccatgacatcagaacagagatggatgagatcaggaagaacctgggcatgtgcccccagcacaacgtgctgtttgaccggctgactgtggaggagcacctgtggttctacagccggctgaagtccatggcccaggaggagatccggcgggagatggacaagatgattgaggacctggagctgagcaacaagaggcacagcctggtgcagaccctgagcggcggcatgaagaggaagctgtctgtggccatcgcctttgtgggcggcagccgggccatcatcctggatgagcccacagctggggtggacccctatgcccggcgggccatctgggacctgatcctgaagtacaagccaggccgcaccatcctgctgagcacccaccacatggatgaggccgacctgctgggggacagaattgccatcatcagccacggcaagctgaagtgctgcggcagccccctcttcctgaagggcacctatggagatggctaccgcctgaccctggtgaagaggcctgctgagcccggcggcccccaggagcccggcctggccagcagccccccaggccgggcccccctgagcagctgcagcgagctgcaggtgtcccagttcatcaggaagcacgtggccagctgcctgctggtgtctgacaccagcacagagctgagctacatcctgcccagcgaggccgccaagaagggggcctttgagcggctcttccagcacctggagaggagcctggatgccctgcacctgagcagctttggcctgatggacaccaccctggaggaggtgttcctgaaggtgtctgaggaggaccagagcctggagaacagcgaggctgatgtgaaggagagcaggaaggatgtgctgcccggggctgagggccctgccagcggggagggccacgccggcaacctggcccgctgcagcgagctgacccagagccaggccagcctgcagagcgccagctctgtgggcagcgcccggggagatgagggcgccggctacacagatgtgtatggagactaccggcccctgtttgacaacccccaggaccctgacaacgtgtccctgcaggaggtggaggccgaggccctgagccgggtgggccagggcagcaggaagctggatggcggctggctgaaggtgcggcagttccacggcctgctggtgaagcgcttccactgtgcccggaggaacagcaaggccctcttcagccagatcctgctgcctgccttctttgtgtgtgtggccatgacagtggccctgtctgtgcctgagattggagacctgccccccctggtgctgagccccagccagtaccacaactacacccagccccggggcaacttcatcccctatgccaatgaggagcggcgggagtaccgcctgcggctgagcccagatgccagcccccagcagctggtgtccaccttccggctgcccagcggcgtgggcgccacctgtgtgctgaagagccctgccaacggcagcctgggccccaccctgaacctgagcagcggggagagccggctgctggccgcccgcttctttgacagcatgtgcctggagagcttcacccagggcctgcccctgagcaactttgtgcccccaccacccagccctgcccccagcgacagccctgccagcccagatgaggacctgcaggcctggaatgtgtccctgcccccaacagctggccctgagatgtggaccagcgcccccagcctgccccggctggtgcgggagcctgtgcgctgcacctgcagcgcccagggcaccggcttcagctgccccagctctgtgggcggccaccccccccagatgagggtggtgactggagacatcctgacagacatcaccggccacaacgtgtctgagtacctgctcttcaccagtgaccgcttccggctgcaccgctacggggccatcacctttggaaatgtgctgaagagcatcccagccagctttggcacccgggccccacccatggtgaggaagattgctgtgcggcgggccgcccaggtgttctacaacaacaagggctaccacagcatgcccacctacctgaacagcctgaacaatgccatcctgcgggccaacctgcccaagagcaaaggaaatcctgctgcctacggcatcaccgtgaccaaccaccccatgaacaagaccagcgccagcctgagcctggactacctgctgcagggcacagatgtggtgattgccatcttcatcatcgtggccatgagctttgtgcctgccagctttgtggtgttcctggtggccgagaagagcaccaaggccaagcacctgcagtttgtgtctggctgcaaccccatcatctactggctggccaactacgtgtgggacatgctgaactacctggtgcctgccacctgctgcgtcatcatcctgtttgtgtttgacctgcctgcctacaccagccccaccaacttccctgctgtgctgagcctcttcctgctgtatggctggagcatcacccccatcatgtacccagccagcttctggtttgaggtgcccagcagcgcctacgtgttcctgattgtcatcaacctcttcatcggcatcacagccaccgtggccaccttcctgctgcagctgtttgaacatgacaaggacctgaaggtggtgaacagctacctgaagagctgcttcctgatcttccccaactacaacctgggccacggcctgatggagatggcctacaatgagtacatcaatgagtactatgccaagattggccagtttgacaagatgaagagcccctttgagtgggacatcgtgacccggggcctggtggccatggctgtggagggcgtggtgggcttcctgctgaccatcatgtgccagtacaacttcctgcggcggccccagaggatgcctgtgtccaccaagcctgtggaggatgatgtggatgtggccagcgagcggcagagggtgctgcggggagatgctgacaatgacatggtgaagattgagaacctgaccaaggtgtacaagagcaggaagattggccgcatcctggccgtggaccggctgtgcctgggcgtgcggcctggagaatgttttggcctgctgggcgtgaatggagctgggaagaccagcaccttcaagatgctgactggagatgagagcaccactggaggagaggcctttgtgaatggccacagcgtgctgaaggagctgctgcaggtgcagcagagcctgggctactgcccccagtgtgatgccctgtttgatgagctgacagcccgggagcacctgcagctgtacacccggctgcggggcatctcctggaaggatgaggcccgggtggtgaagtgggccctggagaagctggagctgaccaagtatgctgacaagccagctggcacctacagcggcggcaacaagaggaagctgagcacagccatcgccctgattggctacccagccttcatcttcctggatgagcccaccaccggcatggaccccaaggcccggcgcttcctgtggaacctgatcctggacctgatcaagacaggccgctctgtggtgctgaccagccacagcatggaggagtgtgaggccctgtgcacccggctggccatcatggtgaatggccgcctgcgctgcctgggcagcatccagcacctgaagaacagatttggagatggctacatgatcaccgtgaggaccaagagcagccagagcgtgaaggatgtggtgcgcttcttcaacagaaacttccctgaggccatgctgaaggagcggcaccacaccaaggtgcagtaccagctgaagtctgagcacatcagcctggcccaggtgttcagcaagatggagcaggtgtctggagtgctgggcatcgaggactacagcgtgtcccagaccaccctggacaacgtgtttgtgaactttgccaagaagcagagcgacaacctggagcagcaggagacagagcccccatctgccctgcagagccccctgggctgcctgctgagcctgctgcggcccaggtctgcccccacagagctgcgggccctggtggctgatgagcctgaggacctggacacagaagatgagggcctcatcagctttgaggaggagcgggcccagctgtccttcaacacagacaccctgtgctag

SEQ ID NO: 290660 - DNA, 7308 bp, Artificial Sequence
  derived and/or modified sequence
atgggcttcctgcaccagctgcagctgctgctgtggaagaacgtgacactgaaacgaaggtccccgtgggtgctggccttcgagatttttatcccactggtccttttcttcatcctactcggactgaggcaaaaaaagccaacaatttctgtgaaggaggccttttacacagccgccccactgacttctgccggaatactgccggtgatgcagtccctttgtccagacggtcagcgggacgagttcggatttctccagtacgctaatagtactgttacacagctcctggaacggctggaccgcgtggttgaagaaggaaatttattcgatcccgcaagaccatctctgggcagcgagctagaggcactgcgacagcacctggaagcgctgtccgccggtcctggcaccagcgggtcacacttagatagatccaccgtgagttccttttcactcgattctgttgcaagaaacccacaagagctttggcggttcctcacccagaacctctcactgcctaattctaccgctcaggccctactggccgctagagtggacccccctgaggtgtatcatttactgttcggcccaagtagcgccctagacagccagtcagggctgcacaagggccaggagccatggtctaggcttggtggcaaccctttattcaggatggaggagctcctgcttgccccagctttactggagcagcttacctgcacccctgggtctggggagttgggccggatactgactgtgcccgagtctcagaagggggctttgcagggctaccgcgacgcggtgtgttccggccaggctgcagcgcgcgcgcgacgattcagcggattaagtgcggagctgcgaaaccaactcgacgtcgcaaaagtgtcccagcagctggggctcgatgcccctaacggctccgactcctccccccaggcgcctccccctcgcaggctgcaggctctattgggtgacctgttggatgcccagaaggtgctccaggacgttgacgttctatccgcactggctttgttgctgccgcagggcgcctgcaccgggcgcacaccgggcccacccgcgtccggtgccggcggagcagccaacgggactggtgctggggctgtgatgggccctaacgctactgctgaagaaggggccccatctgccgcagcacttgcgacccccgacaccctgcaggggcaatgcagcgcttttgttcagttgtgggctggactgcagccaatcttgtgtggcaacaataggaccatagaacctgaggctctccggcggggcaacatgagcagcctgggatttacctcaaaagagcagcggaacttgggactgctggttcacttgatgacatcaaatcccaagatcttgtatgcccctgccgggagtgaagtggatagggttatcttgaaggccaatgaaacttttgcgttcgtggggaacgtgactcactatgcccaggtatggcttaacatttcagctgagatacgatcatttctcgagcaggggaggcttcagcagcatctgagatggttgcaacagtacgtcgctgaattacgcctacaccccgaagcgctgaacctgtctctggatgaacttcctccagccttacggcaggacaacttttccctcccgagtgggatggcactgctgcagcagctggacacaatcgacaacgctgcttgtgggtggatacaattcatgagcaaagtgagtgttgacatttttaagggatttcacgatgaagaatccatcgtgaattatacactcaaccaagcttaccaggataatgttacagtctttgccagcgtgatattccagaccaggaaggatgggagcctcccccctcatgtgcactataaaatcagacagaactcttctttcaccgagaagaccaacgagattcggagagcttattggagacccggacccaataccggagggcgtttctacttcctctacggatttgtatggatccaggacatgatggagcgggccatcatcgataccttcgtggggcacgacgtcgtggaaccagggtcgtatgtccagatgttcccctacccctgttatacgcgggacgatttcctgttcgttattgagcacatgatgcctctgtgtatggtgattagctgggtgtattcagtcgccatgaccattcagcacatagtggcagagaaagagcataggctcaaggaggtgatgaaaacgatgggtctgaataacgctgtacactgggtcgcctggttcattacaggcttcgtgcaacttagtatcagtgtcacagctcttacagcgattctcaagtatggacaagtcttgatgcacagccacgtagtgatcatttggttgttcctggctgtgtacgccgtcgccacaatcatgttctgtttcctcgtgagtgtgctgtattccaaagcaaaactggcttccgcctgcggaggaatcatttattttctgagctacgtaccttatatgtacgtagccattcgggaggaagtcgctcacgacaagatcacggcttttgaaaagtgtatcgcatccttgatgtcgacgacggctttcggactcggctccaaatacttcgctctatacgaagttgctggagttggcattcagtggcatacgtttagtcagtctcccgtggaaggcgatgactttaacttactgctggccgtgacaatgttgatggtcgacgcagtggtttacggcatcttgacctggtatatcgaagccgtgcacccagggatgtacggcctgcctcgcccatggtactttcctctccagaagtcctattggctcgggagcgggcgcacggaagcatgggaatggagttggccatgggcccggacacctcggctgtcggtgatggaagaagaccaggcatgcgcaatggaatcacgcagatttgaagaaaccagagggatggaggaagaacccacgcaccttccactggttgtatgtgtggataaactcactaaggtttataaagatgataagaaactcgcactcaacaaactcagtctcaatctttatgaaaatcaagtagtgtctttccttggacataatggcgcaggcaagacaactactatgtcgattcttacaggtctttttcctccaaccagcgggtctgccaccatatacggacacgatatcagaaccgagatggatgaaatccgcaagaacctgggaatgtgcccccagcacaacgtcttgtttgacaggctgacagtggaggagcacctgtggttctattctcgtttgaagtcaatggctcaggaggagatccggcgggaaatggacaagatgattgaagatctcgaactgtctaacaagcggcattccctcgtgcagactctgtcggggggtatgaaaagaaagctcagtgttgcaatagcctttgtaggtggctcccgggcaatcatactggacgaaccgactgcaggagtggacccgtatgcgagacgtgccatatgggaccttattctgaaatacaagcctggtaggaccattcttcttagcactcatcatatggacgaagctgatctgctcggcgacaggattgctatcatctcacacgggaagttgaagtgctgcggtagccctctgttcctgaagggaacgtatggagatggataccgactcaccctagtaaaacgacctgcggagcctgggggcccccaggagcccggcctcgcaagctcccctcccggccgggccccactgagctcttgttctgaactgcaagttagccaattcatcagaaagcatgtggcttcatgtctgcttgtatccgacacctcaaccgaattgtcttacatcctgccaagcgaagctgccaagaaaggggcttttgagaggttgtttcaacacctggaacggtcactcgatgctcttcatctatcatcatttgggctgatggataccaccttagaggaggttttcttaaaggtctcggaagaggatcaaagcttggaaaatagcgaagccgatgttaaagagagccggaaggacgttcttcccggggcagagggtccagcatctggtgaaggccacgccgggaacctggccaggtgtagcgagcttacccagagccaggccagcctgcagtcggcctctagtgtgggcagtgcgaggggcgacgagggcgctgggtacacggatgtctatggggactatcgccccttgtttgataaccctcaggatccagataacgttagtctccaagaagtcgaagccgaggccctttccagagtcggccagggctcaagaaaattggacggcggttggttaaaagtgcggcagttccatgggctgcttgtgaagagattccactgtgccaggagaaactccaaagctcttttttctcaaatactactgcccgctttttttgtatgtgtagccatgacagtggccctatctgtgcctgagattggcgacctgccaccgctagtcctttcaccctctcagtaccataattatacacagccacgcgggaattttatcccatatgccaacgaggaacggcgtgagtatcgactgcgcctctctccagacgcctccccacagcagttagtctccacatttcgccttccatctggagtgggggccacatgtgtgcttaaatcgccagccaatgggtcactgggacctactttgaacctaagcagtggagaatctagactcctggccgctcgattttttgatagcatgtgcctcgagagcttcacccagggcctcccattgtccaatttcgttcccccgccacccagcccagcacccagcgatagccctgcttcaccagacgaggatctgcaggcttggaacgtgtcgttaccaccaacagctggccctgaaatgtggactagtgccccgagcctgccacgactggtcagggagcctgttcggtgtacctgctccgctcaggggacaggattctcatgtccatcaagcgttggtggccaccctccccagatgcgcgttgtcacaggagatattcttaccgacatcactggccacaatgtatctgagtatctgctttttacgtccgatcgattcagactgcaccgttacggagccatcacttttggcaacgtgttgaaatctatccctgcatcttttgggactcgcgcgccgccgatggtgcggaagatcgctgttaggagagcagcccaggtcttctataacaataaggggtaccacagtatgccgacttatctaaactctctcaacaacgccatcctgcgagccaatctaccaaaatctaagggaaatccagcagcctatggcattaccgttactaaccatccaatgaacaagacatccgccagcctctctctcgattaccttcttcaagggacagatgtcgtcattgccatctttattatcgtggcaatgagcttcgttccggcgtcattcgtcgtgttcctggtggccgaaaaaagcacaaaagcgaaacatctacagtttgtgtcaggttgtaaccccatcatctactggcttgcgaactacgtgtgggatatgcttaattacctggtgccagctacctgctgtgttattatcctgttcgtctttgacctcccagcttatacatctcctactaatttccctgccgttctgtcccttttcctgctgtacgggtggtccataacacctattatgtatccagcttcgttttggttcgaagtccctagttcagcctatgtcttccttatcgtcatcaatctcttcatcggtatcaccgctaccgtagcgacatttttgttgcagctgtttgaacatgataaggacttgaaggtcgtcaactcatacctgaagtcttgttttctgatcttcccaaattataacctaggccatggactcatggagatggcatataatgaatacatcaacgagtattatgctaagatcggtcagtttgataagatgaaaagcccctttgagtgggacattgtgacgcggggcttggtggcgatggctgtggagggagtggttggattcctgcttacaatcatgtgtcagtacaacttcctgaggaggcctcagcgcatgcctgtgagtaccaaaccggtggaggatgacgtagacgttgcctctgaaaggcagcgcgtccttaggggcgatgcagataacgatatggttaaaatcgaaaatctgactaaggtgtacaagtccagaaaaattggccggattcttgcagtggaccgtctctgtctaggtgtacggccaggcgaatgcttcggactgctcggagtgaatggggccggcaaaactagcaccttcaaaatgctcaccggcgacgagtccactacgggtggagaggcctttgtgaatggacactccgtgttaaaggaacttctgcaggttcaacagagcctcggctactgcccacagtgcgatgccttgtttgacgagcttacagctagggaacacctgcaattgtacacgagattacggggcatctcttggaaagatgaagcaagggtcgtcaaatgggctctggagaaactggaacttactaagtacgcagataaaccggctggaacctactccggagggaacaaacgtaagctgtccacagccattgctttaattggctatcccgcattcatattcctggatgaacctaccactggcatggaccccaaagcccgcaggtttctatggaatttaatcctggatcttattaaaaccgggaggtcagtggttctgacatctcattcgatggaggaatgtgaagccctctgtactagactggccatcatggtgaacggtcggttaagatgcctaggaagcatacaacacctgaagaataggtttggcgacggctacatgatcaccgtgaggacaaaatcctcccagtccgtcaaggatgtggtgcggttctttaatcgaaatttcccagaggctatgctgaaagagaggcatcatactaaggttcaatatcagctgaagtctgagcatatcagcctcgcccaggtgttctccaagatggaacaggtgtctggggtcttagggatcgaagattatagtgtttcacagacaacactcgacaacgttttcgtcaacttcgctaaaaagcaaagcgacaacctcgagcaacaggagacagaacctcctagtgcactacagtctcccctggggtgccttttgagcctgctcaggcctcggagtgctccaacagaattacgggcgttggtggcagacgagcctgaagacctagataccgaggatgaggggctgatatcatttgaggaagagcgcgcccaattgtctttcaacacagatacgctgtgttag

SEQ ID NO: 290661 - DNA, 7307 bp, Artificial Sequence
  derived and/or modified sequence
atgggcttcttacatcagctgcaactcctcctttggaaaaacgtgacactgaaaaggcggagcccctgggtgcttgctttcgaaatcttcataccacttgttctgttctttatcttgctgggactgagacagaaaaagcctacaattagtgtgaaagaagcgttttatacagcagctcccttgacctcggccggtatacttccagtcatgcaaagcttgtgccccgacggccagagggacgagttcgggttccttcaatatgctaactcaactgtaacgcagctcctggaacggctggacagagtcgtcgaggaggggaacttgttcgatccggctcgaccttccctcggcagcgaactggaagcgttacgccagcacctcgaggccttgtctgcaggtcccggaacgtccgggtctcatctggatcggagcactgtgagcagtttctctcttgattcagttgcgaggaatccgcaggaactgtggaggtttttgacccagaacttatctctgccaaatagcacagcgcaagctctcctggctgcacgcgttgaccccccagaagtgtaccatttattgttcggtcctagttccgccctggactcacagtcagggctccacaaaggacaggagccgtggtccagattaggagggaaccccttgttccgtatggaggagttgcttttagccccagctcttctggaacagcttacttgcacaccaggatccggtgagctggggaggattttaacagtccccgaatctcagaaaggggcactgcaaggatacagggacgcagtgtgttccggacaggctgctgccagggcacgacgctttagcggtctgagtgccgagctacgcaatcagctagatgtagcaaaggtgagtcaacaactcggtctagatgctccaaacggctctgactcttcaccccaggcgccacctccacggaggctccaggcactgctcggagatttactcgacgcccagaaggttttgcaggatgtggatgttttaagtgccttggcactacttctgccccaaggggcatgcaccggcagaacccccggacctcccgcttcaggagccggaggcgctgctaacggcaccggtgccggagctgttatgggacctaatgccaccgctgaagagggggctccctcagccgcagccctcgctacacctgacaccctgcaaggacagtgctcagcatttgtccagttatgggcgggtttgcaaccaattctgtgtggtaacaaccgaaccatcgagccagaagcattgcggagaggcaatatgtccagtcttggctttacctccaaggagcagcggaatcttggcctgctggtgcacctgatgactagcaaccctaagatcttatacgcaccagccggatcagaggtggatcgcgtgatcctcaaggcgaacgagaccttcgccttcgttggaaacgtaacacactatgctcaagtgtggctgaacatcagtgcggagatccgctcattcctcgagcaggggcgtctgcagcagcacctgcggtggctccaacagtacgtggccgagcttaggctccaccctgaggcccttaatctgtctctggatgaactccctcccgctctgcgacaggacaacttcagccttccttccgggatggccctactccaacagctggatacaatcgataatgcggcatgcggctggatccagtttatgagcaaggtgtcagtggatatcttcaaaggcttccatgacgaagagtccatcgtcaattacaccctcaaccaagcgtatcaggataatgttaccgtgtttgcatccgtgatctttcaaaccaggaaggacggaagcctcccacctcacgtccattataagattcgccaaaattcctcttttaccgagaaaactaacgagatacggagggcatattggcgcccaggacctaacaccgggggacgtttctacttcctgtacggcttcgtctggattcaagacatgatggagcgggcaatcattgacacctttgttggccacgacgtggtcgaaccgggatcatatgtccagatgttcccctatccttgctacacgcgcgatgacttcctcttcgtgatcgagcatatgatgcccctatgtatggtgatatcttgggtatattccgtggctatgactattcaacatatcgttgccgaaaaagagcatcgccttaaggaagtaatgaaaaccatgggacttaacaacgccgtgcattgggtggcatggttcatcaccggctttgtccagctgagcatctcagtcacagccctgaccgccatattgaagtacggacaggtgctgatgcacagccatgtcgtgatcatttggctttttttagcagtatatgcagtcgcaacaatcatgttctgctttctggtgtcagtgctgtattctaaagccaagctggccagtgcttgcgggggtatcatttactttctgtcttatgtgccctacatgtatgtcgcgattcgtgaagaggtggcacatgataagataactgcttttgagaaatgcattgctagtctgatgtctaccaccgctttcggcctaggaagcaaatatttcgccctgtacgaagtggccggagtgggtatacaatggcacaccttctcacagagccctgtagaaggcgatgactttaatctgttattggccgtaacaatgctgatggtagacgcagtggtctatgggattttaacatggtatattgaggccgttcacccaggtatgtacggcctccccagaccttggtacttcccactgcagaagtcttactggctaggatcgggtcgaaccgaagcttgggaatggagttggccgtgggctagaacgccgcgattgagcgtgatggaggaggatcaggcatgcgccatggaaagccgtcggttcgaggagacccgcggtatggaggaagaaccgactcatctgcccctggtcgtttgcgtggataaactcacaaaggtctacaaggacgataaaaaactggccctgaataagttgtctctgaacctctacgaaaaccaagttgtctctttcctcggtcacaatggagccggaaagactacaaccatgtccattctcaccgggcttttcccccctaccagcgggtccgctaccatatacggccatgacatcagaactgaaatggacgagatcagaaagaatttaggtatgtgccctcagcacaacgtgctgtttgatcggctcacggtggaggagcatctttggttttattcccgattaaagtctatggcccaggaggagattagaagggagatggataaaatgattgaagacctggaactatccaacaaacgacatagccttgtgcaaactctcagcgggggtatgaagagaaaactgtccgtcgccatcgcgtttgtggggggatctagggcaattatcttagatgagcctaccgccggtgttgacccctacgccagaagagcgatttgggaccttattctgaagtacaaacccggtcggaccatcttgctgtctactcaccacatggatgaagctgatctgcttggagaccgtatcgctatcattagtcacggtaaactcaagtgctgtggctcccctctgtttttgaaaggtacctacggtgatggctatcgactcaccctcgtgaagagacccgctgagcctggaggcccacaagagcccggtctggcctcgagccctcctgggcgtgccccactgtcaagctgttcagagctgcaggttagccagttcatacgcaaacatgtggccagttgtctgctggtctctgacacaagtactgagttgagctacattcttccctctgaggctgccaaaaaaggtgcttttgaacgcctgtttcaacacctggaaaggtcactggacgctttacatcttagctcctttggtctgatggacactactctggaagaggttttcctcaaggtgagcgaagaagaccagtctttagagaactctgaagccgacgttaaggagagccggaaagacgtgctgcctggcgctgagggacccgcttccggggagggacatgcgggtaatctcgccagatgttccgagttgacccagtcccaggcaagtctgcaaagcgcatcctcagtcggcagcgctcgcggtgacgagggcgctggttacacagacgtgtatggagactatcggcctctttttgataaccctcaagatccagataatgtgtctctccaggaggtggaagccgaggccctgagtcgtgttggacaaggttcacggaaactggatggaggctggctgaaggtgaggcagttccacgggctcctggtgaaaagatttcactgtgccagaagaaattccaaagctctcttttcccagatccttctgccagccttctttgtctgtgtggccatgacagtggctttgtctgtgcctgaaattggtgacctacctcctttagtattaagcccgagccagtaccacaattacacccagccaagaggcaactttatcccttacgccaacgaagagcgccgtgaatatagactccggctctcacctgatgcgtccccccaacaacttgtgagcacctttagactgccttccggtgtcggtgctacctgtgtactgaagtccccagccaatggcagcctgggtcccaccctgaacctgtccagtggggagtccagattgttggcggctcggttttttgactctatgtgtcttgagagcttcacacaagggctcccactctcaaacttcgtgcctccacctccttccccagccccaagcgactcccccgcaagcccagacgaggatctgcaagcttggaacgtgtccctcccccctacagctggcccagagatgtggacttccgctcctagcctgcctagactcgtaagggagccagtgagatgcacgtgctctgcacagggcaccggattttcgtgcccgtcttccgtcggcggtcacccccctcaaatgagagtcgtgacaggtgatattttaaccgacatcacaggtcataatgtttccgaatacttgctattcacgtcagatcgcttccgattgcacagatatggcgctattacctttggaaatgtcctgaagtctattcccgctagtttcgggaccagggccccacccatggtacgcaagattgccgtgcgacgggctgcccaggtattctacaacaataaaggctaccattccatgccaacttacttgaatagtcttaataacgccatcctgcgagcaaatttgccaaagtctaagggtaaccccgcagcgtacggcatcacagtgaccaaccaccctatgaacaaaacatctgcctccttgtccctggactatctcctccagggaacagatgtggtcattgctatttttattatcgtggcaatgagcttcgtgccggctagttttgtagtgtttctagtggccgagaagagtaccaaagctaaacatctgcagttcgtgagtggctgtaatccaataatttattggctggctaactacgtgtgggacatgctaaactatctcgtgccagccacatgttgcgtgatcattctttttgtatttgacttaccggcttacacctctcctacaaacttccctgctgtcctgagtctgtttctattatacggctggagcatcacacccatcatgtatcccgcaagcttctggtttgaggtgccaagcagtgcttatgtcttcttgatcgtcatcaatctgtttataggcattaccgccaccgtcgctaccttccttctgcagctcttcgaacacgacaaagacctcaaagtggtaaactcatatctgaagtcctgttttctaatctttcccaactacaatctaggccatggtctgatggaaatggcatacaatgagtacattaacgagtattatgccaagataggccagtttgacaaaatgaagtccccatttgaatgggacattgtgacccgtggcctggtggcgatggcggtggagggcgtggtgggctttctgttgacgatcatgtgtcagtacaatttcctgaggaggccccagagaatgcccgtctcaaccaagccggtagaagacgacgtggacgtagcctccgaacggcagagagtcctgcgcggagatgccgacaacgacatggtgaagatcgagaatctcacaaaggtttataagagccgtaaaatcggtcgcattcttgcagtcgaccgtctgtgtctgggggtacgacccggtgaatgttttgggcttctgggggttaatggcgcaggaaagacatcgacattcaagatgctcactggagatgaatccactactggaggggaagccttcgttaacggtcattctgtcttgaaggaactgctccaggtgcagcaaagccttggttactgtccgcagtgtgacgccctgttcgatgagttaaccgctcgggaacatctccagctttacacacggttgcgcggaattagttggaaggatgaagcacgcgttgttaaatgggcgttagagaaactggaattgactaagtacgcagacaagccagcaggtacttactccggaggcaataagcgcaaactctccaccgctatcgctctgattggctaccccgcattcatcttcttggatgaacccacaacaggcatggatcctaaggctcggagattcctgtggaatctgatcctggacttaattaagaccggacgatctgtagtgctgacttcccattccatggaagaatgtgaagccctgtgtaccagacttgctatcatggttaatggcaggttaaggtgtcttggatcaatccagcatcttaagaatcgcttcggagatggctatatgattaccgtacgcacaaagagctcacaaagtgtgaaagacgtggtccgcttttttaaccgcaatttccctgaggccatgcttaaggaaagacaccatacaaaggtacagtaccagctcaaatccgaacatatctctctcgctcaggttttttctaaaatggaacaggtttctggcgttctgggcattgaggactacagcgtgtctcagactacattggataacgtcttcgtgaattttgcgaagaaacagtctgacaacctcgaacagcaagaaacggagcctccatccgcactgcagtctcctctgggctgtcttctgagcttgctccgcccacgaagtgcgcctacagagctccgagcgcttgtggcagatgagccagaggaccttgacacagaagacgaagggttgatttcattcgaagaagagcgagcccagctctcttttaacactgataccctttgcta

SEQ ID NO: 290662 - DNA, 8151 bp, Artificial Sequence
  derived and/or modified sequence
ggggcggagccagcgcggatcgggtcccggacgcccgagcgccccgcccccgcgcgggcgatgcccagcggcgcggcgggctgcggggcccggcggggcgcgcagaggagcgggccgcggcgctgaggcggcggagcgtggccccgccatgggcttcctgcaccagctgcagctgctgctctggaagaacgtgacgctcaaacgccggagcccgtgggtcctggccttcgagatcttcatccccctggtgctgttctttatcctgctggggctgcgacagaagaagcccaccatctccgtgaaggaagccttctacacagcggcgcccctgacgtctgccggcatcctgcctgtcatgcaatcgctgtgcccggacggccagcgagacgagttcggcttcctgcagtacgccaactccacggtcacgcagctgcttgagcgcctggaccgcgtggtggaggaaggcaacctgtttgacccagcgcggcccagcctgggctcagagctcgaggccctacgccagcatctggaggccctcagtgcgggcccgggcacctcggggagccacctggacagatccacagtgtcttccttctctctggactcggtggccagaaacccgcaggagctctggcgtttcctgacgcaaaacttgtcgctgcccaatagcacggcccaagcactcttggccgcccgtgtggacccgcccgaggtctaccacctgctctttggtccctcatctgccctggattcacagtctggcctccacaagggtcaggagccctggagccgcctagggggcaatcccctgttccggatggaggagctgctgctggctcctgccctcctggagcagctcacctgcacgccgggctcgggggagctgggccggatcctcactgtgcctgagagtcagaagggagccctgcagggctaccgggatgctgtctgcagtgggcaggctgctgcgcgtgccaggcgcttctctgggctgtctgctgagctccggaaccagctggacgtggccaaggtctcccagcagctgggcctggatgcccccaacggctcggactcctcgccacaggcgccacccccacggaggctgcaggcgcttctgggggacctgctggatgcccagaaggttctgcaggatgtggatgtcctgtcggccctggccctgctactgccccagggtgcctgcactggccggacccccggacccccagccagtggtgcgggtggggcggccaatggcactggggcaggggcagtcatgggccccaacgccaccgctgaggagggcgcaccctctgctgcagcactggccaccccggacacgctgcagggccagtgctcagccttcgtacagctctgggccggcctgcagcccatcttgtgtggcaacaaccgcaccattgaacccgaggcgctgcggcggggcaacatgagctccctgggcttcacgagcaaggagcagcggaacctgggcctcctcgtgcacctcatgaccagcaaccccaaaatcctgtacgcgcctgcgggctctgaggtcgaccgcgtcatcctcaaggccaacgagacttttgcttttgtgggcaacgtgactcactatgcccaggtctggctcaacatctcggcggagatccgcagcttcctggagcagggcaggctgcagcaacacctgcgctggctgcagcagtatgtagcagagctgcggctgcaccccgaggcactgaacctgtcactggatgagctgccgccggccctgagacaggacaacttctcgctgcccagtggcatggccctcctgcagcagctggataccattgacaacgcggcctgcggctggatccagttcatgtccaaggtgagcgtggacatcttcaagggcttccacgacgaggagagcattgtcaactacaccctcaaccaggcctaccaggacaacgtcactgtttttgccagtgtgatcttccagacccggaaggacggctcgctcccgcctcacgtgcactacaagatccgccagaactccagcttcaccgagaaaaccaacgagatccgccgcgcctactggcggcctgggcccaatactggcggccgcttctacttcctctacggcttcgtctggatccaggacatgatggagcgcgccatcatcgacacttttgtggggcacgatgtggtggagccaggcagctacgtgcagatgttcccctacccctgctacacacgcgatgacttcctgtttgtcattgagcacatgatgccgctgtgcatggtgatctcctgggtctactccgtggccatgaccatccagcacatcgtggcggagaaggagcaccggctcaaggaggtgatgaagaccatgggcctgaacaacgcggtgcactgggtggcctggttcatcaccggctttgtgcagctgtccatctccgtgacagcactcaccgccatcctgaagtacggccaggtgcttatgcacagccacgtggtcatcatctggctcttcctggcagtctacgcggtggccaccatcatgttctgcttcctggtgtctgtgctgtactccaaggccaagctggcctcggcctgcggtggcatcatctacttcctgagctacgtgccctacatgtacgtggcgatccgagaggaggtggcgcatgataagatcacggccttcgagaagtgcatcgcgtccctcatgtccacgacggcctttggtctgggctctaagtacttcgcgctgtatgaggtggccggcgtgggcatccagtggcacaccttcagccagtccccggtggagggggacgacttcaacttgctcctggctgtcaccatgctgatggtggacgccgtggtctatggcatcctcacgtggtacattgaggctgtgcacccaggcatgtacgggctgccccggccctggtacttcccactgcagaagtcctactggctgggcagtgggcggacagaagcctgggagtggagctggccgtgggcacgcaccccccgcctcagtgtcatggaggaggaccaggcctgtgccatggagagccggcgctttgaggagacccgtggcatggaggaggagcccacccacctgcctctggttgtctgcgtggacaaactcaccaaggtctacaaggacgacaagaagctggccctgaacaagctgagcctgaacctctacgagaaccaggtggtctccttcttgggccacaacggggcgggcaagaccaccaccatgtccatcctgaccggcctgttccctccaacgtcgggttccgccaccatctacgggcacgacatccgcacggagatggatgagatccgcaagaacctgggcatgtgcccgcagcacaatgtgctctttgaccggctcacggtggaggaacacctctggttctactcacggctcaagagcatggctcaggaggagatccgcagagagatggacaagatgatcgaggacctggagctctccaacaaacggcactcactggtgcagacattgtcgggtggcatgaagcgcaagctgtccgtggccatcgccttcgtgggcggctctcgcgccatcatcctggacgagcccacggcgggcgtggacccctacgcgcgccgcgccatctgggacctcatcctgaagtacaagccaggccgcaccatccttctgtccacccaccacatggatgaggctgacctgcttggggaccgcattgccatcatctcccatgggaagctcaagtgctgcggctccccgctcttcctcaagggcacctatggcgacgggtaccgcctcacgctggtcaagcggcccgccgagccggggggcccccaagagccagggctggcatccagccccccaggtcgggccccgctgagcagctgctccgagctccaggtgtcccagttcatccgcaagcatgtggcctcctgcctgctggtctcagacacaagcacggagctctcctacatcctgcccagcgaggccgccaagaagggggctttcgagcgcctcttccagcacctggagcgcagcctggatgcactgcacctcagcagcttcgggctgatggacacgaccctggaggaagtgttcctcaaggtgtcggaggaggatcagtcgctggagaacagtgaggccgatgtgaaggagtccaggaaggatgtgctccctggggcggagggcccggcgtctggggagggtcacgctggcaatctggcccggtgctcggagctgacccagtcgcaggcatcgctgcagtcggcgtcatctgtgggctctgcccgtggcgacgagggagctggctacaccgacgtctatggcgactaccgccccctctttgataacccacaggacccagacaatgtcagcctgcaagaggtggaggcagaggccctgtcgagggtcggccagggcagccgcaagctggacggcgggtggctgaaggtgcgccagttccacgggctgctggtcaaacgcttccactgcgcccgccgcaactccaaggcactcttctcccagatcttgctgccagccttcttcgtctgcgtggccatgaccgtggccctgtccgtcccggagattggtgatctgcccccgctggtcctgtcaccttcccagtaccacaactacacccagccccgtggcaatttcatcccctacgccaacgaggagcgccgcgagtaccggctgcggctatcgcccgacgccagcccccagcagctcgtgagcacgttccggctgccgtcgggggtgggtgccacctgcgtgctcaagtctcccgccaacggctcgctggggcccacgttgaacctgagcagcggggagtcgcgcctgctggcggctcggttcttcgacagcatgtgtctggagtccttcacacaggggctgccactgtccaatttcgtgccacccccaccctcgcccgccccatctgactcgccagcgtccccggatgaggacctgcaggcctggaacgtctccctgccgcccaccgctgggccagaaatgtggacgtcggcaccctccctgccgcgcctggtacgggagcccgtccgctgcacctgctctgcgcagggcaccggcttctcctgccccagcagtgtgggcgggcacccgccccagatgcgggtggtcacaggcgacatcctgaccgacatcaccggccacaatgtctctgagtacctgctcttcacctccgaccgcttccgactgcaccggtatggggccatcacctttggaaacgtcctgaagtccatcccagcctcatttggcaccagggccccacccatggtgcggaagatcgcggtgcgcagggctgcccaggttttctacaacaacaagggctatcacagcatgcccacctacctcaacagcctcaacaacgccatcctgcgtgccaacctgcccaagagcaagggcaacccggcggcttacggcatcaccgtcaccaaccaccccatgaataagaccagcgccagcctctccctggattacctgctgcagggcacggatgtcgtcatcgccatcttcatcatcgtggccatgtccttcgtgccggccagcttcgttgtcttcctcgtggccgagaagtccaccaaggccaagcacctgcagtttgtcagcggctgcaaccccatcatctactggctggcgaactacgtgtgggacatgctcaactacctggtccccgctacctgctgtgtcatcatcctgtttgtgttcgacctgccggcctacacgtcgcccaccaacttccctgccgtcctctccctcttcctgctctatgggtggtccatcacgcccatcatgtacccggcctccttctggttcgaggtccccagctccgcctacgtgttcctcattgtcatcaatctcttcatcggcatcaccgccaccgtggccaccttcctgctacagctcttcgagcacgacaaggacctgaaggttgtcaacagttacctgaaaagctgcttcctcattttccccaactacaacctgggccacgggctcatggagatggcctacaacgagtacatcaacgagtactacgccaagattggccagtttgacaagatgaagtccccgttcgagtgggacattgtcacccgcggactggtggccatggcggttgagggcgtcgtgggcttcctcctgaccatcatgtgccagtacaacttcctgcggcggccacagcgcatgcctgtgtctaccaagcctgtggaggatgatgtggacgtggccagtgagcggcagcgagtgctccggggagacgccgacaatgacatggtcaagattgagaacctgaccaaggtctacaagtcccggaagattggccgtatcctggccgttgaccgcctgtgcctgggtgtgcgtcctggcgagtgcttcgggctcctgggcgtcaacggtgcgggcaagaccagcaccttcaagatgctgaccggcgacgagagcacgacggggggcgaggccttcgtcaatggacacagcgtgctgaaggagctgctccaggtgcagcagagcctcggctactgcccgcagtgtgacgcgctgttcgacgagctcacggcccgggagcacctgcagctgtacacgcggctgcgtgggatctcctggaaggacgaggcccgggtggtgaagtgggctctggagaagctggagctgaccaagtacgcagacaagccggctggcacctacagcggcggcaacaagcggaagctctccacggccatcgccctcattgggtacccagccttcatcttcctggacgagcccaccacaggcatggaccccaaggcccggcgcttcctctggaacctcatccttgacctcatcaagacagggcgttcagtggtgctgacatcacacagcatggaggagtgcgaggcgctgtgcacgcggctggccatcatggtgaacggtcgcctgcggtgcctgggcagcatccagcacctgaagaaccggtttggagatggctacatgatcacggtgcggaccaagagcagccagagtgtgaaggacgtggtgcggttcttcaaccgcaacttcccggaagccatgctcaaggagcggcaccacacaaaggtgcagtaccagctcaagtcggagcacatctcgctggcccaggtgttcagcaagatggagcaggtgtctggcgtgctgggcatcgaggactactcggtcagccagaccacactggacaatgtgttcgtgaactttgccaagaagcagagtgacaacctggagcagcaggagacggagccgccatccgcactgcagtcccctctcggctgcttgctcagcctgctccggccccggtctgcccccacggagctccgggcacttgtggcagacgagcccgaggacctggacacggaggacgagggcctcatcagcttcgaggaggagcgggcccagctgtccttcaacacggacacgctctgctgaccacccagagctgggccagggaggacacgctccactgaccacccagagctgggccagggactcaacaatggggacagaagtcccccagtgcctgccagggcctggagtggaggttcaggaccaaggggcttctggtcctccagcccctgtactcggccatgccctgtggtcactgcggttgccgcccctaattgtgccaaaggctgacccggcccgggctgcgtacacccttgccctgctttgccttaaagcctcggggtctgcccggcccctcgcccctgcctggcactgctcaccgcccaaggcgacgccggctggaccaggcactgctggcctttctcctgcccggcctcggaaccagcttttctctcttacgatgaaggctgatgccgagagcgggctgtgggcggagctgggtcagtcccgtatttattttgctttgagaagaggctcctctggccctgctctcctgcagggaggtggctgtcctgcgggaagccatcagcttgggccagctggcaggtggcaggaatggagaagctgaccctgctggccaggcaaggggccagaccccccccaacccccagctgccatcgctctcccacccagcttggccccctgcccgcccacctccctgggagccgggcctgtacatagcgcacagatgtttgttttaaataaataaacaaaatgtc

SEQ ID NO: 290663 - DNA, 7308 bp, Artificial Sequence
  derived and/or modified sequence
atgggcttcctgcaccagctgcagctgctgctgtggaagaacgtgaccctgaagagaagaagcccctgggtgctggccttcgagatcttcatccccctggtgctgttcttcatcctgctgggcctgagacagaagaagcccaccatcagcgtgaaggaggccttctacaccgccgcccccctgaccagcgccggcatcctgcccgtgatgcagagcctgtgccccgacggccagagagacgagttcggcttcctgcagtacgccaacagcaccgtgacccagctgctggagagactggacagagtggtggaggagggcaacctgttcgaccccgccagacccagcctgggcagcgagctggaggccctgagacagcacctggaggccctgagcgccggccccggcaccagcggcagccacctggacagaagcaccgtgagcagcttcagcctggacagcgtggccagaaacccccaggagctgtggagattcctgacccagaacctgagcctgcccaacagcaccgcccaggccctgctggccgccagagtggacccccccgaggtgtaccacctgctgttcggccccagcagcgccctggacagccagagcggcctgcacaagggccaggagccctggagcagactgggcggcaaccccctgttcagaatggaggagctgctgctggcccccgccctgctggagcagctgacctgcacccccggcagcggcgagctgggcagaatcctgaccgtgcccgagagccagaagggcgccctgcagggctacagagacgccgtgtgcagcggccaggccgccgccagagccagaagattcagcggcctgagcgccgagctgagaaaccagctggacgtggccaaggtgagccagcagctgggcctggacgcccccaacggcagcgacagcagcccccaggcccccccccccagaagactgcaggccctgctgggcgacctgctggacgcccagaaggtgctgcaggacgtggacgtgctgagcgccctggccctgctgctgccccagggcgcctgcaccggcagaacccccggcccccccgccagcggcgccggcggcgccgccaacggcaccggcgccggcgccgtgatgggccccaacgccaccgccgaggagggcgcccccagcgccgccgccctggccacccccgacaccctgcagggccagtgcagcgccttcgtgcagctgtgggccggcctgcagcccatcctgtgcggcaacaacagaaccatcgagcccgaggccctgagaagaggcaacatgagcagcctgggcttcaccagcaaggagcagagaaacctgggcctgctggtgcacctgatgaccagcaaccccaagatcctgtacgcccccgccggcagcgaggtggacagagtgatcctgaaggccaacgagaccttcgccttcgtgggcaacgtgacccactacgcccaggtgtggctgaacatcagcgccgagatcagaagcttcctggagcagggcagactgcagcagcacctgagatggctgcagcagtacgtggccgagctgagactgcaccccgaggccctgaacctgagcctggacgagctgccccccgccctgagacaggacaacttcagcctgcccagcggcatggccctgctgcagcagctggacaccatcgacaacgccgcctgcggctggatccagttcatgagcaaggtgagcgtggacatcttcaagggcttccacgacgaggagagcatcgtgaactacaccctgaaccaggcctaccaggacaacgtgaccgtgttcgccagcgtgatcttccagaccagaaaggacggcagcctgcccccccacgtgcactacaagatcagacagaacagcagcttcaccgagaagaccaacgagatcagaagagcctactggagacccggccccaacaccggcggcagattctacttcctgtacggcttcgtgtggatccaggacatgatggagagagccatcatcgacaccttcgtgggccacgacgtggtggagcccggcagctacgtgcagatgttcccctacccctgctacaccagagacgacttcctgttcgtgatcgagcacatgatgcccctgtgcatggtgatcagctgggtgtacagcgtggccatgaccatccagcacatcgtggccgagaaggagcacagactgaaggaggtgatgaagaccatgggcctgaacaacgccgtgcactgggtggcctggttcatcaccggcttcgtgcagctgagcatcagcgtgaccgccctgaccgccatcctgaagtacggccaggtgctgatgcacagccacgtggtgatcatctggctgttcctggccgtgtacgccgtggccaccatcatgttctgcttcctggtgagcgtgctgtacagcaaggccaagctggccagcgcctgcggcggcatcatctacttcctgagctacgtgccctacatgtacgtggccatcagagaggaggtggcccacgacaagatcaccgccttcgagaagtgcatcgccagcctgatgagcaccaccgccttcggcctgggcagcaagtacttcgccctgtacgaggtggccggcgtgggcatccagtggcacaccttcagccagagccccgtggagggcgacgacttcaacctgctgctggccgtgaccatgctgatggtggacgccgtggtgtacggcatcctgacctggtacatcgaggccgtgcaccccggcatgtacggcctgcccagaccctggtacttccccctgcagaagagctactggctgggcagcggcagaaccgaggcctgggagtggagctggccctgggccagaacccccagactgagcgtgatggaggaggaccaggcctgcgccatggagagcagaagattcgaggagaccagaggcatggaggaggagcccacccacctgcccctggtggtgtgcgtggacaagctgaccaaggtgtacaaggacgacaagaagctggccctgaacaagctgagcctgaacctgtacgagaaccaggtggtgagcttcctgggccacaacggcgccggcaagaccaccaccatgagcatcctgaccggcctgttcccccccaccagcggcagcgccaccatctacggccacgacatcagaaccgagatggacgagatcagaaagaacctgggcatgtgcccccagcacaacgtgctgttcgacagactgaccgtggaggagcacctgtggttctacagcagactgaagagcatggcccaggaggagatcagaagagagatggacaagatgatcgaggacctggagctgagcaacaagagacacagcctggtgcagaccctgagcggcggcatgaagagaaagctgagcgtggccatcgccttcgtgggcggcagcagagccatcatcctggacgagcccaccgccggcgtggacccctacgccagaagagccatctgggacctgatcctgaagtacaagcccggcagaaccatcctgctgagcacccaccacatggacgaggccgacctgctgggcgacagaatcgccatcatcagccacggcaagctgaagtgctgcggcagccccctgttcctgaagggcacctacggcgacggctacagactgaccctggtgaagagacccgccgagcccggcggcccccaggagcccggcctggccagcagcccccccggcagagcccccctgagcagctgcagcgagctgcaggtgagccagttcatcagaaagcacgtggccagctgcctgctggtgagcgacaccagcaccgagctgagctacatcctgcccagcgaggccgccaagaagggcgccttcgagagactgttccagcacctggagagaagcctggacgccctgcacctgagcagcttcggcctgatggacaccaccctggaggaggtgttcctgaaggtgagcgaggaggaccagagcctggagaacagcgaggccgacgtgaaggagagcagaaaggacgtgctgcccggcgccgagggccccgccagcggcgagggccacgccggcaacctggccagatgcagcgagctgacccagagccaggccagcctgcagagcgccagcagcgtgggcagcgccagaggcgacgagggcgccggctacaccgacgtgtacggcgactacagacccctgttcgacaacccccaggaccccgacaacgtgagcctgcaggaggtggaggccgaggccctgagcagagtgggccagggcagcagaaagctggacggcggctggctgaaggtgagacagttccacggcctgctggtgaagagattccactgcgccagaagaaacagcaaggccctgttcagccagatcctgctgcccgccttcttcgtgtgcgtggccatgaccgtggccctgagcgtgcccgagatcggcgacctgccccccctggtgctgagccccagccagtaccacaactacacccagcccagaggcaacttcatcccctacgccaacgaggagagaagagagtacagactgagactgagccccgacgccagcccccagcagctggtgagcaccttcagactgcccagcggcgtgggcgccacctgcgtgctgaagagccccgccaacggcagcctgggccccaccctgaacctgagcagcggcgagagcagactgctggccgccagattcttcgacagcatgtgcctggagagcttcacccagggcctgcccctgagcaacttcgtgccccccccccccagccccgcccccagcgacagccccgccagccccgacgaggacctgcaggcctggaacgtgagcctgccccccaccgccggccccgagatgtggaccagcgcccccagcctgcccagactggtgagagagcccgtgagatgcacctgcagcgcccagggcaccggcttcagctgccccagcagcgtgggcggccaccccccccagatgagagtggtgaccggcgacatcctgaccgacatcaccggccacaacgtgagcgagtacctgctgttcaccagcgacagattcagactgcacagatacggcgccatcaccttcggcaacgtgctgaagagcatccccgccagcttcggcaccagagccccccccatggtgagaaagatcgccgtgagaagagccgcccaggtgttctacaacaacaagggctaccacagcatgcccacctacctgaacagcctgaacaacgccatcctgagagccaacctgcccaagagcaagggcaaccccgccgcctacggcatcaccgtgaccaaccaccccatgaacaagaccagcgccagcctgagcctggactacctgctgcagggcaccgacgtggtgatcgccatcttcatcatcgtggccatgagcttcgtgcccgccagcttcgtggtgttcctggtggccgagaagagcaccaaggccaagcacctgcagttcgtgagcggctgcaaccccatcatctactggctggccaactacgtgtgggacatgctgaactacctggtgcccgccacctgctgcgtgatcatcctgttcgtgttcgacctgcccgcctacaccagccccaccaacttccccgccgtgctgagcctgttcctgctgtacggctggagcatcacccccatcatgtaccccgccagcttctggttcgaggtgcccagcagcgcctacgtgttcctgatcgtgatcaacctgttcatcggcatcaccgccaccgtggccaccttcctgctgcagctgttcgagcacgacaaggacctgaaggtggtgaacagctacctgaagagctgcttcctgatcttccccaactacaacctgggccacggcctgatggagatggcctacaacgagtacatcaacgagtactacgccaagatcggccagttcgacaagatgaagagccccttcgagtgggacatcgtgaccagaggcctggtggccatggccgtggagggcgtggtgggcttcctgctgaccatcatgtgccagtacaacttcctgagaagaccccagagaatgcccgtgagcaccaagcccgtggaggacgacgtggacgtggccagcgagagacagagagtgctgagaggcgacgccgacaacgacatggtgaagatcgagaacctgaccaaggtgtacaagagcagaaagatcggcagaatcctggccgtggacagactgtgcctgggcgtgagacccggcgagtgcttcggcctgctgggcgtgaacggcgccggcaagaccagcaccttcaagatgctgaccggcgacgagagcaccaccggcggcgaggccttcgtgaacggccacagcgtgctgaaggagctgctgcaggtgcagcagagcctgggctactgcccccagtgcgacgccctgttcgacgagctgaccgccagagagcacctgcagctgtacaccagactgagaggcatcagctggaaggacgaggccagagtggtgaagtgggccctggagaagctggagctgaccaagtacgccgacaagcccgccggcacctacagcggcggcaacaagagaaagctgagcaccgccatcgccctgatcggctaccccgccttcatcttcctggacgagcccaccaccggcatggaccccaaggccagaagattcctgtggaacctgatcctggacctgatcaagaccggcagaagcgtggtgctgaccagccacagcatggaggagtgcgaggccctgtgcaccagactggccatcatggtgaacggcagactgagatgcctgggcagcatccagcacctgaagaacagattcggcgacggctacatgatcaccgtgagaaccaagagcagccagagcgtgaaggacgtggtgagattcttcaacagaaacttccccgaggccatgctgaaggagagacaccacaccaaggtgcagtaccagctgaagagcgagcacatcagcctggcccaggtgttcagcaagatggagcaggtgagcggcgtgctgggcatcgaggactacagcgtgagccagaccaccctggacaacgtgttcgtgaacttcgccaagaagcagagcgacaacctggagcagcaggagaccgagccccccagcgccctgcagagccccctgggctgcctgctgagcctgctgagacccagaagcgcccccaccgagctgagagccctggtggccgacgagcccgaggacctggacaccgaggacgagggcctgatcagcttcgaggaggagagagcccagctgagcttcaacaccgacaccctgtgctag

SEQ ID NO: 290664 - protein, 343 aa, Artificial Sequence
  derived and/or modified sequence
MACEPQVDPGATGPLPPSSPGWSALPGGSPPGWGQELHNGQVLTVLRIDNTCAPISFDLGAAEEQLQTWGIQQVPADQYRSLAESALLEPQVRRYIIYNSRPMRLAFAVVFYVVVWANIYSTSQMFALGNHWAGMLLVTLAAVSLTLTLVLVFERHQKKANTNTDLRLAAANGALLRHRVLLGVTDTVEGCQSVIQLWFVYFDLENCVQFLSDHVQEMKTSQESLLRSRLSQLCVVMETGVSPATAEGPENLEDAPLLPGNSCPNERPLMQTELHQLVPEAEPEEMARQLLAVFGGYYIRLLVTSQLPQAMGTRHTNSPRIPCPCQLIEAYILGTGCCPFLAR

SEQ ID NO: 290665 - DNA, 4578 bp, Artificial Sequence
  derived and/or modified sequence
ggcgggaacccgtgccccaagatgccgtgcacgtggtcggctccgcgcggaggctccttccggcgtcccgggggggcgctcggctgatgaaacgcggcctccagctccgctccgccgcgggcccgggaggcgcgttccctcttggccccaaagcgagtccggcgggcggctcctcggggttgggcgaccgagcggggccggccgggcggggggcgggcccgtgaaggcggcgcagcgcggcgcgggaggcgtgctgggcgcggggctgcggtgcccagaggctgcggcattaggggctcggcgcccccgaccttccgcgtcccggggtggcggcggcggcggcggcggcggcgcgggcggcatatgatgctgagctggctgctccagaatgaaccacagctctgagaaggggaagtagaaacagctggcgccctgccatggcctgtgaaccacaggtggacccgggggccactggcccattgcccccctcctcccctggctggagtgccctgcctggagggagccctcctggctgggggcaagagctccacaatggccaggtcctcactgttctccggattgacaatacctgtgcacccatctccttcgacctgggagccgcagaagagcaactgcaaacttggggcatccagcaggtcccggctgaccagtacaggagcttggctgagagtgccctcttggagccccaagtgagaagatatatcatctacaactcgaggcctatgcggctggcctttgctgtggttttctatgtggtggtgtgggccaatatctactctaccagtcagatgtttgccttggggaaccactgggctggcatgctgctcgtgaccctggccgcggtgagcctgaccttgactcttgtgctggtctttgaaagacaccagaagaaggccaacaccaacacggacctgaggctggcagctgccaatggagccctcctgagacaccgggtgctgctgggggtgacagacacagtggaaggatgccagagtgtgattcagctttggtttgtctacttcgacctggagaactgtgtgcagtttttgtctgatcatgttcaagaaatgaagactagccaagagtccttgctgagaagcagattgagccagttgtgtgttgtcatggagactggggtgagccctgcaacagcggaggggcctgagaacttggaggatgctcctctcctgcccggcaattcttgtcctaacgagaggccactcatgcagactgagcttcatcagcttgttcctgaggctgagccggaggaaatggcccgccagctgctggcagtgtttggcggctactacatccggcttctagtgacctcccagctccctcaggcaatggggacacgacacacgaactctccgagaattccatgcccctgccagctcatagaagcctacatcctaggcacagggtgctgcccgttcctggcgaggtgacctagggatgaaggtactcatcttccttcaagactgagcagtcaggaaggcttcaggagcccaagatggccaatggggagccccaggtgaggagagaagcatctgggggcactccaaaaggggcctgtgatgtcagccactggggtgttgtgctcacttcagggcccagcacaaaaatccttgtttgacatctcatgctgaccccctggcctttgcagaagctgatggttacagagctagtcccaccaaagctactctctctgctgcttagaactgtggacacgtatggaaagactggacccccattgctttcattgttcagagaacccaggagacatgaagatgaccagactgggcaaattatgtgtccaaaacttggcctcagatgatgtttccatctccaaccccttcatgccagatggggaaactgaggctcagagaggatactgctctatgtggcattgccttgaacccctaaaattatcagacttcctttttccaatataaagaaaaaaagtaagttttcagaattctctcaatttttaagtttttctcccccatattttgtgaaaagcagtggtatgtgtacgtgttgtctaccagtacacaggctgcagaagacagagacagaagaaagagatcaagggcagataactgttgataggaatatttgagaaagattgatcctgtttgacttgaggacttattttgttcacaggcatgcacgcttgtggttgtggttttatattacagatgtagaacaatggttatgtttcccgacatgaacattgtcctggaatgaagtgtgatcagccacttgtggaattctttgaagagctcagaggcttccaagtgatctgctcctgaacaagtttgaagacctattgtttcatagacccaagaccaaacgcatctaaaggatccccagcccccaagacctagcctttgtctgcgattttggcttcatctcccacaaaacccctttatgagttcacgctctttcctggactgacatacctattcctttccatttgttggactcctattcatgcttcaaagtccagctttcttaagcccttctttaggaagccttcccacacagccaaccctgctgctctctgcctcctttaaattcttgatacagctgctgcttgttctgatgttttatggtattgattctgttttcctgtgtatatgccagtttttctagctagactgtaaactccttaaggacagagactacaccttgtactttttgtgcatgacctggacctgctaaggaaaaaaaaatcttgtggattgattgctttgccatccccacagcagcttttgcaaattgctttccaaactcacttgaatgatgacattgctgtggacctgggttctggacctgatctgccacttcaagctgtgtaatttttggcaagttgctttctttgcctggtcctcagtttgcccatcaatataatgggtggattggatgatttttttttttttaattgagatggagtcttgcactgtcacccaggctggagtgcagtggcgcgatcttggctcactgcaacccccgccacctaggttcaagtgattctcatgcctcagcctcccaagtagctgggactacaggtgtgcaccactactcctggatatttttttgtgtttttagtagagatggggtttcgccatgttggccaagctggtcttgaactcctgacctcaggtgatccacccgcctcgggctcccaaagtgctgggattacagacgtgaggcaccacaaccagcctggatgattcttaagggcccttctaggaccaaagttctgggaatttctagcttattctgccccctcatagcccttggcctatctatctttatccacatgcagaaacatctggcaaccccacatggctgagatgacctggtcctaggacacccttggacagaagactggcctacctagcagacctggatttttcttcctgatctgctgcttccaagttgtgtgaccttggctaagtcacttaacctttctgattgtcatttcgctttttaataaagtgggtctggtgaacaagaaatgtaataaacacgtggcttgccattcaagagatgagtctgaccattcactttctgtgtgccagagaagagagatcatgggtatagaccagcccctggaaaggctgctttggtcaaggctgagagcagctttgctcaaggaaattattcacgaaggtgaccactgtctttctgacctggcacagaggaaatgttggctgtgaatgtgaccaatagaaagaagcccgtatttctcagtcagtcctagaaccccggtaagtaattaacagagaataaaaatgtgtttgttaaatgacaaagcagcagtttttcaattgtaaggtctgcttgagagcctttgatgtgtgtttcttttcctgacttttcctttctttagaatttttgatggtctcacctggtgggtggggctttcagggtatgcccacaatgtacatttctcggcatctgtgcctcagtttcctcatttataaaatccctatgatctctgtctcacctactttacagggttgctgtgaagatcgcatactacacacaggaatgctcatcagtttttaaattttatttaatttttatttatttttttttaaatgtaattttttcagagagataaggtcttgctatgttacccagcctagtcttgaactcctggcctcaagtgatcctcctgccttggcctcccatgctgctgggattacaggtgtgaactaccatgcccagccagctcctaagtcttaaggctctgtgttagtgatagatgtggccatggtgtaggcagtgcaatgtcttcgagtgagagtgaaggtggtaactcattgcatggattctagagttctgtttattctaatccaagttcttccacttaaaaacaatgttcttcctctcattgagtctcattcctcatctataggatgggaataagagcatgtacctggcaggttgttgtaaggattaaatggtgtaaaaaaatgtcaagtgcttgcaactttgaataccaaacttgagtgaaagctcaataaattgttacttaaaaaa

SEQ ID NO: 290666 - DNA, 1032 bp, Artificial Sequence
  derived and/or modified sequence
atggcctgcgagccccaggtggaccccggcgccaccggccccctgccccccagcagccccggctggagcgccctgcccggcggcagcccccccggctggggccaggagctgcacaacggccaggtgctgaccgtgctgagaatcgacaacacctgcgcccccatcagcttcgacctgggcgccgccgaggagcagctgcagacctggggcatccagcaggtgcccgccgaccagtacagaagcctggccgagagcgccctgctggagccccaggtgagaagatacatcatctacaacagcagacccatgagactggccttcgccgtggtgttctacgtggtggtgtgggccaacatctacagcaccagccagatgttcgccctgggcaaccactgggccggcatgctgctggtgaccctggccgccgtgagcctgaccctgaccctggtgctggtgttcgagagacaccagaagaaggccaacaccaacaccgacctgagactggccgccgccaacggcgccctgctgagacacagagtgctgctgggcgtgaccgacaccgtggagggctgccagagcgtgatccagctgtggttcgtgtacttcgacctggagaactgcgtgcagttcctgagcgaccacgtgcaggagatgaagaccagccaggagagcctgctgagaagcagactgagccagctgtgcgtggtgatggagaccggcgtgagccccgccaccgccgagggccccgagaacctggaggacgcccccctgctgcccggcaacagctgccccaacgagagacccctgatgcagaccgagctgcaccagctggtgcccgaggccgagcccgaggagatggccagacagctgctggccgtgttcggcggctactacatcagactgctggtgaccagccagctgccccaggccatgggcaccagacacaccaacagccccagaatcccctgcccctgccagctgatcgaggcctacatcctgggcaccggctgctgccccttcctggccagatag

SEQ ID NO: 290667 - DNA, 1032 bp, Artificial Sequence
  derived and/or modified sequence
atggcctgtgaaccccaagtcgacccgggcgccacagggccactgcctccaagctcacctggttggtccgccctgcctggcgggtcacccccaggttgggggcaagagctccataatgggcaggtgctaacagtcctccgaatcgataatacctgcgcgccaatctcattcgatctgggagctgcagaggagcagctccaaacatgggggatccaacaagtcccagcggatcaatatcggtccttggcagagtctgctctcctcgagccccaggtgcggcggtatatcatctataactccagaccaatgagattggccttcgccgtggtcttctacgtggtcgtatgggcaaatatttactcaacctcacagatgttcgctctagggaaccactgggcagggatgctacttgtgaccctcgctgccgtgagcttgacacttaccctggtgttggtattcgaaaggcaccagaagaaagctaacacaaataccgatctgcggctggccgcagctaatggtgctcttttacgtcaccgcgtgctccttggagtgactgacacagtcgagggttgccaaagcgttattcagctctggtttgtttatttcgacctagaaaattgtgttcagttcctgtccgatcacgttcaggagatgaaaaccagccaagaatccctcctgcggagtcggctgagtcagctttgcgtcgtcatggaaaccggggtcagtcctgcaactgcagaggggccagaaaatttggaagatgccccgctgctgcccggaaattcctgcccaaatgaaaggcccttgatgcaaacagagctgcaccagctcgtcccagaagcagagcccgaggagatggcgcgacagctgctggctgtgtttggcggatattatatcaggttactggtgacctctcagttaccacaggccatgggcacgcggcatactaacagtcccagaataccatgtccttgtcaattaattgaggcatatattcttggcacgggatgttgcccttttctcgccaggtag

SEQ ID NO: 290668 - DNA, 1032 bp, Artificial Sequence
  derived and/or modified sequence
atggcctgtgagccccaggtggaccccggggccaccggccccctgccccccagcagccctggctggagcgccctgcccggcggcagccccccaggctggggccaggagctgcacaacggccaggtgctgactgtgctgagaattgacaacacctgtgcccccatcagctttgacctgggcgctgctgaggagcagctgcagacctggggcatccagcaggtgcctgctgaccagtaccgcagcctggccgagagcgccctgctggagccccaggtgcggcgctacatcatctacaacagccggcccatgaggctggcctttgctgtggtgttctacgtggtggtgtgggccaacatctacagcaccagccagatgtttgccctgggcaaccactgggccggcatgctgctggtgaccctggccgctgtgtccctgaccctgaccctggtgctggtgtttgagcggcaccagaagaaggccaacaccaacacagacctgcggctggccgccgccaacggggccctgctgcggcaccgggtgctgctgggcgtgacagacacagtggagggctgccagagcgtcatccagctgtggtttgtgtactttgacctggagaactgtgtgcagttcctgagtgaccacgtgcaggagatgaagaccagccaggagagcctgctgcggagccggctgagccagctgtgtgtggtgatggagactggagtgtccccagccacagctgagggccctgagaacctggaggatgcccccctgctgcccggcaacagctgccccaatgaaagacccctgatgcagacagagctgcaccagctggtgcctgaggccgagcctgaggagatggcccggcagctgctggccgtgtttggaggctactacatccggctgctggtgaccagccagctgccccaggccatgggcaccaggcacaccaacagcccccgcatcccctgcccctgccagctgattgaggcctacatcctgggcaccggctgctgccccttcctggccaggtag

SEQ ID NO: 290669 - DNA, 1032 bp, Artificial Sequence
  derived and/or modified sequence
atggcctgcgagccccaggtggaccccggcgccaccggccccctgcccccatccagtcccggctggtcggctcttcccggcggatccccacctggatggggacaggagctgcataatgggcaggttttaacagtgctcagaatcgacaacacttgtgcccctatcagtttcgatctgggtgccgcagaagaacagctgcagacgtggggcattcaacaagtccccgcagatcaataccggtccttagccgagagtgctctgttggagccccaggtgagacgatacattatttataatagccggccaatgcgcctggcattcgcagtcgtgttttatgtggtcgtgtgggccaatatctattccacgagccagatgttcgctcttggaaaccactgggcagggatgctgttggttactttggccgccgtcagcctcacgctcacattggtgttggtgttcgagcgacaccaaaagaaagccaacacaaacactgatcttagactggctgccgctaatggggccctgctgcgccaccgcgtactgctgggggtgacagacacagtcgaaggctgccagtcagtgatccaactgtggttcgtctattttgatctcgaaaattgcgtgcaattcctgtcagaccacgtgcaggagatgaagacctcacaggaatcactccttagaagcagactgtcgcagctgtgcgtagtaatggagacaggagtgagcccggccacagctgaaggtcccgagaatctagaagatgcacctctgctacccggaaatagttgtcctaatgagcgaccactcatgcagactgagctgcaccagctggtccctgaggctgagccagaagaaatggcacggcagctgctggcagtgtttggtggatattacattcggctgctggttacctcacagttgccccaggccatgggcacacgacacaccaactctccaagaatcccatgtccctgccagctgatagaggcgtatatcctggggacgggttgctgtccctttctggcccgctag

SEQ ID NO: 290670 - DNA, 1032 bp, Artificial Sequence
  derived and/or modified sequence
atggcctgcgagccgcaggtggatcctggggctaccggcccattacctccatcttctccaggctggtcagctctgcccggaggcagcccaccaggttgggggcaggagcttcataatggacaagtcctgactgtactccgaatcgataacacctgtgccccaatttccttcgacctgggggctgccgaagaacaactgcagacgtgggggattcaacaggttcccgctgaccagtaccgaagcctcgctgagtccgccctcctggaaccccaggtgcgtcgttacatcatctataattccagaccgatgagactggcgttcgcggtcgttttttacgttgtcgtttgggccaatatctatagtacctctcagatgttcgccctgggcaatcattgggccggaatgctgcttgtgaccttagcggctgtgtccctgactctgaccctagtactcgtctttgagcggcatcagaagaaggctaatacgaacactgacctacggctcgccgctgctaatggagcactgctgagacatagggtgctgctgggtgtgacggacaccgtggaaggatgtcagagcgttatccagttgtggtttgtatacttcgatttggagaactgcgtccagtttctgtctgaccatgttcaggagatgaagacctcacaggaaagcctgctgcgatctagactgagccaactgtgcgtggtgatggagacgggcgtcagccccgcaacggcggagggtcctgaaaacctcgaggatgcccctctgctccctggtaacagttgtcctaacgaaaggcctctgatgcaaactgagctccaccaactggtgcctgaggcagagcctgaggagatggcaaggcagcttctggccgttttcgggggttattatatccgtcttcttgtgacatctcaactccctcaggccatgggaaccagacatacaaatagccctcgaataccgtgtccttgccagctgattgaagcctatattctcggcactggctgctgcccatttctggccagatag

SEQ ID NO: 290671 - protein, 872 aa, Artificial Sequence
  derived and/or modified sequence
MGEGGLPPAFQLLLRACDQGDTETARRLLEPGAAEPAERGAEPEAGAEPAGAEVAGPGAAAAGAVGAPVPVDCSDEAGNTALQFAAAGGHEPLVRFLLRRGASVNSRNHYGWSALMQAARFGHVSVAHLLLDHGADVNAQNRLGASVLTVASRGGHLGVVKLLLEAGAFVDHHHPSGEQLGLGGSRDEPLDITALMAAIQHGHEAVVRLLMEWGADPNHAARTVGWSPLMLAALTGRLGVAQQLVEKGANPDHLSVLEKTAFEVALDCKHRDLVDYLDPLTTVRPKTDEEKRRPDIFHALKMGNFQLVKEIADEDPSHVNLVNGDGATPLMLAAVTGQLALVQLLVERHADVDKQDSVHGWTALMQATYHGNKEIVKYLLNQGADVTLRAKNGYTAFDLVMLLNDPDTELVRLLASVCMQVNKDKGRPSHQPPLPHSKVRQPWSIPVLPDDKGGLKSWWNRMSNRFRKLKLMQTLPRGLSSNQPLPFSDEPEPALDSTMRAAPQDKTSRSALPDAAPVTKDNGPGSTRGEKEDTLLTTMLRNGAPLTRLPSDKLKAVIPPFLPPSSFELWSSDRSRTRHNGKADPMKTALPQRASRGHPVGGGGTDTTPVRPVKFPSLPRSPASSANSGNFNHSPHSSGGSSGVGVSRHGGELLNRSGGSIDNVLSQIAAQRKKAAGLLEQKPSHRSSPVGPAPGSSPSELPASPAGGSAPVGKQKLETSKRPPSGTSTTSKSTSPTLTPSPSPKGHTAESSVSSSSSHRQSKSSGGSSSGTITDEDELTGILKKLSLEKYQPIFEEQEVDMEAFLTLTDGDLKELGIKTDGSRQQILAAISELNAGKGRERQILQETIHNFHSSFESSASNTRAPGNSPCA

SEQ ID NO: 290672 - DNA, 2619 bp, Artificial Sequence
  derived and/or modified sequence
atgggcgagggcggcctgccccccgccttccagctgctgctgagagcctgcgaccagggcgacaccgagaccgccagaagactgctggagcccggcgccgccgagcccgccgagagaggcgccgagcccgaggccggcgccgagcccgccggcgccgaggtggccggccccggcgccgccgccgccggcgccgtgggcgcccccgtgcccgtggactgcagcgacgaggccggcaacaccgccctgcagttcgccgccgccggcggccacgagcccctggtgagattcctgctgagaagaggcgccagcgtgaacagcagaaaccactacggctggagcgccctgatgcaggccgccagattcggccacgtgagcgtggcccacctgctgctggaccacggcgccgacgtgaacgcccagaacagactgggcgccagcgtgctgaccgtggccagcagaggcggccacctgggcgtggtgaagctgctgctggaggccggcgccttcgtggaccaccaccaccccagcggcgagcagctgggcctgggcggcagcagagacgagcccctggacatcaccgccctgatggccgccatccagcacggccacgaggccgtggtgagactgctgatggagtggggcgccgaccccaaccacgccgccagaaccgtgggctggagccccctgatgctggccgccctgaccggcagactgggcgtggcccagcagctggtggagaagggcgccaaccccgaccacctgagcgtgctggagaagaccgccttcgaggtggccctggactgcaagcacagagacctggtggactacctggaccccctgaccaccgtgagacccaagaccgacgaggagaagagaagacccgacatcttccacgccctgaagatgggcaacttccagctggtgaaggagatcgccgacgaggaccccagccacgtgaacctggtgaacggcgacggcgccacccccctgatgctggccgccgtgaccggccagctggccctggtgcagctgctggtggagagacacgccgacgtggacaagcaggacagcgtgcacggctggaccgccctgatgcaggccacctaccacggcaacaaggagatcgtgaagtacctgctgaaccagggcgccgacgtgaccctgagagccaagaacggctacaccgccttcgacctggtgatgctgctgaacgaccccgacaccgagctggtgagactgctggccagcgtgtgcatgcaggtgaacaaggacaagggcagacccagccaccagccccccctgccccacagcaaggtgagacagccctggagcatccccgtgctgcccgacgacaagggcggcctgaagagctggtggaacagaatgagcaacagattcagaaagctgaagctgatgcagaccctgcccagaggcctgagcagcaaccagcccctgcccttcagcgacgagcccgagcccgccctggacagcaccatgagagccgccccccaggacaagaccagcagaagcgccctgcccgacgccgcccccgtgaccaaggacaacggccccggcagcaccagaggcgagaaggaggacaccctgctgaccaccatgctgagaaacggcgcccccctgaccagactgcccagcgacaagctgaaggccgtgatcccccccttcctgccccccagcagcttcgagctgtggagcagcgacagaagcagaaccagacacaacggcaaggccgaccccatgaagaccgccctgccccagagagccagcagaggccaccccgtgggcggcggcggcaccgacaccacccccgtgagacccgtgaagttccccagcctgcccagaagccccgccagcagcgccaacagcggcaacttcaaccacagcccccacagcagcggcggcagcagcggcgtgggcgtgagcagacacggcggcgagctgctgaacagaagcggcggcagcatcgacaacgtgctgagccagatcgccgcccagagaaagaaggccgccggcctgctggagcagaagcccagccacagaagcagccccgtgggccccgcccccggcagcagccccagcgagctgcccgccagccccgccggcggcagcgcccccgtgggcaagcagaagctggagaccagcaagagaccccccagcggcaccagcaccaccagcaagagcaccagccccaccctgacccccagccccagccccaagggccacaccgccgagagcagcgtgagcagcagcagcagccacagacagagcaagagcagcggcggcagcagcagcggcaccatcaccgacgaggacgagctgaccggcatcctgaagaagctgagcctggagaagtaccagcccatcttcgaggagcaggaggtggacatggaggccttcctgaccctgaccgacggcgacctgaaggagctgggcatcaagaccgacggcagcagacagcagatcctggccgccatcagcgagctgaacgccggcaagggcagagagagacagatcctgcaggagaccatccacaacttccacagcagcttcgagagcagcgccagcaacaccagagcccccggcaacagcccctgcgcctag

SEQ ID NO: 290673 - DNA, 2619 bp, Artificial Sequence
  derived and/or modified sequence
atgggcgagggagggctccccccagccttccaactcctgttgagagcatgcgatcagggcgacacagaaactgcccgccggttgctagaacctggggccgccgagcccgcagaaaggggggctgaaccagaggccggcgctgagccggccggcgccgaagtcgccggacctggggcggcagccgcaggcgctgtgggagctcctgtgcccgtggactgctctgacgaagctggcaatacggcactgcaatttgctgcagccggagggcacgaaccactggtgcgattcttgctgcgtagaggggcctctgtgaattctcggaaccattacggatggagtgccctcatgcaggccgcccgatttggccacgttagcgtcgcccatctgctgcttgatcatggtgcagacgtgaacgcccagaacaggttgggtgctagcgttctgacagtcgcatccagaggcgggcacctcggggttgtgaagctcctattggaggctggggcgttcgttgatcaccatcacccaagtggtgagcagctggggctgggcggttcgagagatgaaccattagacattaccgctctcatggctgccatccaacatgggcacgaggctgtggtgcgactgttgatggaatggggagcagatcctaaccacgctgcaaggacggtgggctggagccctcttatgctggctgcccttacaggacgactgggggtagctcagcagcttgtggagaaaggagcaaaccctgaccacctcagtgtgctagagaaaaccgccttcgaggtcgctctagattgcaaacaccgggatttagttgattacctggatcctctgacgacagtgaggcctaaaaccgatgaggaaaagaggagaccagatatcttccatgctctgaaaatgggaaattttcagttggttaaggaaatcgccgatgaagatccgagccacgtcaatctggtgaatggcgacggtgccacccctctcatgcttgcagctgtgacaggacagctggcactagtgcagctgttagtcgagcggcatgccgacgtcgacaagcaggacagtgtccacggctggaccgccctgatgcaggccacttaccacggaaataaagagatagtgaaatatttactgaaccaaggggccgacgtcacactgagagccaagaacggttataccgcatttgacctggttatgttactgaatgacccggacaccgagctggtgcgtctgcttgcctctgtctgtatgcaggtcaacaaggataagggccgtcccagccaccagcctccactcccccattccaaggtaagacagccctggagcatccccgttctccccgatgataagggaggcctaaagtcttggtggaacaggatgtccaacagatttcgcaaactgaaattgatgcaaaccctgccccgtggcctgtccagcaatcagcctttacctttcagcgacgagcccgagccagctctggatagcaccatgcgggccgcccctcaagacaaaacatcccgtagtgctttacccgacgccgcacctgtgacgaaggacaatggtccaggatctacccgcggcgagaaagaggatactctgctgacaaccatgctgcggaacggcgcaccactgacacgactacctagcgacaaattgaaagctgtgataccccccttcttgcccccgtcgagcttcgaactgtggtcatccgacaggtctcgcacacgtcataacgggaaagccgacccaatgaagaccgcattaccgcaaagagccagccgtggccacccagttgggggcggaggaaccgacactacccctgtccggcctgtgaagttccccagcctgccacggtctcctgcatcgtccgccaactccggcaactttaaccacagtccacactcgtcagggggctcctcaggtgtgggcgtgagtcggcatggcggggagctcttgaaccgctcagggggaagcatcgataatgtgttgtctcagatcgccgcccagcgcaaaaaagcagcaggtttgctagaacaaaagccgtcccatagaagtagtcccgtgggcccagctcctggatcctctccctcagagctacctgcatctccggctggcggtagcgcccctgtcggtaagcagaagttggaaacatctaagcggcctccctccggcacttctacaaccagcaaatctacctctcccacactcacaccctccccttcgccaaaaggacacactgcagagtcttccgtgagcagctcatcatcccatcgccagagcaaaagcagcggcgggtcatcttccggcacgatcactgacgaggacgagcttactgggattttgaagaagctgtctttggaaaagtaccagcccatattcgaagaacaggaggtcgacatggaagcctttctgaccctgactgatggggacttaaaggaactcgggatcaagacggacgggagtcgccagcaaatccttgccgcaatctcggagctgaatgccggcaaggggagggaaagacaaatccttcaagaaacaatccataacttccactccagctttgaaagtagcgcatctaacacccgcgcaccagggaattctccctgcgcctag

SEQ ID NO: 290674 - DNA, 7150 bp, Artificial Sequence
  derived and/or modified sequence
gggccgcgcgtggcggcggcgatgggcgagggcgggctgcccccggccttccagctgctgctgcgcgcgtgtgaccagggcgacacggagacggcgcggcggctgctggagccgggggcggcggagccagccgagcgcggcgcggagccggaggcgggcgcggagccggcgggggccgaggtggccgggcccggggccgcagcggcgggggcagtcggggctccggtgcccgtggattgctcggacgaggcgggcaacaccgcactgcagttcgccgcggccgggggccacgaaccgctggtgcgcttcctgctgcgccgcggtgcctcggtcaacagccgcaaccactacggctggagcgcgctcatgcaggcggccagatttgggcatgtgagtgtggcacacctcctgttggatcacggggctgatgtcaatgcccagaaccggctgggggccagtgtgctcactgtggcttctcggggcggccacctgggtgtggtgaagctgctcctggaagccggtgcctttgtggaccatcaccacccttcaggcgagcaactggggttgggcggcagcagggatgagcccttggacatcacagccctgatggctgccatccagcacgggcacgaggccgtggtgcgtctactgatggagtggggcgcggaccccaaccacgcagcccggaccgtgggctggagcccgctgatgctggccgcactcactgggcggcttggagtggcccagcagctggtggagaagggcgccaaccctgaccacctcagcgtgctggagaagaccgccttcgaggttgcactggactgcaagcacagggaccttgtagactacctggacccgctgaccaccgtcaggcccaaaacagatgaggagaaaaggcgacctgatattttccatgcattgaaaatgggaaacttccagctggtcaaagagattgccgatgaagaccccagccacgtgaacttggtcaatggggacggggcgacgccactgatgctagcagctgttacggggcagctggctctggtgcagctgctggtggagaggcacgcggatgttgacaagcaggacagcgtgcatggctggacggccctcatgcaggcaacctaccatgggaataaggaaattgtgaaatatctgctaaaccaaggggccgatgtcactcttcgtgcaaaaaatggatacacggcctttgacctggtgatgctgctgaatgatcccgacacggaacttgttcgactgctggcatctgtctgcatgcaggtgaataaagacaaaggccggccgagccaccagcctcccctgccccactcgaaggtccgacagccctggagcatcccagtgctgcccgatgacaagggtggactgaagtcctggtggaaccgaatgtccaatcggttccgaaagctcaaactgatgcagacgctgccccgtgggctgtccagcaaccagcctttgcctttctctgacgagcctgagccagctctggactccacaatgagggctgccccccaggacaagacaagccgctctgcactccctgatgcggcccctgtgaccaaagacaatggtcctgggagcacaagaggagaaaaggaagacacgttattgacaaccatgcttcgaaacggagctcccctcaccagactcccgagtgacaagctgaaagcagtcatccccccattcctacccccttccagttttgagctgtggagctctgatcggtcccggacgcgtcacaacgggaaggcagaccccatgaagactgcgctgccccagagagccagcaggggccaccccgtgggcggcgggggcacagacactacacccgtcaggcctgttaaatttccaagcctccccagaagcccagcctcttctgccaattctggaaacttcaaccactcgcctcattcatcgggcggctccagtggggtaggtgtgagccggcacggtggggagctgcttaaccgctcaggtggcagcatagacaatgtcttgtcccaaatcgctgcccagaggaaaaaagcagccggattattggagcagaaacccagccatcggtcaagccctgtggggccagcaccggggtccagcccgtctgagcttccagcctcccctgcaggtggcagcgctcctgttggcaagcagaaattggagaccagcaaaaggcctccatctggaacttccactacctccaagagcacctctccaaccctcacgccctccccctcacccaaagggcacactgcagagtcctcagtgtcttcctcgtcatcccatcggcagtccaagagcagtgggggctccagcagtggcaccatcacagatgaggatgaactgactggaatccttaagaaattatcacttgagaaatatcagcccatttttgaggaacaagaggtggacatggaagcgttcctcacactgactgacggtgacttgaaggagctgggaattaagacagatgggtccaggcagcagattctggcagcgatttctgaactgaacgcaggcaagggacgcgagagacaaattttacaggaaaccattcacaactttcactcttcctttgagagcagtgccagcaacaccagggcccctggcaacagcccctgtgcgtgatcctccttcccgcagccaccagcgtgagctctctgaatcccgggaccccttcacgtggccacagccccagccctgcccccgtcacactgctgtgccttagtcatgttgttccctttgctcgggatgcccacttcacgtcgacggcattcattggtagtacttcttgctgcaacaaacttcaacacacagagacagattcccatgtaacagtccagtgggggtgcttctgcttggcaggttggttcacacagtgatgcagggactcagctcctttcatcctgtgctctgccctccccgggagcctcagagtttgcttctggctggcggcaagggaaagggacgatggagaaggcacggctgcttcttacctgccttgctcttaactgacacacatcactcctgctcacgtcctcttggccactggtagtcatgtggccccacctggatgcagaggaggccaggatgtgcagtctccacatagtggcttcccagcaacaacttttgacttagatggggggtatgtattatggtgagaggttagccttcctggcacatcttcccttaaaacttctaacttgcccctcctagtccaagtcacctctcagatgaagtcttttttgaccccctttcagccactgggtcccttagtgctgtgtatgtgactgctgtagcattccactgcacctgctgcatacagcttacattggagatgtgtatgtcaaacgcatttttctttattgcaaagagagtctattatagaaggaaagaagtggaggcctgctgtgtggatcccttcttcttcctagctttcagtttccttatctgcaaagtggaaggtcagaccagatgatgctctggtactccacagtgctcacctgtatcactgcagggctttctgcactgaaagtggaagcagaaggctaatgggtcacattgtgtaaaggtctctggtgctcaaagtttctaggcaaagaagtgaaaatttggaattttgtctacatcctattaatgctgtgttcctcaaaagggaattggcttgtgtagtttcctaccatatcatattttattaaattagaggggccctgacttttaaaacccactggctttctgaagtgttttccagtgaatgactcattcagccagtgcttgttgcatttatgttagctaccaggtgccaagtgtgcagacacaatacagagccttcaggctctcgacaggcaagagaacacctgtaaatagatggtcccgacattgagaggcagcatggtagagtgggcagaccttgtgctctggactcaggttcaaagttcagatgaagctcaatggcctcttagttggagcttagaaccagtatgcccaaagtgctgggtctgcaggaagtacccagtcgatggtaggctgcacagaattctgatctctaccttgagccatgctgagccacaagttggtctccttgggaggtgccatctctcatctgtccctcccccagccatgaaagcccattcccctatgctggctttcagaggctgtcgttaacttactgcccagagcctcgtagttttcttcccctgccctgatggttgggtgtttttcctttaaattctctcagccttacactcacagaagccaactttccacaggactgaagacaaagtgtttcatttagctgttactgatagacacctttacaaaggttactaatgtcccagcctttttaaggagacacactcattcatcccctactatgtgctggcagctttacctttgtcatttcatcctcatggccaccctggaggtggcattgtgtaacctcatcttgcacattcgggaaacggatgcttaggagagggaagcagcttgccagttaaacagcccagaaggagcagatctggggtcagaaccggacctggtgggcttgcaagcctgtgccttttccactaactcctatagactcctggagctagaagcacttgtgattcttgttttaatttactgatggcttcaggggttaacagtaggcctagaattgtttgcctctgaaattcatggcccctgacgttatgtgctttgaggttttgtgcctgctttttgctgtggtcctgtttttttcataacaatatactggtatagcttccactcaggtaagtttgattgaacaatgatacacagctgcaccggggggtcaccttttcacaaatgtagacctccatgaactcattggatgaccctggacagagcggggctattcccattttgcagacaggacagcagaggctccagacaatgcctttcctttctttttcactggactcaagtgtccaaggcttttcatcctaggaagtttgtgtgctggttcacaagaggtccctggcaccctttctggggatgtttggatgcggctggtaggcagggaagagaaagggcaccccagcgggggcatgtgtggaggcagcacggaacatgtaggttatagatcgtcagggaggaggggtcagttgggtgcttgtttttctgatttttggtccttgatcacccccttcccttcccacacgtgtccccagcctgcctgtggctgttccccccacaagaagcacctcccttgcttggcaaccttcaccagcatttcccaaaagtatgctcctgggaaccctagttccacaggataataggtttttcataaagaaacgtagggtgtgtatgtgaaagtggggtgaggttccctggttgagtaggtttggcagacactaaagcgagctacacgatcatctttgctacaggcctctcacaaccttcagcatgccagcatgggtcaggcctcttcacagggccaagaaactcatagcatctcccacattactctcatcacttctccaaggtgcttttgcaagactggaattccttggacaccattggagaagccccgctttttctggaacagcggcaaccaagaggccttgcagccctggaagtgggtcagggcccttggtggtcacctttttctccccagcagctctgcagaggtggcctgcttggcagtgggacatcaggggaccggtcctgctttgagatggcagggtccctgttctgagagctctccagcctgagggcattgagctgaggctccaccctgagctctcctgcagggtggagggcattgtttcccagcacccaggcagtgtcttgctggtgtgtcgtgagtgctggatgtccaagtccctgctggccacggagggctcctgcctctcttcttcagcgccacaaaattacatggaggccagctggttttgtgaggagattgtttattttttaattcttttgtttaccgaacgtttactgagcatctaccctgtgccagccctactcgtacgctctgtctccaaagatgaaaaaggacttctctgccctcaagggaaccccacagtatcttagaggagacaatcatgtcggtgagatggtgtggtgatgaagcctgctgggtatacagctcagggaaagtcatcgatgatggctcaggctcagcctgggcacgccccagaggagagagatggagtggggcctcaaagggcaggtttaggcagaaaagaaaaagggcattccagctggggcatgtgcaaaggcagcacgtaatgtgtaagttctagatcgtcagggaggaagggtcagttgggtgcctgtttttctgtttttagtcctttaaaatgagtagaagcaacctgttaccctggaaagagcactggacatagacctagtgctgcgtgatgttgagcacgtttcttcttccctttgagtcccagtttcccttttggttacagggggatagtagcccccagggatcatgtgaaagtgagaaagcccttttcacactgtggagcggtgcagatgtgggaaacctcaaagatggttgcccattttaaatcctttcatctctcatctctctttcttctctcccttctgccctgacgtagccatggttgggtgggtgaggccagaagaaactgcctccggcaagaggtagcagccgctcaggtggctctgctggcatcggagcccacagaagtgaggagtggccgatggacctgccctccaaatgtgcctgactctgggtcttgctgtcactggatttcctggcatggcagacagaaagaaagatagtttgaccaagtcgtagaagctgatccagcgggtaaaaagggggcagggaactcgtcccttttattcttgcctcagagctgcctgaagacatgggccaggccggaggctggacaactttggataacgctgacctgtacttccaagtaaatgcctcctgaagagcccgggacccttcctgggagaattctgcagccagaatgaaggtgccatcagcaggaggcactgtgaagcaccatcctgtcgctgtccttgtccattcctagcaagttaatcgtgtcttgttaaccagcagttcctgttcaacgtgtaaagagacctgatgttttccctaataaagctgataacagattttgcagga

SEQ ID NO: 290675 - DNA, 2619 bp, Artificial Sequence
  derived and/or modified sequence
atgggagagggcggcctgcccccagccttccagctgctgctgcgggcctgtgaccagggcgacacagaaacagcccggcggctgctggagcctggagctgctgagcctgctgagagaggagctgagcctgaggccggggctgagcctgctggagctgaggtggccggccctggagctgctgctgctggagctgtgggcgcccctgtgcctgtggactgcagtgatgaagctggcaacacagccctgcagtttgctgctgctgggggccacgagcccctggtgcgcttcctgctgcggcggggggcctctgtgaacagcaggaaccactacggctggagcgccctgatgcaggccgccaggtttggacatgtgtctgtggcccacctgctgctggaccatggagcagatgtgaatgcccagaaccggctgggcgcctctgtgctgactgtggccagccggggcggccacctgggcgtggtgaagctgctgctggaggccggggcctttgtggaccaccaccaccccagcggggagcagctgggcctgggcggcagcagagatgagcccctggacatcacagccctgatggccgccatccagcacggccatgaagctgtggtgcggctgctgatggagtggggcgctgaccccaaccacgccgccaggacagtgggctggagccccctgatgctggccgccctgaccggccgcctgggcgtggcccagcagctggtggagaagggggccaacccagaccacctgtctgtgctggagaagacagcctttgaggtggccctggactgcaagcaccgggacctggtggactacctggaccccctgaccaccgtgcggcccaagacagatgaggagaagaggaggccagacatcttccacgccctgaagatgggcaacttccagctggtgaaggagattgctgatgaggaccccagccacgtgaacctggtgaatggagatggagccacccccctgatgctggccgctgtgacaggccagctggccctggtgcagctgctggtggagagacatgctgatgtggacaagcaggacagcgtgcacggctggacagccctgatgcaggccacctaccacggcaacaaggagatcgtgaagtacctgctgaaccagggcgcagatgtgaccctgcgggccaagaatggctacacagcctttgacctggtgatgctgctgaatgaccctgacacagagctggtgcggctgctggcctctgtgtgcatgcaggtgaacaaggacaagggccggcccagccaccagccccccctgccccacagcaaggtgcggcagccctggagcatccctgtgctgcctgatgacaagggcggcctgaagtcctggtggaacaggatgagcaaccgcttcaggaagctgaagctgatgcagaccctgccccggggcctgagcagcaaccagcccctgcccttcagtgatgagcctgagcccgccctggacagcaccatgagagctgccccccaggacaagaccagccgcagcgccctgcctgatgctgcccctgtgaccaaggacaatggacctggcagcaccagaggagagaaggaggacaccctgctgaccaccatgctgagaaatggagcccccctgacccggctgcccagcgacaagctgaaggccgtcatcccccccttcctgccccccagcagctttgagctgtggagcagtgacaggagcaggaccaggcacaacgggaaggctgaccccatgaagacagccctgccccagagggccagccggggccaccctgtgggcggcggcggcacagacaccacccctgtgcggcctgtgaagttccccagcctgcccaggagccctgccagcagcgccaacagcggcaacttcaaccacagcccccacagcagcggcggcagcagcggcgtgggcgtgtccagacatggaggagagctgctgaacagaagtggcggcagcattgacaacgtgctgagccagattgctgcccagaggaagaaggccgccggcctgctggagcagaagcccagccacaggagcagccctgtgggccctgcccctggcagcagccccagcgagctgcctgccagccctgctgggggcagcgcccctgtgggcaagcagaagctggagaccagcaagaggcctccttctggcaccagcaccaccagcaagagcaccagccccaccctgacccccagccccagccccaagggccacacagctgagagctctgtgagcagcagcagcagccaccggcagagcaagagcagcggcggcagcagcagcggcaccatcacagatgaagatgagctgaccggcatcctgaagaagctgagcctggagaagtaccagcccatctttgaggagcaggaggtggacatggaggccttcctgaccctgacagatggagacctgaaggagctgggcatcaagacagatggcagccggcagcagatcctggccgccatcagcgagctgaatgctgggaagggccgggagcggcagatcctgcaggagaccatccacaacttccacagcagctttgagagcagcgccagcaacacccgggcccctggcaacagcccctgtgcctag

SEQ ID NO: 290676 - DNA, 2619 bp, Artificial Sequence
  derived and/or modified sequence
atgggcgagggcggcctgccccccgccttccagctgctgctgcgggcatgcgaccaaggcgatactgagactgcccggcggctgcttgaacccggtgcagccgagcccgccgaaagaggggccgaaccagaggccggagcggaaccagccggcgctgaagttgccgggcccggggctgcagccgccggcgcagtgggggcgcctgtgcccgtggattgctctgacgaggccggaaatactgccctgcagttcgcagccgctggcgggcatgagccactggtccgcttcctgctgcgccgtggggcttccgttaatagcagaaatcattacggctggagcgccctcatgcaggccgcacggtttggccacgtgtcggtcgctcatttactgctggaccacggcgctgacgtcaatgcacagaaccggctaggagctagcgtccttactgtggcctctaggggaggccatttgggcgtggtcaaactgctccttgaagccggagccttcgtcgaccaccatcaccccagtggcgaacagttaggactggggggcagcagggacgagccactggacatcaccgccctgatggccgcaattcagcacggccacgaggccgtagtcagactgttaatggaatggggggccgatcctaatcacgccgccaggaccgtcggatggtccccactcatgctcgctgctctgactggccgcctgggagtggcgcagcaactagtcgaaaagggggccaacccggaccacctttctgttctggaaaagactgctttcgaagtcgctcttgattgcaaacaccgcgaccttgtggactacctggaccccctcacaacagtgaggcctaagaccgacgaagaaaagaggcggcccgatatttttcacgccctaaagatggggaacttccaattagttaaggagattgcggatgaagatccatctcacgtcaatttggtaaacggagacggcgctacccccctgatgcttgctgcagtcaccgggcagctagccctggttcagctgctcgtggagcggcacgctgatgtggacaagcaggattcagtgcatgggtggacagctcttatgcaggccacatatcatggcaacaaagaaattgtgaagtacctgctcaaccagggggcagacgtaacactccgtgcaaaaaatggatacacagcctttgacctcgttatgttactgaacgaccccgacactgagctggttagactgctcgcttctgtctgtatgcaggtcaacaaggataagggtagaccgtctcaccagcctcccctgccccatagcaaagtgcgccagccgtggtctatacccgtgttgccagacgataaaggcggactgaaatcttggtggaatcgaatgtccaaccgttttaggaaactgaagttaatgcaaacactacctagaggactctcaagtaatcagcctctgccattttctgatgagccagagcctgctcttgactctaccatgcgggcagctccccaagataaaacatcccgatcagcgctaccagatgctgcgccagtcaccaaggataatgggccggggagcactaggggggaaaaggaggacacactgctgacaactatgttacggaacggagccccactcacccgcttaccgagcgacaaactcaaagcagtaataccacccttcctgccgccctcaagtttcgagctttggtccagcgatcggagccgcacgcgccacaacggaaaagcagatcccatgaagacggcactacctcagcgggccagtcggggccaccccgtcggaggcgggggcaccgatacaacgccggtgcgccctgtgaagttcccctcactgcctcgcagcccagctagcagtgctaattcaggcaactttaaccacagtcctcatagctccggcggttctagcggggtgggcgtgagtcggcacggtggagaattgctcaatagaagcggcggctcaattgataatgttcttagccagattgcagctcaaagaaagaaagcggcggggctgctggaacagaaaccaagccaccgatctagccctgtgggcccagcccccggatcctcccctagcgagttgcctgccagcccagcagggggctcagcccccgtggggaagcagaaactggaaacgtcaaagcggcccccatctggtacgagtaccaccagcaaatctacaagtccaacactcacccccagcccctctcctaaaggtcataccgccgagtcttcagtttcgtcctcgagctcccaccgccagagtaagtcaagcgggggttctagttcgggtaccattaccgacgaagacgaactcacagggatactgaaaaaactatcactggagaaataccagccaatatttgaggagcaagaggtggacatggaggcattcctcactctcacagacggcgatcttaaagagctgggcattaaaactgatgggtcgcggcaacagatattggcggcgatctccgaactgaacgcaggcaagggtagggagcggcagattctgcaggagacaattcacaactttcacagctccttcgagtcgtcagcctcaaacacccgagcaccgggcaactcaccgtgcgcctag

SEQ ID NO: 290677 - DNA, 2619 bp, Artificial Sequence
  derived and/or modified sequence
atgggtgagggcggtctgccgcctgcctttcaactgcttcttcgagcatgcgaccaaggggacacggaaaccgccaggcggctcctggagcccggagctgctgagccagccgagaggggcgcagaacccgaggcgggagccgaacccgcaggggcagaagtggcgggacccggagctgccgcagctggcgctgtgggcgctcctgtcccagtggactgctctgatgaagccggaaacacagccctccagtttgcagccgctggcggtcatgagccattagtcagattcctgcttcgacggggagcctctgtcaacagcagaaaccactatgggtggtccgctttgatgcaggccgctcgatttggccacgtgtctgtggcccacctcttgctcgaccatggcgctgacgtaaatgcccaaaaccgactaggggctagcgttctaacggtggcgagccgaggaggacacttgggggttgtcaagctactgctggaggcaggcgcattcgtggaccaccaccaccctagtggcgaacagctcggtttaggagggagccgggacgaacccctggatatcaccgccctgatggccgcaattcagcatggccacgaggccgtggtgaggttgcttatggagtggggagctgacccaaatcacgctgctcggacagttgggtggagtccgctgatgctcgccgctctgactggaaggctcggcgtggcacagcaactggtagagaagggcgctaacccggatcatctgtcagtactggagaaaactgcctttgaagttgccctcgactgtaaacatagagacctggtggactacctggaccctctcactaccgttagacccaagaccgacgaagagaaaagaaggccggacatctttcatgcactcaaaatggggaatttccagctggttaaagagatcgccgacgaggaccccagccatgtcaaccttgtcaatggcgatggcgcaacacccctgatgctcgccgcagtgactggtcagctggctctcgtccagcttttggttgaaagacacgctgatgtggacaaacaagatagtgtgcacggctggacggcgctgatgcaggctacgtaccacggcaacaaagaaatagtgaagtacctcctcaaccaaggagccgacgtgaccctgagagctaaaaatggatacacggccttcgatttagtgatgctgcttaatgaccctgatacggagttggtgagattgctagcttcagtgtgcatgcaggttaataaggacaagggtaggccctctcaccagcctccccttccccatagcaaagtgcggcaaccatggagcatccctgtgctccccgacgacaaggggggactgaagtcttggtggaataggatgagcaaccgttttcgaaaactcaaactcatgcagactcttccgcgaggcctgtctagcaaccagcctcttcccttctccgacgagcccgaacctgctcttgatagcaccatgcgtgccgcaccgcaggataagacctctaggtcagcgctgccagacgctgcacccgtaaccaaagataacgggcctggcagcactagaggggaaaaagaggataccttgttaacaaccatgcttcgcaatggcgctcccttaacacgcttgccctccgataagcttaaggccgttatcccaccctttttgccaccaagtagctttgaattatggtctagtgacaggagtcggacacgccacaatggtaaggctgaccccatgaaaactgctctcccccagcgcgcaagccgcggacacccagtgggcggagggggaaccgacacaacgccagtgcggccagtcaagttcccctccctgcccaggagtccagccagtagcgcaaattccggtaactttaatcactctccccactcctctggcggatcttctggagtgggagtgtctaggcatggaggagagttactgaataggagcggtggttcgattgacaacgtgttatcccaaatcgcagctcagcgtaagaaagcagcaggattgctcgaacaaaagccctctcataggtcgagcccggtgggcccagctcccggatccagccccagtgagctcccagcatctccggctggcggttcagccccagtgggaaaacaaaagctcgaaacatcaaagagacccccttctggcacctccacaacgtctaaaagcacttctcctaccctcactccttctccctcgccaaaaggccacactgcagagtcatccgtttctagttcttctagtcatcgccagagcaaatccagtgggggtagctctagtggaaccatcacggatgaagatgagctgacgggaatcctgaagaaactttccctggagaagtatcagcctatcttcgaagagcaggaagtggacatggaggccttcttgaccctgacagatggggacctgaaagaactgggtatcaagaccgatgggtcccgccagcaaatcctggccgctattagcgagctgaacgccggaaagggccgagaacggcagatcttacaggaaaccatacacaactttcacagtagttttgagtctagcgctagcaacaccagagctccaggaaacagtccttgcgcttag

SEQ ID NO: 290678 - protein, 150 aa, Artificial Sequence
  derived and/or modified sequence
MAQDSVDLSCDYQFWMQKLSVWDQASTLETQQDTCLHVAQFQEFLRKMYEALKEMDSNTVIERFPTIGQLLAKACWNPFILAYDESQKILIWCLCCLINKEPQNSGQSKLNSWIQGVLSHILSALRFDKEVALFTQGLGYAPIDYYPGLL

SEQ ID NO: 290679 - DNA, 591 bp, Artificial Sequence
  derived and/or modified sequence
cttccctccattctttttgtggacgccaggccatatcttcaaagcccgtgagagatttttcagatttaatgtgtgccgaccatttccttcagtgctggacaggctgctgtgaagggacatcaccttttcgctttttccaagatggctcaagattcagtagatctttcttgtgattatcagttttggatgcagaagctttctgtatgggatcaggcttccactttggaaacccagcaagacacctgtcttcacgtggctcagttccaggagttcctaaggaagatgtatgaagccttgaaagagatggattctaatacagtcattgaaagattccccacaattggtcaactgttggcaaaagcttgttggaatccttttattttagcatatgatgaaagccaaaaaattctaatatggtgcttatgttgtctaattaacaaagaaccacagaattctggacaatcaaaacttaactcctggatacagggtgtattatctcatatactttcagcactcagatttgataaagaagttgctcttttcactcaaggtcttgggtatgcacctatagattactatcctggtttgctt

SEQ ID NO: 290680 - DNA, 453 bp, Artificial Sequence
  derived and/or modified sequence
atggcacaggactctgtggatctatcttgtgactaccaattctggatgcagaaactttctgtttgggaccaggcatccactctggagacacagcaagacacctgcctgcatgttgcgcagttccaggaattcctgcgcaaaatgtatgaagccctcaaagagatggatagtaacacagtgatagaacgattccctaccatcggccagctgctggctaaggcctgttggaatccttttattctggcttacgacgaatcacagaagatcctgatttggtgcctttgttgtctcataaacaaagagccccagaattctggacagtctaaattaaatagttggatccagggggtgctctcccatattctatctgcgttgagattcgacaaagaagtcgccctgtttactcagggtctgggttatgcaccaatcgactattatccagggcttttatag

SEQ ID NO: 290681 - DNA, 453 bp, Artificial Sequence
  derived and/or modified sequence
atggcccaggacagcgtggacctgagctgtgactaccagttctggatgcagaagctgtctgtgtgggaccaggccagcaccctggagacccagcaggacacctgcctgcacgtggcccagttccaggagttcctgaggaagatgtatgaggccctgaaggagatggacagcaacacagtgattgagcgcttccccaccatcggccagctgctggccaaggcctgctggaaccccttcatcctggcctatgatgagagccagaagatcctgatctggtgcctgtgctgcctgatcaacaaggagccccagaacagcggccagagcaagctgaacagctggatccagggcgtgctgagccacatcctgagcgccctgcgctttgacaaggaggtggccctcttcacccagggcctgggctacgcccccatcgactactacccaggcctgctgtag

SEQ ID NO: 290682 - DNA, 453 bp, Artificial Sequence
  derived and/or modified sequence
atggcccaggacagcgtggacctgagctgcgactaccagttctggatgcagaaattgtccgtgtgggaccaggcaagcaccttggagacacagcaggacacttgcctccacgtggctcagttccaggaatttttgagaaaaatgtacgaggcgctgaaggaaatggattcgaacacagtgatcgaacgatttcccaccatagggcagctgctagcaaaggcttgttggaacccttttattctggcttacgatgagtctcaaaaaatcctaatctggtgcttgtgttgcctcattaataaggaaccccagaattcaggacaaagtaagctcaattcttggattcagggcgtgttatctcatatattgagcgctctgcgattcgacaaggaggtggccctgtttacccagggattgggatacgctccaatcgactactaccctggcttattgtag

SEQ ID NO: 290683 - DNA, 453 bp, Artificial Sequence
  derived and/or modified sequence
atggcccaagatagtgttgacctgtcgtgtgattaccagttctggatgcaaaaactgtcagtgtgggatcaggcctctaccctggaaacacagcaggatacgtgtctccatgttgcccagtttcaggagttcttacggaagatgtacgaggccctcaaggaaatggattccaacacagtaatagagcgctttcccaccattggtcagctcttggcaaaagcctgctggaacccctttattctggcttatgacgaatcacagaaaatcctgatatggtgtctgtgttgcctgataaataaagaaccgcagaacagtggtcagagcaaactgaacagctggattcagggtgtgctgtcccacattctgtcagcccttcgcttcgataaggaagtggcgctgttcacccagggcttgggctacgcgccaatcgactactaccccggacttttatag

SEQ ID NO: 290684 - DNA, 453 bp, Artificial Sequence
  derived and/or modified sequence
atggcccaggacagcgtggacctgagctgcgactaccagttctggatgcagaagctgagcgtgtgggaccaggccagcaccctggagacccagcaggacacctgcctgcacgtggcccagttccaggagttcctgagaaagatgtacgaggccctgaaggagatggacagcaacaccgtgatcgagagattccccaccatcggccagctgctggccaaggcctgctggaaccccttcatcctggcctacgacgagagccagaagatcctgatctggtgcctgtgctgcctgatcaacaaggagccccagaacagcggccagagcaagctgaacagctggatccagggcgtgctgagccacatcctgagcgccctgagattcgacaaggaggtggccctgttcacccagggcctgggctacgcccccatcgactactaccccggcctgctgtag

SEQ ID NO: 290685 - DNA, 456 bp, Artificial Sequence
  derived and/or modified sequence
atgttaaagagcagtttcgccacttgtgtgctggtgtccgaagaggataaacacgccatcatagtggaacccgagaaaaggggcaaatacgtggtgtgcttcgaccccctcgacgggtcgagcaatatcgactgcctggtgagtgtggggacaatcttcgggatctaccgcaaaaaatccaccgatgagccatcagaaaaagacgctctgcagccaggacgtaacctggttgctgccggatacgctttgtatggctccgctaccatgctagtgttggcaatggactgcggcgtcaactgtttcatgctagacccagctatcggagagtttatccttgttgacaaggatgtgaaaatcaagaaaaagggaaaaatatactccctaaatgagggatacgcaagggactttgatcctgcggtcactgaatacatccagcggaagaaattcccaccttag

SEQ ID NO: 290686 - DNA, 456 bp, Artificial Sequence
  derived and/or modified sequence
atgctgaagagcagctttgccacctgtgtgctggtgtctgaggaggacaagcacgccatcatcgtggagcctgagaagaggggcaagtatgtggtgtgctttgaccccctggatggcagcagcaacatcgactgcctggtgtctgtgggcaccatcttcggcatctacaggaagaagagcacagatgagcccagcgagaaggatgccctgcagcccggcaggaacctggtggccgccggctacgccctgtatggcagcgccaccatgctggtgctggccatggactgtggggtgaactgcttcatgctggaccctgccatcggggagttcatcctggtggacaaggatgtgaagatcaagaagaagggcaagatctacagcctgaatgaaggctacgcccgggactttgatcctgctgtgacagagtacatccagaggaagaagttccccccatag

SEQ ID NO: 290687 - DNA, 456 bp, Artificial Sequence
  derived and/or modified sequence
atgctgaagagcagcttcgccacctgcgtgctggtgagcgaggaggacaaacacgccatcatagttgaacccgaaaaaagaggcaaatacgtagtctgctttgaccctctcgacggatcttccaacatcgactgtcttgtttcggtggggacaatcttcggaatttataggaaaaagagcacagatgaaccctccgagaaggatgctctgcaaccaggccgaaaccttgtggccgcgggatatgctctctatggatccgcgacaatgctggttttggccatggactgtggggtcaactgtttcatgcttgacccagcaattggcgagttcatcctggttgataaagatgtaaaaataaaaaagaagggcaagatctattctctgaacgaaggctacgccagagatttcgacccggctgttaccgagtacatacagcgcaagaagtttcccccttag

SEQ ID NO: 290688 - DNA, 456 bp, Artificial Sequence
  derived and/or modified sequence
atgctgaagagttcttttgctacctgcgtgctggtttccgaagaggacaaacatgcaatcatcgttgaacccgagaaacgaggaaagtacgtggtgtgtttcgaccctctcgacggatcttccaacatcgattgtttggtttccgtgggcactatatttggaatttataggaagaagagtacggatgagccatctgagaaagacgcgttacagccagggaggaacctggtggcggctggctatgccctttacggcagcgctactatgctggtgctcgcaatggactgtggcgtgaactgttttatgcttgatcctgcaattggggagtttatattagtcgataaggatgtcaagatcaaaaagaaaggaaagatttacagtctaaacgaagggtatgcgcgtgactttgaccctgcagtgaccgaatatatccagaggaaaaaattccctccctag

SEQ ID NO: 290689 - DNA, 456 bp, Artificial Sequence
  derived and/or modified sequence
atgctgaagagcagcttcgccacctgcgtgctggtgagcgaggaggacaagcacgccatcatcgtggagcccgagaagagaggcaagtacgtggtgtgcttcgaccccctggacggcagcagcaacatcgactgcctggtgagcgtgggcaccatcttcggcatctacagaaagaagagcaccgacgagcccagcgagaaggacgccctgcagcccggcagaaacctggtggccgccggctacgccctgtacggcagcgccaccatgctggtgctggccatggactgcggcgtgaactgcttcatgctggaccccgccatcggcgagttcatcctggtggacaaggacgtgaagatcaagaagaagggcaagatctacagcctgaacgagggctacgccagagacttcgaccccgccgtgaccgagtacatccagagaaagaagttccccccctag

SEQ ID NO: 290690 - protein, 183 aa, Artificial Sequence
  derived and/or modified sequence
MSRINKNVVLALLTLTSSAFLLFQLYYYKHYLSTKNGAGLSKSKGSRIGFDSTQWRAVKKFIMLTSNQNVPVFLIDPLILELINKNFEQVKNTSHGSTSQCKFFCVPRDFTAFALQYHLWKNEEGWFRIAENMGFQCLKIESKDPRLDGIDSLSGTEIPLHYICKLATHAIHLVVFHERSGNY

SEQ ID NO: 290691 - protein, 271 aa, Artificial Sequence
  derived and/or modified sequence
MSRINKNVVLALLTLTSSAFLLFQLYYYKHYLSTKNGAGLSKSKGSRIGFDSTQWRAVKKFIMLTSNQNVPVFLIDPLILELINKNFEQVKNTSHGSTSQCKFFCVPRDFTAFALQYHLWKNEEGWFRIAENMGFQCLKIESKDPRLDGIDSLSGTEIPLHYICKLATHAIHLVVFHERSGNYLWHGHLRLKEHIDRKFVPFRKLQFGRYPGAFDRPELQQVTVDGLEVLIPKDPMHFVEEVPHSRFIECRYKEARAFFQIPVSEVYTVLD

SEQ ID NO: 290692 - DNA, 764 bp, Artificial Sequence
  derived and/or modified sequence
aaagcggagcggctgcagcctgctgttgagtgagattgaaaggaaacacactgaatgaggaaaaactaacatacggtcatcaacatccttgtataacctagtttttaaaaaaattggatttcaaagaaaacaaaattatcttcctttccaaatccaaaaagatgaaaacgactgagatactttcaaaagacaaccaagtgagcagcacagactaatgagtagaatcaataagaacgtggttttggcccttttaacgctgacaagttctgcatttctgctgtttcagttgtactactacaagcactatttatcaacaaagaatggagctggtttgtcaaaatccaaaggaagccgaattggatttgatagcacacagtggcgtgcagttaaaaaatttattatgttaacatccaaccaaaatgtaccagtgtttcttattgatcctttgatactggaattgattaataagaactttgaacaagtcaaaaatacttctcatggctctacttcacaatgcaagtttttctgtgttccaagagactttactgcatttgcactgcagtatcacctatggaagaatgaggaaggctggtttcggatagctgagaatatgggatttcagtgcctaaagattgagagtaaagatccccggctagacgggatagactcactctctggaactgaaatccccctgcactatatctgcaaactggccactcatgcgatccacttggtagtctttcatgagaggagtggcaactacc

SEQ ID NO: 290693 - DNA, 1152 bp, Artificial Sequence
  derived and/or modified sequence
aaagcggagcggctgcagcctgctgttgagtgagaaaacaaaattatcttcctttccaaatccaaaaagatgaaaacgactgagatactttcaaaagacaaccaagtgagcagcacagactaatgagtagaatcaataagaacgtggttttggcccttttaacgctgacaagttctgcatttctgctgtttcagttgtactactacaagcactatttatcaacaaagaatggagctggtttgtcaaaatccaaaggaagccgaattggatttgatagcacacagtggcgtgcagttaaaaaatttattatgttaacatccaaccaaaatgtaccagtgtttcttattgatcctttgatactggaattgattaataagaactttgaacaagtcaaaaatacttctcatggctctacttcacaatgcaagtttttctgtgttccaagagactttactgcatttgcactgcagtatcacctatggaagaatgaggaaggctggtttcggatagctgagaatatgggatttcagtgcctaaagattgagagtaaagatccccggctagacgggatagactcactctctggaactgaaatccccctgcactatatctgcaaactggccactcatgcgatccacttggtagtctttcatgagaggagtggcaactacctctggcacggccacttgagacttaaagaacacattgacaggaaatttgttcccttccgaaagttacagtttggtcgttatccaggagcttttgacaggccagagttacagcaagttactgttgatggactggaagttctcattccaaaggatccaatgcactttgtagaagaagtaccacactctaggtttattgagtgtaggtataaagaagctcgagcattctttcagatacctgtttccgaagtttacactgtgctggactgagtttgtagacatgaaggtccatgtaccctgtgaaaccctcgaatacattgaagccaactatggtaagacctggaagattcctgtaaagacgtgggactggaagcgctctcctcccaatgtgcaacccaatggaatctggcctatttctgagtgggatgaggttatccagttatattgagatagtaggttgaaatgggagaatttctcttttgga

SEQ ID NO: 290694 - DNA, 552 bp, Artificial Sequence
  derived and/or modified sequence
atgagcagaataaataagaatgtcgtgttggctctgctaacgcttacctccagcgccttcctcttgttccaactttattattataagcactatctgtccacaaagaacggcgctggactgtcaaagagcaagggaagtcgaattgggttcgactcaacgcagtggcgagcggtgaaaaagtttatcatgcttacttccaatcaaaacgtgccggtgttcctgatcgatcctctgattttagagctgattaataagaactttgagcaggtgaagaacacatctcatggcagtacatcccaatgtaagttcttttgcgtgcctagagactttactgcctttgcactacagtatcatctgtggaaaaacgaagaaggctggttccgtattgccgagaacatgggcttccagtgcctaaaaatcgagtccaaggacccaaggcttgacgggatcgatagcctcagtggcactgaaattcctctacactatatttgcaaacttgctactcatgcgatacatttggtggtgtttcatgagaggtcaggcaattattag

SEQ ID NO: 290695 - DNA, 816 bp, Artificial Sequence
  derived and/or modified sequence
atgtcccggatcaataaaaacgtcgtattggcgctgctcacactcacaagtagtgcattcttactcttccagctctactactataaacattacttatccactaagaacggggccggcctctcaaaatccaagggctcccggattggttttgacagcacacagtggagagcggtaaaaaagttcattatgctgacaagtaaccagaacgtgccagtctttctaattgatcccctcatcctggaactgattaacaaaaattttgaacaggtgaagaacacaagtcacggctctacaagccagtgcaagtttttttgcgtccctagggacttcacggcctttgctctgcagtatcatttgtggaagaatgaggagggctggttccgcatcgccgagaatatgggatttcagtgtcttaagatcgaaagcaaggatccaagattggacggaattgattccctgtctggaaccgagattcctctccattatatctgcaagctggctacccacgctattcacctcgtggtgtttcatgagagaagtggaaactacctctggcacggtcatcttaggctgaaggagcacatcgatcggaaattcgtgccgtttaggaagcttcagttcggtcgctatccaggcgcatttgatagacccgaactacagcaggttacagttgatgggttggaggtgttgatcccaaaagaccccatgcatttcgttgaggaggttccacattccaggtttattgagtgccgctacaaagaggctcgagccttttttcagatccccgtgagcgaggtctacaccgtgttggactag

SEQ ID NO: 290696 - DNA, 552 bp, Artificial Sequence
  derived and/or modified sequence
atgagccgcatcaacaagaatgtggtgctggccctgctgaccctgaccagcagcgccttcctgctcttccagctgtactactacaagcactacctgagcaccaagaatggagctggcctgagcaagagcaagggcagccgcatcggctttgacagcacccagtggagggctgtgaagaagttcatcatgctgaccagcaaccagaatgtgcctgtgttcctgattgaccccctcatcctggagctgatcaacaagaactttgagcaggtgaagaacaccagccacggcagcaccagccagtgcaagttcttctgtgtgccccgggacttcaccgcctttgccctgcagtaccacctgtggaagaatgaggagggctggttcagaattgctgagaacatgggcttccagtgcctgaagattgagagcaaggacccccggctggatggcatcgacagcctgagcggcacagagatccccctgcactacatctgcaagctggccacccacgccatccacctggtggtgttccacgagaggagcggcaactactag

SEQ ID NO: 290697 - DNA, 816 bp, Artificial Sequence
  derived and/or modified sequence
atgagccgcatcaacaagaatgtggtgctggccctgctgaccctgaccagcagcgccttcctgctcttccagctgtactactacaagcactacctgagcaccaagaatggagctggcctgagcaagagcaagggcagccgcatcggctttgacagcacccagtggagggctgtgaagaagttcatcatgctgaccagcaaccagaatgtgcctgtgttcctgattgaccccctcatcctggagctgatcaacaagaactttgagcaggtgaagaacaccagccacggcagcaccagccagtgcaagttcttctgtgtgccccgggacttcaccgcctttgccctgcagtaccacctgtggaagaatgaggagggctggttcagaattgctgagaacatgggcttccagtgcctgaagattgagagcaaggacccccggctggatggcatcgacagcctgagcggcacagagatccccctgcactacatctgcaagctggccacccacgccatccacctggtggtgttccacgagaggagcggcaactacctgtggcacggccacctgcggctgaaggagcacatcgacaggaagtttgtgcccttcaggaagctgcagtttggccgctacccaggggcctttgacaggcctgagctgcagcaggtgacagtggatggcctggaggtgctgatccccaaggaccccatgcactttgtggaggaggtgccccacagccgcttcattgaatgtcgctacaaggaggcccgggccttcttccagatccctgtgtctgaggtgtacacagtgctggactag

SEQ ID NO: 290698 - DNA, 552 bp, Artificial Sequence
  derived and/or modified sequence
atgagccggatcaacaagaacgtggtgctggccctgctgaccctgactagctccgcctttctgcttttccagttatattattacaagcactacttgtccacaaagaatggagccgggctgtctaaatctaaggggagtaggatcggatttgactccacacagtggagagcagttaagaaatttatcatgctgaccagtaaccagaacgtccccgtttttctgattgatcctttaatcctcgaattaatcaataagaattttgaacaggtgaagaatacctctcacgggtcgacgtcccagtgcaagttcttctgcgtgcccagagacttcacagctttcgccttgcagtaccacttgtggaaaaacgaagaggggtggttcagaatcgcagagaatatgggattccagtgtctgaagatcgagtccaaggaccctcgcctggacggaatcgacagcctatctggcactgagatccctctgcactacatctgcaagttggctacacacgctattcacctggtggtattccatgaaagaagtgggaattattag

SEQ ID NO: 290699 - DNA, 816 bp, Artificial Sequence
  derived and/or modified sequence
atgagccggatcaacaagaacgtggtgctggccctgctgaccctgaccagtagtgcattcctgctttttcagttgtactattataagcattacctctccaccaaaaacggtgccggtttgtctaagtccaagggatcgaggatagggttcgatagcacacagtggagagccgtcaaaaaatttatcatgctgacctctaaccagaacgtgcccgttttcctgattgaccctttaattttggaactcatcaacaagaacttcgagcaggtgaaaaatacctcacacgggtctacttcacagtgtaaatttttctgtgtgcctcgagactttaccgccttcgctttgcagtaccatctgtggaagaatgaagagggctggttcaggatcgccgagaacatgggttttcagtgtctgaagatcgagtcaaaggatcctagacttgacggtattgacagcctcagcggaacagagatcccccttcactatatctgtaagctcgccactcacgcgattcacctcgttgtgtttcatgagcggtccggcaactatctgtggcatggacatctccgccttaaagagcacatcgacagaaagttcgtgccctttcgcaagctacagttcggtagatatcctggggccttcgaccgaccggagctgcagcaggttacagtcgacggtctagaagtattgatacctaaagaccctatgcattttgtagaagaagtgccccacagccgcttcatagagtgtaggtacaaagaggcgagggccttctttcagatccccgtgtctgaagtttacactgtgctagactag

SEQ ID NO: 290700 - DNA, 552 bp, Artificial Sequence
  derived and/or modified sequence
atgtcccggattaacaagaacgtcgtgctggcccttttgacgcttacgtcatctgccttcctgctatttcagctatattactacaaacactatctgtcaaccaagaatggagctggactgtccaagtcgaaggggtctagaataggcttcgatagtacacagtggcgcgcagtgaagaagttcattatgctgacctctaaccaaaatgtgccagtgttccttatagaccccttaatactagagctaattaataagaatttcgagcaagtcaagaatacgagtcacggctctacgtcccagtgcaagtttttctgtgtaccgagagattttacagccttcgccctgcaataccacctgtggaaaaatgaggaggggtggtttagaatagctgagaacatgggttttcagtgcttgaaaatcgagtcaaaagatcccagactcgatggtattgactccctaagcggaactgaaattcctctgcattacatttgtaagttagccacacacgctatccacctagtggttttccatgagagaagtggcaattactag

SEQ ID NO: 290701 - DNA, 816 bp, Artificial Sequence
  derived and/or modified sequence
atgagtagaattaacaagaacgttgtactggccctgctgactcttacttcttccgcattcttgctctttcaactctattattataagcactatttaagcacaaagaacggcgcaggccttagcaagtcaaaaggctcaagaattggattcgactccacccaatggcgggctgtaaagaaattcatcatgcttaccagtaaccaaaatgtgcctgtcttcctgatagaccctcttatattggagctgataaataaaaacttcgagcaagtcaaaaacactagccacgggagcacctcacagtgcaagttcttctgcgtacccagagacttcaccgccttcgccctccaatatcatctgtggaagaatgaagaaggctggtttcgaattgccgaaaatatgggattccagtgcctgaagatcgaatccaaagaccctaggctcgacggcattgactcactttccgggacagaaataccactgcactacatttgcaaactggcaacccatgccatccacctggtggttttccatgagcggtccggaaattacctgtggcatggacacttgcggctgaaagaacacattgatcgtaagtttgtaccattcagaaagctgcaattcgggcgttaccctggggctttcgacagacctgagctccagcaggtgaccgtagatggcctggaagtcctgattccaaaagaccctatgcatttcgtggaagaggtccctcactcccggttcatagagtgtcgctataaagaggccagagctttttttcaaatcccagtgtcagaggtctatacagtgttggattag

SEQ ID NO: 290702 - DNA, 549 bp, Artificial Sequence
  derived and/or modified sequence
atgagccgcatcaacaagaacgtggtgctggccctgctgaccctgaccagcagcgccttcctgctgttccagctgtactactacaagcactacctgagcaccaagaacggcgccggcctgagcaagagcaagggcagccgcatcggcttcgacagcacccagtggcgcgccgtgaagaagttcatcatgctgaccagcaaccagaacgtgcccgtgttcctgatcgaccccctgatcctggagctgatcaacaagaacttcgagcaggtgaagaacaccagccacggcagcaccagccagtgcaagttcttctgcgtgccccgcgacttcaccgccttcgccctgcagtaccacctgtggaagaacgaggagggctggttccgcatcgccgagaacatgggcttccagtgcctgaagatcgagagcaaggacccccgcctggacggcatcgacagcctgagcggcaccgagatccccctgcactacatctgcaagctggccacccacgccatccacctggtggtgttccacgagcgcagcggcaactac

SEQ ID NO: 290703 - DNA, 813 bp, Artificial Sequence
  derived and/or modified sequence
atgagccgcatcaacaagaacgtggtgctggccctgctgaccctgaccagcagcgccttcctgctgttccagctgtactactacaagcactacctgagcaccaagaacggcgccggcctgagcaagagcaagggcagccgcatcggcttcgacagcacccagtggcgcgccgtgaagaagttcatcatgctgaccagcaaccagaacgtgcccgtgttcctgatcgaccccctgatcctggagctgatcaacaagaacttcgagcaggtgaagaacaccagccacggcagcaccagccagtgcaagttcttctgcgtgccccgcgacttcaccgccttcgccctgcagtaccacctgtggaagaacgaggagggctggttccgcatcgccgagaacatgggcttccagtgcctgaagatcgagagcaaggacccccgcctggacggcatcgacagcctgagcggcaccgagatccccctgcactacatctgcaagctggccacccacgccatccacctggtggtgttccacgagcgcagcggcaactacctgtggcacggccacctgcgcctgaaggagcacatcgaccgcaagttcgtgcccttccgcaagctgcagttcggccgctaccccggcgccttcgaccgccccgagctgcagcaggtgaccgtggacggcctggaggtgctgatccccaaggaccccatgcacttcgtggaggaggtgccccacagccgcttcatcgagtgccgctacaaggaggcccgcgccttcttccagatccccgtgagcgaggtgtacaccgtgctggac

SEQ ID NO: 290704 - DNA, 552 bp, Artificial Sequence
  derived and/or modified sequence
atgagcagaatcaacaagaacgtggtgctggccctgctgaccctgaccagcagcgccttcctgctgttccagctgtactactacaagcactacctgagcaccaagaacggcgccggcctgagcaagagcaagggcagcagaatcggcttcgacagcacccagtggagagccgtgaagaagttcatcatgctgaccagcaaccagaacgtgcccgtgttcctgatcgaccccctgatcctggagctgatcaacaagaacttcgagcaggtgaagaacaccagccacggcagcaccagccagtgcaagttcttctgcgtgcccagagacttcaccgccttcgccctgcagtaccacctgtggaagaacgaggagggctggttcagaatcgccgagaacatgggcttccagtgcctgaagatcgagagcaaggaccccagactggacggcatcgacagcctgagcggcaccgagatccccctgcactacatctgcaagctggccacccacgccatccacctggtggtgttccacgagagaagcggcaactactag

SEQ ID NO: 290705 - DNA, 816 bp, Artificial Sequence
  derived and/or modified sequence
atgagcagaatcaacaagaacgtggtgctggccctgctgaccctgaccagcagcgccttcctgctgttccagctgtactactacaagcactacctgagcaccaagaacggcgccggcctgagcaagagcaagggcagcagaatcggcttcgacagcacccagtggagagccgtgaagaagttcatcatgctgaccagcaaccagaacgtgcccgtgttcctgatcgaccccctgatcctggagctgatcaacaagaacttcgagcaggtgaagaacaccagccacggcagcaccagccagtgcaagttcttctgcgtgcccagagacttcaccgccttcgccctgcagtaccacctgtggaagaacgaggagggctggttcagaatcgccgagaacatgggcttccagtgcctgaagatcgagagcaaggaccccagactggacggcatcgacagcctgagcggcaccgagatccccctgcactacatctgcaagctggccacccacgccatccacctggtggtgttccacgagagaagcggcaactacctgtggcacggccacctgagactgaaggagcacatcgacagaaagttcgtgcccttcagaaagctgcagttcggcagataccccggcgccttcgacagacccgagctgcagcaggtgaccgtggacggcctggaggtgctgatccccaaggaccccatgcacttcgtggaggaggtgccccacagcagattcatcgagtgcagatacaaggaggccagagccttcttccagatccccgtgagcgaggtgtacaccgtgctggactag

SEQ ID NO: 290706 - DNA, 1494 bp, Artificial Sequence
  derived and/or modified sequence
gacgtgggcggcgacagaccctgggacagcggcaacacccagctgccccccagaaaccccgtgaaggccaacgccatgttcggcgccggcgacgaggacgacaccgacttcctgagccccagcggcggcgccagactggccagcctgttcggcctggaccaggccgccgccggccacggcaacgagttcttccagtacaccgcccccaagcagcccaagaagggccagggcaccgccgccaccggcaaccaggccacccccaagaccgcccccgccaccatgagcacccccaccatcctggtggccaccgccgtgcacgcctacagatacaccaacggccagtacgtgaagcagggcaagttcggcgccgccgtgctgggcaaccacaccgccagagagtacagaatcctgctgtacatcagccagcagcagcccgtgaccgtggccagaatccacgtgaacttcgagctgatggtgagacccaacaactacagcaccttctacgacgaccagagacagaactggagcatcatgttcgagagcgagaaggccgccgtggagttcaacaagcaggtgtgcatcgccaagtgcaacagcaccagcagcctggacgccgtgctgagccaggacctgatcgtggccgacggccccgccgtggaggtgggcgacagcctggaggtggcctacaccggctggctgttccagaaccacgtgctgggccaggtgttcgacagcaccgccaacaaggacaagctgctgagactgaagctgggcagcggcaaggtgatcaagggctgggaggacggcatgctgggcatgaagaagggcggcaagagactgctgatcgtgccccccgcctgcgccgtgggcagcgagggcgtgatcggctggacccaggccaccgacagcatcctggtgttcgaggtggaggtgagaagagtgaagttcgccagagacagcggcagcgacggccacagcgtgagcagcagagacagcgccgcccccagccccatccccggcgccgacaacctgagcgccgaccccgtggtgagcccccccaccagcatccccttcaagagcggcgagcccgccctgagaaccaagagcaacagcctgagcgagcagctggccatcaacaccagccccgacgccgtgaaggccaagctgatcagcagaatggccaagatgggccagcccatgctgcccatcctgcccccccagctggacagcaacgacagcgagatcgaggacgtgaacaccctgcagggcggcggccagcccgtggtgacccccagcgtgcagcccagcctgcaccccgcccaccccgccctgccccagatgaccagccaggccccccagcccagcgtgaccggcctgcaggcccccagcgccgccctgatgcaggtgagcagcctggacagccacagcgccgtgagcggcaacgcccagagcttccaggtgaccttctacaacagaatcaactacatcctgtag

SEQ ID NO: 290707 - DNA, 1494 bp, Artificial Sequence
  derived and/or modified sequence
gatgtgggcggcgacagaccttgggactcaggcaatacgcaacttccgcccagaaatcctgtgaaagccaatgcaatgttcggtgctggtgacgaagatgatactgatttcctttctccctctgggggcgcgcgattagcctcgctattcggacttgaccaggccgccgcaggccatgggaatgaattttttcagtacaccgcgcctaagcaacccaagaaggggcaggggacagctgctaccggtaaccaggccacccccaaaactgcaccagcaaccatgtctacacctacgatactggtggcgactgctgttcatgcgtatcgatacacgaatggccagtacgtgaagcagggcaagttcggcgcagccgtcttgggcaatcacacagcacgtgaatacagaattctcctgtacatatcccaacagcagccggtgacagtcgctcgcattcacgtgaactttgagctgatggtgcggcctaacaactattccactttctacgacgatcagcgtcagaactggtcgattatgtttgaaagcgagaaggcagcagtcgagttcaataagcaagtttgcatcgctaagtgtaacagcacaagctccctggacgcagtgctcagtcaagatctgattgtggccgacggccctgccgtagaggtcggagattccctcgaggtggcctacaccggctggttattccagaaccacgttctcggtcaggtttttgacagcacagccaacaaagacaaactactgagactgaagctgggctcaggaaaagttatcaaggggtgggaggacgggatgctgggaatgaagaaaggaggcaagcgacttctgatagtgcccccagcatgtgctgtgggctccgagggagtaattgggtggacgcaggctacagatagcatacttgtgttcgaagtcgaggtgcgtagagtgaaattcgcccgcgactctggcagcgatggtcacagcgtaagtagtcgcgatagcgctgccccttcccccattccgggggccgataacctgtccgccgatccagtcgtaagcccacccacctcaattccatttaagtctggagagcccgcattgcggacaaagtctaacagcctcagcgagcaactggcgattaatacctctccagatgctgtcaaagctaagctcatttctaggatggctaagatgggacagcccatgctaccaatcctccccccccaactggacagtaacgatagtgaaattgaggatgtgaacaccctgcagggcgggggccagcctgtagtcacccccagcgttcaacctagccttcatcctgcccacccagcactgccccagatgactagtcaggccccccagccctcagttactgggctgcaggccccgtctgcagcactgatgcaggtatcatccctagattcccactccgccgtttccggaaacgcccaatcgttccaggttaccttttacaacagaattaattacattctctag

SEQ ID NO: 290708 - DNA, 1494 bp, Artificial Sequence
  derived and/or modified sequence
gatgtgggcggggaccggccctgggacagcggcaacacccagctgccccccaggaaccctgtgaaggccaatgccatgtttggagctggagatgaagatgacacagacttcctgagccccagcggcggggcccggctggccagcctgtttggcctggaccaggccgctgctggccatggaaatgagttcttccagtacacagcccccaagcagcccaagaagggccagggcacagctgccactggaaaccaggccacccccaagacagccccagccaccatgagcacccccaccatcctggtggccacagctgtgcacgcctaccgctacaccaacggccagtatgtgaagcagggcaagtttggagctgctgtgctgggcaaccacacagcccgggagtaccgcatcctgctgtacatcagccagcagcagcctgtgacagtggcccgcatccacgtgaactttgagctgatggtgcggcccaacaactacagcaccttctatgatgaccagaggcagaactggagcatcatgtttgaaagtgagaaggctgctgtggagttcaacaagcaggtgtgcatcgccaagtgcaacagcaccagcagcctggatgctgtgctgagccaggacctgattgtggctgatggccctgctgtggaggtgggggacagcctggaggtggcctacacaggctggctgttccagaaccacgtgctgggccaggtgtttgacagcacagccaacaaggacaagctgctgcggctgaagctgggcagcggcaaggtgatcaagggctgggaggatggcatgctgggcatgaagaagggcggcaagaggctgctgattgtgcccccagcctgtgctgtgggcagcgagggcgtgattggctggacccaggccacagacagcatcctggtgtttgaggtggaggtgcggcgggtgaagtttgcccgggacagcggcagtgatggccacagcgtgagcagccgggacagcgctgcccccagccccatccctggagctgacaacctgtctgctgaccctgtggtgagcccccccaccagcatccccttcaagagcggggagcccgccctgcggaccaagagcaacagcctgtctgagcagctggccatcaacaccagcccagatgctgtgaaggccaagctgatcagcaggatggccaagatgggccagcccatgctgcccatcctgcccccccagctggacagcaatgattctgaaattgaagatgtgaacaccctgcagggcggcggccagcctgtggtgacccccagcgtgcagcccagcctgcacccagcccacccagccctgccccagatgaccagccaggccccccagcccagcgtgacaggcctgcaggcccccagcgctgccctgatgcaggtgagcagcctggacagccacagcgctgtgtctggaaatgcccagagcttccaggtgaccttctacaaccgcatcaactacatcctgtag

SEQ ID NO: 290709 - DNA, 1494 bp, Artificial Sequence
  derived and/or modified sequence
gacgtgggcggcgaccggccctgggacagcggcaacacccagctgccacctaggaacccggtgaaggccaacgcaatgtttggggctggcgacgaggatgatactgactttctatctccttctggcggcgctcgcctggcctcgttattcggtctggaccaagctgccgccggacacgggaacgagttctttcaatatacagccccaaaacagccaaagaaaggtcagggcacagcagccactggaaaccaggctactccgaagacagcccccgcaacaatgagcacccctacaattttggttgccacggctgtacacgcctacagatataccaacggacagtacgtgaaacaggggaaattcggggctgctgtgttgggaaatcacactgcgagggagtacaggatcctgctctatattagtcagcagcagccagtcaccgtggcacgcattcacgtgaattttgaactcatggttaggcctaataactacagtacattttacgatgatcagagacagaactggtccatcatgtttgagagcgagaaggcagcggtggaatttaataagcaagtgtgtatcgccaagtgtaatagcacttcctcactggatgccgtactgtctcaagacctcattgtggccgacgggcccgccgtggaagtgggggacagcttagaagtcgcctacacaggttggcttttccagaatcacgtcttaggtcaagtgtttgactccaccgcaaataaggacaagctgcttcgcctgaagcttggtagcggtaaggtcataaaggggtgggaggacggcatgctgggcatgaaaaagggcggaaagcgccttcttatcgtgccacccgcttgcgccgtggggtccgaaggcgtaatcggatggacacaggcaaccgacagcatcctggtctttgaagtggaggtcaggagggtgaaattcgcacgcgatagtggatccgacgggcactcagtcagctcgagggattcggccgcaccttctccaatcccgggcgccgataacctttcagccgaccctgtggtatcaccaccaacctctatcccatttaagtcaggtgagccagcgcttcgaaccaaatccaactccttatccgaacaactggctatcaatacttctccggatgcagtgaaggccaagttaatatccagaatggccaagatgggccagcccatgctccccatacttcccccacagctggactccaacgattccgaaattgaagacgtgaataccctgcagggtggaggccagcccgttgttaccccttctgtgcagcctagcctccatcctgcccatcccgctctgccacagatgaccagtcaagcaccgcagcctagcgtcaccgggctacaggccccaagcgctgcgctgatgcaggttagttcactggatagccactctgcggtgagtgggaatgcgcaatcatttcaagtgacgttctacaaccgcatcaattacatcctgtag

SEQ ID NO: 290710 - DNA, 2815 bp, Artificial Sequence
  derived and/or modified sequence
gacgtcggcggtgacaggccctgggactctgggaatacccagcttcctccccgcaacccggtgaaagccaacgcaatgttcggtgcgggggacgaggacgacaccgatttcctctcgccgagcggcggtgccagattggcctcactttttggactggatcaggcagctgctggccatggaaatgaatttttccagtacacagccccaaaacagcctaagaaaggccagggaacggcagcaacaggaaatcaggcaacaccaaaaacagcaccagccaccatgagcactcccacaatactggtcgcaacagcagtccatgcatatcgatacacaaatggtcaatatgtaaagcagggcaaatttggtgctgcagttctggggaaccacacagccagagagtataggattcttctttatatcagtcaacaacagccagttacggttgctaggattcatgtgaactttgagctaatggttcggcccaataactatagcaccttttatgatgaccagagacagaactggtccatcatgtttgagtcggaaaaggctgctgtggagttcaataagcaggtgtgcattgctaagtgcaacagtacctcttccctggatgcagtgctctcccaggacctcattgtggcagacggccctgctgtagaagttggagattctttggaagtggcctataccggctggctctttcagaatcatgtgctgggccaggttttcgactccactgctaacaaagataagttgcttcgcttgaagttaggatcaggaaaagtcatcaagggctgggaggatggaatgctgggcatgaaaaaaggaggaaagcgattgcttattgtccctccagcctgtgctgttggctcagaaggggtaataggctggactcaagcaacggactcgatcctggtgttcgaggtggaggttaggcgggtgaagtttgccagagattctggctctgatggtcacagtgttagttcccgcgattctgcagctccgtctcccatccctggtgctgacaacctctctgctgatcctgttgtgtcaccacccacatcaatacctttcaaatcaggggagccagctcttcgtaccaaatctaactccctcagtgaacaacttgcaataaatacaagtcccgatgcagtcaaagccaagttgatctctcggatggctaaaatgggccagcccatgctgcccatccttccaccacagctggattccaatgattcagaaatcgaagatgtgaacactctgcaaggaggtgggcagcctgtggtgactccgtccgtccagccctctcttcatccggcccatccagcgttaccacagatgacctcacaggcacctcagccatctgttactgggctccaggcaccttctgctgccttaatgcaagtgtcatctctcgattcccactcagctgtatctggaaatgcccaatcctttcaggtaacattttataaccgtattaattatatcctataatttgctgtggttctagtcagtctcttttcttcttcctgtacatttcatacagtagcagttccccaaagtcagagtttgtaatttttttcccttccttggttaccactttctcatctctaaaccaggcaaaggataacctacgttccagtgtcataaagattaaatgcaagaacaagtagagcccctagtacaacgtagtaaagatgcaatcaatgtttgtttccttttcttttcacacatatccagttgaagcgtgtatattcgcgttcttctgtattcttttctactaaaagttggcaggctaacattctgcagtatattcagcagaatggtatggtttaaaagtggaaccatgtggaaaatgtagcttgactctgctatctagtaaacttttcttaaagaaggcctttttcctgttatcacagaaaacaatggcagcagcctgtttgccaggggtagcagaccctttcttctgcctcaacacacttggtggataaggcatactgtcactgggaacagctgctcactccttgtgatgcttaatggaggtgtgggaatgatggtggataggctatgcctcattaacatggggagtctcgaaactggaaaaagtcccactgttgccctctttctccccatccctcctctcctccatggagaattactatgctgtagactaagaattttttttaagtggatgcgtagttatatctatccctggaaatgagctagacttccttatttcaaggaagaattaccatcctcattaaaataaaagctgctgtttattaagcgcttactatctgtcaggcctgtaacttactagcttttcagaactttacctatctcacttcatttagtccacagaacagccctatgaagtgatattattatcttcctcttacagttgaggtgaccgagactcaaaggaacatgagagctcttggtctcgtggattagcttcagaatctagcaggggagaggcatccttggaaattggcagatttggtttggaatctcagtgagcacttcttctttaaactcaatggaagctaagcagagtttattaatctaaaaacttcttagacaataggcctgataatggggaatgaatccctgcttaattatctcaccagatgactgggtagtgacctaagatacactttcttcagtttctgggtaggattttagtgactggtttcccctgggatacatagataactctcctgctgcagtccttaccaactgccaaacccagatctcacccatctctagcttcagtaagtttgagtctcctcccagctcatccactttattccac

SEQ ID NO: 290711 - DNA, 1494 bp, Artificial Sequence
  derived and/or modified sequence
gatgtgggaggagaccgcccttgggattctgggaacacccaactccctccgagaaaccctgtcaaggcaaacgccatgttcggagcgggagatgaggatgataccgattttcttagccctagtggcggagcccgtctcgcttcgctgtttggtttggatcaggccgcagccggacatgggaacgaattttttcagtacacggcccctaaacagcccaagaaggggcaggggaccgccgctacgggtaaccaagccacgccaaaaaccgcccctgcaaccatgtctactccgactatactggtggctacagcagtgcacgcctaccgttatacaaacggtcaatacgtgaaacaaggaaagtttggcgcagcggttcttggtaatcacaccgcacgcgaatataggatcctgctgtacatatcacagcaacagccggtgacagtggctagaatccatgtgaatttcgagctgatggtacgacccaataactacagcactttttacgatgaccaacgccaaaactggagtatcatgttcgaatccgaaaaggccgctgtagagttcaacaaacaagtgtgtattgcaaaatgcaatagcacttcatctctggatgcagttctgtctcaggaccttatagtcgccgacgggcctgccgtggaagtgggagattctctggaagtggcttatactggttggctctttcagaatcacgtgttgggccaggtgttcgatagtaccgccaacaaggacaaactgcttcgcttgaagcttgggtctggcaaagtaattaaggggtgggaagacggaatgctgggcatgaaaaagggtggtaaacggctccttattgtgccccctgcctgcgctgtaggctctgaaggcgtcattggctggacccaagccacagactcaattctcgtgttcgaagtggaggtgaggagagttaagttcgcgagggactcggggagtgatgggcattctgtctcatcaagagacagcgcagctcctagccctattccgggagccgataacctgagtgccgacccggtggtttcgccacccacgagcattcccttcaaaagcggggaacccgcactgcgtacaaagagtaattccctgtccgagcagctcgctattaacacctcaccagacgctgtgaaggctaaactgatctctcgcatggctaagatggggcaaccaatgttgccaattctgccccctcaactggacagtaatgatagtgagattgaagacgtgaataccctgcagggcggagggcagcccgttgttaccccttctgtgcagccttctctccaccctgcccaccctgccctgcctcagatgacctcacaggcaccacagccatccgttacaggcctgcaggcccctagtgccgcactcatgcaggtctcctctctcgactcgcactccgccgtgtccgggaatgcccagagctttcaagtcaccttctacaataggatcaattatatcttgtag

SEQ ID NO: 290712 - protein, 446 aa, Artificial Sequence
  derived and/or modified sequence
MTSKEIILGLCLLSLVLSMILMVIIRYISRVLVWILTILVILGSLGGTGVLWWLYAKQRRSPKETVTPEQLQIAEDNLRALLIYAISATVFTVILFLIMLVMRKRVALTIALFHVAGKVFIHLPLLVFQPFWTFFALVLFWVYWIMTLLFLGTTGSPVQNEQGFVEFKISGPLQYMWWYHVVGLIWISEFILACQQMTVAGAVVTYYFTRDKRNLPFTPILASVNRLIRYHLGTVAKGSFIITLVKIPRMILMYIHSQLKGKENACARCVLKSCICCLWCLEKCLNYLNQNAYTATAINSTNFCTSAKDAFVILVENALRVATINTVGDFMLFLGKVLIVCSTGLAGIMLLNYQQDYTVWVLPLIIVCLFAFLVAHCFLSIYEMVVDVLFLCFAIDTKYNDGSPGREFYMDKVLMEFVENSRKAMKEAGKGGVADSRELKPMLKKR

SEQ ID NO: 290713 - DNA, 1341 bp, Artificial Sequence
  derived and/or modified sequence
atgaccagcaaggagatcatcctgggcctgtgcctgctgagcctggtgctgagcatgatcctgatggtgatcatcagatacatcagcagagtgctggtgtggatcctgaccatcctggtgatcctgggcagcctgggcggcaccggcgtgctgtggtggctgtacgccaagcagagaagaagccccaaggagaccgtgacccccgagcagctgcagatcgccgaggacaacctgagagccctgctgatctacgccatcagcgccaccgtgttcaccgtgatcctgttcctgatcatgctggtgatgagaaagagagtggccctgaccatcgccctgttccacgtggccggcaaggtgttcatccacctgcccctgctggtgttccagcccttctggaccttcttcgccctggtgctgttctgggtgtactggatcatgaccctgctgttcctgggcaccaccggcagccccgtgcagaacgagcagggcttcgtggagttcaagatcagcggccccctgcagtacatgtggtggtaccacgtggtgggcctgatctggatcagcgagttcatcctggcctgccagcagatgaccgtggccggcgccgtggtgacctactacttcaccagagacaagagaaacctgcccttcacccccatcctggccagcgtgaacagactgatcagataccacctgggcaccgtggccaagggcagcttcatcatcaccctggtgaagatccccagaatgatcctgatgtacatccacagccagctgaagggcaaggagaacgcctgcgccagatgcgtgctgaagagctgcatctgctgcctgtggtgcctggagaagtgcctgaactacctgaaccagaacgcctacaccgccaccgccatcaacagcaccaacttctgcaccagcgccaaggacgccttcgtgatcctggtggagaacgccctgagagtggccaccatcaacaccgtgggcgacttcatgctgttcctgggcaaggtgctgatcgtgtgcagcaccggcctggccggcatcatgctgctgaactaccagcaggactacaccgtgtgggtgctgcccctgatcatcgtgtgcctgttcgccttcctggtggcccactgcttcctgagcatctacgagatggtggtggacgtgctgttcctgtgcttcgccatcgacaccaagtacaacgacggcagccccggcagagagttctacatggacaaggtgctgatggagttcgtggagaacagcagaaaggccatgaaggaggccggcaagggcggcgtggccgacagcagagagctgaagcccatgctgaagaagagatag

SEQ ID NO: 290714 - DNA, 1341 bp, Artificial Sequence
  derived and/or modified sequence
atgactagcaaggagattatcctgggcctgtgcctccttagcctggtgctttcaatgatattaatggtgattattcgctacatttctcgcgtgctcgtgtggattctgacaatccttgtgatcctcggttccttggggggtactggagtactctggtggctgtatgcgaaacaacggaggtcccccaaggaaactgttactccggagcagttacagattgcagaagacaatctgagggcgctactcatctacgccattagtgccaccgtctttacagtgatcctgtttcttattatgctcgtcatgcgcaagagagtggccttgactattgcactgttccatgtggcaggcaaggtgtttatccacctcccgctgctggtgtttcagccattctggacctttttcgctcttgtattgttctgggtgtactggattatgaccttgcttttcctgggcacaaccggttcccccgtacagaatgaacaaggctttgtggaattcaaaatctccgggcctcttcagtacatgtggtggtatcacgtagtgggcctgatctggataagcgagttcattcttgcctgtcaacagatgactgttgctggggccgtcgtgacctattattttactagagacaaacggaacctgcctttcacccctattcttgccagcgtaaatcggctgataagatatcacctcggaaccgtcgctaagggctccttcattattaccttagtgaaaatcccgagaatgatcttgatgtacatccactctcagctgaaaggaaaagagaacgcctgcgctaggtgcgttctgaaatcctgcatctgctgcctatggtgcttagaaaaatgtctaaattacctgaatcaaaacgcttatactgccaccgcaatcaattccacaaatttctgcacaagtgcaaaggacgctttcgttattttggtggagaacgctctgcgtgtggcaacgatcaatacagtcggagattttatgctgtttcttggcaaggtcttgattgtatgcagtacaggtcttgccggtatcatgttgctgaattaccagcaggactataccgtgtgggtgctgcccctgataattgtctgtctgtttgctttcttggttgcacattgttttctgtccatttacgagatggtggtggatgttctgttcctgtgtttcgctatcgacacaaaatataatgacggaagtcctggaagggaattctacatggacaaagtcctgatggaatttgtggagaactcaaggaaggccatgaaggaggccggcaagggcggcgtggcggattccagggagctcaaacccatgcttaagaaacgctag

SEQ ID NO: 290715 - DNA, 1341 bp, Artificial Sequence
  derived and/or modified sequence
atgaccagcaaggagatcatcctgggcctgtgcctgctgagcctggtgctgtccatgatcctgatggtgatcatccgctacatcagccgggtgctggtgtggatcctgaccatcctggtgatcctgggcagcctgggcggcaccggggtgctgtggtggctgtatgccaagcagaggaggagccccaaggagaccgtgaccccagagcagctgcagattgctgaggacaacctgcgggccctgctgatctatgccatcagcgccaccgtcttcaccgtcatcctcttcctgatcatgctggtgatgaggaagagggtggccctgaccatcgccctcttccacgtggccggcaaggtgttcatccacctgcccctgctggtgttccagcccttctggaccttctttgccctggtgctcttctgggtgtactggatcatgaccctgctcttcctgggcaccaccggcagccctgtgcagaatgagcagggctttgtggagttcaagatcagcggccccctgcagtacatgtggtggtaccacgtggtgggcctcatctggatcagcgagttcatcctggcctgccagcagatgacagtggccggggctgtggtgacctactacttcacccgggacaagaggaacctgcccttcacccccatcctggcctctgtgaacagactcatccgctaccacctgggcaccgtggccaagggcagcttcatcatcaccctggtgaagatccccaggatgatcctgatgtacatccacagccagctgaagggcaaggaaaatgcctgtgcccgctgtgtgctgaagagctgcatctgctgcctgtggtgcctggagaagtgcctgaactacctgaaccagaatgcctacacagccacagccatcaacagcaccaacttctgcaccagcgccaaggatgcctttgtgatcctggtggagaatgccctgcgggtggccaccatcaacacagtgggggacttcatgctgttcctgggcaaggtgctgattgtgtgcagcacaggcctggccggcatcatgctgctgaactaccagcaggactacacagtgtgggtgctgcccctcatcatcgtgtgcctgtttgccttcctggtggcccactgcttcctgagcatctatgagatggtggtggatgtgctcttcctgtgctttgccatcgacaccaagtacaatgatggcagccctggccgggagttctacatggacaaggtgctgatggagtttgtggagaacagcaggaaggccatgaaggaggccggcaagggcggcgtggccgacagccgggagctgaagcccatgctgaagaagaggtag

SEQ ID NO: 290716 - DNA, 1341 bp, Artificial Sequence
  derived and/or modified sequence
atgaccagcaaggagatcatcctgggcctgtgcctgctgagcctggttctgagcatgatattgatggttattatccgatatataagcagagtcctcgtatggattctaacgattcttgtaattctcggaagtcttgggggtacaggtgtcctgtggtggttatacgccaagcagcgcagaagtcctaaagagaccgtcacgccagaacaactgcaaattgctgaggacaacctgcgcgctctgttgatctacgcaattagcgcaacagtttttactgtgatcctgttcctgataatgttagttatgcggaaaagagtggctctgaccatcgcgctttttcacgtcgctgggaaagttttcatccacctgccactcctggtctttcagcccttctggaccttcttcgcgctggtgctgttctgggtctactggatcatgacgctcctgttccttgggacaactggatccccagtccagaacgagcagggatttgtggaattcaaaatcagtggtcccctgcagtacatgtggtggtatcacgtcgtggggctgatttggatttcagaattcatcctggcatgtcagcagatgaccgttgccggagcagtggtaacttactacttcacccgcgacaaacgcaatttacctttcacgcctatactcgcctctgtcaacaggctgatcaggtaccacctgggaactgttgccaaaggatcctttattatcacccttgtgaaaatcccacgaatgatcctcatgtatatccatagtcagttaaagggcaaggaaaatgcatgcgccaggtgcgtattgaagagttgtatctgctgtctgtggtgtctcgaaaagtgtctgaattatttgaatcagaacgcctacacagccaccgccatcaacagcaccaacttctgtactagcgcgaaagacgcctttgtcattctggtcgaaaacgccctgcgtgttgctacaattaacacagtgggggattttatgctgtttctagggaaagtgctcattgtgtgctcaactggccttgcaggcataatgttgttgaactaccagcaggattatacagtttgggtgctcccccttattatagtatgcctttttgcctttctggtggcacactgtttcctctcgatctacgaaatggtggtggatgtgctttttctatgctttgcaatagacacgaagtataacgacggctcaccgggacgggagttttatatggacaaggtgctaatggagttcgtagaaaatagtaggaaggctatgaaagaagctggcaaaggcggcgtggccgattccagagaactgaaaccaatgctcaaaaagcgctag

SEQ ID NO: 290717 - DNA, 1341 bp, Artificial Sequence
  derived and/or modified sequence
atgacatctaaggaaattatcctcgggctctgcctgctgtcactggtgctgagtatgatactcatggtcattatccgttatattagccgcgttctagtgtggattctcactatacttgtcattctcggaagccttgggggaaccggggtgctgtggtggctttatgctaaacaaaggaggagtcccaaggagaccgtgacccccgagcaacttcaaatcgctgaggacaatcttcgcgcacttttaatttacgcaatttctgctactgtgttcaccgtgatcctcttcctgattatgctggttatgaggaagagagtcgccctgactattgcactcttccacgtggccggaaaggtgttcattcatctcccgttattggtctttcagccgttttggacctttttcgccctggtgctgttttgggtgtactggataatgactctcctgttcctaggcacaacaggcagtccagttcagaacgagcaggggtttgtggaatttaagatatccggaccactccagtacatgtggtggtatcacgtcgtcggactcatctggattagcgagttcatcctagcttgtcagcagatgaccgttgccggagccgtcgtcacttattattttaccagggataagcggaacctgccttttacgcctatcctggccagtgtgaatcggctgattcggtaccacctcgggactgtcgcaaaaggtagcttcatcatcaccctagttaagatccctcggatgattctgatgtacattcatagccaattaaaaggtaaggagaatgcatgcgcaagatgtgtactcaaatcctgtatttgttgcctgtggtgcttagaaaaatgcctgaattacctcaaccagaatgcctacactgccactgccattaactctactaacttttgtacatcagccaaggacgccttcgtcattctggtggagaatgctttgcgcgtggctaccatcaataccgtcggggatttcatgttgttccttggcaaggtgctgattgtgtgcagcaccggcctggccggtattatgctattgaattatcagcaggactataccgtgtgggttctccctttaataatcgtgtgcctcttcgcctttttggtcgcccattgctttctgagtatctacgaaatggtggtcgatgtactcttcctttgctttgctatcgacacaaaatacaacgacgggtctccgggtcgagagttctacatggacaaggtcctcatggagtttgtggaaaactcgagaaaggccatgaaagaggctgggaagggcggagtagccgactctagagaactaaaacctatgctgaagaagcggtag

SEQ ID NO: 290718 - DNA, 2407 bp, Artificial Sequence
  derived and/or modified sequence
ttttcacttgttaattattttctgttctcatgattatgtgtaatcttttatgcagagatatcacattagatatacttttccccttatattattacattataagcatttccatatattagtactcatggttactgttttaaatagctgcctattatgctgtttgttgatgtctcagcatgactttgtttatatgagaggtattaagcttatgctgtaaacacctttattaatctgagattttgtatgctgttttgttagaggaaacattctattaatggtggcatatttcaagtaaaagcatgtgctttttatttttaaatcgcttatggcaaaaattcattttcagttcaataaagtatgtgtttgtaagctttgtcatctgccccttgactggtagatgtgcaggctaaggagttttaagtgtttggttttgcttttggtagttgtgtgtgtgtatgtgtgtgtgtgtgtgtgcgtttcttttcagaaggggcgggtaatgtcttctgttggaacatgcactccaccctctttgataaggcttgtggtaagatttgcatcactacccatgacagtcatcctcatagcattaagcacacagctcttagctcccataatgatgtgtggagggtggagtgtattgcagccatattcacctttcatttgtgtgtttgatgtggcatttatattaagtaggagtaattttttttctgatttttttttcttgtgtcaccagtgcacctattccattcttccatcgctgtgctcctgtgaacatttcctgctatgccaagtttgcagaggccctgatcacctttgtcagtgacaatagtgtcttacacaggctgattagtggagtaatgaccagcaaagaaattatattgggactttgcttgttatcactagttctatccatgattttgatggtgataatcaggtatatatcaagagtacttgtgtggatcttaacgattctggtcatactcggttcacttggaggcacaggtgtactatggtggctgtatgcaaagcaaagaaggtctcccaaagaaactgttactcctgagcagcttcagatagctgaagacaatcttcgggccctcctcatttatgccatttcagctacagtgttcacagtgatcttattcctgataatgttggttatgcgcaaacgtgttgctcttaccatcgccttgttccacgtagctggcaaggtcttcattcacttgccactgctagtcttccaacccttctggactttctttgctcttgtcttgttttgggtgtactggatcatgacacttctttttcttggcactaccggcagtcctgttcagaatgagcaaggctttgtggagttcaaaatttctgggcctctgcagtacatgtggtggtaccatgtggtgggcctgatttggatcagtgaatttattctagcatgtcagcagatgacagtggcaggagctgtggtaacatactattttactagggataaaaggaatttgccatttacacctattttggcatcagtaaatcgccttattcgttaccacctaggtacggtggcaaaaggatctttcattatcacattagtcaaaattccgcgaatgatccttatgtatattcacagtcagctcaaaggaaaggaaaatgcttgtgcacgatgtgtgctgaaatcttgcatttgttgcctttggtgtcttgaaaagtgcctaaattatttaaatcagaatgcatacacagccacagctatcaacagcaccaacttctgcacctcagcaaaggatgcctttgtcattctggtggagaatgctttgcgagtggctaccatcaacacagtaggagattttatgttattccttggcaaggtgctgatagtctgcagcacaggtttagctgggattatgctgctcaactaccagcaggactacacagtatgggtgctgcctctgatcatcgtctgcctctttgctttcctagtcgctcattgcttcctgtctatttatgaaatggtagtggatgtattattcttgtgttttgccattgatacaaaatacaatgatgggagccctggcagagaattctatatggataaagtgctgatggagtttgtggaaaacagtaggaaagcaatgaaagaagctggtaagggaggcgtcgctgattccagagagctaaagccgatgctgaagaaaaggtgactggtctcatgagccctgaagaatgaactcagaggaggttgtttacatgaggttctcccactcaccagctgttgagagtctgcgattatgaagagcaggatcttattacttcaatgaaagcatgtaacaagtttctcaaaccaccaacagccaagtggatttggtacagtgcggctgtctaataaataatcaaaagcatttgatag

SEQ ID NO: 290719 - protein, 869 aa, Artificial Sequence
  derived and/or modified sequence
MFSQQQQQQLQQQQQQLQQLQQQQLQQQQLQQQQLLQLQQLLQQSPPQAPLPMAVSRGLPPQQPQQPLLNLQGTNSASLLNGSMLQRALLLQQLQGNLRGYGMASPGLAAPSLTPPQLATPNLQQFFPQATRQSLLGPPPVGVPMNPSQFNLSGRNPQKQARTSSSTTPNRKTMPVEDKSDPPEGSEEAAEPRMDTPEDQDLPPCPEDIAKEKRTPAPEPEPCEASELPAKRLRSSEEPTEKEPPGQLQVKAQPQARMTVPKQTQTPDLLPEALEAQVLPRFQPRVLQVQAQVQSQTQPRIPSTDTQVQPKLQKQAQTQTSPEHLVLQQKQVQPQLQQEAEPQKQVQPQVQPQAHSQGPRQVQLQQEAEPLKQVQPQVQPQAHSQPPRQVQLQLQKQVQTQTYPQVHTQAQPSVQPQEHPPAQVSVQPPEQTHEQPHTQPQVSLLAPEQTPVVVHVCGLEMPPDAVEAGGGMEKTLPEPVGTQVSMEEIQNESACGLDVGECENRAREMPGVWGAGGSLKVTILQSSDSRAFSTVPLTPVPRPSDSVSSTPAATSTPSKQALQFFCYICKASCSSQQEFQDHMSEPQHQQRLGEIQHMSQACLLSLLPVPRDVLETEDEEPPPRRWCNTCQLYYMGDLIQHRRTQDHKIAKQSLRPFCTVCNRYFKTPRKFVEHVKSQGHKDKAKELKSLEKEIAGQDEDHFITVDAVGCFEGDEEEEEDDEDEEEIEVEEELCKQVRSRDISREEWKGSETYSPNTAYGVDFLVPVMGYICRICHKFYHSNSGAQLSHCKSLGHFENLQKYKAAKNPSPTTRPVSRRCAINARNALTALFTSSGRPPSQPNTQDKTPSKVTARPSQPPLPRRSTRLKT

SEQ ID NO: 290720 - protein, 820 aa, Artificial Sequence
  derived and/or modified sequence
PLPMAVSRGLPPQQPQQPLLNLQGTNSASLLNGSMLQRALLLQQLQGNLRGYGMASPGLAAPSLTPPQLATPNLQQFFPQATRQSLLGPPPVGVPMNPSQFNLSGRNPQKQARTSSSTTPNRKTMPVEDKSDPPEGSEEAAEPRMDTPEDQDLPPCPEDIAKEKRTPAPEPEPCEASELPAKRLRSSEEPTEKEPPGQLQVKAQPQARMTVPKQTQTPDLLPEALEAQVLPRFQPRVLQVQAQVQSQTQPRIPSTDTQVQPKLQKQAQTQTSPEHLVLQQKQVQPQLQQEAEPQKQVQPQVQPQAHSQGPRQVQLQQEAEPLKQVQPQVQPQAHSQPPRQVQLQLQKQVQTQTYPQVHTQAQPSVQPQEHPPAQVSVQPPEQTHEQPHTQPQVSLLAPEQTPVVVHVCGLEMPPDAVEAGGGMEKTLPEPVGTQVSMEEIQNESACGLDVGECENRAREMPGVWGAGGSLKVTILQSSDSRAFSTVPLTPVPRPSDSVSSTPAATSTPSKQALQFFCYICKASCSSQQEFQDHMSEPQHQQRLGEIQHMSQACLLSLLPVPRDVLETEDEEPPPRRWCNTCQLYYMGDLIQHRRTQDHKIAKQSLRPFCTVCNRYFKTPRKFVEHVKSQGHKDKAKELKSLEKEIAGQDEDHFITVDAVGCFEGDEEEEEDDEDEEEIEVEEELCKQVRSRDISREEWKGSETYSPNTAYGVDFLVPVMGYICRICHKFYHSNSGAQLSHCKSLGHFENLQKYKAAKNPSPTTRPVSRRCAINARNALTALFTSSGRPPSQPNTQDKTPSKVTARPSQPPLPRRSTRLKT

SEQ ID NO: 290721 - DNA, 2610 bp, Artificial Sequence
  derived and/or modified sequence
atgttcagccagcaacagcagcagcagttgcaacagcagcagcaacagctgcaacaactgcagcagcagcagctgcaacagcagcagttacagcaacagcagcttctgcagcttcaacagctcctgcagcagagtccaccacaggcccccctgcccatggcagtcagccgcggcctgcctccccagcagccacagcagcctctcctcaacctccagggcaccaatagtgcaagcttgctgaacggctcaatgctgcagcgggctctgctcttacagcagctccagggcaacctccggggttatgggatggcatctcccgggcttgccgctccgagtctaacgcctccccagctggctacccccaatttgcagcaattcttccctcaggctacaaggcagtccctgctcggacctcctcctgtaggtgttcctatgaacccgtcccagtttaacctgagtggccgcaacccacagaagcaggcacggacttctagcagtaccacacctaatagaaagactatgcccgtggaagacaaaagcgaccctcctgaaggctccgaagaagctgccgaacctcggatggacacccccgaggaccaggatctcccgccctgtcccgaggatatcgctaaggaaaagcgcacacccgcccccgagcccgagccatgcgaggcatcggagctgccagcgaaaagactgcgcagctccgaggaacccacagaaaaagaaccgcccggccagctccaggtcaaggcccagcctcaggctagaatgacagtgcccaaacagacccagacaccagacctactccctgaagcactggaagcacaggttctccctcgatttcaacccagggttctgcaggtgcaagctcaggtgcagtctcaaactcagccccgtatcccgtctacagacacccaagtccagccaaagctccagaagcaagcgcaaacgcagacctctcccgaacacttggtgctgcaacagaaacaggtgcaaccgcagctgcagcaggaggcagaaccccagaagcaggttcagccccaggtccaaccacaggcacattcccagggcccacggcaggtacagttgcagcaggaagcagaacccctcaaacaggtgcaaccgcaagtgcagccccaggcccacagccagccacctcgccaggtccagcttcaactgcaaaagcaggtgcagacccaaacgtatccgcaagtgcacacacaagcccagcccagtgtgcagccgcaggaacatcccccagcccaggtgtctgtccagcccccagagcagacccacgaacagccacacacccagcctcaggtttccctcctggcgcccgaacagaccccagttgttgtgcacgtgtgcggtctggagatgccccctgatgctgttgaggcgggtggcggtatggaaaaaactctccctgaaccagtgggaacacaggtgagcatggaggaaattcagaacgagtccgcctgtggcctagacgttggcgagtgtgagaatcgggcgcgcgaaatgcctggcgtgtggggcgctggtggctctctcaaggtgacgatcctgcagagttccgactcgcgcgctttttccaccgtccccttgacacctgtcccgcgcccatccgattcagttagctctactcccgccgccaccagcacaccatctaaacaggccctgcagtttttttgttacatatgtaaggcctcatgctctagtcaacaggaatttcaggaccacatgtcagaacctcaacatcagcagcgccttggggaaatacaacacatgagtcaggcctgcctgctgagcctgctgcccgtcccccgtgacgttttagaaaccgaggatgaggaacctcccccccggaggtggtgcaacacgtgtcaactttattacatgggtgacctgatccagcacagaaggactcaggaccacaaaattgcgaagcagtctctgcgccctttctgtacggtgtgcaatagatattttaagacaccccgaaagttcgtggagcacgtcaaaagtcaggggcacaaagacaaggcaaaggagctgaagtccctcgagaaggaaatcgccgggcaggacgaagatcattttatcacagtggacgctgtgggatgctttgagggggatgaggaagaagaggaagatgacgaggatgaagaggagatcgaggtcgaggaggagttgtgcaaacaggtgaggagccgagatataagccgggaagaatggaagggttctgagacatactcccctaatacagcatacggtgtcgattttctggtacctgtgatgggctacatatgccggatctgccataagttttatcattctaacagcggtgctcagctcagtcactgtaagtcattaggacatttcgaaaacctccagaagtataaagcggcaaaaaatccttcgcctactacccgccctgtttcccgaagatgtgccatcaatgcccgaaatgccttaaccgccctgttcacctcttcgggaaggccaccttctcagccaaacacccaagacaagacacccagcaaagtgacagctaggccgtctcaaccaccactcccgcgacgctcgacacgtctcaaaacatag

SEQ ID NO: 290722 - DNA, 2463 bp, Artificial Sequence
  derived and/or modified sequence
cccctgcctatggccgtttccagaggcctgccgccacaacagccacagcagccacttctcaatctccagggaacaaatagcgcctccctccttaatgggagtatgctgcagagagctctcctcctgcagcagctccagggaaacctgcgcggctatggaatggctagccccggcctggccgcccccagcctgacaccccctcagttggccactcccaatctgcaacagttttttccccaggccactcgacagtccttgctgggacctccaccagtaggagttcccatgaatccttctcaatttaacctgtcgggacgaaaccctcagaaacaggcaaggacgtcctcctcgaccacacccaacagaaagactatgccggtggaggacaaatctgaccctccagagggatctgaagaagccgctgagccacgtatggacacgccagaggatcaagacctgcctccttgcccagaagacattgctaaagagaaaaggaccccagctccagaacccgaaccatgcgaagcttccgagcttcctgccaagcggctcagatcgagcgaggagcctactgaaaaagagcctcctgggcaactgcaggtaaaggcacagccccaagcccgcatgaccgtaccaaagcagacccagacccccgacctcctccctgaggcactggaggctcaagtgctccctcggtttcagccaagggtgcttcaggtgcaggcccaagtgcagagtcagacccagccacggattccaagcaccgatacccaagtgcagcccaaactacagaagcaggcacagactcaaacgagtccggagcacttggtgctacagcaaaaacaggtccagccccagctccagcaggaagccgagccccagaaacaggtccaaccccaggtgcagcctcaggcacacagtcaaggcccgcgacaagtacagttacagcaggaggccgaaccattgaagcaggtgcagcctcaggtgcagccacaagcgcacagtcagccaccgcgccaagttcagctgcagctccagaagcaagtgcagacacagacctacccgcaggtccatacccaggctcaaccaagtgtgcaacctcaggagcacccaccggcccaggtctctgtccagccacccgaacaaacccacgaacaacctcacacacagccacaagtgtcgctgttagctccagagcaaactcccgtggtagtgcatgtttgtggattagaaatgcccccagacgcagtggaggccgggggtgggatggagaaaacgcttcctgaaccagtgggaacccaggttagcatggaggagattcagaatgagtcggcctgtgggttagacgttggcgagtgtgagaacagagcccgtgagatgccgggcgtctggggtgccggcggcagtctgaaggtcacaatcctgcaatctagcgactccagagcattctcaaccgtgcctctgacccctgtgccacgaccatcggacagcgtctcctcaacacccgcagctactagcactccttcgaaacaagccctgcaatttttctgctacatctgtaaggcttcctgctctagtcagcaagagttccaggatcatatgtccgagccccagcaccagcagcgattgggcgagatccagcacatgtcccaggcctgtctgctctccctactccccgtccctagggacgtgctggagacagaggacgaagagccaccgccccggcggtggtgcaacacatgtcaactgtattacatgggggatctgatccaacatagaaggacccaagatcacaagatcgctaagcagtctcttcgtcccttctgcacagtgtgtaaccggtattttaagacccctagaaaattcgttgagcatgtgaaatcccaaggccacaaagataaggcaaaagaactgaagtccctcgagaaggagattgccggtcaggacgaggatcacttcataaccgtggacgcggtgggatgtttcgaaggcgatgaagaggaggaggaagatgacgaggacgaagaggagattgaggtagaggaggagctgtgtaagcaggtacgctctcgtgatatctctcgggaagagtggaaaggctctgaaacgtattctccaaacacagcctacggtgtggacttcctcgtgcccgtgatgggctacatctgcaggatatgccataagttctatcatagcaacagtggcgcccagctcagtcactgtaaatcgttgggccactttgaaaacctgcagaaatataaagcagctaagaacccgtcccccaccacccgccccgtgtccagacgctgcgccatcaacgctagaaatgcactgaccgccctgttcacttcatcgggccgcccgccctcacagccaaatactcaggataaaaccccatccaaagttacagcccgccctagtcagccacccctgcccaggcggagtacccggcttaagacatag

SEQ ID NO: 290723 - DNA, 2610 bp, Artificial Sequence
  derived and/or modified sequence
atgttcagccagcagcagcagcagcagctgcagcagcagcagcagcagctgcagcagctgcagcagcagcagctgcagcagcagcagctgcagcagcagcagctgctgcagctgcagcagctgctgcagcagagccccccccaggcccccctgcccatggctgtgtcccggggcctgcccccccagcagccccagcagcccctgctgaacctgcagggcaccaacagcgccagcctgctgaatggctccatgctgcagagggccctgctgctgcagcagctgcagggcaacctgcggggctacggcatggccagccctggcctggccgcccccagcctgaccccaccccagctggccacccccaacctgcagcagttcttcccccaggccacccggcagagcctgctgggccccccacctgtgggcgtgcccatgaaccccagccagttcaacctgtctggaagaaacccccagaagcaggcccggaccagcagcagcaccacccccaacaggaagaccatgcctgtggaggacaagagtgaccccccagagggcagcgaggaggccgctgagcccaggatggacaccccagaggaccaggacctgcccccctgcccagaagatattgccaaggagaagaggaccccagcccctgagcctgagccctgtgaggccagcgagctgcctgccaagaggctgcggagcagcgaggagcccacagagaaggagcccccaggccagctgcaggtgaaggcccagccccaggccaggatgacagtgcccaagcagacccagaccccagacctgctgcctgaggccctggaggcccaggtgctgccccgcttccagccccgggtgctgcaggtgcaggcccaggtgcagagccagacccagccccgcatccccagcacagacacccaggtgcagcccaagctgcagaagcaggcccagacccagaccagccctgagcacctggtgctgcagcagaagcaggtgcagccccagctgcagcaggaggccgagccccagaagcaggtgcagccccaggtgcagccccaggcccacagccagggcccccggcaggtgcagctgcagcaggaggccgagcccctgaagcaggtgcagccccaggtgcagccccaggcccacagccagcccccccggcaggtgcagctgcagctgcagaagcaggtgcagacccagacctacccccaggtgcacacccaggcccagcccagcgtgcagccccaggagcaccccccagcccaggtgtctgtgcagcccccagagcagacccatgagcagccccacacccagccccaggtgtccctgctggcccctgagcagacccctgtggtggtgcacgtgtgtggcctggagatgcccccagatgctgtggaggccggcggcggcatggagaagaccctgcctgagcctgtgggcacccaggtgtccatggaggagatccagaatgaaagtgcctgtggcctggatgtgggagaatgtgaaaatagagcccgggagatgcctggggtgtggggcgccggcggcagcctgaaggtgaccatcctgcagagcagtgacagccgggccttcagcacagtgcccctgacccctgtgccccggcccagcgacagcgtgagcagcaccccagctgccaccagcacccccagcaagcaggccctgcagttcttctgctacatctgcaaggccagctgcagcagccagcaggagttccaggaccacatgtctgagccccagcaccagcagaggctgggggagatccagcacatgagccaggcctgcctgctgagcctgctgcctgtgcccagagatgtgctggagacagaagatgaggagcccccaccccggcgctggtgcaacacctgccagctgtactacatgggagacctgatccagcacaggaggacccaggaccacaagatcgccaagcagagcctgcggcccttctgcaccgtgtgcaaccgctacttcaagacccccaggaagtttgtggagcacgtgaagagccagggccacaaggacaaggccaaggagctgaagagcctggagaaggagattgctggccaggatgaggaccacttcatcaccgtggatgctgtgggctgctttgaaggagatgaggaggaggaggaggatgatgaagatgaggaggagattgaggtggaggaggagctgtgcaagcaggtgcgcagccgggacatcagccgggaggagtggaagggcagcgagacctacagccccaacacagcctatggagtggacttcctggtgcctgtgatgggctacatctgccgcatctgccacaagttctaccacagcaacagcggggcccagctgagccactgcaagagcctgggccactttgagaacctgcagaagtacaaggccgccaagaaccccagccccaccaccaggcctgtgtccagaagatgtgccatcaatgccagaaatgccctgacagccctcttcaccagcagcggccggccccccagccagcccaacacccaggacaagacccccagcaaggtgacagcccggcccagccagccccccctgccccggcgcagcacccggctgaagacctag

SEQ ID NO: 290724 - DNA, 2463 bp, Artificial Sequence
  derived and/or modified sequence
cccctgcccatggctgtgtcccggggcctgcccccccagcagccccagcagcccctgctgaacctgcagggcaccaacagcgccagcctgctgaatggctccatgctgcagagggccctgctgctgcagcagctgcagggcaacctgcggggctacggcatggccagccctggcctggccgcccccagcctgaccccaccccagctggccacccccaacctgcagcagttcttcccccaggccacccggcagagcctgctgggccccccacctgtgggcgtgcccatgaaccccagccagttcaacctgagcggcaggaacccccagaagcaggcccggaccagcagcagcaccacccccaacaggaagaccatgcctgtggaggacaagagtgaccccccagagggcagcgaggaggccgctgagcccaggatggacaccccagaggaccaggacctgcccccctgcccagaggacatcgccaaggagaagaggaccccagcccctgagcctgagccctgtgaggccagcgagctgcctgccaagaggctgcggagcagcgaggagcccacagagaaggagcccccaggccagctgcaggtgaaggcccagccccaggccaggatgacagtgcccaagcagacccagaccccagacctgctgcctgaggccctggaggcccaggtgctgccccgcttccagccccgggtgctgcaggtgcaggcccaggtgcagagccagacccagccccgcatccccagcacagacacccaggtgcagcccaagctgcagaagcaggcccagacccagaccagccctgagcacctggtgctgcagcagaagcaggtgcagccccagctgcagcaggaggccgagccccagaagcaggtgcagccccaggtgcagccccaggcccacagccagggcccccggcaggtgcagctgcagcaggaggccgagcccctgaagcaggtgcagccccaggtgcagccccaggcccacagccagcccccccggcaggtgcagctgcagctgcagaagcaggtgcagacccagacctacccccaggtgcacacccaggcccagcccagcgtgcagccccaggagcaccccccagcccaggtgtctgtgcagcccccagagcagacccatgagcagccccacacccagccccaggtgtccctgctggcccctgagcagacccctgtggtggtgcacgtgtgtggcctggagatgcccccagatgctgtggaggccggcggcggcatggagaagaccctgcctgagcctgtgggcacccaggtgtccatggaggagatccagaatgaaagtgcctgtggcctggatgtgggggagtgtgagaacagagcccgggagatgcctggggtgtggggcgctgggggcagcctgaaggtgaccatcctgcagagcagtgacagccgggccttcagcacagtgcccctgacccctgtgccccggcccagcgacagcgtgagcagcaccccagctgccaccagcacccccagcaagcaggccctgcagttcttctgctacatctgcaaggccagctgcagcagccagcaggagttccaggaccacatgtctgagccccagcaccagcagaggctgggggagatccagcacatgagccaggcctgcctgctgagcctgctgcctgtgcccagagatgtgctggagacagaagatgaggagcccccaccccggcgctggtgcaacacctgccagctgtactacatgggagacctgatccagcacaggaggacccaggaccacaagatcgccaagcagagcctgcggcccttctgcaccgtgtgcaaccgctacttcaagacccccaggaagtttgtggagcacgtgaagagccagggccacaaggacaaggccaaggagctgaagagcctggagaaggagattgctggccaggatgaggaccacttcatcaccgtggatgctgtgggctgctttgaaggagatgaggaggaggaggaggatgatgaagatgaggaggagattgaggtggaggaggagctgtgcaagcaggtgcgcagccgggacatcagccgggaggagtggaagggcagcgagacctacagccccaacacagcctacggcgtggacttcctggtgcctgtgatgggctacatctgccgcatctgccacaagttctaccacagcaacagcggggcccagctgagccactgcaagagcctgggccactttgagaacctgcagaagtacaaggccgccaagaaccccagccccaccaccaggcctgtgagccgccgctgtgccatcaatgccagaaatgccctgacagccctcttcaccagcagcggccggccccccagccagcccaacacccaggacaagacccccagcaaggtgacagcccggcccagccagccccccctgcccaggaggagcacccggctgaagacctag

SEQ ID NO: 290725 - DNA, 2610 bp, Artificial Sequence
  derived and/or modified sequence
atgttcagccagcagcagcagcagcagctgcagcagcagcagcagcagcttcagcagctacagcagcagcaacttcagcagcagcaactgcagcagcagcagctgctgcagctgcagcaattgctccagcagagtccgccccaagcccccctgccaatggccgtttcaaggggcctccccccccagcaaccacagcagccacttctgaacctgcaaggtaccaattccgcgtctcttctgaatggatccatgttgcagcgcgccttgctcttacagcaactgcaggggaacctcaggggatatggcatggcttccccaggtctggccgcaccatcactgactcctccacagctggctacccccaacctgcagcagttcttcccgcaggccacgcgccaatccctgttgggccctcctccagtcggcgtcccaatgaaccctagccagtttaacctcagtggccggaacccccagaagcaggccaggacctcttcaagtacgacgccaaacaggaagactatgccagtcgaagacaagtcggacccacccgagggaagcgaagaagccgctgaaccacggatggatacaccagaagatcaggacctccccccatgtccggaagatatcgccaaggagaagaggaccccagcacctgaacccgagccatgtgaggcctctgaactgcctgccaagagactgaggagtagcgaggagcctaccgagaaggagcctcccgggcaactgcaggtcaaggcccagccccaggccagaatgaccgtgcctaagcaaacacagactcctgacctgctgccagaggcactcgaagcgcaggtgctgcctaggtttcagccaagagtgttacaggtgcaggcccaggtgcagtcccaaacgcagccccgaattccaagcacagatacacaggtgcaacctaagctccaaaaacaggcccagacccagacgtctccagaacacctcgtgcttcagcaaaagcaggtgcagcctcaactgcagcaagaagcggaacctcagaaacaagtccagccccaggttcagccccaggcccactcccaaggaccaagacaggtacagctgcaacaggaggcagaacctctcaagcaggttcaaccccaggtgcagcctcaagcgcactcccaaccacccaggcaagttcaactccagctccagaaacaggtgcaaactcaaacctaccctcaggtgcatactcaggcccagccaagtgtgcagccgcaagaacacccccctgcccaggtctcagtgcagccccctgaacagacacatgagcagccacatactcaaccccaggtgtccttgctagccccggagcagacacccgtggttgtgcacgtttgtggactggagatgccccctgatgctgtagaggccggcggtggcatggaaaaaactttaccagagcctgtgggtactcaggtgagtatggaagagatacagaatgagtctgcatgtggactggatgttggggaatgcgagaaccgggcacgggagatgcctggggtctggggcgccggaggaagcctgaaggtgactatccttcaaagcagtgactctagagcattcagcaccgtgcctctgactccagttcccaggccatcagatagtgtctcctccacacccgctgcaactagcactccctctaagcaagcgctacagttcttctgctacatttgcaaggcatcttgcagttcccagcaggagttccaagatcacatgagcgagccccagcaccagcaacgattaggagagatccagcatatgagccaagcctgtctcctgtccctgctcccagtcccccgggacgtactggaaactgaggacgaggaaccgccccccagacgatggtgcaacacctgccagctgtattatatgggcgatctcatccaacacagacgtacccaggatcataaaatcgctaagcagagcctacgcccattttgcaccgtatgtaatcgttatttcaaaaccccaagaaagttcgtggaacatgttaaatctcaggggcataaggacaaggcgaaagagctgaagtccctggaaaaagagattgcagggcaggacgaggatcattttattaccgttgacgctgtcggctgtttcgaaggagacgaggaggaggaggaggacgatgaggacgaggaagagatagaggttgaagaggaactctgcaaacaagtgcggtctagagacattagcagggaagagtggaaaggatccgaaacgtactctcccaacacagcatatggggtagacttccttgtacctgtgatgggctacatatgccgaatctgtcacaaattttaccacagcaacagtggagcccaactgagtcactgtaagtcactggggcattttgaaaacctgcagaagtataaagctgccaagaacccgagccccacaactcgtccagtttctcgccggtgtgcaattaacgcgagaaatgcactgactgccctttttacctcatcgggccgacctccatcacagccaaacactcaggacaaaacaccaagtaaagtgaccgctcgcccctcgcagccaccactcccgaggcggtccacaaggctaaagacatag

SEQ ID NO: 290726 - DNA, 2463 bp, Artificial Sequence
  derived and/or modified sequence
cccctgcccatggccgtgagccggggcctgcccccccagcagccccaacagccccttctcaatctccagggcaccaacagcgccagtctgctgaatggcagtatgctgcaacgggccctcttactgcagcaactgcaggggaatcttcgggggtatgggatggcgagccctggcttagcagcccctagcttaacgcctccccagctcgctacaccgaacttgcagcagttcttcccacaggccactcgccagagtttactggggccaccccccgtgggcgttcctatgaatcccagccaatttaacctttcagggcgcaaccctcagaaacaggcccggacgtcttcctctaccactcctaatcgcaagaccatgcctgtggaggacaagagtgaccctcccgagggctcggaagaagccgccgaaccacgcatggacacacctgaagatcaggatcttcctccctgtcctgaggacatcgcaaaggaaaagcggactcctgctccagagcccgaaccatgtgaagcaagcgagctgccagctaaacggttaaggagttcagaagagcctacagaaaaagaaccccctggccagctgcaggtgaaggcccagccccaggcaagaatgacagtaccaaaacaaacccagacacccgatctcctcccagaggctctggaggcccaagtgctccctcggttccagccccgtgtgctgcaagttcaggcccaggtccaatcccaaacacagcccaggatacccagtacagatacccaggtccagcccaagcttcaaaagcaggctcaaactcagacttcaccagagcacctcgtgctacaacagaagcaggttcagccacagttgcagcaggaggctgaaccccagaaacaagtgcagcctcaggttcaaccacaggctcacagtcagggtcctcgacaggtgcaactacagcaagaagccgagcccctgaaacaagtgcagccccaggtacaacctcaggcccactctcaacccccgcgccaggtacagctgcagttgcagaagcaggtacagactcagacctacccacaggtccatactcaagctcagcctagcgtacaaccacaggaacacccacccgcacaggtgtctgttcagccacctgagcagacacacgaacagccccacacccagccccaggtcagcctgttggccccagagcagacacccgtggtcgtccacgtgtgtggattagaaatgccccccgatgcggttgaggctgggggaggcatggagaagaccctgcctgagccggttggaacacaagtgtccatggaagaaatccagaatgaatcagcatgcggtctggacgtgggggaatgcgagaatcgggcccgtgaaatgcctggtgtttggggagctggagggtctctcaaggtgaccatccttcagtcttcagactccagggccttctctacagtgcctctgacccccgtgccccggcctagtgactccgtctcatctactccagcggctacctcaacaccaagtaagcaagccctccaattcttttgttacatatgcaaggcgtcatgctcttcacagcaagaattccaggatcatatgtctgaaccacagcaccagcagagacttggggaaattcagcatatgtcccaggcgtgcctgctcagtctgcttccagtaccgcgagatgttctcgagacagaggatgaagagccaccaccgcggaggtggtgtaacacatgccagctatattatatgggcgatctgatccagcatagaagaacccaagaccataaaatagctaagcagtccctcaggcctttctgcacggtgtgcaacaggtatttcaaaactcctagaaagtttgtggagcacgtcaaaagtcaggggcacaaggacaaggcaaaggaactgaagagcttagaaaaggagattgcaggacaagatgaggatcattttattaccgtcgacgctgtgggatgctttgaaggagacgaagaagaggaagaagatgacgaggatgaggaggaaatcgaagtggaagaggagctgtgcaaacaagtgcggtctcgcgatatttcgcgcgaagaatggaagggaagtgaaacatattcacctaacaccgcatacggtgtggatttcctggtgcctgttatgggatacatttgcagaatctgccataagttctaccactcgaatagtggagcccagttatcccattgtaagtcactgggtcacttcgaaaatctccagaaatacaaggcagccaagaacccatctcctacaactagacccgtctccagacgctgtgcaattaatgcacgaaatgcgctgaccgcactctttacctctagcggacgacccccctcacagccaaatactcaggataagacaccaagcaaagtgacggcgaggccatcccagccccccttgccacggcggtcaactaggttaaagacctag

SEQ ID NO: 290727 - DNA, 2610 bp, Artificial Sequence
  derived and/or modified sequence
atgttcagccagcagcaacagcagcagcttcagcagcagcaacagcaacttcagcagctccaacagcagcagttgcagcagcagcagcttcagcaacagcaattgcttcaactacagcagctgctacagcagtcgcctccccaagcccctctaccaatggcagtgtctcgcggactccctcctcagcaaccacagcaacctctgcttaatcttcagggtaccaatagtgcaagcttgctgaatggcagtatgttacagcgcgcacttctactgcagcagctccaagggaatctccgcggttatggcatggcttcacctggcttggcagccccaagtttaactccccctcagctggcaactccaaacctgcagcagtttttcccccaggctacccgtcagagccttctgggaccccctcctgtcggtgttcctatgaacccgtcacaattcaatttgtctggacggaatccccaaaaacaggcaaggacctcttcatccactacgcctaaccgaaagaccatgcctgtcgaggataagtcagatccccctgaggggtctgaggaagcagcagaacctagaatggacactcctgaagatcaggacctgcctccatgccctgaagatatcgctaaagaaaagcggactcccgcacctgagcctgagccatgtgaagcctctgaactgccagccaaaaggctgagaagctcagaggaaccgaccgagaaagagccccctgggcagcttcaagtgaaagcccaaccacaggcgaggatgaccgtccctaagcagactcagacaccagacctgctgccagaggctttagaagctcaggtactccctcggttccaacctcgtgtccttcaggtgcaagctcaagtccagtcacaaactcaaccgagaatacccagtacagacacccaggttcaacccaaactacagaaacaagctcagacacagactagcccagaacaccttgtcttgcagcagaagcaggtccaaccccaactgcagcaggaggccgaacctcagaaacaggtccagcctcaggtccaaccccaggcccacagccagggtcccaggcaggtgcaactgcagcaggaggctgagcctctgaagcaggtgcagccacaggttcagccacaggcccattcacagcctccgaggcaggtgcagttacaactgcagaaacaggtccagactcagacctacccccaggtgcatacacaagcgcagccttccgtgcagcctcaggaacatcctcctgctcaggtgtccgtgcagcctcctgaacagacacacgaacagccacatacccagccccaggtgtccctccttgcccctgagcagaccccagtagtagtgcacgtatgcggtcttgagatgcctcctgatgcagtggaggccggtgggggaatggagaagacactgccagagccagtcgggactcaggtctccatggaggaaatacagaacgaaagcgcctgcggtctggatgtcggtgagtgcgaaaatcgtgccagagaaatgccaggcgtgtggggcgcaggaggaagcttgaaggtgaccatcctccagtcatctgattcacgggctttctcaacagtccctctaactccagtccctcgccctagtgactccgtgtcatcaactcctgctgcgactagcacccctagcaagcaggcattgcagttcttttgctatatctgtaaggcctcctgctcatcacaacaggagtttcaggatcatatgtccgagcctcagcaccaacaacggttaggcgagatacagcatatgagccaagcttgcctacttagcctgctgcccgtcccccgtgacgtgctggagacagaggatgaagaacctccaccacgacgttggtgtaatacctgccagctctactatatgggcgacctgattcaacaccgcagaacccaagaccacaagattgcaaaacagtctttgaggccattctgcacggtgtgcaacaggtatttcaaaacaccacgcaaattcgtggagcacgtgaagagtcaaggccataaagataaagcaaaggagctgaagtcactggaaaaagagattgcaggacaagatgaggaccattttatcactgtggatgcagtaggatgttttgaaggcgacgaggaagaagaagaagatgacgaagatgaggaggagattgaagtggaggaggaattatgtaaacaagtgaggagtcgggacatcagccgcgaggaatggaaaggcagtgagacctacagtccaaataccgcatacggcgtggactttcttgttcccgtgatgggatacatctgccgtatctgccacaaattttatcactcaaattctggcgctcagctaagtcactgcaagtccctcgggcacttcgaaaatctacagaaatataaggcagccaagaatccgagccctactacccggccagtgagtcggaggtgcgcaattaatgcgaggaatgcgctaacagctctctttacaagtagcgggagaccaccttcacagcccaatactcaggacaagacaccatcaaaagtgaccgcaaggccatcccagccccctttgccaaggcggtccacacgtctcaagacttag

SEQ ID NO: 290728 - DNA, 2463 bp, Artificial Sequence
  derived and/or modified sequence
ccacttccaatggcagttagccgcggtctccctccacagcagcctcagcagcccctccttaacctacagggaaccaatagcgccagtctcctgaacggcagcatgcttcagcgagccctcctgctccaacaacttcagggtaacctgcggggttacggtatggcaagcccaggccttgcagcgccaagcctgaccccccctcagcttgcaacccccaatctgcagcagtttttcccgcaggcgacgaggcagagtctgttggggcctcccccagtgggagtacccatgaaccccagtcagtttaatctttccggccgaaaccctcaaaaacaggcccgtacctcatcgtccacgacaccaaataggaaaactatgcctgtcgaagataagagtgacccccctgaggggtcagaggaagctgccgaacctaggatggatacccccgaggaccaggatcttcctccttgcccagaggatatcgccaaggagaaaagaactccagcgccagaacccgaaccatgtgaagcaagtgaactgccagccaaacggcttcgcagtagtgaagagccgaccgaaaaggagccccctggccaactgcaggtgaaggcgcagccccaggctcggatgacggtaccaaagcagacccaaacccccgacctcctgcctgaagccctcgaggcacaggtacttccccgtttccagccgagggtactccaggtgcaggcgcaggttcagtcccagacacaaccgaggatacccagcaccgacactcaggtgcagccaaagcttcaaaagcaggcccaaacacagacctcaccagagcatctggttctgcagcagaaacaggtacagccccagctgcagcaggaggccgaacctcagaaacaggtgcagccacaggttcagccacaggcccactcacagggcccacgtcaagtccagcttcaacaggaggctgagcctctcaaacaggtgcaaccgcaggtgcagccacaggcacacagtcagcctcccaggcaggtgcagctgcagctgcagaaacaggtgcagacccagacatatccgcaggtgcacacccaggctcaacctagcgtgcaaccacaggagcaccctccagcccaggtctccgtgcagccaccagagcagacacacgaacagccccacacccagcctcaggtatccctgttagccccagaacagacacctgtggttgtgcatgtgtgtgggcttgagatgcctcctgacgccgtggaagccggtggcggtatggagaagacgctgccggagccagttggaacacaggtcagcatggaggaaatccagaacgagtccgcctgcgggttggatgtgggagaatgtgaaaacagggcacgggaaatgcccggagtttggggggctggcggatccctgaaggtaacaatcttacagtcgagtgattcccgggcattttccaccgtcccgctcacccctgtgcctcgacccagtgatagcgtgtcctcaacacccgcagcaaccagcacacccagcaagcaggccctccagttcttttgctacatttgcaaggcatcctgttcttcccagcaggagtttcaggatcacatgtcagagcctcagcatcagcagaggctgggggagatccagcacatgtcacaagcatgtctgctaagccttttgccagtcccacgtgatgtcctcgaaacagaggacgaggaacccccaccccgacgttggtgcaacacttgtcagctgtactatatgggggatctcatccagcacaggcggacacaggatcacaagattgcaaaacagtcattgcgccctttttgtaccgtgtgcaaccggtattttaaaacccccagaaaatttgtcgagcatgtcaaatcacaaggccacaaagataaggccaaagagctcaagtcccttgagaaagagatcgcgggacaggatgaggaccactttattacagttgacgctgtcggctgcttcgagggggacgaagaggaggaggaggacgacgaagacgaggaggaaatcgaggtcgaggaagaactctgtaagcaggtgaggtccagggacatctccagggaagagtggaagggttcagagacttactcccctaatacagcgtatggggtggacttccttgtacctgtaatgggatatatttgccggatctgtcataagttctatcattctaactcaggcgcacagctgtctcactgtaaaagcctgggacatttcgaaaacctccagaaatataaagcagctaagaatccatccccaactactcggcctgtgtcaaggcgatgtgccatcaacgctaggaacgcgctgactgccctgtttacttcctccgggcgaccaccctcccaacctaatacccaggacaaaacgcctagcaaggtaacagcccgaccaagccagcctccactgccaagacgatccactcgcttaaagacctag

SEQ ID NO: 290729 - DNA, 2904 bp, Artificial Sequence
  derived and/or modified sequence
cccgcccgcatttgggccttacgagcccacaggccccggagtagcagcggggaggccgggagcccgcgggccggagccgcccggccgaggcgtgggggctgcggggccggcccatccgtgggggcgacttgagcgttgagggcgcgcggggaggcgagccaccatgttcagccagcagcagcagcagcagctccagcaacagcagcagcagctccagcagttacagcagcagcagctccagcagcagcaattgcagcagcagcagttactgcagctccagcagctgctccagcagtccccaccacaggccccgttgcccatggctgtcagccgggggctccccccgcagcagccacagcagccgcttctgaatctccagggcaccaactcagcctccctcctcaacggctccatgctgcagagagctttgcttttacagcagttgcaaggtaacctccgaggctatggcatggcatccccaggcctcgcagcccccagcctcacacccccacaactggccactccaaatttgcaacagttctttccccaggccactcgccagtccttgctgggacctcctcctgttggggtccccatgaacccttcccagttcaacctttcaggacggaacccccagaaacaggcccggacctcctcctctaccacccccaatcgaaagacaatgcctgtggaagacaagtcagaccccccagaggggtctgaggaagccgcagagccccggatggacacaccagaagaccaagatttaccgccctgcccagaggacatcgccaaggaaaaacgcactccagcacctgagcctgagccttgtgaggcgtccgagctgccagcaaagagattgaggagctcagaagagcccacagagaaggaacctccagggcagttacaggtgaaggcccagccgcaggcccggatgacagtaccgaaacagacacagacaccagacctgctgcctgaggccctggaagcccaagtgctgccacgattccagccacgggtcctgcaggtccaggcccaggtgcagtcacagactcagccgcggataccatccacagacacccaggtgcagccaaagctgcagaagcaggcgcaaacacagacctctccagagcacttagtgctgcaacagaagcaggtgcagccacagctgcagcaggaggcagagccacagaagcaggtgcagccacaggtacagccacaggcacattcacagggcccaaggcaggtgcagctgcagcaggaggcagagccgctgaagcaggtgcagccacaggtgcagccccaggcacattcacagcccccaaggcaggtgcagctgcagctgcagaagcaggtccagacacagacatatccacaggtccacacacaggcacagccaagcgtccagccacaggagcatcctccagcgcaggtgtcagtacagccaccagagcagacccatgagcagcctcacacccagccgcaggtgtcgttgctggctccagagcaaacaccagttgtggttcatgtctgcgggctggagatgccacctgatgcagtagaagctggtggaggcatggaaaagaccttgccagagcctgtgggcacccaagtcagcatggaagagattcagaatgagtcggcctgtggcctagatgtgggagaatgtgaaaacagagcgagagagatgccaggggtatggggcgccgggggctccctgaaggtcaccattctgcagagcagtgacagccgggcctttagcactgtacccctgacacctgtcccccgccccagtgactccgtctcctccacccctgcggctaccagcactccctctaagcaggccctccagttcttctgctacatctgcaaggccagctgctccagccagcaggagttccaggaccacatgtcggagcctcagcaccagcagcggctaggggagatccagcacatgagccaagcctgcctcctgtccctgctgcccgtgccccgggacgtcctggagacagaggatgaggagcctccaccaaggcgctggtgcaacacctgccagctctactacatgggggacctgatccaacaccgcaggacacaggaccacaagattgccaaacaatccttgcgacccttctgcaccgtttgcaaccgctacttcaaaacccctcgcaagtttgtggagcacgtgaagtcccaggggcataaggacaaagccaaggagctgaagtcgcttgagaaagaaattgctggccaagatgaggaccacttcattacagtggacgctgtgggttgcttcgagggtgatgaagaagaggaagaggatgatgaggatgaagaagagatcgaggttgaggaggaactctgcaagcaggtgaggtccagagatatatccagagaggagtggaagggctcggagacctacagccccaatactgcatatggtgtggacttcctggtgcccgtgatgggctatatctgccgcatctgccacaagttctatcacagcaactcaggggcacagctctcccactgcaagtccctgggccactttgagaacctgcagaaatacaaggcggccaagaaccccagccccaccacccgacctgtgagccgccggtgcgcaatcaacgcccggaacgctttgacagccctgttcacctccagcggccgcccaccctcccagcccaacacccaggacaaaacacccagcaaggtgacggctcgaccctcccagcccccactacctcggcgctcaacccgcctcaaaacctgatagagggacctccctgtccctggcctgcctgggtccagatctgctaatgctttttaggagtctgcctggaaactttgacatggttcatgtttttactcaaaatccaataaaacaaggtagtttggctgtgc

SEQ ID NO: 290730 - DNA, 2508 bp, Artificial Sequence
  derived and/or modified sequence
ccgttgcccatggctgtcagccgggggctccccccgcagcagccacagcagccgcttctgaatctccagggcaccaactcagcctccctcctcaacggctccatgctgcagagagctttgcttttacagcagttgcaaggtaacctccgaggctatggcatggcatccccaggcctcgcagcccccagcctcacacccccacaactggccactccaaatttgcaacagttctttccccaggccactcgccagtccttgctgggacctcctcctgttggggtccccatgaacccttcccagttcaacctttcaggacggaacccccagaaacaggcccggacctcctcctctaccacccccaatcgaaagacaatgcctgtggaagacaagtcagaccccccagaggggtctgaggaagccgcagagccccggatggacacaccagaagaccaagatttaccgccctgcccagaggacatcgccaaggaaaaacgcactccagcacctgagcctgagccttgtgaggcgtccgagctgccagcaaagagattgaggagctcagaagagcccacagagaaggaacctccagggcagttacaggtgaaggcccagccgcaggcccggatgacagtaccgaaacagacacagacaccagacctgctgcctgaggccctggaagcccaagtgctgccacgattccagccacgggtcctgcaggtccaggcccaggtgcagtcacagactcagccgcggataccatccacagacacccaggtgcagccaaagctgcagaagcaggcgcaaacacagacctctccagagcacttagtgctgcaacagaagcaggtgcagccacagctgcagcaggaggcagagccacagaagcaggtgcagccacaggtacagccacaggcacattcacagggcccaaggcaggtgcagctgcagcaggaggcagagccgctgaagcaggtgcagccacaggtgcagccccaggcacattcacagcccccaaggcaggtgcagctgcagctgcagaagcaggtccagacacagacatatccacaggtccacacacaggcacagccaagcgtccagccacaggagcatcctccagcgcaggtgtcagtacagccaccagagcagacccatgagcagcctcacacccagccgcaggtgtcgttgctggctccagagcaaacaccagttgtggttcatgtctgcgggctggagatgccacctgatgcagtagaagctggtggaggcatggaaaagaccttgccagagcctgtgggcacccaagtcagcatggaagagattcagaatgagtcggcctgtggcctagatgtgggagaatgtgaaaacagagcgagagagatgccaggggtatggggcgccgggggctccctgaaggtcaccattctgcagagcagtgacagccgggcctttagcactgtacccctgacacctgtcccccgccccagtgactccgtctcctccacccctgcggctaccagcactccctctaagcaggccctccagttcttctgctacatctgcaaggccagctgctccagccagcaggagttccaggaccacatgtcggagcctcagcaccagcagcggctaggggagatccagcacatgagccaagcctgcctcctgtccctgctgcccgtgccccgggacgtcctggagacagaggatgaggagcctccaccaaggcgctggtgcaacacctgccagctctactacatgggggacctgatccaacaccgcaggacacaggaccacaagattgccaaacaatccttgcgacccttctgcaccgtttgcaaccgctacttcaaaacccctcgcaagtttgtggagcacgtgaagtcccaggggcataaggacaaagccaaggagctgaagtcgcttgagaaagaaattgctggccaagatgaggaccacttcattacagtggacgctgtgggttgcttcgagggtgatgaagaagaggaagaggatgatgaggatgaagaagagatcgaggttgaggaggaactctgcaagcaggtgaggtccagagatatatccagagaggagtggaagggctcggagacctacagccccaatactgcatatggtgtggacttcctggtgcccgtgatgggctatatctgccgcatctgccacaagttctatcacagcaactcaggggcacagctctcccactgcaagtccctgggccactttgagaacctgcagaaatacaaggcggccaagaaccccagccccaccacccgacctgtgagccgccggtgcgcaatcaacgcccggaacgctttgacagccctgttcacctccagcggccgcccaccctcccagcccaacacccaggacaaaacacccagcaaggtgacggctcgaccctcccagcccccactacctcggcgctcaacccgcctcaaaacctgatagagggacctccctgtccctggcctgcctgggtccagatctgct

SEQ ID NO: 290731 - DNA, 2610 bp, Artificial Sequence
  derived and/or modified sequence
atgttcagccagcagcagcagcagcagctgcagcagcagcagcagcagctgcagcagctgcagcagcagcagctgcagcagcagcagctgcagcagcagcagctgctgcagctgcagcagctgctgcagcagagccccccccaggcccccctgcccatggccgtgagcagaggcctgcccccccagcagccccagcagcccctgctgaacctgcagggcaccaacagcgccagcctgctgaacggcagcatgctgcagagagccctgctgctgcagcagctgcagggcaacctgagaggctacggcatggccagccccggcctggccgcccccagcctgacccccccccagctggccacccccaacctgcagcagttcttcccccaggccaccagacagagcctgctgggccccccccccgtgggcgtgcccatgaaccccagccagttcaacctgagcggcagaaacccccagaagcaggccagaaccagcagcagcaccacccccaacagaaagaccatgcccgtggaggacaagagcgacccccccgagggcagcgaggaggccgccgagcccagaatggacacccccgaggaccaggacctgcccccctgccccgaggacatcgccaaggagaagagaacccccgcccccgagcccgagccctgcgaggccagcgagctgcccgccaagagactgagaagcagcgaggagcccaccgagaaggagccccccggccagctgcaggtgaaggcccagccccaggccagaatgaccgtgcccaagcagacccagacccccgacctgctgcccgaggccctggaggcccaggtgctgcccagattccagcccagagtgctgcaggtgcaggcccaggtgcagagccagacccagcccagaatccccagcaccgacacccaggtgcagcccaagctgcagaagcaggcccagacccagaccagccccgagcacctggtgctgcagcagaagcaggtgcagccccagctgcagcaggaggccgagccccagaagcaggtgcagccccaggtgcagccccaggcccacagccagggccccagacaggtgcagctgcagcaggaggccgagcccctgaagcaggtgcagccccaggtgcagccccaggcccacagccagccccccagacaggtgcagctgcagctgcagaagcaggtgcagacccagacctacccccaggtgcacacccaggcccagcccagcgtgcagccccaggagcacccccccgcccaggtgagcgtgcagccccccgagcagacccacgagcagccccacacccagccccaggtgagcctgctggcccccgagcagacccccgtggtggtgcacgtgtgcggcctggagatgccccccgacgccgtggaggccggcggcggcatggagaagaccctgcccgagcccgtgggcacccaggtgagcatggaggagatccagaacgagagcgcctgcggcctggacgtgggcgagtgcgagaacagagccagagagatgcccggcgtgtggggcgccggcggcagcctgaaggtgaccatcctgcagagcagcgacagcagagccttcagcaccgtgcccctgacccccgtgcccagacccagcgacagcgtgagcagcacccccgccgccaccagcacccccagcaagcaggccctgcagttcttctgctacatctgcaaggccagctgcagcagccagcaggagttccaggaccacatgagcgagccccagcaccagcagagactgggcgagatccagcacatgagccaggcctgcctgctgagcctgctgcccgtgcccagagacgtgctggagaccgaggacgaggagcccccccccagaagatggtgcaacacctgccagctgtactacatgggcgacctgatccagcacagaagaacccaggaccacaagatcgccaagcagagcctgagacccttctgcaccgtgtgcaacagatacttcaagacccccagaaagttcgtggagcacgtgaagagccagggccacaaggacaaggccaaggagctgaagagcctggagaaggagatcgccggccaggacgaggaccacttcatcaccgtggacgccgtgggctgcttcgagggcgacgaggaggaggaggaggacgacgaggacgaggaggagatcgaggtggaggaggagctgtgcaagcaggtgagaagcagagacatcagcagagaggagtggaagggcagcgagacctacagccccaacaccgcctacggcgtggacttcctggtgcccgtgatgggctacatctgcagaatctgccacaagttctaccacagcaacagcggcgcccagctgagccactgcaagagcctgggccacttcgagaacctgcagaagtacaaggccgccaagaaccccagccccaccaccagacccgtgagcagaagatgcgccatcaacgccagaaacgccctgaccgccctgttcaccagcagcggcagaccccccagccagcccaacacccaggacaagacccccagcaaggtgaccgccagacccagccagccccccctgcccagaagaagcaccagactgaagacctag

SEQ ID NO: 290732 - DNA, 2463 bp, Artificial Sequence
  derived and/or modified sequence
cccctgcccatggccgtgagcagaggcctgcccccccagcagccccagcagcccctgctgaacctgcagggcaccaacagcgccagcctgctgaacggcagcatgctgcagagagccctgctgctgcagcagctgcagggcaacctgagaggctacggcatggccagccccggcctggccgcccccagcctgacccccccccagctggccacccccaacctgcagcagttcttcccccaggccaccagacagagcctgctgggccccccccccgtgggcgtgcccatgaaccccagccagttcaacctgagcggcagaaacccccagaagcaggccagaaccagcagcagcaccacccccaacagaaagaccatgcccgtggaggacaagagcgacccccccgagggcagcgaggaggccgccgagcccagaatggacacccccgaggaccaggacctgcccccctgccccgaggacatcgccaaggagaagagaacccccgcccccgagcccgagccctgcgaggccagcgagctgcccgccaagagactgagaagcagcgaggagcccaccgagaaggagccccccggccagctgcaggtgaaggcccagccccaggccagaatgaccgtgcccaagcagacccagacccccgacctgctgcccgaggccctggaggcccaggtgctgcccagattccagcccagagtgctgcaggtgcaggcccaggtgcagagccagacccagcccagaatccccagcaccgacacccaggtgcagcccaagctgcagaagcaggcccagacccagaccagccccgagcacctggtgctgcagcagaagcaggtgcagccccagctgcagcaggaggccgagccccagaagcaggtgcagccccaggtgcagccccaggcccacagccagggccccagacaggtgcagctgcagcaggaggccgagcccctgaagcaggtgcagccccaggtgcagccccaggcccacagccagccccccagacaggtgcagctgcagctgcagaagcaggtgcagacccagacctacccccaggtgcacacccaggcccagcccagcgtgcagccccaggagcacccccccgcccaggtgagcgtgcagccccccgagcagacccacgagcagccccacacccagccccaggtgagcctgctggcccccgagcagacccccgtggtggtgcacgtgtgcggcctggagatgccccccgacgccgtggaggccggcggcggcatggagaagaccctgcccgagcccgtgggcacccaggtgagcatggaggagatccagaacgagagcgcctgcggcctggacgtgggcgagtgcgagaacagagccagagagatgcccggcgtgtggggcgccggcggcagcctgaaggtgaccatcctgcagagcagcgacagcagagccttcagcaccgtgcccctgacccccgtgcccagacccagcgacagcgtgagcagcacccccgccgccaccagcacccccagcaagcaggccctgcagttcttctgctacatctgcaaggccagctgcagcagccagcaggagttccaggaccacatgagcgagccccagcaccagcagagactgggcgagatccagcacatgagccaggcctgcctgctgagcctgctgcccgtgcccagagacgtgctggagaccgaggacgaggagcccccccccagaagatggtgcaacacctgccagctgtactacatgggcgacctgatccagcacagaagaacccaggaccacaagatcgccaagcagagcctgagacccttctgcaccgtgtgcaacagatacttcaagacccccagaaagttcgtggagcacgtgaagagccagggccacaaggacaaggccaaggagctgaagagcctggagaaggagatcgccggccaggacgaggaccacttcatcaccgtggacgccgtgggctgcttcgagggcgacgaggaggaggaggaggacgacgaggacgaggaggagatcgaggtggaggaggagctgtgcaagcaggtgagaagcagagacatcagcagagaggagtggaagggcagcgagacctacagccccaacaccgcctacggcgtggacttcctggtgcccgtgatgggctacatctgcagaatctgccacaagttctaccacagcaacagcggcgcccagctgagccactgcaagagcctgggccacttcgagaacctgcagaagtacaaggccgccaagaaccccagccccaccaccagacccgtgagcagaagatgcgccatcaacgccagaaacgccctgaccgccctgttcaccagcagcggcagaccccccagccagcccaacacccaggacaagacccccagcaaggtgaccgccagacccagccagccccccctgcccagaagaagcaccagactgaagacctag

SEQ ID NO: 290733 - DNA, 1528 bp, Artificial Sequence
  derived and/or modified sequence
aggttagaccttggggcgaggcctcgggaggcgggcctggcgggttgcgaccgcccaagcagggccccagggagatggtacctgcggatgctgcaatgttaccggtgcaggcagtggttccacgaggcctgcacccagtgcctcaatgagcccatgatgtttggagaccggttttacctgttcttctgctccgtgtgtaaccagggcccagagtacatcgagaggctgcccctgcgatgggtggatgtggttcacctggccctctataatctgggggtacagagcaagaagaagtactttgactttgaggagattctggcctttgtcaaccaccactgggagctcctgcagcttggcaagctcaccagcaccccagtgacagatcgaggaccacatctcctcaacgctctgaacagttataaaagccggttcctctgcggcaaggagatcaagaagaagaagtgcatcttccgcctgcgcatccgcgtcccacccaacccgccagggaagctgctgcctgacaaaggactgctgccaaatgagaacagcgcctcctctgagctgcgtaagagaggaaagagcaagcctggtttgttgcctcacgaattccagcagcagaaaaggcgagtttatagaagaaaaagatcaaagtttttgctggaagatgctattcccagtagtgacttcacctcagcctggagcaccaaccaccacctggctagcatatttgacttcacgctggatgaaattcaaagtttaaaaagtgccagctcaggccagaccttcttctcagatgtcgactccaccgacgctgccagcacctctggctctgcctccaccagcctctcctatgactccagatggacagtgggcagccgaaagaggaagctggcagccaaggcatacatgcccctgcgggcaaagcggtgggcagctgagctggatggacgctgcccctcggacagcagtgcagagggggcttcagtccccgagcggccagacgaaggcattgacagccacacatttgagagcatcagtgaagatgactcatccctgtcccacctcaagtcatctatcaccaactactttggtgcagctgggcggttggcctgtggggagaagtaccaggtgttggctcggagggtcacacctgagggcaaggttcagtacctggtggagtgggaagggaccaccccttactgactagcccccgggggtgccaggggtcctgaaaaccaaaggaggagcagcagaagccataggctccccagctttctccaggctggggtgggagaaggaagcaggacagagctgcaagtgcctggcagaatgccctgcctgcctgcctgccaggccaaggcctgcgtctctctgctgtaccagctctgttccagggcctcctcaggctcgttacccctgtgcctgtgtctctacacactccacaccccctcaaactctgtttatctgttctctgaccttgtgtcccctgcgctgggacccttcctcctgaggcccaggtctttgtccc

SEQ ID NO: 290734 - protein, 428 aa, Artificial Sequence
  derived and/or modified sequence
MLRTLLRRRLFSYPTKYYFMVLVLSLITFSVLRIHQKPEFVSVRHLELAGENPSSDINCTKVLQGDVNEIQKVKLEILTVKFKKRPRWTPDDYINMTSDCSSFIKRRKYIVEPLSKEEAEFPIAYSIVVHHKIEMLDRLLRAIYMPQNFYCIHVDTKSEDSYLAAVMGIASCFSNVFVASRLESVVYASWSRVQADLNCMKDLYAMSANWKYLINLCGMDFPIKTNLEIVRKLKLLMGENNLETERMPSHKEERWKKRYEVVNGKLTNTGTVKMLPPLETPLFSGSAYFVVSREYVGYVLQNEKIQKLMEWAQDTYSPDEYLWATIQRIPEVPGSLPASHKYDLSDMQAVARFVKWQYFEGDVSKGAPYPPCDGVHVRSVCIFGAGDLNWMLRKHHLFANKFDVDVDLFAIQCLDEHLRHKALETLKH

SEQ ID NO: 290735 - DNA, 1287 bp, Artificial Sequence
  derived and/or modified sequence
atgctgaggaccctcctgagacggcgcttattttcttatcccaccaaatactactttatggtacttgtgctctccttgataacattctctgtgctgaggattcaccagaagccagagttcgtctccgtgcgccatctcgagctggctggcgagaatccttcttccgacatcaactgtactaaggtcctgcagggggacgtaaacgaaatccaaaaagtgaaactagaaattctgaccgtaaagttcaaaaagcgtcctcgctggacaccagatgattatatcaacatgacatccgactgctcgagttttataaagaggagaaagtacattgtcgagccactctccaaggaagaggctgaatttccaatcgcctattctattgtggtgcaccataagatcgagatgctggatcgtctcctcagagcaatttatatgcctcaaaatttctactgtattcacgtggatactaaatcagaggattcctatctcgcagctgttatgggaatagcaagctgtttttctaatgtgttcgtggcttctcgccttgagtctgtggtctatgcgtcttggtctcgggtccaggcagatcttaactgtatgaaagacctgtatgcaatgtctgcgaattggaagtatctgattaatctatgtggtatggacttccctattaagactaatctcgaaattgtccgaaagctgaagctgctaatgggcgaaaacaacttggaaaccgagcgtatgccttcacacaaggaagagagatggaagaaaaggtatgaggttgtcaacggcaaactcactaacaccggcaccgttaagatgctgcccccgctggaaacgcctctgtttagcggctccgcatatttcgttgtaagcagggagtatgttggctatgttttgcagaatgagaagatccagaaactgatggaatgggcacaggacacatactccccagatgaatacctgtgggcaacaattcagaggatcccagaagtacccggttcacttccagcatcccacaagtacgaccttagcgacatgcaagcagtagctaggttcgttaaatggcagtactttgagggggatgtgtccaaaggtgctccttaccccccctgtgatggcgtccatgtgcggagcgtatgtatcttcggcgccggggatctgaattggatgctaagaaagcatcacttatttgctaataaatttgacgtggatgtagacctgtttgctatacaatgcctggacgaacacctcaggcacaaagccctggagacactaaaacactag

SEQ ID NO: 290736 - DNA, 1287 bp, Artificial Sequence
  derived and/or modified sequence
atgttgaggacactgctgagacgccgcctcttcagttatcctacaaagtattacttcatggtgctggtgctgtctcttatcacattttccgtcctcaggatccatcagaagcccgagttcgtttctgtgagacatctggagctcgctggcgagaaccctagctctgacattaattgtaccaaagttctgcagggagatgtaaacgagattcagaaggtcaagctggaaattctcaccgtgaagttcaaaaaaaggcccagatggacaccagacgactatatcaacatgacttcggactgtagctcatttatcaaaagaaggaaatacatcgtggagccgctaagcaaggaagaggcagagttcccaatcgcctactccattgtagtgcaccataagatcgagatgttggaccgcctgttaagggccatctacatgccacagaacttctactgtattcatgtggacaccaaatccgaggactcttacttagctgcagttatgggtatcgcctcttgttttagcaacgtgtttgtagcgtcccggctcgagagcgttgtctatgcatcttggagccgcgtccaggcagatcttaactgtatgaaagatctctatgcgatgagcgctaattggaagtatttaattaacctttgtggtatggattttccaatcaaaacaaatctggaaattgtgagaaagctcaaactgctgatgggcgagaacaacttggaaacagaacgaatgccatctcacaaggaagaacgttggaagaagcgctacgaagtagttaacggaaaacttaccaatacgggcacagtgaaaatgctgcctcctctggagacgccactgtttagcggatctgcgtacttcgtggtttcacgcgagtacgtgggttacgtccttcaaaatgagaagatacagaaactgatggaatgggctcaggatacgtatagtccggatgaatacctgtgggcaaccatccagcggattccagaagtgcccggcagtctccccgcctcacacaagtacgacctgagtgacatgcaagctgtggcaaggtttgttaagtggcagtatttcgaaggggatgtgtcaaagggggcgccatatccaccctgcgacggagtgcatgtacggtctgtctgcatattcggtgccggtgatcttaactggatgctgcgcaaacatcacctcttcgccaataagttcgacgtggatgtggacctgtttgcaattcagtgcctggatgagcacttgcgacacaaagcccttgaaaccctgaagcattag

SEQ ID NO: 290737 - DNA, 1287 bp, Artificial Sequence
  derived and/or modified sequence
atgttgcgcacgctcctgcgacgccgcctgttctcctacccaaccaagtactacttcatggtgcttgtgctcagtttgattacctttagcgttctgcgcatacaccagaagcctgagttcgtctccgttcgccatctcgagctcgccggagaaaatccgtcttctgacatcaactgtactaaagtcttacagggggacgtcaatgaaattcagaaagtaaagcttgagatcctcacagtgaaattcaagaagcggcctaggtggacgcccgacgactatatcaatatgacctcggactgttcttcatttattaaacgccgcaagtatatagttgaaccgctcagcaaagaggaagccgagtttccaattgcgtactccatagtagtccatcataaaatcgaaatgctggatcgtctgttgcgggctatttatatgccgcagaacttttattgtatccacgtcgacacaaaatctgaagattcctatctcgctgctgttatgggaatagcttcttgtttctcaaatgtgttcgttgcctccaggctcgaaagtgttgtgtatgcatcatggtcacgcgtgcaggccgacctgaactgtatgaaggacttatatgctatgtccgctaattggaaataccttataaatctctgcggcatggacttccctattaagactaatctggaaatcgtgcgcaagctcaagctgctcatgggggagaataatctggagacagagcgcatgccttctcacaaagaagagaggtggaagaaaagatatgaggtggttaatggtaaacttacaaataccggtactgtcaagatgctgcctcccctggagacacctcttttctccggctctgcctatttcgtggtgtcacgggaatacgttggctatgtactgcagaacgagaagattcagaaactgatggagtgggcccaagacacttactcacccgacgagtatctgtgggctacaatacagcggatcccggaagtccctgggtccctgccggcatcacacaaatatgatttatccgatatgcaagctgtcgctcggttcgtgaagtggcagtatttcgaaggtgatgtttctaaaggagccccatatcctccgtgtgacggggtgcatgttaggagtgtgtgtatatttggcgccggagacctgaactggatgttacgcaaacatcatctttttgcaaataagttcgacgtcgacgtggatctgttcgccattcaatgcttggatgagcacctcaggcacaaagcactcgagaccctgaagcattag

SEQ ID NO: 290738 - DNA, 1287 bp, Artificial Sequence
  derived and/or modified sequence
atgttgaggacccttttgcgccggaggctatttagctaccctacaaagtattactttatggtcctagttctaagccttatcaccttcagtgtacttagaatccatcagaagcccgaattcgttagtgtcaggcatctagaactggctggggagaatccctcatccgatattaattgcactaaggtgttgcagggagatgtaaacgagattcaaaaggtgaagttggagatcctgaccgtgaagtttaaaaaaagacccaggtggacacctgacgactatatcaatatgacttcagactgcagctcttttatcaagcggcgcaaatatatcgtggaacccctgtccaaggaggaagcagagttccccattgcttatagcattgtggttcaccataaaatcgagatgcttgacagattgctgcgcgccatctacatgccccagaatttttactgtattcatgttgatacaaaaagcgaggatagctacttggcagctgtgatggggatcgccagctgtttcagcaacgtgtttgtggcaagtcgtttagagtctgtcgtttatgcttcttggtcgagggtgcaggcggacctgaattgcatgaaggacttgtacgctatgagtgctaactggaagtatttaataaacttgtgcgggatggatttccccataaagacaaacctggagatagttcggaagctaaaacttctgatgggagagaacaacttggagactgagcggatgccttcccataaagaggagcgatggaagaaaaggtacgaggtggtgaacggcaagctcaccaacacaggcaccgtaaagatgcttcccccactagagacacccctgttctccggtagtgcatattttgtggtctctcgggaatatgtcgggtacgtgctccagaatgaaaaaatacagaaactaatggagtgggcacaggacacttattcccccgacgagtacctttgggccacgatacagcggatccctgaggtacctggctcgttgcccgcctcccataagtacgatttgtctgacatgcaggcagttgcacgattcgtaaaatggcaatatttcgagggagatgtgtccaagggcgccccttacccaccttgtgatggagtgcatgtgcgctcggtgtgcatctttggtgccggcgacctgaactggatgcttaggaagcaccatttattcgcaaataagtttgatgtggacgtggacctgtttgccatacagtgcctggacgaacatctgcgccataaggccctcgaaactctcaaacattag

SEQ ID NO: 290739 - DNA, 5518 bp, Artificial Sequence
  derived and/or modified sequence
gcgcggggcgggagcttggtggagcaggagcggctgggcatcctcctgagactccggggtcagacgcccactccagcgctttctgcgcagcacaggcaccctcgcctgtcacgcctccctctcctcttcccgtctcccagcgtggatgagggcgcctgcagatcccggctagggcacggaccgcctaggccgagatttctttaaagactcgtgcagcacatcattatcgctggatgcccggacatgtaatacacctgacagcatgtgaagtgctcagaatggggcaggatgtcacctggaatcagcactaagtgattcagactttccttacttttaaatgtgctgctcttcatttcaagatgccgttgcagctctgataaatgcaaactgacaaccttcaaggccacgacggagggaaaatcattggtgcttggagcatagaagactgcccttcacaaaggaaatccctgattattgtttgaaatgctgaggacgttgctgcgaaggagacttttttcttatcccaccaaatactactttatggttcttgttttatccctaatcaccttctccgttttaaggattcatcaaaagcctgaatttgtaagtgtcagacacttggagcttgctggggagaatcctagtagtgatattaattgcaccaaagttttacagggtgatgtaaatgaaatccaaaaggtaaagcttgagatcctaacagtgaaatttaaaaagcgccctcggtggacacctgacgactatataaacatgaccagtgactgttcttctttcatcaagagacgcaaatatattgtagaaccccttagtaaagaagaggcggagtttccaatagcatattctatagtggttcatcacaagattgaaatgcttgacaggctgctgagggccatctatatgcctcagaatttctattgcattcatgtggacacaaaatccgaggattcctatttagctgcagtgatgggcatcgcttcctgttttagtaatgtctttgtggccagccgattggagagtgtggtttatgcatcgtggagccgggttcaggctgacctcaactgcatgaaggatctctatgcaatgagtgcaaactggaagtacttgataaatctttgtggtatggattttcccattaaaaccaacctagaaattgtcaggaagctcaagttgttaatgggagaaaacaacctggaaacggagaggatgccatcccataaagaagaaaggtggaagaagcggtatgaggtcgttaatggaaagctgacaaacacagggactgtcaaaatgcttcctccactcgaaacacctctcttttctggcagtgcctacttcgtggtcagtagggagtatgtggggtatgtactacagaatgaaaaaatccaaaagttgatggagtgggcacaagacacatacagccctgatgagtatctctgggccaccatccaaaggattcctgaagtcccgggctcactccctgccagccataagtatgatctgtctgacatgcaagcagttgccaggtttgtcaagtggcagtactttgagggtgatgtttccaagggtgctccctacccgccctgcgatggagtccatgtgcgctcagtgtgcattttcggagctggtgacttgaactggatgctgcgcaaacaccacttgtttgccaataagtttgacgtggatgttgacctctttgccatccagtgtttggatgagcatttgagacacaaagctttggagacattaaaacactgaccattacgggcaattttatgaacaagaagaaggatacacaaaacgtacccttatctgtttccccttccttgtcagcatcgggaagatggtatgaagtcctctttggggcagggactctagtagatcttcttgtcagagaagctgcatggtttctgcagagcacagttagctagaaaggtgatagcattaaatgttcatctagagttaatagtgggaggagtaaaggtagccttgaggccagagcaggtagcaaggcattgtggaaagaggggaccagggtggctggggaagaggccgatgcataaagtcagcctgttcaaagtgctcagggacttagcaaaatgagaagatgtgacctgtgccaaaactattttgagaattttaaatgtgaccatttttctggtatgaataaacttacagcaacaaataatcaaagatacaattaatctgatattatatttgttgaaatagaaatttgattgtactataaatgatttttgtaaataatttatattctgctctaatactgtactgtgtagtgtgtctccgtatgtcatctcagggagcttaaaatgggcttgatttaacattgtttttgtgttatttttgcttgaaacaacgcacacattttcaacaaccaaaaaatgacaatttctagtttagttaatttctacaaatcatcttatgttattagcaaggttaagacatcttttttaaaaaaattatagcttctaccaagagaaacactcaatttttctagagatttgcctctatcttcctttcctcagtcttcccagactgctatcaagctgtgtaaaaatttactttcactggaccctaaattattgtctctgctatctgactgccagtaattagtgcagaaaactaagacaggatgatacaggtttgaggggctggggagtgggaggggggagaaaaggaatgtatttaaacaatttccgatgcccatgatgagtttaaaaaccagcattgacaccatccccaaaattaaggctgtcgcttattgaatccacttgtgtccaacctcccaggattgttttatcctaatgtcacctgtatattcatttgaaaggacttggccctgttcttgggtcttcccgttacctgccccctgggtggtaagtttcctcctttctcaaccttccacgaggaggaaagaagtgtgcagtcattccacatggcctgttggaaggcctggggagggaactttgggtttgggacagatttttttttttgtttttggtatcattcacagcatacgatttttactctctccatcttcaccataagacagataatttggggttgctataatgctgtcacacatctcaaagtacattcaaatcttaaaaagaaattctcgtacttttgccatgttgatactgttcagcaaacaagctaccaggaactgtgaggctttgtcatttagcattagactttaaacaagaattaaaatcatgtgctgtatttttaaaatctagccaaattaaatagtacatgagaaattcagagtattagacagttttaaggcattcaactgagaaaactttatttgtcaaagtcagaaaacattttcatcttattgagagatatgtttttaaacttttatcatcatttgtaaatgtggaagttggtggattgctgtgtttttgcatgattagcatgggagtctgttggagcaagaggaacatgcttgttttgaaaactcgagatgatgagggtggtacatgcagtgtgttctctctttattggcttctaaaccagttttgtcctttaatgcatgtcaaatatttctcccatgcttctcttagcagaaaagtttttacctataagacagggcaccttttaactctaaaactagtgatactcagtgacatagactttgtcttataaacattttttcattttttattttgaaaaattgcaaatctacagcaaaagtaaaacagtagagtgaacaccatgtaaccctcacctggtgttaacattgtaccctatttgctttaagttgtatgtatttctgaacttggcaaaattggaaattaaaatttttaaaaattacaaatatacaaagttatttatcttagcacatttattatgtgtgactgcatctgatttatatttaaattggcaggttttgagggatttttttcttcatcataaatgtaaacataggattttagagtctatttccccaagcgccacattataactgtaaacttaccatcttctatgtagctgtgatatctcatctttctaaaatggaacttgttaaaaagtgttcaaacactatccctaatgcctgcggcagaatttatatacgatccattcattggggctcaaagtatcttttagacttttaaggacaatttacagcaaatgaaatttatgatgctgtgacaagaaatttaaagaatcaaaacgatggtttgaaaaggaaacctatgatacatgcaggagaagcaaaacccaagtgattggtgagaaatatagaaattatttaaattactttatagtaattattaaacactaatttttgtactgtcattgaaggtgttttatagagaaatctgagaaatcacattcacaaattagaagtcaaacatggccaggcacagtggctcacacctgtaatcttcaggatttcaagaccagcctagccaacatgacgaaaccccatctctactgaaaatagaaaaaaaaaattagccaggcttgcacctgtaatcccagttacctgggaggctgaggcaggagaatctcttgagcccaggaggcggaggttgcagtgagctgagatgccaccaccacaccagcctgggtgacagagtgaaactcgtatctccaaacaaacaaacaaaaagtccttaaacatatgtgaacaaaaattttgtgatggaaggattctagttaatgagtattgcatcaagatttacatctttcttactaaggaaaagagttaataaaaattgttctttattttacaggcagttactgaggctcttcccagatctcagtaaacagccactcagccttgaaaatggagtgttgttgtttctaaacatatatttatgtcatttattaagtacagttcacttaaataacataagtagattttctcttgtagtgatttgggtaggaagaggccatgtttcagttcgttttctctgtagggtcgattgaattggaccttttcagttgttcagaaaaataaaaataatttctcatattaaatacagacgctcctcaacttatgatgtgggtaggtcccagtaaacccattataatttgaaaatatcacattgaaaatgcatttaatatctcttacctgaaatcataacttagccaagcctaccttaaatgttctcagaacatttagcctgcagttgggcaaaaccatttaacacaaagcctattttataatgaagtgttgaatagctcatgttatttactgaatactgttgtgaaagtgaaaaacaatgattgtatgggtactcaaagtataatttctactgaatgcatatcacttgtgcactgttgtaaagctgaaaaaccgttaagcctctacgatttttaagtaagttggggaccatcagtttaaaataaatgcaatactatttcatgataaacatggtcactgtaagttttactcttttgaatgagggtgcgacagaatgcagttagaatcagttcatatcaccattaaaatcatccattcagaaaccaa

SEQ ID NO: 290740 - DNA, 5972 bp, Artificial Sequence
  derived and/or modified sequence
acagaccataggtgaactgttaaggagggagaagccgcagtgtcaccttccacagtcctgctcccattaagacctatgaagtggaaaatgcagattattctttgaggtttcctgggaccagaaaaggtcagagactcttaatgggtaatgcagacaactggaatgcaatcatcaggtattcatttctgttttaaggttttatgtctgagaaacctgaaacctgaagaagtaaagcaatcatgattttttaaaaacttaataatatggttttggatttaaaaagaaagactgactcagagctggggaaaacactcacttgtgatacggatcaatgtgaaaacagcttaactctgttccatggcaattcgcacagtgtgactcagagacacctctcttcaccagctctggctcaggggatgtgaagccagaagcagaggtcacagtgacttcatctgagaaggacttaactgaccattgctggttttgaagccggaggaaggcccacagtcaatgaatgagagaggcttcgagaagctagaaatggcaaggaaatagattttcctctaaagctcccagaaagaaacacggttctgctgacacctcgattttaggccagtgagacctgcttcagacttctgacctacagaacgatttctttaaagactcgtgcagcacatcattatcgctggatgcccggacatgtaatacacctgacagcatgtgaagtgctcagaatggggcaggatgtcacctggaatcagcactaagtgattcagactttccttacttttaaatgtgctgctcttcatttcaagatgccgttgcagctctgataaatgcaaactgacaaccttcaaggccacgacggagggaaaatcattggtgcttggagcatagaagactgcccttcacaaaggaaatccctgattattgtttgaaatgctgaggacgttgctgcgaaggagacttttttcttatcccaccaaatactactttatggttcttgttttatccctaatcaccttctccgttttaaggattcatcaaaagcctgaatttgtaagtgtcagacacttggagcttgctggggagaatcctagtagtgatattaattgcaccaaagttttacagggtgatgtaaatgaaatccaaaaggtaaagcttgagatcctaacagtgaaatttaaaaagcgccctcggtggacacctgacgactatataaacatgaccagtgactgttcttctttcatcaagagacgcaaatatattgtagaaccccttagtaaagaagaggcggagtttccaatagcatattctatagtggttcatcacaagattgaaatgcttgacaggctgctgagggccatctatatgcctcagaatttctattgcattcatgtggacacaaaatccgaggattcctatttagctgcagtgatgggcatcgcttcctgttttagtaatgtctttgtggccagccgattggagagtgtggtttatgcatcgtggagccgggttcaggctgacctcaactgcatgaaggatctctatgcaatgagtgcaaactggaagtacttgataaatctttgtggtatggattttcccattaaaaccaacctagaaattgtcaggaagctcaagttgttaatgggagaaaacaacctggaaacggagaggatgccatcccataaagaagaaaggtggaagaagcggtatgaggtcgttaatggaaagctgacaaacacagggactgtcaaaatgcttcctccactcgaaacacctctcttttctggcagtgcctacttcgtggtcagtagggagtatgtggggtatgtactacagaatgaaaaaatccaaaagttgatggagtgggcacaagacacatacagccctgatgagtatctctgggccaccatccaaaggattcctgaagtcccgggctcactccctgccagccataagtatgatctgtctgacatgcaagcagttgccaggtttgtcaagtggcagtactttgagggtgatgtttccaagggtgctccctacccgccctgcgatggagtccatgtgcgctcagtgtgcattttcggagctggtgacttgaactggatgctgcgcaaacaccacttgtttgccaataagtttgacgtggatgttgacctctttgccatccagtgtttggatgagcatttgagacacaaagctttggagacattaaaacactgaccattacgggcaattttatgaacaagaagaaggatacacaaaacgtacccttatctgtttccccttccttgtcagcatcgggaagatggtatgaagtcctctttggggcagggactctagtagatcttcttgtcagagaagctgcatggtttctgcagagcacagttagctagaaaggtgatagcattaaatgttcatctagagttaatagtgggaggagtaaaggtagccttgaggccagagcaggtagcaaggcattgtggaaagaggggaccagggtggctggggaagaggccgatgcataaagtcagcctgttcaaagtgctcagggacttagcaaaatgagaagatgtgacctgtgccaaaactattttgagaattttaaatgtgaccatttttctggtatgaataaacttacagcaacaaataatcaaagatacaattaatctgatattatatttgttgaaatagaaatttgattgtactataaatgatttttgtaaataatttatattctgctctaatactgtactgtgtagtgtgtctccgtatgtcatctcagggagcttaaaatgggcttgatttaacattgtttttgtgttatttttgcttgaaacaacgcacacattttcaacaaccaaaaaatgacaatttctagtttagttaatttctacaaatcatcttatgttattagcaaggttaagacatcttttttaaaaaaattatagcttctaccaagagaaacactcaatttttctagagatttgcctctatcttcctttcctcagtcttcccagactgctatcaagctgtgtaaaaatttactttcactggaccctaaattattgtctctgctatctgactgccagtaattagtgcagaaaactaagacaggatgatacaggtttgaggggctggggagtgggaggggggagaaaaggaatgtatttaaacaatttccgatgcccatgatgagtttaaaaaccagcattgacaccatccccaaaattaaggctgtcgcttattgaatccacttgtgtccaacctcccaggattgttttatcctaatgtcacctgtatattcatttgaaaggacttggccctgttcttgggtcttcccgttacctgccccctgggtggtaagtttcctcctttctcaaccttccacgaggaggaaagaagtgtgcagtcattccacatggcctgttggaaggcctggggagggaactttgggtttgggacagatttttttttttgtttttggtatcattcacagcatacgatttttactctctccatcttcaccataagacagataatttggggttgctataatgctgtcacacatctcaaagtacattcaaatcttaaaaagaaattctcgtacttttgccatgttgatactgttcagcaaacaagctaccaggaactgtgaggctttgtcatttagcattagactttaaacaagaattaaaatcatgtgctgtatttttaaaatctagccaaattaaatagtacatgagaaattcagagtattagacagttttaaggcattcaactgagaaaactttatttgtcaaagtcagaaaacattttcatcttattgagagatatgtttttaaacttttatcatcatttgtaaatgtggaagttggtggattgctgtgtttttgcatgattagcatgggagtctgttggagcaagaggaacatgcttgttttgaaaactcgagatgatgagggtggtacatgcagtgtgttctctctttattggcttctaaaccagttttgtcctttaatgcatgtcaaatatttctcccatgcttctcttagcagaaaagtttttacctataagacagggcaccttttaactctaaaactagtgatactcagtgacatagactttgtcttataaacattttttcattttttattttgaaaaattgcaaatctacagcaaaagtaaaacagtagagtgaacaccatgtaaccctcacctggtgttaacattgtaccctatttgctttaagttgtatgtatttctgaacttggcaaaattggaaattaaaatttttaaaaattacaaatatacaaagttatttatcttagcacatttattatgtgtgactgcatctgatttatatttaaattggcaggttttgagggatttttttcttcatcataaatgtaaacataggattttagagtctatttccccaagcgccacattataactgtaaacttaccatcttctatgtagctgtgatatctcatctttctaaaatggaacttgttaaaaagtgttcaaacactatccctaatgcctgcggcagaatttatatacgatccattcattggggctcaaagtatcttttagacttttaaggacaatttacagcaaatgaaatttatgatgctgtgacaagaaatttaaagaatcaaaacgatggtttgaaaaggaaacctatgatacatgcaggagaagcaaaacccaagtgattggtgagaaatatagaaattatttaaattactttatagtaattattaaacactaatttttgtactgtcattgaaggtgttttatagagaaatctgagaaatcacattcacaaattagaagtcaaacatggccaggcacagtggctcacacctgtaatcttcaggatttcaagaccagcctagccaacatgacgaaaccccatctctactgaaaatagaaaaaaaaaattagccaggcttgcacctgtaatcccagttacctgggaggctgaggcaggagaatctcttgagcccaggaggcggaggttgcagtgagctgagatgccaccaccacaccagcctgggtgacagagtgaaactcgtatctccaaacaaacaaacaaaaagtccttaaacatatgtgaacaaaaattttgtgatggaaggattctagttaatgagtattgcatcaagatttacatctttcttactaaggaaaagagttaataaaaattgttctttattttacaggcagttactgaggctcttcccagatctcagtaaacagccactcagccttgaaaatggagtgttgttgtttctaaacatatatttatgtcatttattaagtacagttcacttaaataacataagtagattttctcttgtagtgatttgggtaggaagaggccatgtttcagttcgttttctctgtagggtcgattgaattggaccttttcagttgttcagaaaaataaaaataatttctcatattaaatacagacgctcctcaacttatgatgtgggtaggtcccagtaaacccattataatttgaaaatatcacattgaaaatgcatttaatatctcttacctgaaatcataacttagccaagcctaccttaaatgttctcagaacatttagcctgcagttgggcaaaaccatttaacacaaagcctattttataatgaagtgttgaatagctcatgttatttactgaatactgttgtgaaagtgaaaaacaatgattgtatgggtactcaaagtataatttctactgaatgcatatcacttgtgcactgttgtaaagctgaaaaaccgttaagcctctacgatttttaagtaagttggggaccatcagtttaaaataaatgcaatactatttcatgataaacatggtcactgtaagttttactcttttgaatgagggtgcgacagaatgcagttagaatcagttcatatcaccattaaaatcatccattcagaaacc

SEQ ID NO: 290741 - DNA, 5476 bp, Artificial Sequence
  derived and/or modified sequence
gggcctctgggggcggccccggggcgggccacgctggtgtgagggctgcaggcgcagctccggagcgcctagagcgcggcgcggggcgggagcttggtggagcaggagcggctgggcatcctcctgagactccggggtcagacgcccactccagatttctttaaagactcgtgcagcacatcattatcgctggatgcccggacatgtaatacacctgacagcatgtgaagtgctcagaatggggcaggatgtcacctggaatcagcactaagtgattcagactttccttacttttaaatgtgctgctcttcatttcaagatgccgttgcagctctgataaatgcaaactgacaaccttcaaggccacgacggagggaaaatcattggtgcttggagcatagaagactgcccttcacaaaggaaatccctgattattgtttgaaatgctgaggacgttgctgcgaaggagacttttttcttatcccaccaaatactactttatggttcttgttttatccctaatcaccttctccgttttaaggattcatcaaaagcctgaatttgtaagtgtcagacacttggagcttgctggggagaatcctagtagtgatattaattgcaccaaagttttacagggtgatgtaaatgaaatccaaaaggtaaagcttgagatcctaacagtgaaatttaaaaagcgccctcggtggacacctgacgactatataaacatgaccagtgactgttcttctttcatcaagagacgcaaatatattgtagaaccccttagtaaagaagaggcggagtttccaatagcatattctatagtggttcatcacaagattgaaatgcttgacaggctgctgagggccatctatatgcctcagaatttctattgcattcatgtggacacaaaatccgaggattcctatttagctgcagtgatgggcatcgcttcctgttttagtaatgtctttgtggccagccgattggagagtgtggtttatgcatcgtggagccgggttcaggctgacctcaactgcatgaaggatctctatgcaatgagtgcaaactggaagtacttgataaatctttgtggtatggattttcccattaaaaccaacctagaaattgtcaggaagctcaagttgttaatgggagaaaacaacctggaaacggagaggatgccatcccataaagaagaaaggtggaagaagcggtatgaggtcgttaatggaaagctgacaaacacagggactgtcaaaatgcttcctccactcgaaacacctctcttttctggcagtgcctacttcgtggtcagtagggagtatgtggggtatgtactacagaatgaaaaaatccaaaagttgatggagtgggcacaagacacatacagccctgatgagtatctctgggccaccatccaaaggattcctgaagtcccgggctcactccctgccagccataagtatgatctgtctgacatgcaagcagttgccaggtttgtcaagtggcagtactttgagggtgatgtttccaagggtgctccctacccgccctgcgatggagtccatgtgcgctcagtgtgcattttcggagctggtgacttgaactggatgctgcgcaaacaccacttgtttgccaataagtttgacgtggatgttgacctctttgccatccagtgtttggatgagcatttgagacacaaagctttggagacattaaaacactgaccattacgggcaattttatgaacaagaagaaggatacacaaaacgtacccttatctgtttccccttccttgtcagcatcgggaagatggtatgaagtcctctttggggcagggactctagtagatcttcttgtcagagaagctgcatggtttctgcagagcacagttagctagaaaggtgatagcattaaatgttcatctagagttaatagtgggaggagtaaaggtagccttgaggccagagcaggtagcaaggcattgtggaaagaggggaccagggtggctggggaagaggccgatgcataaagtcagcctgttcaaagtgctcagggacttagcaaaatgagaagatgtgacctgtgccaaaactattttgagaattttaaatgtgaccatttttctggtatgaataaacttacagcaacaaataatcaaagatacaattaatctgatattatatttgttgaaatagaaatttgattgtactataaatgatttttgtaaataatttatattctgctctaatactgtactgtgtagtgtgtctccgtatgtcatctcagggagcttaaaatgggcttgatttaacattgtttttgtgttatttttgcttgaaacaacgcacacattttcaacaaccaaaaaatgacaatttctagtttagttaatttctacaaatcatcttatgttattagcaaggttaagacatcttttttaaaaaaattatagcttctaccaagagaaacactcaatttttctagagatttgcctctatcttcctttcctcagtcttcccagactgctatcaagctgtgtaaaaatttactttcactggaccctaaattattgtctctgctatctgactgccagtaattagtgcagaaaactaagacaggatgatacaggtttgaggggctggggagtgggaggggggagaaaaggaatgtatttaaacaatttccgatgcccatgatgagtttaaaaaccagcattgacaccatccccaaaattaaggctgtcgcttattgaatccacttgtgtccaacctcccaggattgttttatcctaatgtcacctgtatattcatttgaaaggacttggccctgttcttgggtcttcccgttacctgccccctgggtggtaagtttcctcctttctcaaccttccacgaggaggaaagaagtgtgcagtcattccacatggcctgttggaaggcctggggagggaactttgggtttgggacagatttttttttttgtttttggtatcattcacagcatacgatttttactctctccatcttcaccataagacagataatttggggttgctataatgctgtcacacatctcaaagtacattcaaatcttaaaaagaaattctcgtacttttgccatgttgatactgttcagcaaacaagctaccaggaactgtgaggctttgtcatttagcattagactttaaacaagaattaaaatcatgtgctgtatttttaaaatctagccaaattaaatagtacatgagaaattcagagtattagacagttttaaggcattcaactgagaaaactttatttgtcaaagtcagaaaacattttcatcttattgagagatatgtttttaaacttttatcatcatttgtaaatgtggaagttggtggattgctgtgtttttgcatgattagcatgggagtctgttggagcaagaggaacatgcttgttttgaaaactcgagatgatgagggtggtacatgcagtgtgttctctctttattggcttctaaaccagttttgtcctttaatgcatgtcaaatatttctcccatgcttctcttagcagaaaagtttttacctataagacagggcaccttttaactctaaaactagtgatactcagtgacatagactttgtcttataaacattttttcattttttattttgaaaaattgcaaatctacagcaaaagtaaaacagtagagtgaacaccatgtaaccctcacctggtgttaacattgtaccctatttgctttaagttgtatgtatttctgaacttggcaaaattggaaattaaaatttttaaaaattacaaatatacaaagttatttatcttagcacatttattatgtgtgactgcatctgatttatatttaaattggcaggttttgagggatttttttcttcatcataaatgtaaacataggattttagagtctatttccccaagcgccacattataactgtaaacttaccatcttctatgtagctgtgatatctcatctttctaaaatggaacttgttaaaaagtgttcaaacactatccctaatgcctgcggcagaatttatatacgatccattcattggggctcaaagtatcttttagacttttaaggacaatttacagcaaatgaaatttatgatgctgtgacaagaaatttaaagaatcaaaacgatggtttgaaaaggaaacctatgatacatgcaggagaagcaaaacccaagtgattggtgagaaatatagaaattatttaaattactttatagtaattattaaacactaatttttgtactgtcattgaaggtgttttatagagaaatctgagaaatcacattcacaaattagaagtcaaacatggccaggcacagtggctcacacctgtaatcttcaggatttcaagaccagcctagccaacatgacgaaaccccatctctactgaaaatagaaaaaaaaaattagccaggcttgcacctgtaatcccagttacctgggaggctgaggcaggagaatctcttgagcccaggaggcggaggttgcagtgagctgagatgccaccaccacaccagcctgggtgacagagtgaaactcgtatctccaaacaaacaaacaaaaagtccttaaacatatgtgaacaaaaattttgtgatggaaggattctagttaatgagtattgcatcaagatttacatctttcttactaaggaaaagagttaataaaaattgttctttattttacaggcagttactgaggctcttcccagatctcagtaaacagccactcagccttgaaaatggagtgttgttgtttctaaacatatatttatgtcatttattaagtacagttcacttaaataacataagtagattttctcttgtagtgatttgggtaggaagaggccatgtttcagttcgttttctctgtagggtcgattgaattggaccttttcagttgttcagaaaaataaaaataatttctcatattaaatacagacgctcctcaacttatgatgtgggtaggtcccagtaaacccattataatttgaaaatatcacattgaaaatgcatttaatatctcttacctgaaatcataacttagccaagcctaccttaaatgttctcagaacatttagcctgcagttgggcaaaaccatttaacacaaagcctattttataatgaagtgttgaatagctcatgttatttactgaatactgttgtgaaagtgaaaaacaatgattgtatgggtactcaaagtataatttctactgaatgcatatcacttgtgcactgttgtaaagctgaaaaaccgttaagcctctacgatttttaagtaagttggggaccatcagtttaaaataaatgcaatactatttcatgataaacatggtcactgtaagttttactcttttgaatgagggtgcgacagaatgcagttagaatcagttcatatcaccattaaaatcatccattcagaaacc

SEQ ID NO: 290742 - DNA, 1628 bp, Artificial Sequence
  derived and/or modified sequence
actctctaacaccagcacctctatcttgctgagctccagccaaagaaggaagatttctttaaagactcgtgcagcacatcattatcgctggatgcccggacatgtaatacacctgacagcatgtgaagtgctcagaatggggcaggatgtcacctggaatcagcactaagtgattcagactttccttacttttaaatgtgctgctcttcatttcaagatgccgttgcagctctgataaatgcaaactgacaaccttcaaggccacgacggagggaaaatcattggtgcttggagcatagaagactgcccttcacaaaggaaatccctgattattgtttgaaatgctgaggacgttgctgcgaaggagacttttttcttatcccaccaaatactactttatggttcttgttttatccctaatcaccttctccgttttaaggattcatcaaaagcctgaatttgtaagtgtcagacacttggagcttgctggggagaatcctagtagtgatattaattgcaccaaagttttacagggtgatgtaaatgaaatccaaaaggtaaagcttgagatcctaacagtgaaatttaaaaagcgccctcggtggacacctgacgactatataaacatgaccagtgactgttcttctttcatcaagagacgcaaatatattgtagaaccccttagtaaagaagaggcggagtttccaatagcatattctatagtggttcatcacaagattgaaatgcttgacaggctgctgagggccatctatatgcctcagaatttctattgcattcatgtggacacaaaatccgaggattcctatttagctgcagtgatgggcatcgcttcctgttttagtaatgtctttgtggccagccgattggagagtgtggtttatgcatcgtggagccgggttcaggctgacctcaactgcatgaaggatctctatgcaatgagtgcaaactggaagtacttgataaatctttgtggtatggattttcccattaaaaccaacctagaaattgtcaggaagctcaagttgttaatgggagaaaacaacctggaaacggagaggatgccatcccataaagaagaaaggtggaagaagcggtatgaggtcgttaatggaaagctgacaaacacagggactgtcaaaatgcttcctccactcgaaacacctctcttttctggcagtgcctacttcgtggtcagtagggagtatgtggggtatgtactacagaatgaaaaaatccaaaagttgatggagtgggcacaagacacatacagccctgatgagtatctctgggccaccatccaaaggattcctgaagtcccgggctcactccctgccagccataagtatgatctgtctgacatgcaagcagttgccaggtttgtcaagtggcagtactttgagggtgatgtttccaagggtgctccctacccgccctgcgatggagtccatgtgcgctcagtgtgcattttcggagctggtgacttgaactggatgctgcgcaaacaccacttgtttgccaataagtttgacgtggatgttgacctctttgccatccagtgtttggatgagcatttgagacacaaagctttggagacattaaaacactga

SEQ ID NO: 290743 - DNA, 1287 bp, Artificial Sequence
  derived and/or modified sequence
atgctgcggaccctgctgcggcggcggctcttctcctaccccaccaagtactacttcatggtgctggtgctgagcctcatcaccttctctgtgctgcgcatccaccagaagccagagtttgtgtctgtgcgccacctggagctggccggggagaaccccagcagtgacatcaactgcaccaaggtgctgcagggagatgtgaatgagatccagaaggtgaagctggagatcctgactgtgaagttcaagaagaggccccgctggaccccagatgactacatcaacatgaccagtgactgcagcagcttcatcaagaggaggaagtacatcgtggagcccctgagcaaggaggaggccgagttccccatcgcctacagcatcgtggtgcaccacaagattgagatgctggaccggctgctgcgggccatctacatgccccagaacttctactgcatccacgtggacaccaagtcagaagattcctacctggccgctgtgatgggcatcgccagctgcttcagcaatgtgtttgtggccagccggctggagagcgtggtgtatgcctcctggagccgggtgcaggccgacctgaactgcatgaaggacctgtatgccatgtctgccaactggaagtacctgatcaacctgtgtggcatggacttccccatcaagaccaacctggagatcgtgaggaagctgaagctgctgatgggagagaacaacctggagacagagaggatgcccagccacaaggaggagcgctggaagaagagatatgaggtggtgaatggcaagctgaccaacacaggaacagtgaagatgctgccccccctggagacccccctcttcagcggcagcgcctactttgtggtgtcccgggagtatgtgggctacgtgctgcagaatgagaagatccagaagctgatggagtgggcccaggacacctacagcccagatgagtacctgtgggccaccatccagagaattcctgaggtgcccggcagcctgcctgccagccacaagtatgacctgagtgacatgcaggccgtggccaggtttgtgaagtggcagtactttgaaggagatgtgtccaaaggagccccctacccaccctgtgatggagtgcacgtgcgctctgtgtgcatctttggagctggggacctgaactggatgctgaggaagcaccacctgtttgccaacaagtttgatgtggatgtggacctgtttgccatccagtgcctggatgagcacctgcggcacaaggccctggagaccctgaagcactag

SEQ ID NO: 290744 - DNA, 1287 bp, Artificial Sequence
  derived and/or modified sequence
atgctgcggaccctgctgcggcggcggctgttcagctaccccaccaagtactattttatggtcttggtacttagtctcatcaccttctctgttttgagaatacaccagaaaccggagttcgtttccgtaagacaccttgagctggctggcgaaaacccaagctcagacatcaattgcactaaagtccttcagggcgacgtgaatgagattcagaaggttaaattagagatccttactgtgaaatttaagaagcgtccacgctggacacccgatgactatatcaacatgactagcgactgtagctcctttatcaaacgacggaagtacattgtcgagccattatctaaagaggaagccgagtttccaatcgcttatagtatagttgttcaccataaaatcgaaatgcttgatcgcctactccgggccatttacatgccccaaaacttctactgtattcatgtcgacacaaaaagtgaagatagctacctggctgccgtgatgggcatagcttcatgcttttccaatgtgtttgtggcgtctcgcctcgaaagcgtggtgtacgcctcttggtcccgagttcaggccgacctaaactgcatgaaagacctgtatgccatgtccgcgaactggaaatacctgattaacctctgtggtatggattttccaatcaagaccaaccttgagatcgtgcggaaactgaagttattgatgggggagaacaacctggaaacagagcggatgccctcccacaaggaagaaaggtggaaaaagagatacgaggttgtcaacggtaagttaacgaatacgggaacagtcaagatgttgccaccactcgaaaccccactgttcagcggatcagcctacttcgtcgtcagcagagagtacgtcggctacgtgttgcagaatgagaaaattcagaagttgatggagtgggcccaggatacttactcccccgatgaatatctttgggcaactattcagcgcattcccgaagtccctgggagcctgccagcctctcataagtacgacctatccgatatgcaggctgtggcccgattcgtgaaatggcagtacttcgaaggggatgtgagcaaaggggctccttaccccccatgcgacggggtgcatgtaaggtccgtgtgtatatttggggcaggcgaccttaactggatgcttcgcaaacatcatcttttcgctaacaagtttgatgtggacgttgacttattcgctatccaatgcctggacgagcatttacggcacaaggcgttggagacccttaagcactag

SEQ ID NO: 290745 - DNA, 1287 bp, Artificial Sequence
  derived and/or modified sequence
atgctgcggaccctgctgcggcggcggctgttcagctaccccaccaagtactacttcatggtgctggtactgtcgcttatcacattcagtgtactgcggattcatcagaagccggaatttgtgtcagtgcgacacctggagctggcaggtgagaatccaagttccgatataaactgcactaaagtgctacagggcgacgttaatgaaattcaaaaagtgaaactggagattttaactgttaagttcaaaaagaggccacgttggactccagacgattatataaacatgacaagtgactgtagctcatttatcaagcgacgtaagtacatcgtggagcccctgtccaaggaagaggcagaattccccattgcttattctatcgtggtgcaccacaagatcgagatgcttgaccgcttgctgcgggccatttacatgccgcagaatttttattgtatccacgtcgacaccaagtcagaagactcatacctcgccgcagttatggggatcgcctcttgtttcagtaacgttttcgtggcctccaggcttgagtctgtcgtgtatgcaagctggtcacgggtccaggcagatctgaattgcatgaaggatttatacgccatgagcgccaactggaagtatctgatcaacctttgtgggatggacttccccatcaagaccaacctcgaaatcgtgagaaagctgaagctgctgatgggtgagaacaatctcgaaaccgagcgcatgccctcacacaaggaggaaagatggaaaaaacgttacgaggtggtaaacggaaaactgaccaatactggaaccgtcaaaatgcttccaccgctggagaccccactgtttagtggcagcgcctacttcgtagtgagtcgagagtacgtaggttacgtcctccagaacgaaaaaatacaaaagctcatggaatgggcacaggacacctatagtccagatgaatacttgtgggcaacaattcaacgcattcccgaggtgccggggagtctgcccgccagtcacaagtatgacttgtccgacatgcaggcagttgcacgctttgttaaatggcagtactttgaaggagacgtctctaaaggggcaccctatccaccttgcgacggggtgcacgtcaggtcagtgtgcatttttggcgcaggagacctgaactggatgttacggaagcaccacctctttgctaacaaatttgacgtcgatgttgacttgtttgctatccagtgtctcgacgagcacctgcgacataaggcgcttgagacattgaaacactag

SEQ ID NO: 290746 - DNA, 1287 bp, Artificial Sequence
  derived and/or modified sequence
atgctgcggaccctgctgcggcggcggctgttcagctaccccaccaaatattatttcatggtcctggtgctgagtcttataacattttctgttttgaggattcatcaaaagcctgagtttgttagcgtgcgacacctggagctcgccggcgaaaaccccagtagtgatatcaattgtacgaaagtcctgcagggggatgtaaacgagattcaaaaggtcaagttggaaatcctgaccgtcaaatttaagaaacgtcctcgctggaccccggacgattacattaatatgactagtgactgttccagcttcattaaacggcgaaagtatatcgtggagcctctgtccaaagaagaggcagagtttcccatcgcttactccattgtggttcatcacaaaattgaaatgttagatcgcctgcttcgagcaatatacatgccgcagaacttctattgtatccacgttgatactaagagcgaggatagttatcttgcagctgtcatgggtattgcttcatgtttctctaatgtgttcgtggcttccaggctcgaatccgtggtttatgcgtcctggagtcgcgtccaggccgatctgaactgtatgaaggatctgtacgcaatgtccgcaaactggaaataccttatcaatctctgtgggatggacttcccaataaagaccaaccttgagatcgttcgcaaactaaaactcctgatgggggaaaacaacctggagacagaaaggatgccttctcataaggaggaaaggtggaagaaacgatacgaggtagttaacggaaaattgacaaacacagggactgttaaaatgctgccacccttggagacgccgctctttagtggaagcgcctacttcgtggtttcccgcgagtatgtcgggtatgtgttacagaacgagaagatccagaagctcatggagtgggcgcaggacacttactctccagacgagtatctatgggccaccatccaaaggatcccagaggtgcccgggtcgctgcctgcatcacataagtatgatctgtccgatatgcaggccgtggctcggttcgtgaaatggcaatattttgaaggagacgtatctaaaggagccccctatccgccttgcgatggggtccatgtgcgctctgtatgtatattcggggccggcgatctcaactggatgctcaggaaacaccacctgttcgctaataaatttgatgttgacgtggacttgttcgccatccagtgtcttgatgaacatttgcgccataaagccctcgagacccttaaacattag

SEQ ID NO: 290747 - DNA, 1287 bp, Artificial Sequence
  derived and/or modified sequence
atgctgcggaccctgctgcggcggcggctgttcagctaccccaccaaatactattttatggttttagttctgagtctcatcaccttttctgtgttaaggatacaccagaagcctgaatttgtaagcgtacggcacctggagctggcaggggagaacccttctagtgatatcaattgcaccaaagtgcttcaaggcgacgtgaatgagatccagaaggtgaagctggagatcttgacagttaaatttaaaaaacgacccagatggactcccgatgactacatcaacatgacatctgattgtagcagcttcatcaagagacgcaaatatattgtggagccccttagcaaggaggaagccgagtttccaattgcctactcaatcgtcgtgcaccataagatcgagatgcttgatcgacttttgcgtgcaatttacatgcctcaaaatttttactgtatccacgtggatactaagagcgaggattcctatctcgccgctgtcatgggcatagcctcctgcttttccaatgtgtttgtggctagccgcctcgaatctgttgtgtatgctagctggagcagggtacaagcagatttgaattgcatgaaggacttatacgcgatgtccgccaattggaagtatttgattaatttgtgtgggatggattttcctattaagactaaccttgagattgtccgcaaactgaaactcctgatgggcgagaataaccttgagactgaacggatgccatcacataaagaggaacggtggaaaaagagatatgaagtggttaatggtaagcttacaaataccggcaccgtgaagatgctgcctccgctcgagacaccacttttctctggcagcgcctacttcgtggtgtcccgggaatacgttggttacgttctgcagaacgagaaaattcaaaaactaatggaatgggcccaggatacgtacagccctgatgaatatttatgggctaccatacaacggattccagaagtgcccggatccctgcccgctagccacaagtatgacctgagcgatatgcaagcggtggcccgcttcgtgaagtggcagtattttgaaggcgacgtgagcaagggggccccctatccgccatgcgacggagtgcacgtgagaagcgtctgcatcttcggcgcaggggacctaaattggatgctccggaaacatcatctgtttgccaacaagttcgacgtggacgtcgatctgtttgctattcagtgtcttgatgaacacctccgacacaaagctttagaaaccttaaaacattag

SEQ ID NO: 290748 - DNA, 1287 bp, Artificial Sequence
  derived and/or modified sequence
atgctgagaacactcctccgacgaaggcttttctcctacccaaccaagtactatttcatggtactcgtgctttccctcattacgttctctgtattgcggatccatcagaagccagagtttgtgtctgttagacatctggagctggcaggcgaaaatccatccagtgatataaattgcactaaggtgttgcagggggatgttaatgaaatccagaaggttaagctggagatactcacggtgaagttcaagaaacgccctcgatggaccccggacgactacatcaatatgacctccgactgctcatccttcatcaagaggaggaagtacattgtggaacctctgtcaaaagaagaagcggagtttcccatcgcttatagtattgtggtccaccataaaatcgagatgctggatcggcttctgagagccatctacatgccccagaatttttattgcatccatgttgataccaaatctgaggacagctacctagctgctgtgatgggtatcgccagttgtttttcgaacgtatttgtcgcctcgagattagaatccgtagtgtatgcaagctggagtagagtccaggctgacttaaactgcatgaaagacctgtacgccatgtccgctaattggaagtatctgatcaacctttgtggtatggatttccccattaagacaaacctggaaatagtgaggaagctcaagcttcttatgggcgagaataatctcgaaactgagagaatgccctctcacaaagaggagcgatggaagaagcgttacgaggtcgtgaatgggaagctaaccaatacgggaacagtgaagatgctgcccccactggagacccccctattctctggaagcgcatacttcgtggtctcccgggagtatgtgggatacgttttacaaaatgagaagatccagaaactaatggagtgggctcaggacacgtattcacctgatgaatatttgtgggccacaattcagcgcatcccagaggtccctggaagcttgcccgcttcacataaatacgacctctccgatatgcaggcggttgccagattcgttaagtggcaatactttgaaggggatgtatccaagggcgctccgtaccctccctgcgatggggtgcatgttagaagtgtctgcatctttggggctggagacctaaattggatgctcaggaaacaccacctgtttgctaacaagttcgatgtcgacgtggacctcttcgcgattcagtgcctggacgagcacctaagacacaaagcccttgagactctaaagcattag

SEQ ID NO: 290749 - DNA, 1287 bp, Artificial Sequence
  derived and/or modified sequence
atgttgcggactttgctcaggcgaagactgttcagttaccctacaaaatattacttcatggtgctggtgctgtcgctgattaccttttctgtgctccgaatccatcagaagccagagttcgtctccgtccggcacttagagttggccggagagaatccaagcagtgatataaattgcactaaagtcttgcaaggtgatgtcaacgagatccagaaggttaagctcgaaatcttgaccgtgaaatttaaaaagagacctaggtggactcccgatgactacatcaatatgaccagcgattgctccagttttattaaaagacgcaagtacatcgtggagccacttagcaaagaagaggcagagttcccaatagcctattccatcgtggtccatcacaagatcgaaatgctcgatcgtttgcttcgcgctatatatatgccacagaatttttattgtatccatgttgacaccaaatctgaagactcctacctggcagcagttatgggcatagcctcctgtttctctaacgtgtttgtagccagcagactcgaatcagtcgtatatgcgtcatggagtcgggttcaggcagacctgaattgcatgaaggacctttatgcaatgagcgccaactggaaatatctgatcaatttatgcggcatggacttcccaataaaaacgaatttggaaatcgtccggaaactcaagctcttgatgggcgaaaacaacctcgaaactgagaggatgccatcccacaaggaggagaggtggaaaaaaagatatgaggtggtcaatgggaaactcaccaacaccggcactgttaaaatgctgcctccgctcgagaccccgctattctccggatccgcctattttgtggtttccagagagtacgtggggtacgttctgcagaacgagaaaatccaaaagctcatggagtgggcacaagacacctactcccctgacgagtacctctgggctaccatccaaaggatcccggaggtccctgggtcactccccgcatcgcacaagtatgacctgagcgacatgcaggcagttgcgaggttcgtgaagtggcagtattttgagggggatgtgtcgaagggcgcaccatacccaccgtgtgacggcgtgcacgtgcggtcagtgtgcatatttggtgcaggcgatttgaattggatgcttaggaagcatcatctgtttgcaaacaaattcgatgttgacgtcgatttgttcgcgattcagtgcctggatgaacatctgcgtcacaaggccctcgaaacactgaaacactag

SEQ ID NO: 290750 - DNA, 1287 bp, Artificial Sequence
  derived and/or modified sequence
atgctgcgaacgctgctcaggcggaggcttttctcgtatcctaccaagtactattttatggtcctggtcctgtccctgatcactttcagcgtattgcgcatccaccagaaacccgagtttgtatccgtgcgtcatttagaactagccggtgagaatcccagcagcgatataaattgtaccaaggttctgcagggggacgtcaatgaaatccagaaggttaagctggaaatacttaccgtgaagttcaagaagcgaccacggtggaccccagacgactatattaatatgacgtccgattgttccagctttataaaacgcagaaaatacatagtcgagcccctaagtaaggaggaagccgaatttcctatcgcctatagcatcgtggtccaccacaaaatcgagatgctcgacaggctgctgcgtgcgatctacatgccccagaacttctattgtatacacgtcgatacaaaaagtgaggatagctacctggccgcagtgatgggtatcgcctcctgtttctctaatgttttcgtggcctcccgattagagtctgttgtctacgccagttggagtcgcgtccaggctgacttgaattgtatgaaggatctgtatgcaatgagcgcaaactggaaatacctcatcaacctgtgcggaatggatttcccaattaaaacaaatttggagatcgtaagaaagctgaagttgctgatgggtgagaacaatttggagactgaaaggatgccatctcacaaggaggaaagatggaagaaacgctatgaggtggttaacggaaaactcactaatacgggcactgtaaaaatgctcccccctttggaaactcccctgttcagcgggtcagcgtatttcgtggtatctcgggagtatgttggatacgtactgcagaacgagaagatacagaagctgatggagtgggcccaggatacctactctccagacgagtatttatgggccaccattcaaaggattcccgaggtaccagggtcactgccagctagccacaagtatgatctgtcagacatgcaagccgttgcaaggttcgtaaagtggcagtattttgaaggagacgtctccaagggggcaccctaccccccatgcgatggcgtgcatgttcgttcagtgtgtatctttggcgcaggcgaccttaactggatgctcaggaaacaccacttgtttgcgaacaaatttgatgttgatgtggatctatttgctattcagtgtctggatgagcatctcaggcataaggcccttgaaaccttgaagcactag

SEQ ID NO: 290751 - DNA, 1287 bp, Artificial Sequence
  derived and/or modified sequence
atgctgcgcacactattacgcagacgactcttctcgtaccctacaaagtattatttcatggtcctggtcctgtccctgatcaccttctccgtcttgcgcatccatcagaagcccgaattcgtgtctgtgagacatttagagttggctggcgagaacccctcctcagatatcaattgtaccaaggtgctacagggggatgttaatgagatccaaaaagtaaaattagaaatcttaaccgtgaagttcaagaagcgtccgaggtggacccctgacgactacattaatatgacgagcgactgcagtagttttatcaagcgacggaagtacatcgtggagcctttatctaaggaagaggccgaatttcctatcgcctacagcatagtggtgcatcataagatcgagatgctagatcgcctactgcgagctatttacatgcctcagaacttttactgcatccatgttgataccaaaagcgaagacagctacctcgctgcagtgatgggcatcgcctcctgcttttccaatgtctttgttgcctcccgcctcgagagtgtcgtgtacgcttcctggagcagggttcaagctgacttgaattgcatgaaggatctgtacgcaatgtccgccaattggaaatatttgatcaatctctgtgggatggacttcccgattaaaactaacctggaaatcgtgaggaagctaaaactgctcatgggtgagaataaccttgagacagaacgcatgcccagccataaggaggaaaggtggaaaaagcggtatgaagtcgtgaacgggaagttgacaaacacagggaccgtgaagatgctccctcctttagaaacgcccctgttctcaggtagtgcctactttgtagttagccgggaatacgtgggttatgtgttacagaatgaaaagattcagaaactcatggagtgggcacaggatacatactctcctgacgagtacttgtgggctacgattcagcgcatacccgaggtgcctgggtctctgccagccagccataagtatgatctctcagatatgcaggcggtagcccgattcgttaaatggcagtatttcgagggagatgtatctaagggagctccttatcccccatgtgatggtgtgcacgtgcgtagcgtgtgcatctttggagccggagacctgaattggatgctccgaaaacatcatctgttcgctaataaatttgacgtggacgtggatctctttgctattcagtgcctcgatgaacacctaaggcacaaggctttagagaccctaaaacactag

SEQ ID NO: 290752 - DNA, 1287 bp, Artificial Sequence
  derived and/or modified sequence
atgctgagaaccctgctgagaagaagactgttcagctaccccaccaagtactacttcatggtgctggtgctgagcctgatcaccttcagcgtgctgagaatccaccagaagcccgagttcgtgagcgtgagacacctggagctggccggcgagaaccccagcagcgacatcaactgcaccaaggtgctgcagggcgacgtgaacgagatccagaaggtgaagctggagatcctgaccgtgaagttcaagaagagacccagatggacccccgacgactacatcaacatgaccagcgactgcagcagcttcatcaagagaagaaagtacatcgtggagcccctgagcaaggaggaggccgagttccccatcgcctacagcatcgtggtgcaccacaagatcgagatgctggacagactgctgagagccatctacatgccccagaacttctactgcatccacgtggacaccaagagcgaggacagctacctggccgccgtgatgggcatcgccagctgcttcagcaacgtgttcgtggccagcagactggagagcgtggtgtacgccagctggagcagagtgcaggccgacctgaactgcatgaaggacctgtacgccatgagcgccaactggaagtacctgatcaacctgtgcggcatggacttccccatcaagaccaacctggagatcgtgagaaagctgaagctgctgatgggcgagaacaacctggagaccgagagaatgcccagccacaaggaggagagatggaagaagagatacgaggtggtgaacggcaagctgaccaacaccggcaccgtgaagatgctgccccccctggagacccccctgttcagcggcagcgcctacttcgtggtgagcagagagtacgtgggctacgtgctgcagaacgagaagatccagaagctgatggagtgggcccaggacacctacagccccgacgagtacctgtgggccaccatccagagaatccccgaggtgcccggcagcctgcccgccagccacaagtacgacctgagcgacatgcaggccgtggccagattcgtgaagtggcagtacttcgagggcgacgtgagcaagggcgccccctaccccccctgcgacggcgtgcacgtgagaagcgtgtgcatcttcggcgccggcgacctgaactggatgctgagaaagcaccacctgttcgccaacaagttcgacgtggacgtggacctgttcgccatccagtgcctggacgagcacctgagacacaaggccctggagaccctgaagcactag

SEQ ID NO: 290753 - protein, 83 aa, Artificial Sequence
  derived and/or modified sequence
  misc_feature (1)..(1): Xaa can be any naturally occurring amino acid
XQELLKEKTLAEQNLEDTRQQLLAARSSQAKAINTLETRVRELEQTLQASEEQLQQSKGIVAAQETQIQELVSAYWSCCIPGP

SEQ ID NO: 290754 - protein, 767 aa, Artificial Sequence
  derived and/or modified sequence
MFAKLKKKIAEETAVAQRPGGATRIPRSVSKESVASMGADSGDDFASDGSSSREDLSSQLLRRNEQIRKLEARLSDYAEQVRNLQKIKEKLEIALEKHQDSSMRKFQEQNETFQANRAKMAEGLALALARKDQEWSEKMDQLEKEKNILTAQLQEMKNQSMNLFQRRDEMDELEGFQQQELSKIKHMLLKKEESLGKMEQELEARTRELSRTQEELMNSNQMSSDLSQKLEELQRHYSTLEEQRDHVIASKTGAESKITALEQKEQELQALIQQLSIDLQKVTAETQEKEDVITHLQEKVASLEKRLEQNLSGEEHLQELLKEKTLAEQNLEDTRQQLLAARSSQAKAINTLETRVRELEQTLQASEEQLQQSKGIVAAQETQIQELAAANQESSHVQQQALALEQQFLERTQALEAQIVALERTRAADQTTAEQGMRQLEQENAALKECRNEYERSLQNHQFELKKLKEEWSQREIVSVAMAQALEEVRKQREEFQQQAANLTAIIDEKEQNLREKTEVLLQKEQEILQLERGHNSALLQIHQLQAELEALRTLKAEEAAVVAEQEDLLRLRGPLQAEALSVNESHVTSRAMQDPVFQLPTAGRTPNGEVGAMDLTQLQKEKQDLEQQLLEKNKTIKQMQQRMLELRKTLQKELKIRPDNELFEVREKPGPEMANMAPSVTNNTDLTDAREINFEYLKHVVLKFMSCRESEAFHLIKAVSVLLNFSQEEENMLKETLEYKMSWFGSKPAPKGSIRPSISNPRIPWS

SEQ ID NO: 290755 - DNA, 2304 bp, Artificial Sequence
  derived and/or modified sequence
atgttcgccaagctgaagaagaagatcgccgaggagaccgccgtggcccagagacccggcggcgccaccagaatccccagaagcgtgagcaaggagagcgtggccagcatgggcgccgacagcggcgacgacttcgccagcgacggcagcagcagcagagaggacctgagcagccagctgctgagaagaaacgagcagatcagaaagctggaggccagactgagcgactacgccgagcaggtgagaaacctgcagaagatcaaggagaagctggagatcgccctggagaagcaccaggacagcagcatgagaaagttccaggagcagaacgagaccttccaggccaacagagccaagatggccgagggcctggccctggccctggccagaaaggaccaggagtggagcgagaagatggaccagctggagaaggagaagaacatcctgaccgcccagctgcaggagatgaagaaccagagcatgaacctgttccagagaagagacgagatggacgagctggagggcttccagcagcaggagctgagcaagatcaagcacatgctgctgaagaaggaggagagcctgggcaagatggagcaggagctggaggccagaaccagagagctgagcagaacccaggaggagctgatgaacagcaaccagatgagcagcgacctgagccagaagctggaggagctgcagagacactacagcaccctggaggagcagagagaccacgtgatcgccagcaagaccggcgccgagagcaagatcaccgccctggagcagaaggagcaggagctgcaggccctgatccagcagctgagcatcgacctgcagaaggtgaccgccgagacccaggagaaggaggacgtgatcacccacctgcaggagaaggtggccagcctggagaagagactggagcagaacctgagcggcgaggagcacctgcaggagctgctgaaggagaagaccctggccgagcagaacctggaggacaccagacagcagctgctggccgccagaagcagccaggccaaggccatcaacaccctggagaccagagtgagagagctggagcagaccctgcaggccagcgaggagcagctgcagcagagcaagggcatcgtggccgcccaggagacccagatccaggagctggccgccgccaaccaggagagcagccacgtgcagcagcaggccctggccctggagcagcagttcctggagagaacccaggccctggaggcccagatcgtggccctggagagaaccagagccgccgaccagaccaccgccgagcagggcatgagacagctggagcaggagaacgccgccctgaaggagtgcagaaacgagtacgagagaagcctgcagaaccaccagttcgagctgaagaagctgaaggaggagtggagccagagagagatcgtgagcgtggccatggcccaggccctggaggaggtgagaaagcagagagaggagttccagcagcaggccgccaacctgaccgccatcatcgacgagaaggagcagaacctgagagagaagaccgaggtgctgctgcagaaggagcaggagatcctgcagctggagagaggccacaacagcgccctgctgcagatccaccagctgcaggccgagctggaggccctgagaaccctgaaggccgaggaggccgccgtggtggccgagcaggaggacctgctgagactgagaggccccctgcaggccgaggccctgagcgtgaacgagagccacgtgaccagcagagccatgcaggaccccgtgttccagctgcccaccgccggcagaacccccaacggcgaggtgggcgccatggacctgacccagctgcagaaggagaagcaggacctggagcagcagctgctggagaagaacaagaccatcaagcagatgcagcagagaatgctggagctgagaaagaccctgcagaaggagctgaagatcagacccgacaacgagctgttcgaggtgagagagaagcccggccccgagatggccaacatggcccccagcgtgaccaacaacaccgacctgaccgacgccagagagatcaacttcgagtacctgaagcacgtggtgctgaagttcatgagctgcagagagagcgaggccttccacctgatcaaggccgtgagcgtgctgctgaacttcagccaggaggaggagaacatgctgaaggagaccctggagtacaagatgagctggttcggcagcaagcccgcccccaagggcagcatcagacccagcatcagcaaccccagaatcccctggagctag

SEQ ID NO: 290756 - DNA, 2304 bp, Artificial Sequence
  derived and/or modified sequence
atgttcgctaaactgaaaaagaagattgccgaggaaacagctgtggcccagcggcccgggggcgccacgagaatcccgaggagcgtctccaaggaatctgttgccagcatgggcgcagattctggagatgactttgcaagcgacggctcatccagccgcgaggacttatccagtcagctgttgaggaggaatgagcagattcgcaagttggaagcccggctgtctgactatgccgagcaggtaagaaatcttcagaaaatcaaggagaaactggaaatcgctttggagaaacaccaagattcgtcaatgcgaaagttccaggagcagaatgaaaccttccaggctaatagggcaaagatggccgaaggcctcgctttagcgttggccagaaaagaccaagaatggtctgaaaagatggaccagttagagaaggagaagaacatactgactgcccaattacaagagatgaagaatcagtcgatgaatctcttccagcgccgggatgagatggacgaactggagggattccagcagcaggaactgtcaaagatcaaacacatgctgttaaaaaaagaggaatccctgggaaagatggaacaggagctggaagcaagaacaagagagctgtcaagaactcaggaggagctgatgaacagcaatcagatgtcttcggatctgagccagaaattggaggaacttcagaggcactacagtacactggaggagcaaagggatcatgtaatcgcgtctaaaacgggggccgagtccaaaatcaccgccttagagcagaaagagcaggaactccaggccctgatacagcaactgtcaattgatctacagaaggtcacggccgagacccaggaaaaagaggatgtgatcactcacctgcaagagaaagtggcatccctagagaagcgcctggaacagaatctgagtggtgaggagcacctgcaggagctcctgaaggagaagacgctggcagaacagaacctggaggacacaaggcagcagctacttgcagcccgttcctcccaagctaaagccattaatacactcgaaacacgcgtgagggagcttgaacagaccctgcaggcatcagaagaacagcttcagcagagcaaggggatagtcgcagcgcaggagacgcaaatccaggagctcgcggcggctaatcaggagtcttcccacgtgcagcagcaggccctggctttagagcagcagtttctggagcggacacaggccctggaggcgcagattgtcgctttggagaggacacgcgctgcagaccaaaccactgcggagcagggaatgcgccagctggaacaggagaacgccgcgctgaaggaatgtcggaacgaatatgaacgttcccttcaaaatcatcaatttgaactgaaaaagctgaaagaagagtggtcccagagggaaattgtcagtgtcgcaatggcacaagcattagaggaggtgcgtaaacagcgggaagaattccagcagcaggccgccaacctaacagcgatcatcgatgagaaggagcagaatctcagggagaagaccgaggtgttgttacagaaagagcaggagatcttacagctagaaagggggcacaattccgcattgctgcagattcatcaattgcaagccgagctcgaagccctccggactttaaaggcggaggaggctgctgtcgtagccgagcaggaggatttgttgcggctgcgtggaccactgcaggccgaggcgctatctgtgaatgagagccacgtgacaagccgcgcgatgcaggatccagtttttcagttgccgacagcaggacgcacccccaatggcgaggtcggagcgatggatctcacccagctccaaaaggaaaagcaggatctggaacagcagctgctggagaagaacaaaaccattaaacagatgcagcagcgcatgttagaactgagaaaaacactccagaaggaacttaaaattagacccgacaacgagctgttcgaggtcagggagaagcctgggccggaaatggctaatatggcgccctctgtaacaaacaatacagacctgactgacgcgcgcgagatcaatttcgagtatctgaagcacgttgtgctgaaattcatgtcctgcagggaaagtgaggccttccacctgattaaagctgtttccgtgctgttgaatttctcacaagaggaagaaaatatgctaaaggaaacgctggaatataagatgtcctggttcggatccaaacccgcaccaaaaggttctattcggccctcaatctctaatcccaggataccctggagctag

SEQ ID NO: 290757 - DNA, 4801 bp, Artificial Sequence
  derived and/or modified sequence
gcgctgggagacgtgcggttccgggtcgctgctcggctcgccggctgggcggtgggggttggtgacgcgggccggggctcacgagaggcccgggaggcggggctttgctggcttcccagagagaggcaggacagaatgctttgacctccaagctgttttaaatctagtagataagccagatcctgtgttgccataagcccttggcccacatttaagtgggaatgcagctagcttggatgtctgaaactttgtaggcgcctctgtctgaatcctgaacacaggcaccaggactactgagagctcgtcatctgtgcaggatagccacacagcaaacatgtttgcaaaactgaagaagaaaattgcagaagagactgctgttgctcagaggccaggaggtgctactaggatcccacggtctgtgagcaaggaatcagttgcctcaatgggagctgactcaggagatgactttgcttccgatggaagcagctccagagaagatctttcatcccagcttctgagaaggaatgaacagatacggaagttagaggccagactttctgactatgctgaacaggtccgaaacttgcagaagataaaagagaagcttgaaattgcattagaaaaacaccaggattcttccatgcggaaatttcaagagcagaatgagacattccaagccaacagagccaaaatggcagaaggactggctttggcattagccagaaaggaccaggaatggtcagaaaagatggatcagcttgaaaaggagaaaaatattctgacagcccagttacaggaaatgaagaaccagagtatgaatcttttccaaaggagagatgaaatggatgaattagaggggttccagcagcaggaactaagtaaaataaagcacatgcttttaaaaaaagaagaaagtctagggaaaatggaacaagaattggaggcacgaaccagagaacttagtcgtacccaggaggagttgatgaactccaatcagatgtcatcagacttaagccagaagctagaagaattgcagagacactactcaacgctggaagagcagagagatcatgtgatagcttcaaaaacaggtgcagaaagtaagatcacagccctggaacaaaaggaacaagagctccaagcactcattcagcagctttccattgatttgcaaaaggtcactgctgaaactcaagagaaagaagacgttatcacacatttgcaagagaaggttgcatccttggagaagagactagaacagaacttatcaggagaagaacacttgcaagaactcctgaaagagaaaacacttgctgagcagaatttggaggataccagacaacagctcttggcagccagaagcagccaggctaaggccattaacaccctggagactcgggtgagagaactggagcagaccttgcaggcctctgaggagcagctccaacagagcaagggcattgtggctgcccaggaaactcagatacaggagctcgctgccgccaaccaggagagcagccatgtgcagcagcaggcccttgctctggagcagcagttcttggagcgcacccaggcgctagaagcccagatagtggccctggagagaacgcgggcagctgaccagaccaccgcagagcaagggatgagacaactggagcaagaaaatgcagcccttaaagaatgcaggaatgaatatgaacgttctttacaaaatcaccaatttgaactaaagaagctgaaggaagaatggagccaaagagaaattgtgagcgtggccatggctcaagccctggaggaggtgcggaagcaaagggaagagttccagcaacaggcagctaacctgacagccataatagacgagaaggaacagaatctgcgggaaaaaaccgaagtgcttctccagaaagagcaggagattctccagctggagcgaggtcacaactctgccctgctgcagatacaccagctgcaggccgagctggaggccctgaggaccctcaaggcggaggaggctgcagtggtcgcggagcaggaggacctgctgaggctgcggggcccattgcaggccgaagcactctcagtcaatgagtcgcacgtgacctcgagggccatgcaggaccctgtgttccagcttccaactgcaggaagaacaccaaatggtgaggttggggccatggatctcacacagctacagaaggagaaacaggacttggagcagcaacttctggagaaaaataagaccataaagcagatgcagcagcggatgctggagctccggaagactctgcagaaggagctgaaaatcagacccgataatgagctcttcgaagtccgggagaaacctggacctgagatggcaaacatggcgccttccgtcacgaataacactgacctgacagatgcccgcgagatcaactttgagtaccttaaacatgtggttttaaaattcatgtcttgtcgcgaatccgaggcttttcatcttataaaagctgtgtcagtgttgctgaacttttcccaagaggaggagaacatgctcaaggaaactctggaatataagatgtcatggtttgggtccaaaccagctcccaagggcagcatccggccgtctatctcaaaccctcggataccatggtcctagaggggactacccaaggatggagctccgtgggttgacactttttctgtgaaaagaacactgacacaccagtctgggtgggtttttaatcactgtaactgcagtattttgtacaagtgtctaaacattgtttacaagactaaggcccacttccctgcaggctgacctgaacctcagggggtagctgatcctgtcattctggtcaccaaacaggagggtcctggcactacccagatttccacagtgctgctaatatcccagctccagccagcaccccatctgcacctgaatcctctaacttcacggtagcacttacagctgaagccatcagcatctggcaggcacacctgagtcaccatgtagcgctgctactggaggtagagacggccctttgagatggtgcccagcaggccaaacccacctgcctctgccaggaacagccaactccatgggaactctatgggagtggcttttaaaaattcagatgagttagaagctttttatcccttcctctcaagaaaatattctttcaccctgtctctcaaaccacctagaactttagaggatccatctttaagggtcggtgtggatgaatgagaaaatgcacctttctgacagtatctccactttacttaagaaaactagcaaatatatgaaaagacccttagtaccaaatacactcaattgcctttttaatgaatgtacttgtcttggataggttgctggtaaaccattttaaactattttttatagctgaagttcttcactactataaacatgtcttctgtactataaaatccatttaactggtgttcttaaaatcagagcgtccagaggaaattcttcctaaaactaggattcctgttcctttgtcttctcactcgcactctggcactgctccctctgaagtgcagtgggatctcgtgtgctttgtcttgattctgtgctgcgctgccgctgggcgatgcagaccacctgtcttctactgaaggacagtccgctgtctccagtgggggcagcagctgtcccccagcctcgatggagacactggggcagtctgccttgtctgtggagctgctctctctccctcatcccaccccaaatacttaaaatgacactacacccagacggcgcccagctggctgcagcacttgtagcatgcacatgactctggtagtaaccaacaaaaacttgttttatggattcctcgtttactgaggaaagggaacatgctggttctggaaaagccacaatattgaatctaaaaggaaaccgtttattgtttgatgaaagtttcactggttaaataaaaaactaaattaataactggagcctctaaatttattatccattatccagtgatggaaagttgtatttctcaatcatgcttagggccaaaataggtatataaaatgtgtcacagaaaaacacgcatttgcaacgttaacctaacgaaatttccatgaagaaccaagtcagggcagcatctccttagtcccagctcaggctctctgccttccagaggccgcttctccagtgactaacctcctcctctggctcctccttgcagacagttatcccttgtttagaacacgaatttccatttacctggtgggaacacgaaacaggagtctcttctgttctgcaagtttgatgggtaagaggtagccttttttcaaagtaggatttcctttttcaactgttccaggaaagaatctctaagactgggtagctcacagccagccaaaggcagctacatttccacagaagcccatccgctgcctccgtggcttctccagccattgaactggtcccacacgcaccccaggccccactcctcggcagtttcaggtgtagctgtggggcccgttcctaggtctgtactcactttagggaggcttcactgactaggctttcctcctgcatgttgaatttccttcagctttaagaggaagagtggaataaatattctaagtgatttaatgcactttgacttgtataaaactttctgtgttagcgacggtatctatagccctttatacgagcgatggatcttgagctctccttccatgttgtaaatagggattgtattcttgaaaactgctgtagcaaattcatctgtggtgcaatacactttttgattaaagctcttcaatccagatgcaa

SEQ ID NO: 290758 - DNA, 2304 bp, Artificial Sequence
  derived and/or modified sequence
atgtttgccaagctgaagaagaagattgctgaggagacagctgtggcccagaggcctggaggagccacccgcatccccaggtctgtgtccaaggagagcgtggcctccatgggcgctgacagcggagatgactttgccagtgatggcagcagcagccgggaggacctgagcagccagctgctgcggagaaatgagcagatcaggaagctggaggcccggctgagtgactatgcagagcaggtgaggaacctgcagaagatcaaggagaagctggagatcgccctggagaagcaccaggacagctccatgaggaagttccaggagcagaatgagaccttccaggccaacagagccaagatggccgagggcctggccctggccctggccaggaaggaccaggagtggagcgagaagatggaccagctggagaaggagaagaacatcctgacagcccagctgcaggagatgaagaaccagagcatgaacctcttccagaggagagatgagatggatgagctggagggcttccagcagcaggagctgagcaagatcaagcacatgctgctgaagaaggaggagagcctgggcaagatggagcaggagctggaggcccggacccgggagctgagcaggacccaggaggagctgatgaacagcaaccagatgagcagtgacctgagccagaagctggaggagctgcagaggcactacagcaccctggaggagcagagggaccacgtgattgccagcaagacaggagctgagagcaagatcacagccctggagcagaaggagcaggagctgcaggccctgatccagcagctgagcattgacctgcagaaggtgacagctgagacccaggagaaggaggatgtgatcacccacctgcaggagaaggtggccagcctggagaagaggctggagcagaacctgagcggggaggagcacctgcaggagctgctgaaggagaagaccctggccgagcagaacctggaggacacccggcagcagctgctggccgcccggagcagccaggccaaggccatcaacaccctggagaccagggtgcgggagctggagcagaccctgcaggccagcgaggagcagctgcagcagagcaagggcatcgtggccgcccaggagacccagatccaggagctggccgccgccaaccaggagagcagccacgtgcagcagcaggccctggccctggagcagcagttcctggagaggacccaggccctggaggcccagatcgtggccctggagaggaccagggctgctgaccagaccacagctgagcagggcatgaggcagctggagcaggagaatgctgccctgaaggaatgtagaaatgaatatgaaagaagcctgcagaaccaccagtttgagctgaagaagctgaaggaggagtggagccagcgggagatcgtgtctgtggccatggcccaggccctggaggaggtgaggaagcagcgggaggagttccagcagcaggccgccaacctgacagccatcattgatgagaaggagcagaacctgcgggagaagacagaggtgctgctgcagaaggagcaggagatcctgcagctggagcggggccacaacagcgccctgctgcagatccaccagctgcaggccgagctggaggccctgcggaccctgaaggccgaggaggccgctgtggtggccgagcaggaggacctgctgcggctgcggggccccctgcaggccgaggccctgtctgtgaatgaaagccacgtgaccagccgggccatgcaggaccccgtcttccagctgcccacagctggccgcacccccaacggggaggtgggcgccatggacctgacccagctgcagaaggagaagcaggacctggagcagcagctgctggagaagaacaagaccatcaagcagatgcagcagaggatgctggagctgaggaagaccctgcagaaggagctgaagatccggccagacaatgagctgtttgaggtgcgggagaagccaggccctgagatggccaacatggcccccagcgtgaccaacaacacagacctgacagatgcccgggagatcaactttgagtacctgaagcacgtggtgctgaagttcatgagctgccgggagagcgaggccttccacctgatcaaggctgtgtctgtgctgctgaacttcagccaggaggaggagaacatgctgaaggagaccctggagtacaagatgtcctggtttggcagcaagccagcccccaagggcagcatccggcccagcatcagcaacccccgcatcccctggagctag

SEQ ID NO: 290759 - DNA, 2304 bp, Artificial Sequence
  derived and/or modified sequence
atgttcgccaagctgaagaagaagatcgccgaggagaccgccgtggcccagagaccagggggcgctacgcgcatcccccgttccgtatctaaagaatcagtcgcgtccatgggcgccgactcaggggatgacttcgcatccgatggatcaagttcacgcgaggatttgtcctctcaactactccgcaggaatgagcagataaggaagttggaagctagactgagtgactacgcagagcaggtgaggaatttgcagaaaataaaggagaagctggagatagcgctcgagaaacatcaggacagctcaatgcggaagttccaagagcagaatgaaacttttcaggctaacagggctaagatggcagagggccttgcactggcccttgcccggaaagaccaggaatggagcgagaaaatggaccagctggaaaaggagaaaaacatcttaacagctcagctgcaagagatgaagaatcagtcaatgaatctgttccaacggcgcgatgaaatggatgagttagagggtttccagcagcaagaactttccaagatcaagcacatgctgctgaagaaggaagagtctctggggaaaatggagcaggaactggaagccaggacccgcgagttaagccgtactcaggaggagctgatgaacagcaaccagatgagttcggatctgagccagaaactggaagagctgcagaggcattattcgaccctggaggaacagcgtgatcacgtaatcgcctcaaagaccggggcagagagtaaaattacagcattagaacagaaggaacaagagctgcaggcactgatccaacagctgagcatcgatctccagaaagtcaccgctgagacacaggaaaaagaggacgtgatcacccatttgcaggagaaggtagccagtctggaaaaacgcctggagcagaacctgtcgggggaggaacacttacaggaactgctaaaagagaagaccctcgcagaacagaatctggaagacaccagacagcagctcctcgctgcccgttccagccaagctaaagctattaacacattggagaccagggtgcgcgaattagagcagaccttgcaggcctcagaggagcagctccagcaatccaaggggatcgtcgctgcccaggagactcagatccaggaacttgcggctgccaatcaagagtccagtcatgtgcagcaacaggccctggcactggaacagcagtttctggagaggacacaggccctggaggcgcaaatcgtggcactcgagagaacccgcgccgcagatcagacaaccgctgagcaggggatgagacaactcgagcaagaaaatgccgcgctgaaagagtgcaggaacgaatacgagcgctctttacagaatcaccagtttgaactgaagaaactgaaagaagagtggtctcagcgggagatagtcagtgtagcaatggcacaagccctggaggaagtcaggaaacagagggaagagtttcagcaacaggctgccaacctcacagccatcatcgacgagaaggagcagaacctccgcgagaagacagaggtcctcttacagaaggagcaagaaatcctccaactcgagcgggggcataactccgctcttctacagatccatcagctgcaagctgagctggaagcgctgcgcactcttaaagctgaagaggctgcagtggtggcggaacaggaggatctcctcaggcttcgcgggccacttcaagccgaggctctcagcgtaaacgagagccacgtaacatccagagcaatgcaggatcccgtgtttcagctcccaaccgctggccgcacccccaacggggaggtcggagcgatggatctcacccagcttcagaaggaaaagcaggacctcgaacagcaacttttagagaagaacaagaccatcaaacaaatgcagcagagaatgctggaattgcgcaagactcttcagaaagaactgaaaatcagacccgataatgagctgtttgaggtgcgggagaaacctggacccgagatggccaatatggccccctcggtcaccaacaacacggacctgactgatgctcgagagattaatttcgaatatcttaaacacgtagtgctcaagttcatgtcatgtcgcgaatcagaggcatttcacctcatcaaagccgtgtcggtgctgttaaacttttctcaggaagaggagaacatgcttaaagaaacactcgagtacaaaatgtcctggtttggcagtaaacccgcacctaagggatctattagaccaagtatctctaatccacgcatcccgtggtcctag

SEQ ID NO: 290760 - DNA, 2304 bp, Artificial Sequence
  derived and/or modified sequence
atgttcgccaaacttaagaaaaaaatagcagaggagacggctgtcgctcagcgtccgggtggcgcaacacggataccaagatccgtgagcaaggaatcagtagcatcaatgggcgcagactcaggagacgacttcgcatcggatggaagctcctccagagaggatcttagttctcagttactcagaaggaacgagcagattcgcaaacttgaggcaagactaagcgactatgccgaacaggtgcgaaatctgcagaagattaaggaaaaactcgagattgcccttgagaagcatcaggacagctcaatgcgtaaattccaagaacagaacgagacatttcaggccaatagagcgaagatggctgaaggactggcacttgccctggcaaggaaagatcaggaatggagtgagaaaatggatcaactggagaaggaaaaaaacattttgaccgcacagctgcaggagatgaagaatcagtccatgaatttgttccaaagacgcgatgagatggacgagcttgagggatttcagcagcaagaactcagtaagatcaaacatatgctactgaagaaagaggagtctctagggaagatggaacaggaactggaagcaagaacaagggaactgagcaggacccaggaagagctaatgaactcgaaccagatgagcagtgatttaagccaaaaattagaggaactccagcgccattacagcaccctggaagagcagcgagaccatgtcattgcgtctaaaaccggtgccgaaagcaagataacagcgctggagcagaaggagcaggagctacaggcacttattcagcaactgagcatcgatttgcagaaggtaaccgctgagacccaagaaaaggaggacgtgatcacccacctccaggagaaagtggctagcttggagaaacgcctggaacagaatttatcaggcgaggagcacctccaggagctactgaaggagaagaccctggcagagcaaaacctggaggatacgaggcagcagcttttggccgcaagatcttcccaggcgaaagccatcaacactctcgagacccgggttcgggaactggagcagactctacaagccagcgaagagcaactgcaacagtctaaaggaattgtggccgctcaggagactcagattcaggaactggccgctgctaaccaggagtccagtcacgtacaacagcaggcccttgccctggaacagcagttcctggaacgaacccaggcattagaggcacaaatcgtggccttggagaggactagggcggcagaccagacgaccgccgagcaaggaatgcggcaactagaacaggagaatgcagctctcaaggaatgtaggaatgaatatgagagatcactccagaaccaccaattcgaactcaagaagttgaaagaagaatggtcacagcgcgagatcgtgtccgtggctatggcccaggccctcgaagaagttcggaaacagcgagaagaattccaacaacaggcggctaacttgactgctatcatcgacgaaaaggagcagaaccttcgcgaaaaaacagaggtgctgctgcaaaaggagcaggagatcttacaactcgaaagggggcacaacagcgctttactgcagatccaccaactccaggcagaactggaggccctccgtacactgaaagccgaagaagcagccgtggtggcagaacaggaagatctcttgagacttcgaggaccactgcaagcagaggctctaagcgtcaacgaatcacatgttaccagccgcgctatgcaggatcccgtgttccagctaccgactgccggacggacccccaatggcgaggtaggggctatggacctcactcagctgcagaaggaaaaacaggatctggagcagcagctgctggagaagaataaaacaatcaagcagatgcagcaacgtatgcttgaattacggaaaactctacaaaaggaactcaagatccgacctgacaatgaactattcgaggtgcgggagaagcccggacctgagatggctaatatggctcccagcgtcaccaataacactgacctgactgatgcaagggaaatcaacttcgagtatttgaagcatgttgtcctgaaatttatgtcttgtagagagtctgaagcatttcatcttatcaaagccgttagtgtactcctgaatttctctcaggaggaggaaaacatgttaaaggagaccctagaatataaaatgtcctggttcgggtcaaaacccgctccgaaaggttccatacgcccaagcatatctaaccctagaattccttggagctag

SEQ ID NO: 290761 - protein, 715 aa, Artificial Sequence
  derived and/or modified sequence
MVVEHPEFLKAGKEPGLQIWRVEKFDAYVILKTVQLRNGNLQYDLHYWLGNECSQDESGAAAIFTVQLDDYLNGRAVQHREVQGFESATFLGYFKSGLKYKKGGVASGFKHVVPNEVVVQRLFQVKGRRVVRATEVPVSWESFNNGDCFILDLGNNIHQWCGSNSNRYERLKATQVSKGIRDNERSGRARVHVSEEGTEPEAMLQVLGPKPALPAGTEDTAKEDAANRKLAKLYKVSNGAGTMSVSLVADENPFAQGALKSEDCFILDHGKDGKIFVWKGKQANTEERKAALKTASDFITKMDYPKQTQVSVLPEGGETPLFKQFFKNWRDPDQTDGLGLSYLSSHIANVERVPFDAATLHTSTAMAAQHGMDDDGTGQKQIWRIEGSNKVPVDPATYGQFYGGDSYIILYNYRHGGRQGQIIYNWQGAQSTQDEVAASAILTAQLDEELGGTPVQSRVVQGKEPAHLMSLFGGKPMIIYKGGTSREGGQTAPASTRLFQVRANSAGATRAVEVLPKAGALNSNDAFVLKTPSAAYLWVGTGASEAEKTGAQELLRVLRAQPVQVAEGSEPDGFWEALGGKAAYRTSPRLKDKKMDAHPPRLFACSNKIGRFVIEEVPGELMQEDLATDDVMLLDTWDQVFVWVGKDSQEEEKTEALTSAKRYIETDPANRDRRTPITVVKQGFEPPSFVGWFLGWDDDYWSVDPLDRAMAELAA

SEQ ID NO: 290762 - protein, 742 aa, Artificial Sequence
  derived and/or modified sequence
MEKLFCCFPNSMVVEHPEFLKAGKEPGLQIWRVEKFDLVPVPTNLYGDFFTGDAYVILKTVQLRNGNLQYDLHYWLGNECSQDESGAAAIFTVQLDDYLNGRAVQHREVQGFESATFLGYFKSGLKYKKGGVASGFKHVVPNEVVVQRLFQVKGRRVVRATEVPVSWESFNNGDCFILDLGNNIHQWCGSNSNRYERLKATQVSKGIRDNERSGRARVHVSEEGTEPEAMLQVLGPKPALPAGTEDTAKEDAANRKLAKLYKVSNGAGTMSVSLVADENPFAQGALKSEDCFILDHGKDGKIFVWKGKQANTEERKAALKTASDFITKMDYPKQTQVSVLPEGGETPLFKQFFKNWRDPDQTDGLGLSYLSSHIANVERVPFDAATLHTSTAMAAQHGMDDDGTGQKQIWRIEGSNKVPVDPATYGQFYGGDSYIILYNYRHGGRQGQIIYNWQGAQSTQDEVAASAILTAQLDEELGGTPVQSRVVQGKEPAHLMSLFGGKPMIIYKGGTSREGGQTAPASTRLFQVRANSAGATRAVEVLPKAGALNSNDAFVLKTPSAAYLWVGTGASEAEKTGAQELLRVLRAQPVQVAEGSEPDGFWEALGGKAAYRTSPRLKDKKMDAHPPRLFACSNKIGRFVIEEVPGELMQEDLATDDVMLLDTWDQVFVWVGKDSQEEEKTEALTSAKRYIETDPANRDRRTPITVVKQGFEPPSFVGWFLGWDDDYWSVDPLDRAMAELAA

SEQ ID NO: 290763 - DNA, 2229 bp, Artificial Sequence
  derived and/or modified sequence
atggagaagctgttctgctgttttcctaacagcatggttgtcgagcatcctgaattcctaaaagctggcaaagagccggggctgcaaatttggcgcgtcgaaaagttcgaccttgtgccagtgcctactaacctctatggcgatttttttaccggcgacgcgtatgtcatcctgaagacagtgcaactgaggaacgggaacctgcagtacgatttgcattattggctcggtaacgaatgctctcaggacgagtcaggtgcggccgcaattttcactgtccaactggacgactatctcaatggcagggcagtgcaacatcgcgaggttcaaggctttgaaagtgccacctttcttggttactttaaatcgggactcaaatacaaaaaagggggtgtagcttccggatttaagcacgttgtccccaatgaagtggtcgtgcagagactatttcaggttaaggggcgcagggtggtgagggctaccgaagtgcctgtgtcttgggaatctttcaacaacggagactgttttatcctcgatctgggcaataacatccaccagtggtgcggatcaaattccaatcgctacgagcgactcaaagccacccaggtctccaagggcataagagacaatgaaagatcagggcgagcacgcgtccatgtttcggaggaggggacagaaccagaggctatgctccaagtgttgggaccaaaacctgctctgccagccggtaccgaggatacagccaaggaggacgcagcaaaccgaaagctggccaagctgtataaagtgagcaatggagcaggaaccatgtctgtgagtctggtggcggacgagaacccctttgcacagggggcactcaaatcagaggactgttttatattagatcacggaaaagacggcaaaatctttgtttggaagggcaaacaggccaatacagaggagcggaaagccgctctgaaaactgcaagtgatttcatcactaagatggattaccccaaacagacacaggtgagcgtgctgcccgagggtggcgaaacgcctctgttcaagcagttcttcaaaaactggagagacccggatcagacagatggccttggattatcttacctgtcttctcatatcgctaatgtggagcgtgtaccatttgacgccgccactctgcatacctcaaccgcgatggctgcccagcatgggatggatgatgatggaacaggccaaaagcagatctggagaattgagggcagcaataaggtcccggtcgacccagcaacatacggacagttttatggaggagacagttacattatcttgtataactacaggcatggcggccgtcagggtcagatcatctacaactggcagggagcacagagcactcaggacgaagtcgccgcaagcgcaatcctcactgcccagcttgatgaggaactgggtgggactcccgtgcagagtcgggtggttcagggcaaagaacctgctcacttaatgtctctgtttgggggtaagccaatgatcatctacaagggtggtacaagtcgcgaaggcgggcagacggcccccgcatctactaggctctttcaggtgagagctaatagcgcgggggctaccagggccgtggaagtgttgccaaaggccggagcactcaacagcaatgacgctttcgtacttaaaacacccagcgccgcctatctctgggtcgggactggcgcgtccgaagcggagaaaaccggggcgcaagagttgctgcgggtgttaagggcccaacctgtgcaggtggccgaggggtccgagcccgatggtttttgggaggcactgggggggaaggcagcctaccggacttccccaaggctcaaggataaaaaaatggatgcacaccctccccgcctttttgcatgttccaataagattggaaggttcgtaatagaggaggtgcctggggaattaatgcaagaggatttagccactgatgacgtgatgctgctcgacacttgggatcaggtttttgtctgggtggggaaagactctcaggaagaggaaaagacggaagcccttacatccgccaagaggtacatcgaaaccgatccagctaacagagaccgaaggacacctattacagtcgtcaagcaagggttcgaacctccctcctttgtcggttggtttttaggctgggacgatgactactggtccgtcgatcccttagacagggccatggctgagctcgctgcatag

SEQ ID NO: 290764 - DNA, 2229 bp, Artificial Sequence
  derived and/or modified sequence
atggagaaactgttctgttgctttccgaattctatggttgttgaacacccggagttcttaaaggcagggaaggagccgggactacagatttggagagtcgaaaaatttgacttggtccccgtcccaaccaatctgtatggagatttttttactggggatgcctatgtcattctgaagaccgtgcagctgcgtaatggcaatctccagtatgaccttcattactggctgggaaatgagtgctcccaggatgaaagtggcgccgccgcgatattcaccgttcaactggacgattatctcaacggcagagccgttcaacaccgggaagtgcagggtttcgaatccgccacttttctgggttactttaaaagcggacttaaatacaaaaaaggtggtgttgcttccgggttcaagcacgtcgtgcctaatgaggtcgtggtgcaacgcctgtttcaggttaagggaagacgcgtggttagggctaccgaagtgccggttagctgggagagttttaacaatggggactgctttattctggaccttggtaataatatccaccagtggtgtggttccaactcaaataggtacgaacgacttaaagctacgcaggtatccaagggaatccgcgataatgagcgctccgggcgcgcacgcgtgcatgtatcagaagaaggaaccgagcccgaggcaatgcttcaagtgctgggcccaaagccagctcttccggccggtactgaggatacagccaaagaagacgcagcaaaccgcaagctggccaagctgtacaaagtctctaatggggccgggaccatgtcagtgtcactggtcgcggatgaaaaccctttcgcccagggagctctgaaaagtgaagactgtttcattcttgaccatggcaaggacggaaagatcttcgtttggaagggcaagcaggccaacacggaggagcgtaaggccgctctgaagactgcctctgatttcataacaaaaatggattatcctaagcagacccaagtgagtgttttacctgaaggcggcgaaacaccacttttcaagcaattcttcaagaactggcgcgacccagaccagacagatggtcttggcctgagctatctgtcttcacacattgcaaacgtggaaagagtgcccttcgacgcagcaacacttcatacaagcacagccatggcggcacaacatggcatggacgacgacgggactgggcaaaagcaaatctggcgaattgaaggatctaataaagtgccggttgacccagcaacctatggccaattctacggcggtgactcttatatcatcctgtacaattatagacatggtggtagacaaggccagattatctacaattggcagggcgcccagtccacgcaggatgaggtggctgcatccgccatccttactgcacagttagacgaagaactgggcgggacacctgtgcaaagcagagtcgtgcagggcaaggagccagctcacctaatgtctctattcgggggtaagcccatgatcatttacaagggcggcacctctagagagggcggtcagaccgcccctgcttccactagactgttccaggttcgcgccaacagtgccggcgctactcgggccgttgaggtgttaccgaaagccggtgcgcttaactctaatgatgcgttcgtactgaaaaccccaagtgctgcatacctttgggtggggaccggagcctccgaggcagaaaagacgggtgcccaggagctcctgagagtgctgcgcgcccagcctgtccaggttgccgaaggaagcgagcctgacggtttctgggaagcgctgggaggcaaggctgcctaccgcacctccccaagactgaaagacaagaaaatggatgctcatcctccgcgcctgttcgcgtgcagcaacaagatcgggcgattcgtgatcgaggaggttcccggcgagctaatgcaggaagatctcgccaccgacgacgtgatgctgttagatacctgggatcaagtgtttgtctgggtcggaaaagactctcaggaggaagagaagacagaagcactcacctcagctaaaagatatattgagacagatccggccaaccgcgaccggcgcacaccaatcacagttgttaagcaggggttcgaaccccccagtttcgtgggatggttccttggatgggatgacgactactggtcagtagatccgctggatagagccatggccgagctcgcggcctag

SEQ ID NO: 290765 - DNA, 2655 bp, Artificial Sequence
  derived and/or modified sequence
tcccgcccgcgccctgcccaccccggccgcgcgcaccacaacgcccccgccccgccgcccggaaccagctgagcgcagctggacccagcagccgctgtctccagtgccgcagcagcaggtagtgctcatagctctctttgtccagtgcttcggccttggtcccagcgccttcccacggagcagcactcttcaccctgcacagccttgttagcccaacagcatggtggtggaacaccccgagttcctcaaggcagggaaggagcctggcctgcagatctggcgtgtggagaagttcgatctggtgcccgtgcccaccaacctttatggagacttcttcacgggcgacgcctacgtcatcctgaagacagtgcagctgaggaacggaaatctgcagtatgacctccactactggctgggcaatgagtgcagccaggatgagagcggggcggccgccatctttaccgtgcagctggatgactacctgaacggccgggccgtgcagcaccgtgaggtccagggcttcgagtcggccaccttcctaggctacttcaagtctggcctgaagtacaagaaaggaggtgtggcatcaggattcaagcacgtggtacccaacgaggtggtggtgcagagactcttccaggtcaaagggcggcgtgtggtccgtgccaccgaggtacctgtgtcctgggagagcttcaacaatggcgactgcttcatcctggacctgggcaacaacatccaccagtggtgtggttccaacagcaatcggtatgaaagactgaaggccacacaggtgtccaagggcatccgggacaacgagcggagtggccgggcccgagtgcacgtgtctgaggagggcactgagcccgaggcgatgctccaggtgctgggccccaagccggctctgcctgcaggtaccgaggacaccgccaaggaggatgcggccaaccgcaagctggccaagctctacaaggtctccaatggtgcagggaccatgtccgtctccctcgtggctgatgagaaccccttcgcccagggggccctgaagtcagaggactgcttcatcctggaccacggcaaagatgggaaaatctttgtctggaaaggcaagcaggcaaacacggaggagaggaaggctgccctcaaaacagcctctgacttcatcaccaagatggactaccccaagcagactcaggtctcggtccttcctgagggcggtgagaccccactgttcaagcagttcttcaagaactggcgggacccagaccagacagatggcctgggcttgtcctacctttccagccatatcgccaacgtggagcgggtgcccttcgacgccgccaccctgcacacctccactgccatggccgcccagcacggcatggatgacgatggcacaggccagaaacagatctggagaatcgaaggttccaacaaggtgcccgtggaccctgccacatatggacagttctatggaggcgacagctacatcattctgtacaactaccgccatggtggccgccaggggcagataatctataactggcagggtgcccagtctacccaggatgaggtcgctgcatctgccatcctgactgctcagctggatgaggagctgggaggtacccctgtccagagccgtgtggtccaaggcaaggagcccgcccacctcatgagcctgtttggtgggaagcccatgatcatctacaagggcggcacctcccgcgagggcgggcagacagcccctgccagcacccgcctcttccaggtccgcgccaacagcgctggagccacccgggctgttgaggtattgcctaaggctggtgcactgaactccaacgatgcctttgttctgaaaaccccctcagccgcctacctgtgggtgggtacaggagccagcgaggcagagaagacgggggcccaggagctgctcagggtgctgcgggcccaacctgtgcaggtggcagaaggcagcgagccagatggcttctgggaggccctgggcgggaaggctgcctaccgcacatccccacggctgaaggacaagaagatggatgcccatcctcctcgcctctttgcctgctccaacaagattggacgttttgtgatcgaagaggttcctggtgagctcatgcaggaagacctggcaacggatgacgtcatgcttctggacacctgggaccaggtctttgtctgggttggaaaggattctcaagaagaagaaaagacagaagccttgacttctgctaagcggtacatcgagacggacccagccaatcgggatcggcggacgcccatcaccgtggtgaagcaaggctttgagcctccctcctttgtgggctggttccttggctgggatgatgattactggtctgtggaccccttggacagggccatggctgagctggctgcctgaggaggggcagggcccacccatgtcaccggtcagtgccttttggaactgtccttccctcaaagaggccttagagcgagcagagcagctctgctatgagtgtgtgtgtgtgtgtgtgttgtttcttttttttttttttacagtatccaaaaatagccctgcaaaaattcagagtccttgcaaaattgtctaaaatgtcagtgtttgggaaattaaatccaataaaaacattttgaagtgtg

SEQ ID NO: 290766 - DNA, 2562 bp, Artificial Sequence
  derived and/or modified sequence
tcccgcccgcgccctgcccaccccggccgcgcgcaccacaacgcccccgccccgccgcccggaaccagctgagcgcagctggacccagcagccgctgtctccagtgccgcagcagcagcccaacagcatggtggtggaacaccccgagttcctcaaggcagggaaggagcctggcctgcagatctggcgtgtggagaagttcgatctggtgcccgtgcccaccaacctttatggagacttcttcacgggcgacgcctacgtcatcctgaagacagtgcagctgaggaacggaaatctgcagtatgacctccactactggctgggcaatgagtgcagccaggatgagagcggggcggccgccatctttaccgtgcagctggatgactacctgaacggccgggccgtgcagcaccgtgaggtccagggcttcgagtcggccaccttcctaggctacttcaagtctggcctgaagtacaagaaaggaggtgtggcatcaggattcaagcacgtggtacccaacgaggtggtggtgcagagactcttccaggtcaaagggcggcgtgtggtccgtgccaccgaggtacctgtgtcctgggagagcttcaacaatggcgactgcttcatcctggacctgggcaacaacatccaccagtggtgtggttccaacagcaatcggtatgaaagactgaaggccacacaggtgtccaagggcatccgggacaacgagcggagtggccgggcccgagtgcacgtgtctgaggagggcactgagcccgaggcgatgctccaggtgctgggccccaagccggctctgcctgcaggtaccgaggacaccgccaaggaggatgcggccaaccgcaagctggccaagctctacaaggtctccaatggtgcagggaccatgtccgtctccctcgtggctgatgagaaccccttcgcccagggggccctgaagtcagaggactgcttcatcctggaccacggcaaagatgggaaaatctttgtctggaaaggcaagcaggcaaacacggaggagaggaaggctgccctcaaaacagcctctgacttcatcaccaagatggactaccccaagcagactcaggtctcggtccttcctgagggcggtgagaccccactgttcaagcagttcttcaagaactggcgggacccagaccagacagatggcctgggcttgtcctacctttccagccatatcgccaacgtggagcgggtgcccttcgacgccgccaccctgcacacctccactgccatggccgcccagcacggcatggatgacgatggcacaggccagaaacagatctggagaatcgaaggttccaacaaggtgcccgtggaccctgccacatatggacagttctatggaggcgacagctacatcattctgtacaactaccgccatggtggccgccaggggcagataatctataactggcagggtgcccagtctacccaggatgaggtcgctgcatctgccatcctgactgctcagctggatgaggagctgggaggtacccctgtccagagccgtgtggtccaaggcaaggagcccgcccacctcatgagcctgtttggtgggaagcccatgatcatctacaagggcggcacctcccgcgagggcgggcagacagcccctgccagcacccgcctcttccaggtccgcgccaacagcgctggagccacccgggctgttgaggtattgcctaaggctggtgcactgaactccaacgatgcctttgttctgaaaaccccctcagccgcctacctgtgggtgggtacaggagccagcgaggcagagaagacgggggcccaggagctgctcagggtgctgcgggcccaacctgtgcaggtggcagaaggcagcgagccagatggcttctgggaggccctgggcgggaaggctgcctaccgcacatccccacggctgaaggacaagaagatggatgcccatcctcctcgcctctttgcctgctccaacaagattggacgttttgtgatcgaagaggttcctggtgagctcatgcaggaagacctggcaacggatgacgtcatgcttctggacacctgggaccaggtctttgtctgggttggaaaggattctcaagaagaagaaaagacagaagccttgacttctgctaagcggtacatcgagacggacccagccaatcgggatcggcggacgcccatcaccgtggtgaagcaaggctttgagcctccctcctttgtgggctggttccttggctgggatgatgattactggtctgtggaccccttggacagggccatggctgagctggctgcctgaggaggggcagggcccacccatgtcaccggtcagtgccttttggaactgtccttccctcaaagaggccttagagcgagcagagcagctctgctatgagtgtgtgtgtgtgtgtgtgttgtttcttttttttttttttacagtatccaaaaatagccctgcaaaaattcagagtccttgcaaaattgtctaaaatgtcagtgtttgggaaattaaatccaataaaaacattttgaagtgtg

SEQ ID NO: 290767 - DNA, 2570 bp, Artificial Sequence
  derived and/or modified sequence
acaacgcccccgccccgccgcccggaaccagctgagcgcagctggacccagcagccgctgtctccagtgccgcagcagcaggtagtgctcatagctctctttgtccagtgcttcggccttggtcccagcgccttcccacggagcagcactcttcaccctgcacagccttgttagcccaacagcatggtggtggaacaccccgagttcctcaaggcagggaaggagcctggcctgcagatctggcgtgtggagaagttcgacgcctacgtcatcctgaagacagtgcagctgaggaacggaaatctgcagtatgacctccactactggctgggcaatgagtgcagccaggatgagagcggggcggccgccatctttaccgtgcagctggatgactacctgaacggccgggccgtgcagcaccgtgaggtccagggcttcgagtcggccaccttcctaggctacttcaagtctggcctgaagtacaagaaaggaggtgtggcatcaggattcaagcacgtggtacccaacgaggtggtggtgcagagactcttccaggtcaaagggcggcgtgtggtccgtgccaccgaggtacctgtgtcctgggagagcttcaacaatggcgactgcttcatcctggacctgggcaacaacatccaccagtggtgtggttccaacagcaatcggtatgaaagactgaaggccacacaggtgtccaagggcatccgggacaacgagcggagtggccgggcccgagtgcacgtgtctgaggagggcactgagcccgaggcgatgctccaggtgctgggccccaagccggctctgcctgcaggtaccgaggacaccgccaaggaggatgcggccaaccgcaagctggccaagctctacaaggtctccaatggtgcagggaccatgtccgtctccctcgtggctgatgagaaccccttcgcccagggggccctgaagtcagaggactgcttcatcctggaccacggcaaagatgggaaaatctttgtctggaaaggcaagcaggcaaacacggaggagaggaaggctgccctcaaaacagcctctgacttcatcaccaagatggactaccccaagcagactcaggtctcggtccttcctgagggcggtgagaccccactgttcaagcagttcttcaagaactggcgggacccagaccagacagatggcctgggcttgtcctacctttccagccatatcgccaacgtggagcgggtgcccttcgacgccgccaccctgcacacctccactgccatggccgcccagcacggcatggatgacgatggcacaggccagaaacagatctggagaatcgaaggttccaacaaggtgcccgtggaccctgccacatatggacagttctatggaggcgacagctacatcattctgtacaactaccgccatggtggccgccaggggcagataatctataactggcagggtgcccagtctacccaggatgaggtcgctgcatctgccatcctgactgctcagctggatgaggagctgggaggtacccctgtccagagccgtgtggtccaaggcaaggagcccgcccacctcatgagcctgtttggtgggaagcccatgatcatctacaagggcggcacctcccgcgagggcgggcagacagcccctgccagcacccgcctcttccaggtccgcgccaacagcgctggagccacccgggctgttgaggtattgcctaaggctggtgcactgaactccaacgatgcctttgttctgaaaaccccctcagccgcctacctgtgggtgggtacaggagccagcgaggcagagaagacgggggcccaggagctgctcagggtgctgcgggcccaacctgtgcaggtggcagaaggcagcgagccagatggcttctgggaggccctgggcgggaaggctgcctaccgcacatccccacggctgaaggacaagaagatggatgcccatcctcctcgcctctttgcctgctccaacaagattggacgttttgtgatcgaagaggttcctggtgagctcatgcaggaagacctggcaacggatgacgtcatgcttctggacacctgggaccaggtctttgtctgggttggaaaggattctcaagaagaagaaaagacagaagccttgacttctgctaagcggtacatcgagacggacccagccaatcgggatcggcggacgcccatcaccgtggtgaagcaaggctttgagcctccctcctttgtgggctggttccttggctgggatgatgattactggtctgtggaccccttggacagggccatggctgagctggctgcctgaggaggggcagggcccacccatgtcaccggtcagtgccttttggaactgtccttccctcaaagaggccttagagcgagcagagcagctctgctatgagtgtgtgtgtgtgtgtgtgttgtttcttttttttttttttacagtatccaaaaatagccctgcaaaaattcagagtccttgcaaaattgtctaaaatgtcagtgtttgggaaattaaatccaataaaaacattttgaagtgtg

SEQ ID NO: 290768 - DNA, 2717 bp, Artificial Sequence
  derived and/or modified sequence
tcccgcccgcgccctgcccaccccggccgcgcgcaccacaacgcccccgccccgccgcccggaaccagctgagcgcagctggacccagcagccgctgtctccagtgccgcagcagcaggtagtgctcatagctctctttgtccagtgcttcggccttggtcccagcgccttcccacggagcagcactcttcaccctgcacagccttgttagatacagcgctaggaaaaggggagtaattcaggtctagaatggaaaaactgttttgttgctttcccaacagcatggtggtggaacaccccgagttcctcaaggcagggaaggagcctggcctgcagatctggcgtgtggagaagttcgatctggtgcccgtgcccaccaacctttatggagacttcttcacgggcgacgcctacgtcatcctgaagacagtgcagctgaggaacggaaatctgcagtatgacctccactactggctgggcaatgagtgcagccaggatgagagcggggcggccgccatctttaccgtgcagctggatgactacctgaacggccgggccgtgcagcaccgtgaggtccagggcttcgagtcggccaccttcctaggctacttcaagtctggcctgaagtacaagaaaggaggtgtggcatcaggattcaagcacgtggtacccaacgaggtggtggtgcagagactcttccaggtcaaagggcggcgtgtggtccgtgccaccgaggtacctgtgtcctgggagagcttcaacaatggcgactgcttcatcctggacctgggcaacaacatccaccagtggtgtggttccaacagcaatcggtatgaaagactgaaggccacacaggtgtccaagggcatccgggacaacgagcggagtggccgggcccgagtgcacgtgtctgaggagggcactgagcccgaggcgatgctccaggtgctgggccccaagccggctctgcctgcaggtaccgaggacaccgccaaggaggatgcggccaaccgcaagctggccaagctctacaaggtctccaatggtgcagggaccatgtccgtctccctcgtggctgatgagaaccccttcgcccagggggccctgaagtcagaggactgcttcatcctggaccacggcaaagatgggaaaatctttgtctggaaaggcaagcaggcaaacacggaggagaggaaggctgccctcaaaacagcctctgacttcatcaccaagatggactaccccaagcagactcaggtctcggtccttcctgagggcggtgagaccccactgttcaagcagttcttcaagaactggcgggacccagaccagacagatggcctgggcttgtcctacctttccagccatatcgccaacgtggagcgggtgcccttcgacgccgccaccctgcacacctccactgccatggccgcccagcacggcatggatgacgatggcacaggccagaaacagatctggagaatcgaaggttccaacaaggtgcccgtggaccctgccacatatggacagttctatggaggcgacagctacatcattctgtacaactaccgccatggtggccgccaggggcagataatctataactggcagggtgcccagtctacccaggatgaggtcgctgcatctgccatcctgactgctcagctggatgaggagctgggaggtacccctgtccagagccgtgtggtccaaggcaaggagcccgcccacctcatgagcctgtttggtgggaagcccatgatcatctacaagggcggcacctcccgcgagggcgggcagacagcccctgccagcacccgcctcttccaggtccgcgccaacagcgctggagccacccgggctgttgaggtattgcctaaggctggtgcactgaactccaacgatgcctttgttctgaaaaccccctcagccgcctacctgtgggtgggtacaggagccagcgaggcagagaagacgggggcccaggagctgctcagggtgctgcgggcccaacctgtgcaggtggcagaaggcagcgagccagatggcttctgggaggccctgggcgggaaggctgcctaccgcacatccccacggctgaaggacaagaagatggatgcccatcctcctcgcctctttgcctgctccaacaagattggacgttttgtgatcgaagaggttcctggtgagctcatgcaggaagacctggcaacggatgacgtcatgcttctggacacctgggaccaggtctttgtctgggttggaaaggattctcaagaagaagaaaagacagaagccttgacttctgctaagcggtacatcgagacggacccagccaatcgggatcggcggacgcccatcaccgtggtgaagcaaggctttgagcctccctcctttgtgggctggttccttggctgggatgatgattactggtctgtggaccccttggacagggccatggctgagctggctgcctgaggaggggcagggcccacccatgtcaccggtcagtgccttttggaactgtccttccctcaaagaggccttagagcgagcagagcagctctgctatgagtgtgtgtgtgtgtgtgtgttgtttcttttttttttttttacagtatccaaaaatagccctgcaaaaattcagagtccttgcaaaattgtctaaaatgtcagtgtttgggaaattaaatccaataaaaacattttgaagtgtg

SEQ ID NO: 290769 - DNA, 2726 bp, Artificial Sequence
  derived and/or modified sequence
tcccgcccgcgccctgcccaccccggccgcgcgcaccacaacgcccccgccccgccgcccggaaccagctgagcgcagctggacccagcagccgctgtctccagtgccgcagcagcaggtagtgctcatagctctctttgtccagtgcttcggccttggtcccagcgccttcccacggagcagcactcttcaccctgcacagccttgttagttcttgcagatacagcgctaggaaaaggggagtaattcaggtctagaatggaaaaactgttttgttgctttcccaacagcatggtggtggaacaccccgagttcctcaaggcagggaaggagcctggcctgcagatctggcgtgtggagaagttcgatctggtgcccgtgcccaccaacctttatggagacttcttcacgggcgacgcctacgtcatcctgaagacagtgcagctgaggaacggaaatctgcagtatgacctccactactggctgggcaatgagtgcagccaggatgagagcggggcggccgccatctttaccgtgcagctggatgactacctgaacggccgggccgtgcagcaccgtgaggtccagggcttcgagtcggccaccttcctaggctacttcaagtctggcctgaagtacaagaaaggaggtgtggcatcaggattcaagcacgtggtacccaacgaggtggtggtgcagagactcttccaggtcaaagggcggcgtgtggtccgtgccaccgaggtacctgtgtcctgggagagcttcaacaatggcgactgcttcatcctggacctgggcaacaacatccaccagtggtgtggttccaacagcaatcggtatgaaagactgaaggccacacaggtgtccaagggcatccgggacaacgagcggagtggccgggcccgagtgcacgtgtctgaggagggcactgagcccgaggcgatgctccaggtgctgggccccaagccggctctgcctgcaggtaccgaggacaccgccaaggaggatgcggccaaccgcaagctggccaagctctacaaggtctccaatggtgcagggaccatgtccgtctccctcgtggctgatgagaaccccttcgcccagggggccctgaagtcagaggactgcttcatcctggaccacggcaaagatgggaaaatctttgtctggaaaggcaagcaggcaaacacggaggagaggaaggctgccctcaaaacagcctctgacttcatcaccaagatggactaccccaagcagactcaggtctcggtccttcctgagggcggtgagaccccactgttcaagcagttcttcaagaactggcgggacccagaccagacagatggcctgggcttgtcctacctttccagccatatcgccaacgtggagcgggtgcccttcgacgccgccaccctgcacacctccactgccatggccgcccagcacggcatggatgacgatggcacaggccagaaacagatctggagaatcgaaggttccaacaaggtgcccgtggaccctgccacatatggacagttctatggaggcgacagctacatcattctgtacaactaccgccatggtggccgccaggggcagataatctataactggcagggtgcccagtctacccaggatgaggtcgctgcatctgccatcctgactgctcagctggatgaggagctgggaggtacccctgtccagagccgtgtggtccaaggcaaggagcccgcccacctcatgagcctgtttggtgggaagcccatgatcatctacaagggcggcacctcccgcgagggcgggcagacagcccctgccagcacccgcctcttccaggtccgcgccaacagcgctggagccacccgggctgttgaggtattgcctaaggctggtgcactgaactccaacgatgcctttgttctgaaaaccccctcagccgcctacctgtgggtgggtacaggagccagcgaggcagagaagacgggggcccaggagctgctcagggtgctgcgggcccaacctgtgcaggtggcagaaggcagcgagccagatggcttctgggaggccctgggcgggaaggctgcctaccgcacatccccacggctgaaggacaagaagatggatgcccatcctcctcgcctctttgcctgctccaacaagattggacgttttgtgatcgaagaggttcctggtgagctcatgcaggaagacctggcaacggatgacgtcatgcttctggacacctgggaccaggtctttgtctgggttggaaaggattctcaagaagaagaaaagacagaagccttgacttctgctaagcggtacatcgagacggacccagccaatcgggatcggcggacgcccatcaccgtggtgaagcaaggctttgagcctccctcctttgtgggctggttccttggctgggatgatgattactggtctgtggaccccttggacagggccatggctgagctggctgcctgaggaggggcagggcccacccatgtcaccggtcagtgccttttggaactgtccttccctcaaagaggccttagagcgagcagagcagctctgctatgagtgtgtgtgtgtgtgtgtgttgtttcttttttttttttttacagtatccaaaaatagccctgcaaaaattcagagtccttgcaaaattgtctaaaatgtcagtgtttgggaaattaaatccaataaaaacattttgaagtgtg

SEQ ID NO: 290770 - DNA, 2453 bp, Artificial Sequence
  derived and/or modified sequence
agctggacccagcagccgctgtctccagtgccgcagcagcaggtagtgctcatagctctctttgtccagtgcttcggccttggtcccagcgccttcccacggagcagcactcttcaccctgcacagccttgttagcatggtggtggaacaccccgagttcctcaaggcagggaaggagcctggcctgcagatctggcgtgtggagaagttcgatctggtgcccgtgcccaccaacctttatggagacttcttcacgggcgacgcctacgtcatcctgaagacagtgcagctgaggaacggaaatctgcagtatgacctccactactggctgggcaatgagtgcagccaggatgagagcggggcggccgccatctttaccgtgcagctggatgactacctgaagtacaagaaaggaggtgtggcatcaggattcaagcacgtggtacccaacgaggtggtggtgcagagactcttccaggtcaaagggcggcgtgtggtccgtgccaccgaggtacctgtgtcctgggagagcttcaacaatggcgactgcttcatcctggacctgggcaacaacatccaccagtggtgtggttccaacagcaatcggtatgaaagactgaaggccacacaggtgtccaagggcatccgggacaacgagcggagtggccgggcccgagtgcacgtgtctgaggagggcactgagcccgaggcgatgctccaggtgctgggccccaagccggctctgcctgcaggtaccgaggacaccgccaaggaggatgcggccaaccgcaagctggccaagctctacaaggtctccaatggtgcagggaccatgtccgtctccctcgtggctgatgagaaccccttcgcccagggggccctgaagtcagaggactgcttcatcctggaccacggcaaagatgggaaaatctttgtctggaaaggcaagcaggcaaacacggaggagaggaaggctgccctcaaaacagcctctgacttcatcaccaagatggactaccccaagcagactcaggtctcggtccttcctgagggcggtgagaccccactgttcaagcagttcttcaagaactggcgggacccagaccagacagatggcctgggcttgtcctacctttccagccatatcgccaacgtggagcgggtgcccttcgacgccgccaccctgcacacctccactgccatggccgcccagcacggcatggatgacgatggcacaggccagaaacagatctggagaatcgaaggttccaacaaggtgcccgtggaccctgccacatatggacagttctatggaggcgacagctacatcattctgtacaactaccgccatggtggccgccaggggcagataatctataactggcagggtgcccagtctacccaggatgaggtcgctgcatctgccatcctgactgctcagctggatgaggagctgggaggtacccctgtccagagccgtgtggtccaaggcaaggagcccgcccacctcatgagcctgtttggtgggaagcccatgatcatctacaagggcggcacctcccgcgagggcgggcagacagcccctgccagcacccgcctcttccaggtccgcgccaacagcgctggagccacccgggctgttgaggtattgcctaaggctggtgcactgaactccaacgatgcctttgttctgaaaaccccctcagccgcctacctgtgggtgggtacaggagccagcgaggcagagaagacgggggcccaggagctgctcagggtgctgcgggcccaacctgtgcaggtggcagaaggcagcgagccagatggcttctgggaggccctgggcgggaaggctgcctaccgcacatccccacggctgaaggacaagaagatggatgcccatcctcctcgcctctttgcctgctccaacaagattggacgttttgtgatcgaagaggttcctggtgagctcatgcaggaagacctggcaacggatgacgtcatgcttctggacacctgggaccaggtctttgtctgggttggaaaggattctcaagaagaagaaaagacagaagccttgacttctgctaagcggtacatcgagacggacccagccaatcgggatcggcggacgcccatcaccgtggtgaagcaaggctttgagcctccctcctttgtgggctggttccttggctgggatgatgattactggtctgtggaccccttggacagggccatggctgagctggctgcctgaggaggggcagggcccacccatgtcaccggtcagtgccttttggaactgtccttccctcaaagaggccttagagcgagcagagcagctctgctatgagtgtgtgtgtgtgtgtgtgttgtttcttttttttttttttacagtatccaaaaatagccctgcaaaaattcagagtccttgcaaaattgtctaaaatgtcagt

SEQ ID NO: 290771 - DNA, 2229 bp, Artificial Sequence
  derived and/or modified sequence
atggagaagctgttctgctgcttccccaacagcatggtggtggagcaccctgagttcctgaaggccggcaaggagcccggcctgcagatctggagggtggagaagtttgacctggtgcctgtgcccaccaacctgtatggagacttcttcaccggagatgcctacgtgatcctgaagacagtgcagctgagaaatggaaacctgcagtatgacctgcactactggctgggcaatgaatgttcccaggatgaaagtggagctgctgccatcttcaccgtgcagctggatgactacctgaatggccgggctgtgcagcaccgggaggtgcagggctttgagagcgccaccttcctgggctacttcaagagcggcctgaagtacaagaagggcggcgtggccagcggcttcaagcacgtggtgcccaatgaggtggtggtgcagaggctcttccaggtgaagggcagaagagtggtgcgggccacagaggtgcctgtgtcctgggagagcttcaacaacggggactgcttcatcctggacctgggcaacaacatccaccagtggtgtggcagcaacagcaacagatatgagcggctgaaggccacccaggtgtccaagggcatccgggacaatgaaagaagtggccgggcccgggtgcacgtgtctgaggagggcacagagcctgaggccatgctgcaggtgctgggccccaagccagccctgcctgctggaacagaggacacagccaaggaggatgctgccaacaggaagctggccaagctgtacaaggtgtccaatggagctggcaccatgtctgtgtccctggtggctgatgagaacccctttgcccagggcgccctgaagtctgaggactgcttcatcctggaccacggcaaggatggcaagatctttgtgtggaagggcaagcaggccaacacagaggagaggaaggccgccctgaagacagccagtgacttcatcaccaagatggactaccccaagcagacccaggtgtctgtgctgcctgagggcggggagacccccctcttcaagcagttcttcaagaactggagggaccctgaccagacagatggcctgggcctgagctacctgagcagccacatcgccaacgtggagcgggtgccctttgatgctgccaccctgcacaccagcacagccatggccgcccagcacggcatggatgatgatggcaccggccagaagcagatctggagaattgagggcagcaacaaggtgcctgtggaccctgccacctacggccagttctatggaggagacagctacatcatcctgtacaactaccgccacggcggccggcagggccagatcatctacaactggcagggcgcccagagcacccaggatgaggtggccgccagcgccatcctgacagcccagctggatgaggagctgggcggcacccctgtgcagagccgggtggtgcagggcaaggagcccgcccacctgatgagcctgtttggaggcaagcccatgatcatctacaagggcggcaccagccgggagggcggccagacagccccagccagcaccaggctcttccaggtgcgggccaacagcgctggggccaccagggctgtggaggtgctgcccaaggccggggccctgaacagcaatgatgcctttgtgctgaagacccccagcgctgcctacctgtgggtgggcaccggggccagcgaggccgagaagacaggagcccaggagctgctgcgggtgctgcgggcccagcctgtgcaggtggccgagggcagcgagccagatggcttctgggaggccctgggcggcaaggccgcctaccgcaccagcccccggctgaaggacaagaagatggatgcccaccccccccggctgtttgcctgcagcaacaagattggccgctttgtgattgaggaggtgcctggagagctgatgcaggaggacctggccacagatgatgtgatgctgctggacacctgggaccaggtgtttgtgtgggtgggcaaggacagccaggaggaggagaagacagaggccctgaccagcgccaagcgctacattgaaacagatcctgccaacagagacaggaggacccccatcaccgtggtgaagcagggctttgagcccccatcctttgtgggctggttcctgggctgggatgatgactactggagcgtggaccccctggaccgggccatggccgagctggccgcctag

SEQ ID NO: 290772 - DNA, 2229 bp, Artificial Sequence
  derived and/or modified sequence
atggagaagctgttctgctgcttccccaacagcatggtggtggagcaccccgagtttctgaaggctgggaaggagccagggctgcagatctggcgggttgagaagtttgacttggtgccagttcctaccaatctgtacggggattttttcaccggagatgcatacgtgatattgaagacggtgcagcttaggaatggaaacttgcaatatgacctccactattggctcgggaatgagtgtagccaggacgagtctggcgctgcagcgatctttacagttcagctggatgattatttgaatggtcgggctgtgcagcatcgtgaagttcagggctttgaatcggccacttttctgggatacttcaaatctggattaaagtacaagaaagggggcgtggccagcggcttcaaacatgtcgttcccaacgaagttgtggtccaaagactgttccaagttaagggaaggagggtcgttagagcaacagaagtccccgtttcctgggagtcttttaacaacggcgactgcttcatcttagacctcggcaacaacatccaccaatggtgcgggtctaatagcaaccggtacgaacgcttgaaagcaacacaagttagtaagggaattagagacaacgagagatccgggagggcccgcgtgcatgtttcagaggaaggcaccgaaccggaggctatgctacaggttctgggcccaaagcccgccctgcccgccggcaccgaagacacggcgaaagaggacgccgccaatagaaaactggccaaattatataaggtcagtaatggggccgggacgatgagcgtctctctcgtagccgacgagaatcctttcgcacaaggcgcgctgaagtccgaggactgctttattcttgaccacggcaaagacggaaagatcttcgtgtggaaagggaaacaggccaacactgaagaaaggaaagctgcactgaaaactgctagcgatttcatcaccaagatggattaccccaaacaaacccaggtgtctgtgcttcctgagggcggggaaacacctctctttaaacagttctttaaaaattggcgagacccggaccagaccgatggcctgggcctgtcgtatctgagttcgcacatcgccaatgtcgaaagagtaccattcgacgccgccacgctgcacacaagtaccgcaatggccgcacagcacggaatggatgacgatggaacagggcaaaaacagatctggcggatcgagggctctaataaggtcccagttgaccccgccacatatggccagttctacgggggcgattcctacatcatcttatacaattatagacacggcggtagacaaggccagatcatctacaattggcagggcgcacagtccacccaggatgaagtggccgcctccgccatcctgaccgcacaattagacgaagaactgggaggcacccctgtgcaatccagggtcgtccagggaaaggagcccgcccacctgatgtctctgttcggtggtaagccaatgataatatacaagggcggaacctcacgggaggggggacaaactgcccctgcaagcactcgattgtttcaggtgagggcaaattctgccggcgctacccgggccgtggaagtgctgccaaaagccggggcgttgaactccaacgatgcatttgtgctcaaaacacctagcgcagcatacttatgggttggcacaggcgcatccgaggccgagaagactggagctcaggaattgctgcgggttctgagagcacagcccgtgcaggtggcggaggggtccgagcccgatggtttctgggaggctcttggcggcaaggctgcctatcggacctcaccccgactgaaggacaagaagatggacgcacaccctcccagattgtttgcctgctctaacaaaatcggacggtttgtcatcgaggaagtgcccggagagctaatgcaagaagatttggccaccgatgatgtcatgctgctcgacacttgggatcaggttttcgtttgggtgggtaaggactctcaggaggaggaaaaaacagaagctctaacctccgctaaacggtatatagagactgatccagcaaacagggaccgaagaacacccattacagtcgtcaagcaggggtttgagccccccagtttcgtgggctggtttctaggttgggatgatgattactggtccgtcgatcccttggatagagcaatggcagaactcgcggcatag

SEQ ID NO: 290773 - DNA, 2229 bp, Artificial Sequence
  derived and/or modified sequence
atggagaagctgttctgctgcttccccaacagcatggtggtggagcatcctgagtttctcaaagccggcaaggagccagggctgcaaatttggcgggtcgagaagttcgacctggtaccagttccaacgaatttatatggcgatttttttacaggtgatgcttatgtgatcctgaagactgtccagctgcgcaatggaaacttgcagtatgacttgcactactggctgggtaacgaatgctcccaggacgagagcggcgctgccgcgatcttcactgttcagcttgatgactacctgaacgggagggcagttcagcaccgggaagtgcaaggtttcgagtccgccacatttctcggctacttcaagtcaggcctgaaatacaaaaaaggaggggtggcaagcggcttcaaacatgtggtccccaatgaagtcgtggtgcagcgtctgttccaggttaaaggtcgccgcgtcgtgagggccacagaggtcccagtttcttgggaatctttcaacaacggggattgttttattctcgatttggggaataacatccaccaatggtgtgggagcaatagcaataggtatgagagactgaaggctactcaggtgtctaaggggattcgcgacaacgagcgaagtgggcgcgcccgcgtccatgtgagcgaagagggaaccgagcccgaagcaatgctccaggtgctgggaccgaagccagcactgcccgctggtaccgaggatacagccaaagaggacgcggctaaccggaaactggccaagctttataaggttagcaatggtgccggcactatgtctgtgtctcttgtggccgatgagaatccttttgcgcagggcgccttaaagtcggaagactgtttcatcctggatcatggaaaggatggtaagatattcgtgtggaaggggaagcaggccaatacagaggagagaaaggccgccctcaaaacagcctccgactttatcactaaaatggactacccgaagcagactcaggtgtctgttctgccagaggggggcgaaacccctttgttcaaacagttttttaagaactggagagatcccgatcaaactgacggcctagggctctcctaccttagttctcacatcgccaacgtcgagcgagtcccgttcgatgcggctacccttcacacgtccacagccatggcggcccagcatggaatggacgacgatggaactgggcagaagcagatctggcgcatcgagggttcaaataaggttccggtggaccccgcaacatatgggcaattctatgggggtgactcatacatcatcctgtacaactacagacacggtggccgtcagggccagatcatatataattggcagggtgcccagagcactcaggacgaggttgctgcgtctgctatcttgacagcccagctggacgaagagctgggcgggacgcctgtgcagtccagggtggtgcaggggaaagaaccagctcatctgatgtctctgttcggcggcaagcccatgattatttacaaaggaggcaccagcagggagggcggacagactgctccagcttcaacgcgattattccaggtccgagcaaactccgcaggcgccacacgagccgttgaggttctcccaaaagcaggagctttaaactctaacgatgcattcgtgctgaagacaccctcagccgcctatctttgggtcgggacaggcgcatcagaagccgagaaaactggggcccaggaactcctcagggtcctcagggcccaacctgtccaagtggccgagggctccgaacccgatgggttctgggaggccctgggaggaaaggctgcctataggacttcaccacggctgaaagacaaaaagatggatgcccatccaccacgactgtttgcttgctcaaacaaaataggcagattcgtgattgaagaagtcccaggcgagttgatgcaagaagatctcgccactgatgatgtgatgctcctggacacttgggatcaggtgttcgtatgggtcggcaaggattcgcaagaggaggaaaagactgaggcgctgacatctgctaagcgctacatcgagactgaccctgcaaatagggatagaaggacgcctataacagtcgtgaaacagggattcgaacctccatcatttgtggggtggtttttgggctgggatgacgactactggtccgttgacccgctggatcgagctatggccgagctggcggcatag

SEQ ID NO: 290774 - DNA, 2229 bp, Artificial Sequence
  derived and/or modified sequence
atggagaagctgttttgctgttttcctaattcaatggtggtcgagcatcctgagttccttaaggccggaaaagagcccggactacagatttggagagtggagaaatttgatcttgtgcctgtccccacaaatctctatggcgatttctttacaggagacgcctacgtcatcttaaaaacagtccagctcagaaacggaaacctccagtacgacctgcattattggttaggtaacgaatgcagccaagacgagtcaggcgctgcggctatctttaccgtgcagctcgatgattacttgaacggccgtgccgttcagcacagggaggtgcaggggtttgagagcgcaacgttcctggggtactttaagtctggtttaaagtacaagaaaggtggcgtggcatcagggttcaagcacgtcgtcccgaatgaagtggtggtgcagcgcttgttccaagtaaaggggagaagagtggtgcgcgcaaccgaagtgcccgtgtcttgggaaagtttcaataacggagattgctttatactagacctaggcaacaatattcaccagtggtgcggttctaattccaaccggtatgagagactcaaagcgacacaggtgagtaagggcataagagataacgaacgctccggccgtgcacgtgtccacgtgagcgaggaagggacggagcctgaggccatgctgcaagttctggggcctaagcctgctttgcctgcgggaactgaagatacggctaaagaagacgccgctaacagaaagttggccaagctgtacaaagtgagtaatggagcaggtaccatgtcagtcagcttggtggcagacgaaaatccttttgctcagggagccctaaaaagcgaggattgttttattctcgaccatggtaaggacggcaaaatctttgtgtggaaggggaagcaggccaacacagaggaaagaaaagccgcactcaagacggcatcagatttcattactaagatggattaccctaaacagacccaggtgagcgttctcccagaaggcggagagactcccttgtttaaacagtttttcaagaattggcgagaccccgaccagacggatgggttggggctctcctacctcagctcccacattgcaaatgtggagagagtgcccttcgatgccgcaacacttcacacatcaacagcaatggcagctcaacatgggatggacgacgacggtacaggacagaagcagatctggcggattgagggttcaaataaggtccccgtggaccccgctacctatggccaattttatggcggagactcatatatcattttatacaattatcgacacgggggtagacaaggacagatcatttataactggcaaggggctcaatccacacaagacgaggtagccgcttcggctatacttacggcacagctggatgaggaactggggggaactccagtgcagtccagagtggtgcaaggaaaggagccagcccatctcatgtccctgtttggcggaaagcccatgattatttacaagggtgggactagccgcgaggggggacagaccgccccagcatccacccggctctttcaggtgcgagccaatagcgctggcgctactagggccgtcgaggtcctcccgaaggccggagctctgaactccaatgacgccttcgtcctgaaaacccctagtgcagcttacttgtgggtcggtaccggcgcttctgaggcggagaaaaccggcgctcaggagttactacgcgtactcagagcccagccggttcaggtggccgaaggtagtgaaccagatggcttttgggaagccttggggggtaaggctgcttacagaacaagtccacgtcttaaagacaaaaagatggacgctcatccgccacgccttttcgcttgcagtaacaaaattggacggttcgtaatcgaggaggtaccaggagagctgatgcaagaagacctcgcaactgatgatgtgatgctgctcgacacttgggaccaagtgttcgtgtgggttggcaaagacagtcaggaagaggagaaaaccgaggcgctgacctccgcaaagcgctatattgaaactgaccctgctaacagggatcggagaacaccgattacagtggtgaagcagggctttgagccaccatcattcgtcggttggtttctgggatgggacgacgattactggtccgtggaccctctagacagagccatggccgaacttgctgcttag

SEQ ID NO: 290775 - DNA, 2229 bp, Artificial Sequence
  derived and/or modified sequence
atggagaaacttttttgttgtttcccgaatagcatggtggttgagcacccagagtttctgaaagccggaaaggagccaggacttcagatttggagagtcgaaaaatttgacttagttccagtaccaacaaacctgtacggcgatttcttcactggtgatgcttacgtgatcctgaaaaccgtacagctgcgaaatgggaatctgcaatacgaccttcactactggctgggtaacgagtgttcccaggatgagtctggtgcggcagcaatctttacggtgcagctagacgattatctaaatggtcgggctgtgcaacacagagaagtccagggatttgaatctgctacatttctgggatacttcaagtctggcctcaagtacaaaaaaggcggtgtcgcttctggattcaagcacgtcgtgcctaatgaggtcgtggtgcagcgcctttttcaggtgaaagggaggcgggtcgtgagagctaccgaggtccctgtctcctgggaatcatttaacaacggcgattgctttatactggaccttggaaataacattcatcagtggtgcggctccaactctaatagatacgagcgactgaaggcaacccaggttagtaagggcattcgagacaatgaacgaagcggaagggcccgagtacatgtgtcagaagagggcactgaacccgaagctatgttacaggtgctcgggccaaagcctgccctgcccgcaggcacggaagacactgcaaaagaggatgctgccaataggaagcttgctaagttgtacaaggtaagcaacggcgctggcacaatgtccgttagtctcgtggcagatgagaatccctttgcgcagggtgccctcaaatccgaggattgcttcatactggatcatggtaaagatgggaagatcttcgtgtggaaaggaaagcaagcaaatacagaggagcggaaagcagcactcaagaccgcctcagacttcattaccaaaatggattaccctaaacagacgcaagtgtccgttttacctgaggggggtgagactccccttttcaagcagttttttaaaaattggcgagatccagaccaaacagacggattgggtctcagctatctgtcctcccatatcgccaacgtagaaagagtgccattcgacgctgctacgttgcacacaagtaccgccatggctgcccagcatggtatggatgatgacggcaccgggcaaaaacaaatctggagaattgaaggaagcaacaaggttccagtggatccggcaacatatggccagttttacggaggcgattcttacattatactgtacaattacaggcatggtgggaggcaggggcaaatcatttacaattggcagggcgctcagagtactcaggacgaagtcgctgctagtgctatcctgacagctcagcttgacgaagaactaggcggtacaccggtccaaagccgggttgtccaaggtaaggagcccgctcacctcatgtccctcttcggcggaaagccgatgattatctataagggaggcacgtccagggagggcggtcagacagcacctgcaagtacccgtctgttccaggtgagagcaaactctgcaggggctactagggcagtggaggtgctcccaaaagctggagcccttaattccaatgacgcgttcgtcctaaaaacgccaagcgctgcctatctgtgggtcggtacaggggcttctgaagctgagaaaacaggtgctcaggagcttctgcgagtgctgcgggctcagccagtacaggttgccgagggctctgagcccgatgggttctgggaggcactgggaggcaaggctgcgtacaggacgtctccgagattaaaggataagaagatggatgcacatcccccacgcctatttgcgtgttccaacaagatcggaagattcgtaatcgaagaggtgccaggtgaacttatgcaggaggatctcgccacagacgacgttatgctcctcgacacttgggaccaggtttttgtgtgggtgggtaaagactcacaggaagaggagaagaccgaagccctgacgtccgccaaacggtacattgagaccgatcctgctaaccgtgatcgcaggacccccattaccgtggtcaagcaggggtttgaaccaccgtcatttgtcggctggttcctggggtgggacgacgactactggtcagtggaccctctggatcgagctatggcagaactggctgcttag

SEQ ID NO: 290776 - DNA, 2229 bp, Artificial Sequence
  derived and/or modified sequence
atggagaaactgttctgctgcttcccgaacagcatggtagttgagcatccagagtttctaaaggcagggaaggaacccgggttgcagatctggcgcgtggaaaagtttgatctggtcccagtccccaccaacctctatggcgacttttttacaggggatgcgtacgttattctcaaaacagttcagctgcgtaatgggaacttgcagtatgatctccactattggctggggaatgagtgcagtcaggatgagtctggcgccgccgctatctttaccgtgcagctggatgactatttaaacggcagagctgtgcagcatcgagaagtgcaaggtttcgagagcgcgacatttttggggtactttaagtcgggactgaagtataaaaagggtggagtcgcttccggtttcaagcatgtcgtgccaaatgaggtagtggtccaacgcctgttccaggtgaaaggtagaagagtggtaagggcaactgaagttccggtatcatgggaaagctttaataatggagactgcttcattttggacctggggaacaacattcatcagtggtgcggcagtaatagcaatcgctacgaacgtctcaaagccacacaggtctctaagggaattagagataacgagaggagcggaagagcacgtgtgcacgtttctgaggagggtaccgaacccgaggccatgctgcaggtactgggtccgaagccagccctccccgccggaaccgaagataccgctaaggaagatgcggctaatcggaagctggcaaaattgtacaaggttagtaatggggcagggacaatgagcgtcagcctcgtcgccgatgaaaaccctttcgcccagggcgcactcaagagcgaagattgttttatcctcgaccacggaaaagatggcaaaatatttgtctggaaggggaaacaagccaataccgaggaacggaaggcggcattaaaaacagcttccgatttcattactaagatggattatccaaagcagactcaagtcagtgtactccctgagggtggggaaacgcctcttttcaagcagttcttcaaaaattggagagaccctgatcagaccgacggtctggggctgtcctatctctcatcccatatagcgaacgtcgagcgcgttcccttcgatgccgccaccctgcacactagcaccgcaatggccgctcagcacggaatggacgatgacggcaccggacagaaacagatctggagaattgagggcagcaacaaggtgccagtggatcctgccacctacggtcaattctatgggggggacagctatatcatcctgtataactaccggcatggcggtcggcaaggccaaattatttataactggcagggtgcccagtctacacaagacgaagtcgcagcctctgcaattctaactgcccaactcgacgaggaattgggcggaacccctgttcagtctagagttgtgcaggggaaggagcccgcacatctgatgagtctgttcgggggcaagccgatgatcatttataaagggggtacatctcgggagggaggccaaaccgctcccgccagcacacgcctctttcaagtgcgcgccaactccgccggtgcaactcgagccgttgaggttctcccaaaggccggcgcactgaattccaatgacgctttcgttttaaagacgcccagcgcagcttatttgtgggtgggaactggcgcttctgaagccgaaaaaacgggtgcacaggagttgctgcgtgtgctccgcgcccaacccgtgcaggtcgccgagggctcggaaccagacggcttctgggaagcattaggcgggaaagctgcttataggactagcccgagactaaaagataaaaagatggacgctcatccacctagactcttcgcttgttccaacaagatcggtcggtttgtcattgaagaagtccccggggagcttatgcaggaagatctcgcaacagatgatgtgatgctgctggacacatgggatcaagttttcgtctgggtaggcaaagatagtcaggaagaagagaagacggaagcactgacgtctgcgaagagatatattgaaaccgaccccgctaaccgcgacaggaggactcccattaccgtggtgaaacagggatttgagccaccctcattcgtcggctggtttctgggatgggacgacgactattggagtgttgatccccttgacagagccatggccgagttagccgcctag

SEQ ID NO: 290777 - DNA, 2229 bp, Artificial Sequence
  derived and/or modified sequence
atggagaaactgttttgttgcttccccaactcaatggtcgttgagcacccagagttcctcaaagccggaaaggagccaggactgcaaatttggagggttgagaagttcgacctcgttccagtgcctacaaatctttacggggatttctttaccggggacgcctacgtgatcttaaaaaccgtccagcttcgaaacggaaaccttcagtatgacttgcattactggcttggcaacgaatgctcacaggatgagtctggtgccgctgctatttttacagtacaactagacgattatctgaatggccgggccgtgcagcatagggaggtgcaaggattcgagtctgccacttttctaggttattttaagagcggactaaagtacaaaaagggcggagtggctagcggtttcaagcacgtagtgccaaatgaggtcgttgtgcagcgtttattccaggtcaagggcagaagagtggtacgagccacggaggtccccgtttcctgggagtcatttaacaacggagattgttttattctagacctcggaaacaacatccatcagtggtgcggaagcaattccaacagatacgaaaggctcaaagcaacacaagtttcgaaaggaatcagagacaacgaacgcagtggacgggcgcgtgtccacgtgagcgaggaaggtaccgagcccgaggctatgctgcaggtcctaggtcccaagcctgcgttacctgcgggaacagaggatacggcgaaggaggatgccgccaaccgtaagctcgctaaactgtacaaggtttcgaatggcgcaggtacgatgtccgtcagtctagtagcggacgaaaaccctttcgcccagggcgcattgaaatccgaggattgcttcattctggaccacggaaaagacggcaaaattttcgtctggaaggggaagcaggctaatacagaggaaaggaaagctgccctcaagactgccagtgactttattaccaaaatggactaccctaaacagactcaggtcagcgtactgccagaaggcggtgaaacacccctcttcaagcagtttttcaaaaattggcgggatccagatcagactgacggtttaggcctctcctacctcagctctcacattgccaacgtcgagagggttcccttcgacgcagccacattacatacctcaaccgcgatggcagctcagcacggcatggatgacgacggtacagggcagaaacagatctggcgtatcgaaggatcgaacaaggttcccgtggaccctgcgacatacggacaattctatggaggcgatagctacattatcttgtataattatcggcacggggggagacaaggtcagatcatctataactggcagggggctcagagcacacaggatgaagtcgccgctagcgcaatccttacagcccagctggacgaagaacttggcggcacaccggtgcaatctagggtggtccagggtaaggaacccgcacacctcatgtctctatttggtggtaagcccatgatcatctataagggcggcaccagccgagagggcggacagacagcacctgcatctactagactattccaggtgcgggccaactccgcgggagccacccgtgccgtagaggtgctgcccaaggccggagcattgaactccaacgacgcattcgttctcaagaccccctccgccgcatacttgtgggtcggaaccggggcatcagaggccgagaagacaggcgcccaggaacttctgcgggtactgcgcgcccagccagtgcaagtggccgagggatcagagccagacggcttttgggaagctcttgggggtaaagccgcgtacaggacttcaccacgattgaaagacaaaaagatggacgcccatcctcccagattatttgcatgctccaataagatcggaaggttcgtaatcgaggaggtacctggggagctcatgcaagaggatctggcaacggatgatgtgatgttactagacacttgggaccaagtattcgtgtgggtgggcaaggacagccaagaagaagaaaaaacagaagcactgacctctgctaagagatatattgaaacggaccctgcgaatcgagaccgtaggacccccattactgttgtgaagcagggttttgagccaccctcattcgtcgggtggttcctggggtgggacgacgactactggtccgtggatcccctcgacagagcgatggctgagctcgcagcctag

SEQ ID NO: 290778 - DNA, 2229 bp, Artificial Sequence
  derived and/or modified sequence
atggagaaactgttctgctgctttcccaactcaatggtcgtggagcacccagagttcctgaaagctgggaaggagccaggactgcaaatatggcgtgttgagaaatttgatttagttcccgtcccaacgaatctttatggcgattttttcaccggcgatgcatacgtgattttgaaaacagtgcaactgcgtaatggtaacttgcagtacgacctgcactactggctaggaaacgagtgtagccaagacgagtccggcgccgcagccatttttaccgtacaattagacgactacctcaatgggcgcgcagtccaacacagagaggtgcaggggtttgagagtgcaacgttcctaggatatttcaagagtggactcaaatataagaaaggaggagttgctagcggttttaagcatgttgtgcccaacgaggtggtcgtgcagcggttgtttcaggttaaaggccgcagggtggtgcgtgcaactgaggtgccggtcagctgggaatcctttaataacggtgattgttttattctagatttagggaataacatccatcagtggtgtggcagtaactccaacagatacgagcgtttgaaggccacacaggtctcgaagggtattagagataatgagagatccggccgcgcaagagtacacgtgtcagaagaaggcactgaacccgaagccatgctgcaggtactggggcctaaaccagctctccccgctggcaccgaagacacagccaaggaagacgccgccaacagaaaactggccaagctgtacaaggtatctaacggcgccgggactatgtctgtgtcgctggtcgctgatgaaaatccgttcgcgcagggtgctctgaagtctgaggattgcttcatcctggatcatggaaaagatgggaaaatctttgtttggaaagggaaacaggctaacacagaggaaagaaaggcagcacttaaaaccgcaagcgacttcattaccaagatggactaccctaaacaaacacaagtatccgttctccctgaggggggcgagacgcctttattcaaacagttttttaaaaattggagggacccagaccaaaccgatggactcggcctcagctacttgtcttcacatattgctaatgtggaacgggtcccgttcgatgccgccacgctgcacacctcaaccgccatggccgcccagcacgggatggatgatgatggtacgggtcaaaaacaaatttggagaattgagggcagtaacaaagtacccgtcgaccccgcaacatatgggcagttctacggcggagacagctacattatcttatacaactaccgacatggcggcagacagggccaaattatttacaactggcagggcgcccagtcaacccaggatgaagtcgccgccagcgcgatcttgaccgctcagcttgacgaggaattggggggaacgcccgtgcaaagccgcgtggtccagggaaaggagcccgcccacctgatgagtctgttcggcggtaagccaatgattatctataaagggggcacttcgagggagggggggcaaacagccccagcttctaccagactgttccaggttagagcaaattccgccggggctactagggcagtggaggtcctgccgaaagctggggctctaaactcaaacgatgcatttgtgcttaaaacaccatctgcggcatatttatgggtcggcactggggctagcgaagccgagaagacgggtgctcaggaactcttgagggtcttacgagcccagcctgtacaagttgcggagggcagtgagcccgatggtttttgggaggcgttaggcggcaaagcggcttataggacttcgcctagacttaaggacaagaaaatggacgctcatcccccaagactcttcgcatgctccaacaagatcggacgatttgtaatcgaggaagtgccgggagagttaatgcaagaagacttagcgacagatgatgtgatgctgctggacacctgggaccaagtttttgtgtgggtgggtaaggactctcaggaggaagagaagactgaggccctgacaagtgctaagagatacattgaaacagatcctgcaaatagagatagacgtacaccgattacagtggtgaagcagggttttgaacccccctcttttgttggatggttcctaggctgggatgatgactattggtcagttgatcctttggacagggctatggccgagcttgcggcatag

SEQ ID NO: 290779 - DNA, 2229 bp, Artificial Sequence
  derived and/or modified sequence
atggagaagctgttctgttgctttcctaatagcatggttgtggagcatcctgaatttctcaaggccgggaaggagcctggactgcagatatggagagtggaaaaattcgacctcgtcccagtacccactaatctttatggggacttcttcacaggtgatgcatatgtcatcctcaagactgtgcagctgagaaatggcaatttacagtacgacttacactactggttaggaaatgagtgttcccaggatgaatcaggggccgccgcaatttttaccgtacagctggacgattacttgaatgggagagccgtccagcatcgcgaagtccagggtttcgagtccgccacctttctgggctactttaaatctggtctgaaatacaagaaaggcggggtcgcaagcgggttcaaacacgttgtccctaatgaagtggtagtccaaagattattccaagtgaaaggacggagagtcgtgagggccacagaggttcccgtgtcctgggaaagtttcaataacggagattgctttatccttgacctaggaaataatatacaccagtggtgcggatccaacagcaatcggtacgaaaggctcaaggccacacaagtatccaaaggcattagggataacgaaagaagtggacgcgctagagtccacgtgtccgaagaaggtacggagccagaggccatgctccaggtacttggacctaaacccgcactccctgcaggcaccgaagacactgccaaagaggacgcagcaaatagaaagcttgccaagctctacaaggtctctaatggtgcaggaactatgagcgttagcctcgtcgccgacgaaaatccttttgcccagggagccctcaagtcagaagactgtttcatcctcgatcacggcaaagacggaaagattttcgtctggaagggaaagcaagccaacaccgaggaacgcaaagccgccttaaaaaccgctagcgactttatcactaagatggactatcccaagcagacccaggtttccgtcctgcccgagggcggagagacacccctatttaagcagttctttaaaaactggcgggacccagatcagactgacgggctcggcctctcatatttatcatcacatatcgctaacgtggaacgggttccttttgacgcagccacactccacacctctaccgctatggccgcacaacatggaatggatgacgacggtacagggcagaaacagatctggcgtatcgaaggatcgaacaaggttcccgtggaccctgcgacatacggacaattctatggaggcgatagctacattatcttgtataattatcggcacggggggagacaaggtcagatcatctataactggcagggggctcagagcacacaggatgaagtcgccgctagcgcaatccttacagcccagctggacgaagaacttggcggcacaccggtgcaatctagggtggtccagggtaaggaacccgcacacctcatgtctctatttggtggcaaaccaatgattatctacaagggtggtacatcaagggaaggcggccagaccgccccagcatctactagactgtttcaagtacgcgccaactccgctggagcaacaagggcggtcgaagtgctgcctaaagccggggcacttaacagcaatgacgcgttcgttcttaaaacaccctccgctgcatatctatgggtgggcactggcgctagtgaagccgagaaaaccggagcacaggaactgctcagggtgctgcgcgcacagcctgtgcaggtggcagaggggtccgagccagacgggttttgggaagcattgggaggtaaagccgcctacagaaccagccctaggctcaaggataagaaaatggacgctcacccaccgagattgttcgcctgctcaaataaaatcggtcgctttgtgatagaagaagttccaggcgaattgatgcaggaggaccttgcaactgacgatgtaatgctgctggacacatgggatcaagtgttcgtgtgggtggggaaagatagccaggaagaggaaaagacagaggcgctgacttccgccaaaagatatattgaaaccgatcccgctaatcgcgaccgtagaactccgatcacagttgtgaagcagggcttcgaaccccctagttttgttggctggttcctaggttgggatgatgactactggtcagtggatcccttggatagagcaatggccgagttagctgcctag

SEQ ID NO: 290780 - DNA, 2229 bp, Artificial Sequence
  derived and/or modified sequence
atggagaagctgttctgctgcttccccaacagcatggtggtggagcaccccgagttcctgaaggccggcaaggagcccggcctgcagatctggagagtggagaagttcgacctggtgcccgtgcccaccaacctgtacggcgacttcttcaccggcgacgcctacgtgatcctgaagaccgtgcagctgagaaacggcaacctgcagtacgacctgcactactggctgggcaacgagtgcagccaggacgagagcggcgccgccgccatcttcaccgtgcagctggacgactacctgaacggcagagccgtgcagcacagagaggtgcagggcttcgagagcgccaccttcctgggctacttcaagagcggcctgaagtacaagaagggcggcgtggccagcggcttcaagcacgtggtgcccaacgaggtggtggtgcagagactgttccaggtgaagggcagaagagtggtgagagccaccgaggtgcccgtgagctgggagagcttcaacaacggcgactgcttcatcctggacctgggcaacaacatccaccagtggtgcggcagcaacagcaacagatacgagagactgaaggccacccaggtgagcaagggcatcagagacaacgagagaagcggcagagccagagtgcacgtgagcgaggagggcaccgagcccgaggccatgctgcaggtgctgggccccaagcccgccctgcccgccggcaccgaggacaccgccaaggaggacgccgccaacagaaagctggccaagctgtacaaggtgagcaacggcgccggcaccatgagcgtgagcctggtggccgacgagaaccccttcgcccagggcgccctgaagagcgaggactgcttcatcctggaccacggcaaggacggcaagatcttcgtgtggaagggcaagcaggccaacaccgaggagagaaaggccgccctgaagaccgccagcgacttcatcaccaagatggactaccccaagcagacccaggtgagcgtgctgcccgagggcggcgagacccccctgttcaagcagttcttcaagaactggagagaccccgaccagaccgacggcctgggcctgagctacctgagcagccacatcgccaacgtggagagagtgcccttcgacgccgccaccctgcacaccagcaccgccatggccgcccagcacggcatggacgacgacggcaccggccagaagcagatctggagaatcgagggcagcaacaaggtgcccgtggaccccgccacctacggccagttctacggcggcgacagctacatcatcctgtacaactacagacacggcggcagacagggccagatcatctacaactggcagggcgcccagagcacccaggacgaggtggccgccagcgccatcctgaccgcccagctggacgaggagctgggcggcacccccgtgcagagcagagtggtgcagggcaaggagcccgcccacctgatgagcctgttcggcggcaagcccatgatcatctacaagggcggcaccagcagagagggcggccagaccgcccccgccagcaccagactgttccaggtgagagccaacagcgccggcgccaccagagccgtggaggtgctgcccaaggccggcgccctgaacagcaacgacgccttcgtgctgaagacccccagcgccgcctacctgtgggtgggcaccggcgccagcgaggccgagaagaccggcgcccaggagctgctgagagtgctgagagcccagcccgtgcaggtggccgagggcagcgagcccgacggcttctgggaggccctgggcggcaaggccgcctacagaaccagccccagactgaaggacaagaagatggacgcccacccccccagactgttcgcctgcagcaacaagatcggcagattcgtgatcgaggaggtgcccggcgagctgatgcaggaggacctggccaccgacgacgtgatgctgctggacacctgggaccaggtgttcgtgtgggtgggcaaggacagccaggaggaggagaagaccgaggccctgaccagcgccaagagatacatcgagaccgaccccgccaacagagacagaagaacccccatcaccgtggtgaagcagggcttcgagccccccagcttcgtgggctggttcctgggctgggacgacgactactggagcgtggaccccctggacagagccatggccgagctggccgcctag

SEQ ID NO: 290781 - DNA, 435 bp, Artificial Sequence
  derived and/or modified sequence
atgccctcttcggcccacgcccacgcgattcttaaggacgcccaagattcgccaggtgttgtcctgggccagggagtcatacgggccgggaagggttgggaaaacgggcccgagagccatagggtcagatataggggcaaaaaaaacactgactggcataccagaagcccggccctcacttttaccgtgctttggcctagctgccccttagtgcctatagtgttgggcctcaaccctgggttttgtccgtgtgcaagatcttctggggagtgcaatcactctggccacatcatcgagggtacaaggtgggaccagggtcagttgtgcctcctgtttactctgtcacgtgccgatatcagagcatgttggcgggtgggagaacagcagtacgtgagtttgtttactcacgttcaaatgcagcacccatcgctctag

SEQ ID NO: 290782 - protein, 276 aa, Artificial Sequence
  derived and/or modified sequence
QLMVVVGILLAYLAGWVLEWRWLAVLGCVPPSLMLLLMCFMPETPRFLLTQHRRQEAMAALRFLWGSEQGWEDPPIGAEQSFHLALLRQPGIYKPFIIGVSLMAFQQLSGVNAVMFYAETIFEEAKFKDSSLASVVVGVIQVLFTAVAALIMDRAGRRLLLVLSGVVMVFSTSAFGAYFKLTQGGPGNSSHVAISAPVSAQPVDASVGLAWLAVGSMCLFIAGFAVGWGPIPWLLMSEIFPLHVKGVATGICVLTNWLMAFLVTKEFSSLMLLLLL

SEQ ID NO: 290783 - protein, 1079 aa, Artificial Sequence
  derived and/or modified sequence
MGAMTQLLAGVFLAFLALATEGGVLKKVIRHKRQSGVNATLPEENQPVVFNHVYNIKLPVGSQCSVDLESASGEKDLAPPSEPSESFQEHTVDGENQIVFTHRINIPRRACGCAAAPDVKELLSRLEELENLVSSLREQCTAGAGCCLQPATGRLDTRPFCSGRGNFSTEGCGCVCEPGWKGPNCSEPECPGNCHLRGRCIDGQCICDDGFTGEDCSQLACPSDCNDQGKCVNGVCICFEGYAGADCSREICPVPCSEEHGTCVDGLCVCHDGFAGDDCNKPLCLNNCYNRGRCVENECVCDEGFTGEDCSELICPNDCFDRGRCINGTCYCEEGFTGEDCGKPTCPHACHTQGRCEEGQCVCDEGFAGVDCSEKRCPADCHNRGRCVDGRCECDDGFTGADCGELKCPNGCSGHGRCVNGQCVCDEGYTGEDCSQLRCPNDCHSRGRCVEGKCVCEQGFKGYDCSDMSCPNDCHQHGRCVNGMCVCDDGYTGEDCRDRQCPRDCSNRGLCVDGQCVCEDGFTGPDCAELSCPNDCHGQGRCVNGQCVCHEGFMGKDCKEQRCPSDCHGQGRCVDGQCICHEGFTGLDCGQHSCPSDCNNLGQCVSGRCICNEGYSGEDCSEVSPPKDLVVTEVTEETVNLAWDNEMRVTEYLVVYTPTHEGGLEMQFRVPGDQTSTIIQELEPGVEYFIRVFAILENKKSIPVSARVATYLPAPEGLKFKSIKETSVEVEWDPLDIAFETWEIIFRNMNKEDEGEITKSLRRPETSYRQTGLAPGQEYEISLHIVKNNTRGPGLKRVTTTRLDAPSQIEVKDVTDTTALITWFKPLAEIDGIELTYGIKDVPGDRTTIDLTEDENQYSIGNLKPDTEYEVSLISRRGDMSSNPAKETFTTGLDAPRNLRRVSQTDNSITLEWRNGKAAIDSYRIKYAPISGGDHAEVDVPKSQQATTKTITAKFTTDLDSPRDLTATEVQSETALLTWRPPRASVTGYLLVYESVDGTVKEVIVGPDTTSYSLADLSPPSLFLHFIQQKPEKQYCFHFKDMINIINIIMMMMMMKTKDFSRDLSFQNISGQYLIVFFF

SEQ ID NO: 290784 - protein, 230 aa, Artificial Sequence
  derived and/or modified sequence
MKKPRPAAAAPSPRPPACSRGAHPGTASELRVPALRRGGCGDRRLREEAAPEQAAAGPRRSTVGALLASELGWKFYDADDYHPEENRRKMGKGIPLNDQDRIPWLCNLHDILLRDVASGQRVVLACSALKKTYRDILTQGKDGVALKCEESGKEAKQAEMQLLVVHLSGSFEVISGRLLKREGHFMPPELLQSQFETLEPPAAPENFIQISVDKNVSEIIATIMETLKMK

SEQ ID NO: 290785 - DNA, 693 bp, Artificial Sequence
  derived and/or modified sequence
atgaagaagcccagacccgccgccgccgcccccagccccagaccccccgcctgcagcagaggcgcccaccccggcaccgccagcgagctgagagtgcccgccctgagaagaggcggctgcggcgacagaagactgagagaggaggccgcccccgagcaggccgccgccggccccagaagaagcaccgtgggcgccctgctggccagcgagctgggctggaagttctacgacgccgacgactaccaccccgaggagaacagaagaaagatgggcaagggcatccccctgaacgaccaggacagaatcccctggctgtgcaacctgcacgacatcctgctgagagacgtggccagcggccagagagtggtgctggcctgcagcgccctgaagaagacctacagagacatcctgacccagggcaaggacggcgtggccctgaagtgcgaggagagcggcaaggaggccaagcaggccgagatgcagctgctggtggtgcacctgagcggcagcttcgaggtgatcagcggcagactgctgaagagagagggccacttcatgccccccgagctgctgcagagccagttcgagaccctggagccccccgccgcccccgagaacttcatccagatcagcgtggacaagaacgtgagcgagatcatcgccaccatcatggagaccctgaagatgaagtag

SEQ ID NO: 290786 - DNA, 693 bp, Artificial Sequence
  derived and/or modified sequence
atgaaaaagccaagacccgcagctgcggcgcccagtcccaggcctccagcctgcagccggggtgctcacccggggacagcttccgagttgagggtccccgctctccggagaggcggctgcggggatcgtcggcttagagaggaagccgctcccgagcaagccgctgctgggcctaggcgatctacagttggggctctgctggcatccgaactcggctggaagttttacgatgccgacgattatcatccagaggaaaatagaaggaaaatggggaaaggcatcccactgaatgatcaggatcgcatcccctggctgtgtaatctccacgatatccttctgagagacgtggccagtggacagagagtggttctggcatgtagcgcactgaagaaaacttaccgcgacattttgacccagggcaaggatggcgtggcattgaaatgtgaagaatctggcaaagaagccaaacaggcagagatgcagttactggtcgtccacttgagtggctcatttgaggttatctcgggacgactgctcaagagggagggtcactttatgccccccgaactcctccagtcccaatttgaaaccctggagccacctgcggcaccggaaaactttatccagatttcagtagataaaaatgtaagcgagataattgctactatcatggaaacgctgaaaatgaagtag

SEQ ID NO: 290787 - DNA, 693 bp, Artificial Sequence
  derived and/or modified sequence
atgaagaagcccaggcctgctgctgctgcccccagcccccggcccccagcctgcagcagaggagcccaccctggaacagccagcgagctgcgggtgcctgccctgcggcggggcggctgtggggaccggcggctgcgggaggaggccgcccctgagcaggccgccgccggccccaggaggagcacagtgggcgccctgctggccagcgagctgggctggaagttctatgatgctgatgactaccacccagaagaaaatagaaggaagatgggcaagggcatccccctgaatgaccaggaccgcatcccctggctgtgcaacctgcatgacatcctgctgagagatgtggccagcggccagagggtggtgctggcctgcagcgccctgaagaagacctacagagacatcctgacccagggcaaggatggagtggccctgaagtgtgaggagagcggcaaggaggccaagcaggccgagatgcagctgctggtggtgcacctgagcggcagctttgaagtcatcagcggccgcctgctgaagcgggagggccacttcatgcctcctgagctgctgcagagccagtttgagaccctggagcccccagctgcccctgagaacttcatccagatctctgtggacaagaatgtgtctgagatcatcgccaccatcatggagaccctgaagatgaagtag

SEQ ID NO: 290788 - DNA, 693 bp, Artificial Sequence
  derived and/or modified sequence
atgaagaagccccggcccgccgccgccgcccccagcccccggcccccagcctgttcccgaggggctcaccctggcactgcctcggagctgcgcgttcctgcgctgagacgcggcggctgtggggaccggcgtctgcgcgaagaggcggccccagaacaagccgcggccgggccaagacgatccaccgtgggagccctgctggctagcgagctaggatggaagttctatgatgccgatgattaccaccccgaggagaaccgtcgcaagatgggtaagggcattccccttaatgaccaggaccgcatcccatggctgtgtaacctccatgatatactgttgagggatgtggccagcggacagcgtgtcgtccttgcttgcagcgccctgaagaagacatatcgggatattctaacccaggggaaggatggagtcgccttgaagtgtgaggaatccggcaaggaggccaagcaggccgagatgcaattactcgtagtacatttatcaggctcattcgaagtaatttctggccgcctgctgaagagagaggggcattttatgccccctgagttacttcagagccagtttgaaacacttgaaccccctgctgcccctgaaaacttcatccagatttccgtggacaaaaatgtctcagaaataattgccaccataatggaaaccctgaaaatgaagtag

SEQ ID NO: 290789 - DNA, 693 bp, Artificial Sequence
  derived and/or modified sequence
atgaagaaaccccgacctgctgccgcagctccatctccgcgaccaccagcatgcagcagaggcgcacaccccggaacagcatctgaactgagggtccccgctctgcgcagggggggatgtggcgaccgtaggcttagagaagaagccgcaccggaacaggcagcagccggtccacgtcgctcgaccgtgggagcactgcttgcaagcgagcttggctggaagttctatgacgctgacgactaccaccctgaagaaaatcgcagaaagatgggcaagggcatccccctcaatgatcaagaccgcattccatggttgtgcaacctgcatgacattctactccgagatgtagcttctgggcaaagagtggtgttggcctgctccgccctcaaaaaaacctaccgcgacatcttaacccagggaaaggatggggtggcgctcaagtgcgaggagagcggaaaggaagctaagcaagctgaaatgcagctcctcgtggtgcatctgtccggctccttcgaggttatcagcggcaggctacttaaaagagagggccacttcatgccgccagaattgctccagagccagttcgagaccctcgagccgcctgctgcacctgagaatttcatacagatttccgtggataagaacgtgagcgagatcatcgccacaatcatggaaacgctgaaaatgaaatag

SEQ ID NO: 290790 - DNA, 1036 bp, Artificial Sequence
  derived and/or modified sequence
atgaagaaaccgaggcccgcggctgccgcgccctctccccgccctccagcctgctcgcggggcgcccatcctgggaccgcatccgagctccgggttcccgctctaagacggggaggctgcggcgaccgcaggctcagggaggaagccgctcctgaacaggcggctgcggggccgcgcagatccaccgtgggcgccctgctggcatctgagctgggatggaaattctatgatgctgatgattatcacccggaggaaaatcgaaggaagatgggaaaaggcataccgctcaatgaccaggaccggattccatggctctgtaacttgcatgacattttactaagagatgtagcctcgggacagcgtgtggttctagcctgttcagccctgaagaaaacgtacagagacatattaacacaaggaaaagatggtgtagctctgaagtgtgaggagtcgggaaaggaagcaaagcaggctgagatgcagctcctggtggtccatctgagcgggtcgtttgaggtcatctctggacgcttactcaaaagagagggacattttatgccccctgaattattgcagtcccagtttgagactctggagcccccagcagctccagaaaactttatccaaataagtgtggacaaaaatgtttcagagataattgctacaattatggaaaccctaaaaatgaaatgacaatgattttgtatcagtggtccaaacagaactaagcataaatcattgtgccatcccaaacctcgttccagccgccttgcccatactagattctaaatgtttctaaaggcaaaccccaatgtgtcaagacagacttgtttaggtgtaattttaggaattatgctggttcatcaggaagcagagggggagttttaaaagtcaagcttaaattgaagtttaaattcatctataaccaaatcaaatgatcagaggaaattctgtaatcaatgctggaaatcgttacattgtttagaacattcttgctcatgcctgtatttgcacaaataaatgaaacttcgctgtc

SEQ ID NO: 290791 - DNA, 1614 bp, Artificial Sequence
  derived and/or modified sequence
gcgcagaggggcacggccctcactgccccggccggggcgagagcggctccgcccctcgagcgccgggtaggccggggccggcggggcccggaaggcgacgggaaggagccgagcttgggttatggcggcgccgggcgcgctgctggtgatgggcactctcactctgtcgcccaggctggagtacagtggcgtgatctcggctcactgcaacctctgcctcctgagttcaagcgattgtcatgcctcagcctccggagtaactggggttacaggcgtgcaccaccacacccagctaagttttgtatttttagttgagacggggttttgccatgttggccgagctagtcccgaactcctggcctcaagtgatccgcctgcctcagcctcccaaagtgctgggattataggcgtgagccaagggctcaacctaacttggtcttaagtgtgatttctgctatgcacacttctggcttcaccagccatggagtttggccgggatggtctactcatccgtaggctgcatgtctccctgcgcagccttcaatagaatgaactaatgggaaaggtttcactgctctcgcaacctttggttacatccaggagcagatctcagtttggtacaactgtgtctaacacctctctgatagctttttagtgaaagaaagaggacctttgttaggcaacagtatccagctagaatttaatcacattgttctgttttcattatatacagcttttcaggtaccttctattcaagatccaccgtgggcgccctgctggcatctgagctgggatggaaattctatgatgctgatgattatcacccggaggaaaatcgaaggaagatgggaaaaggcataccgctcaatgaccaggaccggattccatggctctgtaacttgcatgacattttactaagagatgtagcctcgggacagcgtgtggttctagcctgttcagccctgaagaaaacgtacagagacatattaacacaaggaaaagatggtgtagctctgaagtgtgaggagtcgggaaaggaagcaaagcaggctgagatgcagctcctggtggtccatctgagcgggtcgtttgaggtcatctctggacgcttactcaaaagagagggacattttatgccccctgaattattgcagtcccagtttgagactctggagcccccagcagctccagaaaactttatccaaataagtgtggacaaaaatgtttcagagataattgctacaattatggaaaccctaaaaatgaaatgacaatgattttgtatcagtggtccaaacagaactaagcataaatcattgtgccatcccaaacctcgttccagccgccttgcccatactagattctaaatgtttctaaaggcaaaccccaatgtgtcaagacagacttgtttaggtgtaattttaggaattatgctggttcatcaggaagcagagggggagttttaaaagtcaagcttaaattgaagtttaaattcatctataaccaaatcaaatgatcagaggaaattctgtaatcaatgctggaaatcgttacattgtttagaacattcttgctcatgcctgtatttgcacaaataaatgaaacttcgctgtc

SEQ ID NO: 290792 - protein, 455 aa, Artificial Sequence
  derived and/or modified sequence
MDDQSRMLQTLAGVNLAGHSVQGGMALPPPPHGHEGADGDGRKQDIGDILHQIMTITDQSLDEAQAKKHALNCHRMKPALFSVLCEIKEKTGLSIRGAQEEDPPDPQLMRLDNMLLAEGVSGPEKGGGSAAAAAAAAASGGSSDNSIEHSDYRAKLTQIRQIYHTELEKYEQACNEFTTHVMNLLREQSRTRPISPKEIERMVGIIHRKFSSIQMQLKQSTCEAVMILRSRFLDARRKRRNFSKQATEILNEYFYSHLSNPYPSEEAKEELAKKCSITVSQSLVKDPKERGSKGSDIQPTSVVSNWFGNKRIRYKKNIGKFQEEANLYAAKTAVTAAHAVAAAVQNNQTNSPTTPNSGSSGSFNLPNSGDMFMNMQSLNGDSYQGSQVGANVQSQVDTLRHVINQTGGYSDGLGGNSLYSPHNLNANGGWQDATTPSSVTSPTEGPGSVHSDTSN

SEQ ID NO: 290793 - DNA, 1368 bp, Artificial Sequence
  derived and/or modified sequence
atggacgatcagtcgcggatgctccagacccttgcaggcgtaaacctggcgggccatagcgtccaggggggcatggcccttccaccaccaccgcatgggcacgaaggcgcggacggggatgggagaaaacaggatatcggcgacatcttacatcagattatgactataacagatcagagtttagacgaggcccaggccaaaaagcatgcattaaattgtcaccggatgaaacctgccctgtttagcgtgttatgtgaaattaaggagaaaacaggactttcaatccgcggcgcacaagaggaggaccccccagatcctcagcttatgaggctggacaacatgctgctggcagagggagtgtctggcccagaaaaggggggtggaagtgcggccgctgcggccgcagccgcggcctcggggggaagtagcgacaattcgattgagcactcagactatagagcaaagctgacccaaattagacagatttaccatacagaactggagaaatacgagcaggcctgcaatgaatttaccactcatgtgatgaatctcctgcgtgagcagagccgcacccgccctatatctccaaaggaaattgagagaatggtgggcatcatccacagaaagttttcctcaatacagatgcagttgaaacagtctacctgtgaagctgtgatgatcctgagaagcaggtttttagacgctcgccgcaagagacgaaatttcagcaagcaggcgaccgagatactgaatgagtacttctacagccatctctcaaatccctacccaagtgaagaggccaaggaagagctcgctaagaagtgcagcatcacagtgtcacagagcctggtcaaagatccaaaggagcgcggcagcaaggggtccgatattcagcccacttccgtggtgtccaattggttcggcaacaagcgcatcaggtacaagaagaacataggtaagtttcaggaggaggcaaacctgtatgcggcaaagaccgcagtgactgctgctcatgcagtagcggcagccgttcagaataaccaaaccaacagccccactacccccaattcgggaagcagtggcagctttaatctcccaaattctggagacatgttcatgaatatgcagtctttgaacggggactcctatcagggatcccaagtgggcgccaatgttcagtcccaggttgatacactccgacacgtgatcaatcagacaggtggatacagcgacggattgggaggcaatagtctgtactccccacacaatctgaatgccaacggcggctggcaggatgctaccaccccaagttctgtgacatcgccaaccgaaggccccggaagcgtacattccgatacctccaattag

SEQ ID NO: 290794 - DNA, 1368 bp, Artificial Sequence
  derived and/or modified sequence
atggatgaccagagcaggatgctgcagaccctggccggcgtgaacctggccggccacagcgtgcagggcggcatggccctgcccccaccaccccacggccacgagggcgcagatggagatggcaggaagcaggacatcggggacatcctgcaccagatcatgaccatcacagaccagagcctggatgaggcccaggccaagaagcacgccctgaactgccacaggatgaagccagccctcttctctgtgctgtgtgagatcaaggagaagacaggcctgagcatccggggggcccaggaggaggaccccccagacccccagctgatgaggctggacaacatgctgctggccgagggcgtgtctggccctgagaagggcggcggcagcgctgctgctgctgctgctgctgctgccagcggcggcagcagtgacaacagcattgagcacagcgactaccgggccaagctgacccagatccggcagatctaccacacagagctggagaagtatgagcaggcctgcaatgagttcaccacccacgtgatgaacctgctgcgggagcagagcaggacccggcccatcagccccaaggagattgaaagaatggtgggcatcatccacaggaagttcagcagcatccagatgcagctgaagcagagcacctgtgaggccgtgatgatcctgcggagccgcttcctggatgcccggaggaagagaagaaacttcagcaagcaggccacagagatcctgaatgagtacttctacagccacctgagcaacccctaccccagcgaggaggccaaggaggagctggccaagaagtgcagcatcaccgtgtcccagagcctggtgaaggaccccaaggagcggggcagcaaaggaagtgacatccagcccacctctgtggtgagcaactggtttggaaacaagaggatccgctacaagaagaacatcggcaagttccaggaggaggccaacctgtatgctgccaagacagctgtgacagctgcccatgctgtggccgctgctgtgcagaacaaccagaccaacagccccaccacccccaacagcggcagcagcggcagcttcaacctgcccaacagcggggacatgttcatgaacatgcagagcctgaatggagacagctaccagggcagccaggtgggcgccaacgtgcagagccaggtggacaccctgcggcacgtgatcaaccagacaggaggctacagtgatggcctgggcggcaacagcctgtacagcccccacaacctgaatgccaatggaggctggcaggatgccaccacccccagctctgtgaccagccccacagagggccctggctctgtgcacagcgacaccagcaactag

SEQ ID NO: 290795 - DNA, 1368 bp, Artificial Sequence
  derived and/or modified sequence
atggacgaccagagccggatgctgcagaccctggccggcgtgaacctcgccggacacagcgtccagggaggaatggcactccccccccccccccatggacacgagggggccgacggggatggtcggaagcaagacatcggggacatcctgcatcaaattatgactatcacggatcaaagtctcgacgaagcccaggccaaaaagcacgccctgaactgccataggatgaagccagcattattttctgttctgtgtgagattaaagaaaagacaggactctctataaggggagcccaggaggaagaccccccggatccacaattgatgcgcttagacaacatgctgctggcagagggggtcagtgggcccgagaagggtggcggctctgcagctgcagccgctgcagccgcggcttcggggggttccagtgataactcaattgagcactcagattaccgggcgaaactcacacagattaggcagatttaccacacagagctcgaaaagtacgagcaggcctgcaatgaattcactacacatgtcatgaacttgctacgcgaacagagcagaacaagacccatcagtcctaaagaaatcgaacggatggtcggtatcattcaccgcaaattcagtagcattcagatgcagctaaaacagtcaacatgtgaggctgttatgattctcaggtcccggtttctcgatgcccgaagaaagcgaagaaatttcagcaaacaagccacagagattttgaacgaatacttctatagtcacctttcgaacccgtaccctagcgaagaggcaaaggaggagttggctaaaaagtgcagtatcacggtgtcccagtccctcgtaaaggatccaaaagagcgaggcagcaaaggcagtgacatccagcccacatcagttgtgagcaattggtttggaaataaaaggattcgttataaaaaaaacattgggaagtttcaagaggaggcgaatttatatgcggccaaaacggctgttacagctgcgcacgcagtggccgcagccgtccaaaacaaccagactaactcacctactacccctaacagcggttcgagcggaagctttaacctccctaattccggggatatgttcatgaacatgcagtcactcaacggcgatagttaccaggggtcacaggtcggcgctaatgtgcagtctcaggtggatactctgagacatgtgattaatcagacaggcgggtactcagatggactgggtggtaattccctgtatagcccacacaatctcaacgccaacggtggttggcaagacgctactacgccatccagcgtcacatcgcctaccgagggaccaggaagtgtacatagcgacacgagtaactag

SEQ ID NO: 290796 - DNA, 2902 bp, Artificial Sequence
  derived and/or modified sequence
tcctccctcgtcgccgccgccgccgccgccgcctcagccttcgcctcagccgccgcccgctcccgcccgcgcgcggcgggatggacgatcaatccaggatgctgcagactctggccggggtgaacctggctggccactcggtgcaggggggcatggccctgccgcctcccccgcacggccacgaaggggcggacggcgacggcaggaagcaggacatcggcgacatcctccaccagatcatgaccatcaccgaccagagcttggacgaggcgcaagcaaagaaacatgccctgaactgtcacagaatgaaaccagcgctcttcagcgtcctgtgtgagatcaaagagaaaacaggtctcagcatcagaggagcccaggaggaggaccctcccgatccccagctaatgagactggacaatatgcttttggcagaaggggtttcaggtcctgagaaaggtgggggatcggcggcagcagctgcagccgcggcagcctctggaggttcttcagataactctattgaacactcagattacagagccaaattgacccagatcagacaaatctatcacacagaactggagaaatatgaacaggcatgtaatgaatttactacacatgtgatgaaccttctccgagaacagagtagaacacgtcccatttctccaaaagagattgaaagaatggtgggcatcatccatcgaaaatttagttccattcagatgcagctcaaacaaagcacttgtgaagcagttatgattttaagatcaaggttccttgatgccagacggaaaaggcgtaacttcagtaaacaggccacagaaatcttgaatgaatatttttactcacacctcagcaacccctaccccagtgaagaagccaaagaggagctggccaagaaatgcagcatcacagtgtcacagagtcttgtaaaggatccaaaagaaagagggagcaaaggttctgacatccagccaactagcgtggtatccaattggtttggcaacaaacgaatcaggtacaagaagaacattggcaagtttcaggaagaagccaacctctatgctgcaaagacggccgtgacagctgcacacgcagtagcagcagctgtgcagaacaaccagaccaattcgcccaccacaccaaattccggttcttctggttcttttaacctcccaaattctggggacatgttcatgaacatgcagagtctgaatggggattcttaccaagggtcccaagtcggagccaatgtgcaatcacaggtggataccctccgtcatgttatcaatcagacgggaggctacagtgatggccttggaggaaattcactgtacagtccacataatttaaatgctaatggaggctggcaggacgcaacaactccatcttctgtgacttctcctacagaaggcccaggaagtgtgcactcggatacctctaactaatctctggccacacttttccctgagctacatgccttgataagtgcattcagagcaataggaggaaaaggaaagcgtttttgtagcccaccatctacagctttactgtaaaaccttgtcttattcgagaacttggtaaatctgttttttaaggaatcataatcatttgtatttatacttaaaaacacacaatgttaaaaaaaataaagcactttatccaattaggccaagatttaacattgttgacagtcctgtagctattttatcataatttattatcaatattttacattaatggtttcacagttgccaattacttggccttaagggtaaaaagtacaatatacactaaacctcaaccgttaaagcagatgcaaaaattcacctcacctaaattgaacttcttgcatatttccattactgacttggattgtctttctttcatatcactaatggagttggaataaagagctgtttgcctatccctgttaatgatggttgtgtttaagaatcttcctcgtcacgtttgtgttcagatctcttatgttataattagatcagagactggtagcatcgtttctctctctgaaagcaccagtgcccagagtctgctcggtaataaaattatggatccagattgttctgagagacgaagatacttgctgctgatagaggtgaaaacgagattgatccgtctggggttttacggtgtgcactgggtgctgcacagacttgtcaaggtttgctacgtcctctgggcatctgcaaaaggccctgctctctggagtgttgtatatagtgtagcaaaagagtatttatacatcccaccaatcaaaacacagctttattacctcatgcgaactcatacaaaccaatagaatttcaacatgttctgtagcttagagtgctcacttactacctctgaacaatactcacgctgtagtttgtctctttcttatctttttgcatcttgtaattaactctttgtttcccttcataaaatgtaatgtacattgtaatcttttaaaagaaaaatcagggttgcacttgcaacttttaaaaaaccgagtgtggaaacattgggtcttaattcaacacaggatcggtaaaactgttgtaaatactgagaaacattttgaatgttcttcatcttattactaatccatgcaaaaaaaaaaaaaaaagcagcgactaattgtgatgcattcagatttcagtattcagtactgtatatttcaccctgtgtaatggggccccctctcctttctctctttttgtattgtatgcgattctgaaactgattgagtcatgaaaataatttgtggcggtgattctaatgtattaaaaacgtttcgtgttcctttctaactggattacaccctggattgaaaaagtcttcctcgtggtagttatatgtagtttcaaacatgaataaactttttgctttcatgattaaa

SEQ ID NO: 290797 - DNA, 1368 bp, Artificial Sequence
  derived and/or modified sequence
atggacgatcaatcgcgcatgctccagactctcgccggagtgaatttggcaggccactcagtgcaggggggtatggctcttccaccgccacctcacggccacgagggagccgatggcgatggccgaaagcaggatatcggggatatcctgcaccagattatgaccattactgatcagtccctcgacgaggctcaggccaagaagcatgccctcaactgccaccgcatgaaaccggcattgttctcagtcttgtgtgaaattaaggagaagacggggctgtccatcaggggcgctcaggaggaagatcccccagatccacaactgatgcgtttggataatatgctgcttgctgagggcgtctcaggccctgaaaaaggaggagggagtgctgcggctgctgccgctgctgccgcaagcggaggctcttctgataattccattgagcactctgattatcgggcaaagctgacccagatcagacaaatatatcacacagaactggaaaaatatgagcaggcctgcaatgagtttactacccatgtgatgaatctcctgcgcgagcagagcaggacgcgacctatttccccaaaggaaatagagaggatggtcggcatcattcacaggaagttctcctcaatccagatgcagctgaaacagtcgacatgtgaggcggtcatgattctgcgcagtaggtttttggacgctcgtaggaagaggcggaatttttctaaacaagcgaccgagattctgaacgagtacttctacagtcacttgtctaatccttacccctccgaagaggctaaggaagagctagccaaaaaatgctctattactgtcagtcaatcactggtcaaggatcccaaagagaggggcagtaagggatcggacatccagcctactagtgtggtgtctaattggttcggcaacaagaggattcgctacaagaaaaatatagggaagtttcaggaggaggcgaatctatacgcagctaagaccgccgttactgcagcacacgccgttgcggcagcggttcagaataaccaaactaactcaccaaccacaccaaactccggctcttccggatctttcaacttgccaaattccggggatatgttcatgaatatgcagtccctcaacggtgactcctatcaggggtcccaagtgggcgctaatgtccaatcccaggtggatacattgagacacgtgatcaaccagacaggtgggtactctgacggacttgggggaaacagtttatactctccccacaatctgaacgcaaatggaggttggcaggacgccaccaccccgagctctgtgacctcacctaccgaggggccagggtcagtacactcggatacaagcaattag

SEQ ID NO: 290798 - DNA, 1368 bp, Artificial Sequence
  derived and/or modified sequence
atggacgaccagagcagaatgctgcagaccctggccggcgtgaacctggccggccacagcgtgcagggcggcatggccctgcccccccccccccacggccacgagggcgccgacggcgacggcagaaagcaggacatcggcgacatcctgcaccagatcatgaccatcaccgaccagagcctggacgaggcccaggccaagaagcacgccctgaactgccacagaatgaagcccgccctgttcagcgtgctgtgcgagatcaaggagaagaccggcctgagcatcagaggcgcccaggaggaggacccccccgacccccagctgatgagactggacaacatgctgctggccgagggcgtgagcggccccgagaagggcggcggcagcgccgccgccgccgccgccgccgccgccagcggcggcagcagcgacaacagcatcgagcacagcgactacagagccaagctgacccagatcagacagatctaccacaccgagctggagaagtacgagcaggcctgcaacgagttcaccacccacgtgatgaacctgctgagagagcagagcagaaccagacccatcagccccaaggagatcgagagaatggtgggcatcatccacagaaagttcagcagcatccagatgcagctgaagcagagcacctgcgaggccgtgatgatcctgagaagcagattcctggacgccagaagaaagagaagaaacttcagcaagcaggccaccgagatcctgaacgagtacttctacagccacctgagcaacccctaccccagcgaggaggccaaggaggagctggccaagaagtgcagcatcaccgtgagccagagcctggtgaaggaccccaaggagagaggcagcaagggcagcgacatccagcccaccagcgtggtgagcaactggttcggcaacaagagaatcagatacaagaagaacatcggcaagttccaggaggaggccaacctgtacgccgccaagaccgccgtgaccgccgcccacgccgtggccgccgccgtgcagaacaaccagaccaacagccccaccacccccaacagcggcagcagcggcagcttcaacctgcccaacagcggcgacatgttcatgaacatgcagagcctgaacggcgacagctaccagggcagccaggtgggcgccaacgtgcagagccaggtggacaccctgagacacgtgatcaaccagaccggcggctacagcgacggcctgggcggcaacagcctgtacagcccccacaacctgaacgccaacggcggctggcaggacgccaccacccccagcagcgtgaccagccccaccgagggccccggcagcgtgcacagcgacaccagcaactag

SEQ ID NO: 290799 - protein, 351 aa, Artificial Sequence
  derived and/or modified sequence
MDDQSRMLQTLAGVNLAGHSVQGGMALPPPPHGHEGADGDGRKQDIGDILHQIMTITDQSLDEAQAKKHALNCHRMKPALFSVLCEIKEKTGLSIRGAQEEDPPDPQLMRLDNMLLAEGVSGPEKGGGSAAAAAAAAASGGSSDNSIEHSDYRAKLTQIRQIYHTELEKYEQACNEFTTHVMNLLREQSRTRPISPKEIERMVGIIHRKFSSIQMQLKQSTCEAVMILRSRFLDARRKRRNFSKQATEILNEYFYSHLSNPYPSEEAKEELAKKCSITVSQVSNWFGNKRIRYKKNIGKFQEEANLYAAKTAVTAAHAVAAAVQNNQTNSPTTPNSGGYPPSCYQSDGRLQ

SEQ ID NO: 290800 - DNA, 1056 bp, Artificial Sequence
  derived and/or modified sequence
atggacgaccagtcgaggatgcttcagactctggccggggtaaacttggcgggccacagcgtgcaaggaggcatggcgctgccaccaccgccgcacggtcacgagggggccgatggggacggccggaaacaggacattggcgacatcttacaccagattatgacgataacagaccaatcgctggatgaggctcaagcaaaaaagcacgccttgaattgtcatagaatgaagcccgcactgttcagcgttctatgtgaaattaaagagaaaacaggattgagcatcaggggggcccaggaagaagaccctcccgaccctcagctgatgagacttgacaacatgctgctggctgaaggggtaagcggacccgaaaagggaggaggctctgccgccgctgctgcagctgcggctgcgagcgggggcagctccgacaactctatagagcactccgattaccgtgctaaacttacccagatccggcaaatttaccatacagaactagagaagtacgagcaggcgtgcaatgagttcactactcacgtgatgaacctcctgagggagcagtctaggacacggcctatctctccgaaagaaatcgaacgtatggttggcataatccatagaaaattctcctccatccagatgcagctaaagcagagcacgtgtgaggcagtgatgattctgcgaagcagatttctggacgcgcgccggaagagaaggaatttttccaagcaggccactgaaatcctgaacgaatatttctactctcacttaagtaacccctatccatcagaggaagccaaggaggagctcgccaagaaatgtagcatcactgttagtcaagtttccaattggtttggcaataagcggatccggtataaaaagaacatcgggaagttccaggaggaggcaaacctatatgccgctaaaacggctgtgaccgctgcccacgctgtagccgccgccgtgcagaataaccagaccaatagccctacaacacctaatagcgggggataccccccctcctgctatcagtccgatggcagactgcagtag

SEQ ID NO: 290801 - DNA, 1056 bp, Artificial Sequence
  derived and/or modified sequence
atggatgaccagagcaggatgctgcagaccctggccggcgtgaacctggccggccacagcgtgcagggcggcatggccctgcccccaccaccccacggccacgagggcgcagatggagatggcaggaagcaggacatcggggacatcctgcaccagatcatgaccatcacagaccagagcctggatgaggcccaggccaagaagcacgccctgaactgccacaggatgaagccagccctcttctctgtgctgtgtgagatcaaggagaagacaggcctgagcatccggggggcccaggaggaggaccccccagacccccagctgatgaggctggacaacatgctgctggccgagggcgtgtctggccctgagaagggcggcggcagcgctgctgctgctgctgctgctgctgccagcggcggcagcagtgacaacagcattgagcacagcgactaccgggccaagctgacccagatccggcagatctaccacacagagctggagaagtatgagcaggcctgcaatgagttcaccacccacgtgatgaacctgctgcgggagcagagcaggacccggcccatcagccccaaggagattgaaagaatggtgggcatcatccacaggaagttcagcagcatccagatgcagctgaagcagagcacctgtgaggccgtgatgatcctgcggagccgcttcctggatgcccggaggaagagaagaaacttcagcaagcaggccacagagatcctgaatgagtacttctacagccacctgagcaacccctaccccagcgaggaggccaaggaggagctggccaagaagtgcagcatcaccgtgtcccaggtgagcaactggtttggaaacaagaggatccgctacaagaagaacatcggcaagttccaggaggaggccaacctgtatgctgccaagacagctgtgacagctgcccatgctgtggccgctgctgtgcagaacaaccagaccaacagccccaccacccccaacagcggcggctacccacccagctgctaccagagtgatggccgcctgcagtag

SEQ ID NO: 290802 - DNA, 1056 bp, Artificial Sequence
  derived and/or modified sequence
atggacgaccagagccggatgctgcagaccctggccggcgtgaacctagcgggccactccgttcagggagggatggccctccctcctcctccacacggccacgagggagctgatggggacgggcgaaaacaggacataggagacatccttcaccaaataatgacaattactgaccaaagcctggacgaagcgcaggccaaaaaacatgctctgaactgccaccggatgaaaccggccctattcagtgtgttatgtgaaattaaggaaaaaactggcctctccatccgtggagcacaagaagaggaccctcctgacccccagctaatgcgactcgataacatgttactcgctgagggcgtttccgggcccgagaaaggggggggatcagccgccgcagccgcagccgcggccgcttccggtggcagttccgataattccattgagcacagtgattaccgggctaaacttacacagattcggcaaatctaccacacagaactcgaaaagtatgaacaggcatgcaacgagttcacaacgcacgtcatgaatcttctcagagaacagtctcggactaggcctatcagcccaaaagaaatcgaacgcatggtggggattatccacagaaagttctccagtatccagatgcagttgaaacagtccacctgtgaggccgtgatgatcctcaggagtcgattcctggatgcaaggcgcaagagacgaaattttagcaagcaggccactgagatccttaatgagtacttctactcacacctttccaacccatatccctcggaagaggctaaagaagaactggccaagaagtgcagcatcacagtctcacaggtctccaactggttcggcaacaaacgcatccgatataaaaagaacatcggaaagtttcaggaggaagccaatctctacgctgccaagactgccgttaccgcagcacatgccgtagccgccgccgttcagaataatcagaccaacagcccaaccacaccaaactctggaggctatccgccctcttgttatcaaagtgacggtagactacagtag

SEQ ID NO: 290803 - DNA, 2755 bp, Artificial Sequence
  derived and/or modified sequence
cctccccctccccctccccctctttcttctcctccctcgtcgccgccgccgccgccgccgcctcagccttcgcctcagccgccgcccgctcccgcccgcgcgcggcgggatggacgatcaatccaggatgctgcagactctggccggggtgaacctggctggccactcggtgcaggggggcatggccctgccgcctcccccgcacggccacgaaggggcggacggcgacggcaggaagcaggacatcggcgacatcctccaccagatcatgaccatcaccgaccagagcttggacgaggcgcaagcaaagaaacatgccctgaactgtcacagaatgaaaccagcgctcttcagcgtcctgtgtgagatcaaagagaaaacaggtctcagcatcagaggagcccaggaggaggaccctcccgatccccagctaatgagactggacaatatgcttttggcagaaggggtttcaggtcctgagaaaggtgggggatcggcggcagcagctgcagccgcggcagcctctggaggttcttcagataactctattgaacactcagattacagagccaaattgacccagatcagacaaatctatcacacagaactggagaaatatgaacaggcatgtaatgaatttactacacatgtgatgaaccttctccgagaacagagtagaacacgtcccatttctccaaaagagattgaaagaatggtgggcatcatccatcgaaaatttagttccattcagatgcagctcaaacaaagcacttgtgaagcagttatgattttaagatcaaggttccttgatgccagacggaaaaggcgtaacttcagtaaacaggccacagaaatcttgaatgaatatttttactcacacctcagcaacccctaccccagtgaagaagccaaagaggagctggccaagaaatgcagcatcacagtgtcacaggtatccaattggtttggcaacaaacgaatcaggtacaagaagaacattggcaagtttcaggaagaagccaacctctatgctgcaaagacggccgtgacagctgcacacgcagtagcagcagctgtgcagaacaaccagaccaattcgcccaccacaccaaattccggtggataccctccgtcatgttatcaatcagacgggaggctacagtgatggccttggaggaaattcactgtacagtccacataatttaaatgctaatggaggctggcaggacgcaacaactccatcttctgtgacttctcctacagaaggcccaggaagtgtgcactcggatacctctaactaatctctggccacacttttccctgagctacatgccttgataagtgcattcagagcaataggaggaaaaggaaagcgtttttgtagcccaccatctacagctttactgtaaaaccttgtcttattcgagaacttggtaaatctgttttttaaggaatcataatcatttgtatttatacttaaaaacacacaatgttaaaaaaaataaagcactttatccaattaggccaagatttaacattgttgacagtcctgtagctattttatcataatttattatcaatattttacattaatggtttcacagttgccaattacttggccttaagggtaaaaagtacaatatacactaaacctcaaccgttaaagcagatgcaaaaattcacctcacctaaattgaacttcttgcatatttccattactgacttggattgtctttctttcatatcactaatggagttggaataaagagctgtttgcctatccctgttaatgatggttgtgtttaagaatcttcctcgtcacgtttgtgttcagatctcttatgttataattagatcagagactggtagcatcgtttctctctctgaaagcaccagtgcccagagtctgctcggtaataaaattatggatccagattgttctgagagacgaagatacttgctgctgatagaggtgaaaacgagattgatccgtctggggttttacggtgtgcactgggtgctgcacagacttgtcaaggtttgctacgtcctctgggcatctgcaaaaggccctgctctctggagtgttgtatatagtgtagcaaaagagtatttatacatcccaccaatcaaaacacagctttattacctcatgcgaactcatacaaaccaatagaatttcaacatgttctgtagcttagagtgctcacttactacctctgaacaatactcacgctgtagtttgtctctttcttatctttttgcatcttgtaattaactctttgtttcccttcataaaatgtaatgtacattgtaatcttttaaaagaaaaatcagggttgcacttgcaacttttaaaaaaccgagtgtggaaacattgggtcttaattcaacacaggatcggtaaaactgttgtaaatactgagaaacattttgaatgttcttcatcttattactaatccatgcaaaaaaaaaaaaaaaagcagcgactaattgtgatgcattcagatttcagtattcagtactgtatatttcaccctgtgtaatggggccccctctcctttctctctttttgtattgtatgcgattctgaaactgattgagtcatgaaaataatttgtggcggtgattctaatgtattaaaaacgtttcgtgttcctttctaactggattacaccctggattgaaaaagtcttcctcgtggtagttatatgtagtttcaaacatgaataaactttttgctttcatgattaaa

SEQ ID NO: 290804 - DNA, 1056 bp, Artificial Sequence
  derived and/or modified sequence
atggatgaccaatctcggatgctccaaactctcgccggagtaaacttggcaggccacagtgttcagggcggaatggcactgcctccaccccctcacgggcacgaaggggcagatggtgacggcaggaagcaggatattggggacatcctgcaccaaatcatgacaataacagatcagtcactcgatgaggcacaggcaaaaaaacacgcgctgaattgccacaggatgaaaccagcactgttctctgtactctgcgagattaaggagaagactgggctttccattcgaggggctcaggaagaagaccctcccgacccgcaactgatgcgccttgacaacatgctgctggctgaaggggtcagcgggccagagaaaggcggaggctccgctgccgctgctgcggcagccgctgcgtccggaggatctagtgataattcaatcgagcacagcgactacagagctaagctaacccagatccgtcaaatctaccacactgaattggagaagtacgagcaggcctgtaacgagtttactactcacgtgatgaatctgctgcgcgagcagtccaggacacggcctatctctcctaaagagatcgagcgcatggtggggataatacacagaaagttcagttccattcagatgcagctgaagcagagtacctgtgaagccgtcatgatcctcagaagcaggtttctggacgccaggcggaaacggagaaatttttcaaaacaagccacagaaattctcaatgaatatttttactctcatctgtcaaatccatatccatcagaagaggcaaaagaagaattggccaagaagtgctctattacagtgtcccaagtcagtaactggtttgggaacaaaagaattcgttataagaaaaatattggaaagttccaggaggaagccaacctgtacgccgctaagactgctgttacagccgctcacgctgttgcagccgctgtgcaaaacaaccaaaccaattctcccaccactccgaactcaggaggctatcccccatcttgctaccagtctgatggtcggctgcagtag

SEQ ID NO: 290805 - DNA, 1056 bp, Artificial Sequence
  derived and/or modified sequence
atggacgaccagagcagaatgctgcagaccctggccggcgtgaacctggccggccacagcgtgcagggcggcatggccctgcccccccccccccacggccacgagggcgccgacggcgacggcagaaagcaggacatcggcgacatcctgcaccagatcatgaccatcaccgaccagagcctggacgaggcccaggccaagaagcacgccctgaactgccacagaatgaagcccgccctgttcagcgtgctgtgcgagatcaaggagaagaccggcctgagcatcagaggcgcccaggaggaggacccccccgacccccagctgatgagactggacaacatgctgctggccgagggcgtgagcggccccgagaagggcggcggcagcgccgccgccgccgccgccgccgccgccagcggcggcagcagcgacaacagcatcgagcacagcgactacagagccaagctgacccagatcagacagatctaccacaccgagctggagaagtacgagcaggcctgcaacgagttcaccacccacgtgatgaacctgctgagagagcagagcagaaccagacccatcagccccaaggagatcgagagaatggtgggcatcatccacagaaagttcagcagcatccagatgcagctgaagcagagcacctgcgaggccgtgatgatcctgagaagcagattcctggacgccagaagaaagagaagaaacttcagcaagcaggccaccgagatcctgaacgagtacttctacagccacctgagcaacccctaccccagcgaggaggccaaggaggagctggccaagaagtgcagcatcaccgtgagccaggtgagcaactggttcggcaacaagagaatcagatacaagaagaacatcggcaagttccaggaggaggccaacctgtacgccgccaagaccgccgtgaccgccgcccacgccgtggccgccgccgtgcagaacaaccagaccaacagccccaccacccccaacagcggcggctacccccccagctgctaccagagcgacggcagactgcagtag

SEQ ID NO: 290806 - DNA, 984 bp, Artificial Sequence
  derived and/or modified sequence
atggcaactgtccccgtgtactgcgtttgcagactcccctacgacgttacccgttttatgattgaatgtgacgcttgtaaggactggttccatggctcctgtgtaggtgtagaggaggaggaagccccagacatcgacatttatcactgtccaaattgtgagaaaacacatggaaagtcgactctaaaaaaaaaacgtacctggcataagcacgggcccggccaagcgccagatgtgaagccgaagaactctgtggatctcgatgactatgaggaagaacaggaccacctggacgcctgctttaaggattcggattacgtgtaccccagcctggaatcagacgaagacaatcctatttttaaatccaggtccaaaaagcggaaaggctccgatgacgctccatattccccaacagcgagagtggggcctagcgtgcctcgccaagaccggccagttcgggaaggcacgcgcgtggcaagcatagaaacgggcctggctgccgccgccgccaaactctctcagcaggaggagcagaagagtaagaaaaaaaaatcagctaagcgtaagttgacacctaacacaacctccccctccacgtcaacttcaatttccgcggggacaacatctacctctactaccccagcttcaaccactccagcttccacaacacccgcatctacatcaacagcttccagtcaggcttcacaggagggtagcagccctgagcctccccctgagtcccactcatcgagccttgccgatcacgagtacacagcagcaggtacgtttactggtgcccaagccggccgcaccagtcaacccatggcgcccggcgtgtttctgacacaaagacggccatcagcgagttctcccaataacaataccgctgcaaaagggaagcgaactaaaaaaggaatggctacagcaaagcagcggctgggaaagattctcaagatccacaggaatgggaaactgctcctgtag

SEQ ID NO: 290807 - DNA, 984 bp, Artificial Sequence
  derived and/or modified sequence
atggccaccgtgcctgtgtactgtgtgtgccgcctgccctatgatgtgacccgcttcatgattgaatgtgatgcctgcaaggactggttccacggcagctgtgtgggcgtggaggaggaggaggccccagacatcgacatctaccactgccccaactgtgagaagacccacggcaagagcaccctgaagaagaagaggacctggcacaagcacggccctggccaggccccagatgtgaagcccaagaacagcgtggacctggatgattatgaggaggagcaggaccacctggatgcctgcttcaaggacagcgactatgtgtaccccagcctggagagtgatgaggacaaccccatcttcaagagccgcagcaagaagaggaagggcagtgatgatgccccctacagccccacagcccgggtgggccccagcgtgccccggcaggacaggcctgtgcgggagggcaccagggtggccagcattgaaacaggcctggccgctgctgctgccaagctgagccagcaggaggagcagaagagcaagaagaagaagagcgccaagaggaagctgacccccaacaccaccagccccagcaccagcaccagcatctctgctggcaccaccagcaccagcaccaccccagccagcaccaccccagccagcaccaccccagccagcaccagcacagccagcagccaggccagccaggagggcagcagccctgagcccccacctgagagccacagcagcagcctggccgaccacgagtacacagctgctggcaccttcaccggggcccaggccggccgcaccagccagcccatggcccctggggtcttcctgacccagaggcggcccagcgccagcagccccaacaacaacacagctgccaagggcaagaggaccaagaagggcatggccacagccaagcagaggctgggcaagatcctgaagatccacagaaatggcaagctgctgctgtag

SEQ ID NO: 290808 - DNA, 984 bp, Artificial Sequence
  derived and/or modified sequence
atggccaccgtgcccgtgtactgcgtgtgccggctgccctacgacgtgacgagattcatgattgagtgcgacgcgtgcaaggactggttccatgggagctgcgtgggcgtggaggaagaagaagccccagacattgacatttatcactgtccgaattgcgaaaaaactcacggaaagtccactttaaaaaagaaacgcacctggcataaacacggccctgggcaggcaccagacgttaaaccaaagaacagtgtagatttggacgattacgaagaggaacaggaccacctggatgcctgctttaaggattctgactatgtctatccgtccctcgaatccgacgaagataacccaattttcaagagccgatctaagaaacgcaaagggtctgacgatgcgccgtactctccgacagcccgggttgggccgtctgtccctcggcaggaccggccagtgcgtgaaggaactcgcgtagcctccatcgaaaccggcctagctgcagccgccgccaagctgtcccagcaggaggaacagaaatctaaaaagaagaaaagtgctaagaggaagcttactcccaacaccacctccccttcgacaagcacctcaatatccgcgggcacaacctccacaagcaccacaccggcctctactactcccgcttcaactactccggcctctacctccacagcatcttcgcaggcatcccaggagggcagttctccggagcccccccctgagtcgcattcctccagccttgcagatcacgaatataccgcagctggtaccttcaccggggcgcaggcaggcaggacctcccagcccatggcgcccggggtcttcctaacacagagacggccctccgccagcagcccaaataataatacagccgccaagggcaaaagaacaaagaagggcatggctaccgccaaacagcgactggggaagattctcaaaattcatagaaacgggaagctcctgttgtag

SEQ ID NO: 290809 - DNA, 3042 bp, Artificial Sequence
  derived and/or modified sequence
gtgcgcccccgtccccgtcccctcccggccgcggcgccgcctgcgccccgccgcccccgccgcccccgcgcggcccggcccccggcccggcccggaccgacccgggcagcgcagcggcggggccgagcggcggcgcggcgcggcaacatggcgacggtgcccgtgtactgcgtctgccggctcccctacgacgttacccgcttcatgatcgagtgcgacgcctgcaaggactggttccacggcagctgtgttggggtggaagaggaggaggcgcccgacatcgacatataccactgcccaaactgtgagaaaacccatgggaagtccaccttaaagaagaagcggacctggcacaaacacggcccggggcaagcgcctgacgtcaagcccaaaaacagtgtcgacctggacgactacgaggaagagcaggaccacctggatgcctgcttcaaggactcagactacgtttacccctcactggagtcagatgaagacaaccccatctttaagtcccggtcgaagaaaaggaaaggctcagacgacgctccctacagcccaacagcaagggtcggcccatcggtgccaagacaggacaggcctgtgcgtgagggtacacgggtggcttccatcgagaccgggctggcggctgctgcagctaagttgtcccagcaggaggagcagaaaagcaagaaaaaaaagagtgccaagaggaagctgactcctaacaccacctccccttccacctccacctccatctctgccggcaccacctccacctccaccacgccagcctctaccaccccggcctccaccaccccggcctccaccagcacggccagcagccaggcctcgcaggagggcagctcgccagagcccccgcctgagtcgcatagcagcagcctggcggaccatgagtacacagccgctggcaccttcaccggggcccaggctggccgcacctcccagcccatggcccctggggtctttctcacacagaggcggccctccgcatcgtctccaaacaacaacaccgctgccaaaggaaaacgtacgaaaaagggcatggcgaccgccaagcagaggcttgggaaaattttgaaaattcatcggaacgggaaactactcctttaagatttggaaagccaggatccttctgctccgctcaggacccccggagccccgcgaaaacatctgcctcccaggagggtgccgagctgcctcaccagggagggccttgcctcttcccggctgccatctccccaacaagcgtctgtcccttcagccggcagagcgagcccagcgtggcccctcaatttgaaaatggacgtcttttctcaagttgctaagagtgatctgtcccagaaaagcggccctgcaagtttgaggaccgcttattccactttaaggacagccttcaggccccctgagcgtgggtgtgattgcagggcctctgcagctctgctgagagcatgagtccttcaaggaagacagagtgagccaatgctcaccagccccagagtcagagctggccacaggctggcagcctccaggggcttaaaaaaaaaggcaaagaacacagaaagaggaggagcaagtgggatgtttatgtccccccttctcttcctgagtgattctcagccaagtccagacagtgctcggcgggtgaggaagggtctgccccgagctttctggttggcaggtggcagcaggatggtgggtgttcagcctgaatgcccaggagcatttctggggggcagctaagactggcagctgggttggtgtgttagcgggcaggggagccattgtggggtccccaggaaagggcaagggctcagccacatcttggggtctgggaggcccaggctaagccatgtggcagggaccgtcttgccctgctggccacactctggagaagcacttctcagccaaggcacccctgccctgggactggcagggcaggggcaggggcagggacagtggccaggcggcccgaggacttacggtcggcacttctctgttctcccgtgtcagcgtgtggtgtcgcctgcatgggtcgtacctggatggtgtgtccaccatcgacacggaggggctggatttgtttctcaggcaatcctgtattttaattttagatgtatttcctgaagcatatttttcatagaatgtagcgtgtaaatagctttttaaataacttcttttttataagagtaaaagtatctttaggaatttctttctatagagttcttcattaacatttatacgagttttttgctgagtcagatggacagttgggttctgatgctttttccttctcctttccttttattattattatttttttcttttaagaactaaggtattgcctgaaaaacaagtgatgtctgtgcagccttacactctgtctttacagaagcaaatagtacacaaaagatctatttcagacacattttgaagatgaatcttcaactttaataccagctctttgttttccttgtatgatgaggggattgggggatacagttattttactagcaccttgtgaagtgtttccgtgttttgtgatgctgtaatttattaatgtttgtagctttttatatttgtacatttcttatgagctttgtttatatacccattacctggatgtttttgtccactgggagaggcagcttggtggaggccttatccactcccacttgtcctgtttggagggacgcagtccctagggcccgagactgggtgggagagggggagtctcacggggccccaggcttattcagaactggtgtttttaaagtttcctttaccctgcccttgttgaacatttatataatctaacctggacatcaagctgttctctctctctcttttttttaattttattattattattttggcaacatgtacatttctaacaaagtttatcgtggctattaaagtgttttatttcccaattcatattactcttgtatcgagtccatgaggtctaaggcaacttagatcaaagttttaaaaaagtaaaaatatttcaggttttgtacagaa

SEQ ID NO: 290810 - DNA, 984 bp, Artificial Sequence
  derived and/or modified sequence
atggccactgttcccgtctattgcgtgtgccggctcccgtatgatgtgacaagatttatgattgaatgcgatgcttgcaaggattggtttcatggctcctgtgtgggagtggaggaggaggaagcgcctgatatagatatctatcactgtccaaattgcgaaaaaacacatggcaaaagtacgctcaaaaagaagaggacctggcacaagcatggccctggacaggctccagatgtgaaaccaaagaatagcgtggatctggacgattacgaagaggagcaggaccacttagacgcttgctttaaagactctgactatgtctacccttctcttgaatcagatgaagacaatccgatctttaagtcccggtccaagaagaggaagggaagcgacgatgcaccctatagtccaacagctagagtagggccaagcgtcccaaggcaggatcgccctgtgcgagagggaacacgcgtcgcctccattgaaaccggactggcggctgcggctgcgaaactctcccagcaagaagagcagaaatcaaaaaaaaagaagagcgcaaagcgcaaattaacaccgaacactacatccccatctacgtcgactagcatcagtgcagggacaacaagcacctccacaactcccgcttcaaccacccccgcatcaacaacaccagctagcacgtccaccgcatctagccaagcatcccaagaaggaagcagccctgaacctccccctgagagccattcatcatcattggccgatcatgagtacacagccgcagggacatttaccggggctcaggcaggcaggacctcccaaccgatggctccaggcgtgttcctaactcaaaggagacccagtgctagttctccaaacaataatacggctgcaaaaggtaaaagaactaaaaagggcatggctactgccaaacagcgtcttggcaagatcctcaagatccaccggaatggaaagttactgctctag

SEQ ID NO: 290811 - DNA, 984 bp, Artificial Sequence
  derived and/or modified sequence
atggccaccgtgcccgtgtactgcgtgtgcagactgccctacgacgtgaccagattcatgatcgagtgcgacgcctgcaaggactggttccacggcagctgcgtgggcgtggaggaggaggaggcccccgacatcgacatctaccactgccccaactgcgagaagacccacggcaagagcaccctgaagaagaagagaacctggcacaagcacggccccggccaggcccccgacgtgaagcccaagaacagcgtggacctggacgactacgaggaggagcaggaccacctggacgcctgcttcaaggacagcgactacgtgtaccccagcctggagagcgacgaggacaaccccatcttcaagagcagaagcaagaagagaaagggcagcgacgacgccccctacagccccaccgccagagtgggccccagcgtgcccagacaggacagacccgtgagagagggcaccagagtggccagcatcgagaccggcctggccgccgccgccgccaagctgagccagcaggaggagcagaagagcaagaagaagaagagcgccaagagaaagctgacccccaacaccaccagccccagcaccagcaccagcatcagcgccggcaccaccagcaccagcaccacccccgccagcaccacccccgccagcaccacccccgccagcaccagcaccgccagcagccaggccagccaggagggcagcagccccgagcccccccccgagagccacagcagcagcctggccgaccacgagtacaccgccgccggcaccttcaccggcgcccaggccggcagaaccagccagcccatggcccccggcgtgttcctgacccagagaagacccagcgccagcagccccaacaacaacaccgccgccaagggcaagagaaccaagaagggcatggccaccgccaagcagagactgggcaagatcctgaagatccacagaaacggcaagctgctgctgtag

SEQ ID NO: 290812 - protein, 1131 aa, Artificial Sequence
  derived and/or modified sequence
MKVNRETKRLYVGGLSQDISEADLQNQFSRFGEVSDVEIITRKDDQGNPQKVFAYINISVAEADLKKCMSVLNKTKWKGGTLQIQLAKESFLHRLAQEREAAKAKKEESTTGNANLLEKTGGVDFHMKAVPGTEVPGHKNWVVSKFGRVLPVLHLKNQHKHLRNIIKYDPSKYCHNLKKIGEDFSNTIPISSLTWELEGGNDPMSKKRRGEFSDFHGPPKKIIKVQKDESSTGSLAMSTRPRRVIERPPLTQQQAAQKRTCDSITPSKSSPVPVSDTQKLKNLPFKTSGLETAKKRNSISDDDTDSEDELRMMIAKEENLQRTTQPSINESESDPFEVVRDDFKSGVHKLHSLIGLGIKNRVSCHDSDDDIMRNDREYDSGDTDEIIAMKKNVAKVKNSTEFSQMEKSTKKTSFKNRENCELSDHCIKLQKRKSNVESALSHGLKSLNRKSPSHSSSSEDADSASELADSEGGEEYNAMMKNCLRVNLTLADLEQLAGSDLKVPNEDTKSDGPETTTQCKFDRGSKSPKTPTGLRRGRQCIRPAEIVASLLEGEENTCGKQKPKENNLKPKFQAFKGVGCLYEKESMKKSLKDSVASNNKDQNSMKHEDPSIISMEDGSPYVNGSLGEVTPCQHAKKANGPNYIQPQKRQTTFESQDRKAVSPSSSEKRSKNPISRPLEGKKSLSLSAKTHNIGFDKDSCHSTTKTEASQEERSDSSGLTSLKKSPKVSSKDTREIKTDFSLSISNSSDVSAKDKHAEDNEKRLAALEARQKAKEVQKKLVHNALANLESMGKTSGKLFDSSDDDESDSEDDSNRFKIKPQFEGRAGQKLMDLQSHFGTDDRFRMDSRFLETDSEEEQEEVNEKKTAEEEELAEEKKKALNVVQSVLQINLSNSTNRGSVAAKKFKDIIHYDPTKQDHATYERKRDDKPKESKAKRKKKREEAEKLPEVSKEMYYNIAMDLKEIFQTTKYTSEKEEGTPWNEDCGKEKPEEIQDPAALTSDAEQPSGFTFSFFDSDTKDIKEETYRVETVKPGKIVWQEDPRLQDSSSEEEDVTEETDHRNSSPGEASLLEKETTRFFFFSKNDERLQGSDLFWRGVGSNMSRNSWEARTTNLRMDCRKKHKDAKRKMKPK

SEQ ID NO: 290813 - protein, 258 aa, Artificial Sequence
  derived and/or modified sequence
MKVNRETKRLYVGGLSQDISEADLQNQFSRFGEVSDVEIITRKDDQGNPQKVFAYINISVAEADLKKCMSVLNKTKWKGGTLQIQLAKESFLHRLAQEREAAKAKKEESTTGNANLLEKTGGVDFHMKAVPGTEVPGHKNWVVSKFGRVLPVLHLKNQHKRKIIKYDPSKYCHNLKKIGEDFSNTIPISSLTWELEGGNDPMSKKRRGEFSDFHGPPKKIIKVQKDESSTGSLAMSTRPRRVIERPPLTQQQAAQKRT

SEQ ID NO: 290814 - DNA, 3396 bp, Artificial Sequence
  derived and/or modified sequence
atgaaagtgaatcgagagacgaagagactttacgtgggtgggctatctcaggacatctctgaagccgacctgcagaaccaatttagccgctttggagaagtatcggatgtggagattatcactagaaaggacgatcagggaaacccccaaaaagtcttcgcatatatcaacataagcgtcgcggaagcagacctaaaaaagtgcatgtccgtcctgaacaaaactaagtggaaggggggcaccttgcagatccagctggcgaaagagtctttcctgcacagactggcacaggaaagagaggctgctaaagcaaagaaagaggagagtacaaccggaaacgccaatctactggagaaaactggcggagtggacttccatatgaaagctgtcccaggaacagaagtgccaggacacaaaaactgggtcgtgtccaagtttggaagagttctccctgtccttcatctcaagaatcagcataagcatctccgaaatatcatcaaatacgacccttctaaatattgtcataatctaaaaaagattggtgaggatttttcaaatacaatcccaatatcaagcctgacctgggaactggagggaggaaacgatccaatgtccaagaagcggcgcggcgagttctctgatttccacggcccccccaagaagattataaaagtgcaaaaagacgaaagcagcactgggagcctggcaatgagcacccgacctaggagagtcatcgagaggccacccctcacacaacagcaggctgcacagaagcgaacttgcgactcaattactccatctaagtccagccctgtacccgtcagtgatacccagaagctcaaaaacctgccctttaaaacatcaggcttggagacggcaaagaaaagaaactccatttcagatgacgacaccgattctgaagatgagctccgtatgatgatcgcaaaggaggagaacctgcagcgcactacccagccgtcaatcaacgagtcagagtccgaccccttcgaggttgtgagagacgattttaagtccggagttcacaagctgcactccttgatcgggttgggcatcaagaacagggtgagctgtcacgattccgatgacgacattatgaggaatgaccgggagtatgatagcggggataccgatgaaattattgccatgaagaagaacgtggcgaaggtcaaaaactccaccgagttcagtcagatggagaaatctacaaagaagacctcctttaaaaatcgcgagaattgcgagctctcagaccattgcatcaaattgcaaaagcgaaagagcaacgtcgaatccgcgctgtcccatgggctgaagtctttgaaccgtaagagccctagccacagctctagctccgaggacgcagattctgcatcggaactggctgactctgaaggcggcgaagagtacaacgccatgatgaaaaattgccttagggtcaatctgaccctggctgaccttgaacagctggcgggatccgaccttaaagtgcccaatgaagacacaaaatccgatgggcctgaaaccacaacgcagtgcaagttcgaccggggcagtaaatcaccaaaaactcctactggtcttcggcgcggacggcagtgcatccggccagccgagattgtggcatcgctgcttgaaggcgaagaaaatacatgcggaaagcagaagccaaaagaaaataacctaaaaccaaaattccaggctttcaagggagttgggtgcctgtatgaaaaggaaagtatgaaaaagtcacttaaagattccgtcgcttccaacaacaaggatcagaactcgatgaagcatgaggaccctagcatcattagcatggaagacggatccccttacgttaatgggtccctcggtgaggtcacaccatgccagcacgctaagaaagctaatgggcctaactacattcaacctcagaagcgccaaaccacatttgagagtcaagatcgcaaagccgtgtcaccctcgtcgtccgagaaacgttctaagaaccctatatctcgccccctggaaggcaagaaaagcttatctctgagtgcgaaaacccacaacatcggatttgataaggattcctgccattcaactacgaagacagaggcttcccaggaagaacgtagcgacagctctgggttgacctctctgaaaaaatctcctaaagttagttctaaagatactagagagatcaaaactgattttagcctgtccatctctaacagctctgacgtgagcgcgaaggataaacatgcggaggataatgagaagagactggctgcattggaggcgaggcagaaggcaaaggaggtgcagaagaaattagtgcataatgcattggcaaacctcgaaagcatgggcaaaacctccggcaagctcttcgacagttctgacgacgatgagtccgactcagaggatgacagtaaccggtttaagataaagccccaattcgagggtagggccggccagaaacttatggacctgcagtctcatttcggtaccgatgatcggttcaggatggacagccgatttctcgaaacagacagcgaggaggagcaggaggaggtcaacgagaagaagacagcagaagaagaagagttggccgaggagaaaaagaaagcattaaatgtggtgcagtctgttctgcagattaacctgtctaacagtactaatcggggttccgttgccgccaaaaaattcaaggatatcatccattacgatcccacaaagcaggaccacgccacgtatgagaggaagagggatgataagccaaaagagtcaaaggctaagagaaaaaagaaacgagaggaggccgagaaactccctgaagtcagcaaagaaatgtactacaacattgcaatggatctgaaggagattttccagaccaccaagtacacgagcgaaaaagaagaaggcaccccttggaatgaggactgcggaaaggagaagccagaggagattcaggatccagccgcccttaccagtgacgcagagcagccttcaggatttaccttttccttcttcgacagtgacaccaaagatattaaggaggagacctacagagtggaaactgtaaaaccaggcaagatcgtgtggcaggaagaccctcggctgcaggattcatccagcgaggaggaggatgtgaccgaagaaacagaccacagaaatagctcacctggcgaggcaagcctgctagagaaagaaactacgcggtttttctttttcagcaagaatgacgagaggctccaggggtcggatttgttctggaggggagtgggatcaaatatgagcaggaatagctgggaagcgaggaccactaacttgaggatggattgccgcaaaaagcacaaggatgccaagagaaaaatgaaacctaagtag

SEQ ID NO: 290815 - DNA, 3396 bp, Artificial Sequence
  derived and/or modified sequence
atgaaggtgaaccgggagaccaagaggctgtatgtgggcggcctgagccaggacatcagcgaggccgacctgcagaaccagttcagcagatttggagaggtgtctgatgtggagatcatcaccaggaaggatgaccagggcaacccccagaaggtgtttgcctacatcaacatctctgtggccgaggccgacctgaagaagtgcatgtctgtgctgaacaagaccaagtggaagggcggcaccctgcagatccagctggccaaggagagcttcctgcaccggctggcccaggagcgggaggccgccaaggccaagaaggaggagagcaccactggaaatgccaacctgctggagaagacaggaggagtggacttccacatgaaggctgtgcctggaacagaggtgcccggccacaagaactgggtggtgtccaagtttggccgggtgctgcctgtgctgcacctgaagaaccagcacaagcacctgaggaacatcatcaagtatgaccccagcaagtactgccacaacctgaagaagatcggggaggacttcagcaacaccatccccatcagcagcctgacctgggagctggagggcggcaatgaccccatgagcaagaagagaagaggagagttcagtgacttccacggcccccccaagaagatcatcaaggtgcagaaggatgagagcagcacaggcagcctggccatgagcacccggccccggcgggtgattgagcggccccccctgacccagcagcaggccgcccagaagaggacctgtgacagcatcacccccagcaagagcagccctgtgcctgtgtctgacacccagaagctgaagaacctgcccttcaagaccagcggcctggagacagccaagaagaggaacagcatcagtgatgatgacacagacagtgaagatgagctgaggatgatgattgccaaggaggagaacctgcagaggaccacccagcccagcatcaatgaaagtgaaagtgacccctttgaggtggtgagagatgacttcaagtctggagtgcacaagctgcacagcctcatcggcctgggcatcaagaacagagtgtcctgccacgacagtgatgatgacatcatgagaaatgaccgggagtatgacagcggggacacagatgagatcatcgccatgaagaagaatgtggccaaggtgaagaacagcacagagttcagccagatggagaagagcaccaagaagaccagcttcaagaaccgggagaactgtgagctgagtgaccactgcatcaagctgcagaagaggaagagcaatgtggagagcgccctgagccacggcctgaagagcctgaacaggaagagccccagccacagcagcagcagtgaagatgctgacagcgccagcgagctggccgacagcgagggcggggaggagtacaatgccatgatgaagaactgcctgcgggtgaacctgaccctggccgacctggagcagctggccggcagtgacctgaaggtgcccaatgaagacaccaagagtgatggccctgagaccaccacccagtgcaagtttgaccggggcagcaagagccccaagacccccaccggcctgcggcggggccggcagtgcatccggcctgctgagatcgtggccagcctgctggagggggaggagaacacctgtgggaagcagaagcccaaggagaacaacctgaagcccaagttccaggccttcaagggcgtgggctgcctgtatgagaaggagagcatgaagaagagcctgaaggacagcgtggccagcaacaacaaggaccagaacagcatgaagcatgaggaccccagcatcatctccatggaggatggcagcccctacgtgaatggcagcctgggggaggtgaccccctgccagcacgccaagaaggccaacggccccaactacatccagccccagaagaggcagaccacctttgagagccaggacaggaaggctgtgagccccagcagcagcgagaagaggagcaagaaccccatcagccggcccctggagggcaagaagagcctgagcctgagcgccaagacccacaacattggatttgacaaggacagctgccacagcaccaccaagacagaggccagccaggaggagaggagtgacagcagcggcctgaccagcctgaagaagagccccaaggtgagcagcaaggacacccgggagatcaagacagacttcagcctgagcatcagcaacagcagtgatgtgtctgccaaggacaagcatgctgaggacaatgagaagaggctggccgccctggaggcccggcagaaggccaaggaggtgcagaagaagctggtgcacaatgccctggccaacctggagagcatgggcaagaccagcggcaagctgtttgacagcagtgatgatgatgaaagtgacagtgaagatgacagcaaccgcttcaagatcaagccccagtttgagggccgggccggccagaagctgatggacctgcagagccactttggaacagatgaccgcttcaggatggacagccgcttcctggagacagacagcgaggaggagcaggaggaggtgaatgagaagaagacagctgaggaggaggagctggccgaggagaagaagaaggccctgaatgtggtgcagagcgtgctgcagatcaacctgagcaacagcaccaacagaggctctgtggccgccaagaagttcaaggacatcatccactatgaccccaccaagcaggaccacgccacctatgaaaggaagagagatgacaagcccaaggagagcaaggccaagaggaagaagaagcgggaggaggccgagaagctgcctgaggtgtccaaggagatgtactacaacatcgccatggacctgaaggagatcttccagaccaccaagtacaccagcgagaaggaggagggcaccccctggaatgaagactgtgggaaggagaagccagaggagatccaggaccctgctgccctgaccagtgatgctgagcagcccagcggcttcaccttctccttctttgacagcgacaccaaggacatcaaggaggagacctacagagtggagaccgtgaagccaggcaagatcgtgtggcaggaggacccccggctgcaggacagcagcagcgaggaggaggatgtgacagaggagacagaccacaggaacagcagccctggagaggccagcctgctggagaaggagaccacccgcttcttcttcttcagcaagaatgatgagcggctgcagggcagtgacctcttctggaggggcgtgggcagcaacatgagcagaaattcctgggaggcccggaccaccaacctgaggatggactgcaggaagaagcacaaggatgccaagaggaagatgaagcccaagtag

SEQ ID NO: 290816 - DNA, 3396 bp, Artificial Sequence
  derived and/or modified sequence
atgaaggtgaaccgggagaccaagcggctgtacgtgggcggcctgagtcaggatatcagcgaggcggatctgcagaaccagttttcaaggttcggggaggtctctgatgtcgaaattatcacacggaaagacgatcaaggtaatcctcagaaagtgttcgcctacatcaacatatctgtagcagaggcagatctgaagaagtgcatgagtgtgctgaacaaaacaaaatggaaaggggggactctacagatccaactggctaaggaatcatttctgcatcggctggcccaggagcgcgaagccgccaaggctaagaaagaggagagtacaacgggaaacgcgaacttgttggagaagaccggcggggtggatttccacatgaaagcagtccccggcaccgaggtgcccggccataaaaattgggtcgtctcgaaatttggccgagtccttcccgtgctccatctgaagaatcagcataagcatctgcgaaacattatcaagtatgatcctagcaaatattgtcataatctaaagaaaatcggggaagacttttccaacaccatccccatctcgagcctaacttgggaactcgaaggcggaaatgacccaatgtccaagaagcgccgcggggagttctccgactttcacggcccacctaagaagatcattaaagtgcagaaagatgagagctccactgggtcacttgctatgtccaccaggcctcgccgcgtgattgagcgcccccctctcacccagcaacaggctgctcagaaaagaacttgcgactccattacgccgtcgaagagctcccctgtccccgtgtccgacacccagaaattgaagaatctgcccttcaagaccagcggtctggagaccgcaaagaagagaaattccatctctgatgatgacactgacagtgaagatgagctgaggatgatgatcgcgaaggaggagaacctgcaacggacaacccagccaagcattaacgagtctgaatcagatccgtttgaagtggttagagatgacttcaaatccggtgttcacaagcttcattccttgattggtctcgggatcaaaaatcgcgtctcatgtcatgatagcgacgatgatataatgcgaaacgatcgcgagtacgacagtggcgataccgacgaaatcattgccatgaaaaaaaatgtggcaaaggtgaagaacagcaccgaattttcccagatggaaaagagcactaaaaaaaccagcttcaaaaaccgggagaactgcgaactgtccgatcactgcattaagctccagaaaaggaaatctaatgtggaatctgccctctcacacggtttaaagtccttaaatcgcaaatcaccttcccactcttcgtcttccgaggacgccgattccgcaagcgaactggccgactccgagggtggcgaagaatacaacgctatgatgaagaattgccttcgggtaaacctgaccctcgccgatctggagcaactcgctggatccgatcttaaggtgccaaatgaggacactaagtccgacggccccgaaactactacccagtgtaaattcgaccgagggagcaagtcacctaaaacaccgacgggcctccgccgcggcagacagtgcatcagaccagctgaaatcgtcgcttctctactcgagggtgaggagaacacgtgtggcaaacagaagccgaaagagaataatctgaaacccaagtttcaggcctttaaaggagtgggatgcttgtacgagaaagaatctatgaagaagtcacttaaggatagtgtagctagcaacaacaaggatcagaactctatgaagcacgaggacccttctatcatctccatggaagatggctctccatatgtcaatggatccctaggagaggtgaccccctgtcagcatgctaaaaaggccaacggacccaactacatccagccacagaagaggcagaccactttcgagagccaagatagaaaggctgtttctccttcttcgtcagaaaaacgctccaaaaatcctatctcacgtccactcgaggggaaaaaatctctcagtctctcagcgaaaacccataacatcgggttcgataaggacagctgccacagtacaactaaaactgaggcttctcaagaagaacgaagtgactcaagcgggctgacctccctgaaaaagtcccctaaggtaagctctaaagacacacgggaaattaagacagatttttctcttagcataagcaatagcagtgatgtgagcgccaaagacaagcacgccgaggacaatgaaaaacggttggccgccttggaagcccgccagaaggctaaggaggtacaaaagaagttagtgcataacgcgttagcaaatctcgaatctatgggcaagaccagcggcaagctgtttgatagttctgacgacgacgagtctgactccgaagatgacagcaatagatttaagataaaaccccaattcgaaggaagggcgggccagaagcttatggaccttcaaagtcactttggcaccgatgaccggtttcggatggatagtcgttttctcgagacagactccgaggaggaacaggaagaagtaaacgaaaagaaaacagccgaagaggaggaattggccgaggagaagaagaaagctctgaacgtcgtccagtctgtgctccaaattaatctctccaatagcaccaatagaggtagtgtggccgctaaaaaattcaaggacatcatccactatgatcctactaaacaggaccacgctacctatgagcgcaaacgggatgacaaacctaaagagtctaaagctaaacgaaagaagaagagagaggaggccgagaaactcccagaggtaagcaaggagatgtactataacatcgcaatggatttgaaagagatcttccagacaacaaaatacacctcagagaaagaggagggaaccccatggaacgaggactgcggtaaagagaagcccgaagagatacaggatcccgctgccctgaccagtgacgctgaacagccatccggttttacattcagtttctttgactcagatacaaaagacataaaggaggaaacttatagggtggagacagtcaagccaggtaagattgtttggcaggaggatccccgcttgcaggactcaagctcagaggaggaagacgtcactgaagaaacagaccacaggaattcaagtccaggggaggcttctctgcttgaaaaggagacaacaaggtttttctttttttccaagaatgacgaacggctgcaaggatccgacctattttggcgcggggtgggcagcaacatgagcaggaactcttgggaagccaggacaacgaatctgaggatggactgccgcaaaaaacacaaggacgcaaagcgcaaaatgaaacctaaatag

SEQ ID NO: 290817 - DNA, 4210 bp, Artificial Sequence
  derived and/or modified sequence
cttacgccgacctagtccaggaattggtacacacagcgatagtgttcaatagaaactaggggattttggtttaggctcttttgcagtcgttgagggggaggtgacggaggcgtcagggaaggtgggaggacggaaaaggaaattaaaagctcttgggaactgaattgtggtaacggaaccttaggaggctgggttggaaatcgagtaggaaggaagagaggatgctccgttgggacacgtgaccagaagttaggggctgcagcggcgctggctttaggtgaacgacgtgaaaattacttttcccactgaaacacacccaagtatatgcccagccttcatgaaagtgaacagagaaacgaagcgcctttatgtgggtggccttagccaggacatttctgaggcagacctacaaaatcagttcagcagatttggagaagtttcggatgtggagatcatcacacggaaagatgaccaaggaaacccacagaaagtttttgcatatatcaacatcagtgtagcagaagcggacctgaaaaaatgtatgtctgttttaaataaaacaaaatggaaaggtggaacattacaaattcaactagcaaaagaaagctttctgcacagattggcccaagagagagaagcagcaaaagctaagaaagaagaatcaacaacaggtaacgccaacttgttagaaaagacaggaggagtggatttccatatgaaagctgtgccagggacagaagtgccagggcataagaattgggttgtgagcaaatttggaagagtcttacctgttcttcaccttaaaaatcaacataaacacttgcgtaacatcatcaaatatgatccctcaaaatactgccacaacctgaagaagataggggaggatttctcaaacaccattcctatatccagcctgacttgggaattagaaggagggaatgaccctatgagtaagaaacggcgaggagagttctctgactttcatggccctcccaagaagataataaaagtgcagaaggatgagagttccactgggtctctggccatgagtacaaggcccaggagggtaatagagagaccacccttaacacagcaacaggctgcacaaaaaagaacttgtgattccattactccttctaaatcatctcctgtacctgtttctgatactcagaaacttaaaaatctaccttttaagacttctggcttggaaactgccaagaagagaaacagcatttctgatgatgatactgattctgaagatgaattgagaatgatgattgcgaaagaggaaaacttacagagaactacacaaccctcaataaatgaatctgaaagtgatccttttgaagttgtaagggatgatttcaaatcaggcgttcacaaactgcattctttaataggtttaggtatcaaaaatcgtgtctcttgccatgatagtgatgatgatattatgagaaatgatcgtgagtatgactcaggagatacagatgaaattattgcgatgaaaaaaaatgttgctaaggtcaaaaacagtacagaattttcacaaatggaaaaatctacgaagaaaacttctttcaaaaatagagaaaactgtgagctttctgatcactgtattaaactacaaaaaagaaaaagcaatgtagagtcagccctcagtcatggattaaagtctcttaatcgtaaatctccctctcactccagtagcagtgaagatgctgattctgcatcagaattagctgactctgaaggaggtgaggagtataatgccatgatgaaaaactgccttcgtgtgaatctcactttagctgatttggaacaattggctggcagtgatctgaaggttccaaatgaagatactaagagtgatggaccagaaaccaccacccaatgcaagtttgacagaggctccaagagccccaagactcccactggcctccgcagaggccgacagtgtattcgtcctgcggagattgtggcttccctgttagaaggagaggagaacacctgtggcaaacagaaaccaaaggaaaacaatttaaagccaaaatttcaggctttcaagggagtaggctgtctatatgaaaaggagtcaatgaaaaaatccttgaaagacagtgttgcctctaacaataaagatcagaattccatgaaacatgaggatcccagtatcatatccatggaagatgggtccccatatgttaatggctcattaggtgaagtgactccatgccaacatgcaaagaaggcgaatggcccaaactatattcagcctcaaaaaagacagaccacttttgaaagccaggatcgcaaggcagtgtcccctagcagttctgaaaagagaagtaagaatcctatttctaggccattagaaggtaagaagtccttaagtcttagtgcaaagactcacaacataggctttgacaaagacagctgccatagtaccacaaagacagaagcttcacaggaagagcggtctgattcaagcggcctcacatctctcaagaaatcaccaaaggtctcatccaaggacactcgggaaatcaaaactgatttctcactttctattagtaattcgtcagatgtgagtgctaaagataagcatgctgaagacaatgagaagcgtttggcagccttggaagcgaggcaaaaagcaaaagaagtgcagaagaagctggtgcataatgctctggcaaatttggagtctatgggtaaaacatcagggaagctgtttgatagcagtgatgatgacgaatctgattctgaagatgacagtaataggttcaaaattaaacctcagtttgagggcagagctggacagaagctcatggatttacagtcgcactttggcaccgatgacagattccgcatggactctcgatttctagaaactgacagtgaagaggaacaggaagaggtaaatgaaaagaaaactgctgaggaagaagagcttgctgaagaaaaaaagaaagccctgaatgttgtacaaagtgttttgcaaatcaacttaagcaattctacaaacagaggatcagtagctgctaagaaatttaaggacatcatacattatgatccaacgaagcaagaccatgccacttacgaaagaaaaagagatgataagccaaaagaaagtaaagcaaaacgaaaaaagaaaagggaggaagctgagaaactacctgaggtgtctaaagaaatgtattataatattgctatggatctgaaagaaatattccaaactacaaaatataccagtgaaaaggaagagggcacaccctggaatgaggactgtggtaaagagaaacctgaggaaatccaggaccctgcagctctgaccagtgacgctgagcagcccagcgggttcacgttctctttttttgattcagacactaaagacataaaggaagagacctacagagttgaaacagtgaaacctggaaagattgtctggcaggaagaccctcgtttacaagacagcagttcagaagaggaagatgttactgaagaaacagatcacagaaactccagtcctggagaagcatcattacttgagaaagagaccactagatttttctttttctctaagaatgatgaacgacttcaaggttctgacttattctggagaggagtaggaagtaatatgagcaggaactcttgggaggccagaacaaccaacctgcgtatggattgtcgaaagaaacataaagacgcaaaaaggaaaatgaaaccaaaataataaatgtcagctggttttgatactgaatgtgaacaaggctcacctaaggaaactgacccagaaaacagttttagctgacaaagaagaaatttcagagtgaaggaattttaaaaatctggctgacggaatatcattctggttgccatctttttctgtggaactcctctgcatttcttcctaagtaattacttcaaaaattaaattcaacttcttataaaggaagaacaagatagtccttgaaaatactttttgtatataatctctttgccctctatcctgagtaactaatggacatcttctcatgcaaggtttatatgaagcctttttaaataaatgagtcaaagcacttgtattttccagcctaggctttgtgtgaattataggctatttgaaattttatttctgattatgtcaaatacaccttccattttgtcatttttgtttaaactgataaattacaagtcaacattgagtttt

SEQ ID NO: 290818 - DNA, 3396 bp, Artificial Sequence
  derived and/or modified sequence
atgaaggtgaatagagagactaagagactgtacgtcggtgggctgtcccaggatatcagtgaagctgacctgcagaatcagttctccagattcggcgaagtgagcgatgtcgaaattataacacggaaggacgatcaggggaatcctcagaaggtcttcgcctacattaatatttccgttgcagaagctgatctcaaaaaatgcatgagcgtgctcaataagacgaaatggaaggggggaacgctccaaatccagctggctaaggagagcttcctgcacagactcgcacaagaacgggaggctgctaaggcaaagaaggaagagagtaccactggcaatgctaatcttcttgaaaagaccggaggagtggacttccacatgaaagcagttcccggaacagaggtccccggtcataaaaactgggtggtgtcaaagttcggacgagtgttgccagtgctacacttaaaaaaccagcacaaacacctgcgtaacatcattaaatatgacccctccaagtactgccacaatctgaaaaaaattggcgaggacttctccaatacaatccctatcagctctcttacctgggagttagagggcggaaacgaccctatgtccaagaaaaggcgcggtgaattctcagacttccatgggccacccaaaaagatcatcaaagtgcagaaggatgagtcctcgacgggctctctggccatgagtacccgtcccagaagagtgattgagcggccacccctgacccaacagcaagcagcacagaagaggacctgcgattctattacgccctccaagtcaagccctgttcctgtctccgatacgcaaaagctgaaaaacctgccctttaagacatctggcctggagactgcaaaaaaacgaaatagcatctccgacgatgacactgattccgaggacgaactgcgcatgatgatagctaaagaagagaatctgcagcgcactactcagccctccatcaacgagtcagaaagcgaccctttcgaggttgtgagggacgacttcaagtctggagtccacaagctgcactccttgatcggtctaggcattaagaatagagttagttgtcatgatagtgacgatgatatcatgcggaacgaccgagagtacgattccggcgacacagacgaaataatcgcaatgaagaaaaacgtggccaaggtgaagaatagcacagaattctcccagatggagaagtccacaaagaagacatcatttaagaacagggagaattgtgaactctctgatcactgtatcaaattacagaagagaaagagtaatgtcgagagtgccctgagtcatggactcaagtccttgaacagaaaatctccgagtcacagctcctcctccgaagatgctgactccgcctctgagctcgcggattccgaggggggagaggaatataatgccatgatgaaaaactgcttaagggtcaacctgactctggcggatctggagcaattagcgggaagcgatctcaaagtgcctaacgaggacacaaaaagtgatggacctgagactacaactcagtgcaaattcgatcgcggatctaagtctccaaaaactcctaccggccttagacgcggtcggcagtgtattcggcctgccgagattgtggcatctctgctggagggggaagaaaatacctgtggaaagcagaagcccaaggagaataaccttaaaccaaagtttcaggcttttaaaggggtgggatgcctgtacgaaaaggagtcaatgaaaaagtcactcaaagattcggtcgcctctaataataaagaccagaatagtatgaagcacgaagatccaagtatcatttcaatggaggacggatcgccgtacgtaaacggatctctgggtgaggttaccccgtgtcagcacgccaagaaagccaatgggcctaattatattcagccccagaagcgccagaccacttttgagagccaagatcgaaaagctgtgagtccatcctctagcgagaagagaagcaaaaatccaattagcaggcctctggaaggaaaaaagagtctgtctctgagtgctaagactcacaacatcggtttcgacaaggactcttgtcacagcaccacaaaaactgaagcatcgcaggaggagcggtccgatagtagcgggctcacctcactgaagaagtccccgaaagtgtctagtaaagacacccgagagatcaagaccgattttagcctgtcaatcagtaatagctccgatgtgtccgccaaagacaaacacgccgaggataacgaaaaacgactggccgctttggaggctagacaaaaggcaaaagaagtgcaaaaaaagttagttcacaatgctctggctaacctggagagtatgggaaagacctcggggaagctgttcgactcttcagacgatgacgaaagcgattctgaagatgacagtaacagatttaagatcaagccccagttcgaaggtagggctggccagaagctcatggacctgcaatctcatttcggaaccgacgatcgtttccgcatggacagtcgcttcctggagactgacagcgaagaggaacaggaggaggtcaacgagaagaaaactgcggaagaggaggagcttgccgaggagaagaagaaggctctcaacgtggtgcagtctgttttgcagatcaatctgtccaactctacaaatcggggttcagtggccgctaaaaaatttaaagacattattcactatgacccaacaaaacaggaccatgctacctacgaaaggaaaagggacgataagcctaaagagtccaaagctaagcgtaagaagaaacgcgaagaagcagagaagctgcctgaagtctctaaagagatgtattacaacatagcaatggacctgaaggaaattttccagacaactaagtacacatcggaaaaagaggaagggaccccatggaacgaggactgtggcaaggagaagccagaagagatacaggaccctgctgcgttaaccagtgacgcagagcaaccctctgggttcacattctcattcttcgatagtgacaccaaggatatcaaggaagagacgtaccgtgtggagactgtcaagcccggaaaaattgtttggcaagaggatccgaggttgcaggactcttcttcggaggaggaagacgtcacagaagagaccgaccacaggaacagctcccctggcgaagcgagcctcctggaaaaggaaaccacgaggtttttcttcttctctaagaacgatgaacgcttgcagggatctgatttgttctggagaggcgttgggtctaatatgagtaggaacagttgggaagctagaactactaacctccgcatggactgtcgcaagaagcacaaagacgccaagagaaagatgaaacctaagtag

SEQ ID NO: 290819 - DNA, 3396 bp, Artificial Sequence
  derived and/or modified sequence
atgaaggtgaacagagagaccaagagactgtacgtgggcggcctgagccaggacatcagcgaggccgacctgcagaaccagttcagcagattcggcgaggtgagcgacgtggagatcatcaccagaaaggacgaccagggcaacccccagaaggtgttcgcctacatcaacatcagcgtggccgaggccgacctgaagaagtgcatgagcgtgctgaacaagaccaagtggaagggcggcaccctgcagatccagctggccaaggagagcttcctgcacagactggcccaggagagagaggccgccaaggccaagaaggaggagagcaccaccggcaacgccaacctgctggagaagaccggcggcgtggacttccacatgaaggccgtgcccggcaccgaggtgcccggccacaagaactgggtggtgagcaagttcggcagagtgctgcccgtgctgcacctgaagaaccagcacaagcacctgagaaacatcatcaagtacgaccccagcaagtactgccacaacctgaagaagatcggcgaggacttcagcaacaccatccccatcagcagcctgacctgggagctggagggcggcaacgaccccatgagcaagaagagaagaggcgagttcagcgacttccacggcccccccaagaagatcatcaaggtgcagaaggacgagagcagcaccggcagcctggccatgagcaccagacccagaagagtgatcgagagaccccccctgacccagcagcaggccgcccagaagagaacctgcgacagcatcacccccagcaagagcagccccgtgcccgtgagcgacacccagaagctgaagaacctgcccttcaagaccagcggcctggagaccgccaagaagagaaacagcatcagcgacgacgacaccgacagcgaggacgagctgagaatgatgatcgccaaggaggagaacctgcagagaaccacccagcccagcatcaacgagagcgagagcgaccccttcgaggtggtgagagacgacttcaagagcggcgtgcacaagctgcacagcctgatcggcctgggcatcaagaacagagtgagctgccacgacagcgacgacgacatcatgagaaacgacagagagtacgacagcggcgacaccgacgagatcatcgccatgaagaagaacgtggccaaggtgaagaacagcaccgagttcagccagatggagaagagcaccaagaagaccagcttcaagaacagagagaactgcgagctgagcgaccactgcatcaagctgcagaagagaaagagcaacgtggagagcgccctgagccacggcctgaagagcctgaacagaaagagccccagccacagcagcagcagcgaggacgccgacagcgccagcgagctggccgacagcgagggcggcgaggagtacaacgccatgatgaagaactgcctgagagtgaacctgaccctggccgacctggagcagctggccggcagcgacctgaaggtgcccaacgaggacaccaagagcgacggccccgagaccaccacccagtgcaagttcgacagaggcagcaagagccccaagacccccaccggcctgagaagaggcagacagtgcatcagacccgccgagatcgtggccagcctgctggagggcgaggagaacacctgcggcaagcagaagcccaaggagaacaacctgaagcccaagttccaggccttcaagggcgtgggctgcctgtacgagaaggagagcatgaagaagagcctgaaggacagcgtggccagcaacaacaaggaccagaacagcatgaagcacgaggaccccagcatcatcagcatggaggacggcagcccctacgtgaacggcagcctgggcgaggtgaccccctgccagcacgccaagaaggccaacggccccaactacatccagccccagaagagacagaccaccttcgagagccaggacagaaaggccgtgagccccagcagcagcgagaagagaagcaagaaccccatcagcagacccctggagggcaagaagagcctgagcctgagcgccaagacccacaacatcggcttcgacaaggacagctgccacagcaccaccaagaccgaggccagccaggaggagagaagcgacagcagcggcctgaccagcctgaagaagagccccaaggtgagcagcaaggacaccagagagatcaagaccgacttcagcctgagcatcagcaacagcagcgacgtgagcgccaaggacaagcacgccgaggacaacgagaagagactggccgccctggaggccagacagaaggccaaggaggtgcagaagaagctggtgcacaacgccctggccaacctggagagcatgggcaagaccagcggcaagctgttcgacagcagcgacgacgacgagagcgacagcgaggacgacagcaacagattcaagatcaagccccagttcgagggcagagccggccagaagctgatggacctgcagagccacttcggcaccgacgacagattcagaatggacagcagattcctggagaccgacagcgaggaggagcaggaggaggtgaacgagaagaagaccgccgaggaggaggagctggccgaggagaagaagaaggccctgaacgtggtgcagagcgtgctgcagatcaacctgagcaacagcaccaacagaggcagcgtggccgccaagaagttcaaggacatcatccactacgaccccaccaagcaggaccacgccacctacgagagaaagagagacgacaagcccaaggagagcaaggccaagagaaagaagaagagagaggaggccgagaagctgcccgaggtgagcaaggagatgtactacaacatcgccatggacctgaaggagatcttccagaccaccaagtacaccagcgagaaggaggagggcaccccctggaacgaggactgcggcaaggagaagcccgaggagatccaggaccccgccgccctgaccagcgacgccgagcagcccagcggcttcaccttcagcttcttcgacagcgacaccaaggacatcaaggaggagacctacagagtggagaccgtgaagcccggcaagatcgtgtggcaggaggaccccagactgcaggacagcagcagcgaggaggaggacgtgaccgaggagaccgaccacagaaacagcagccccggcgaggccagcctgctggagaaggagaccaccagattcttcttcttcagcaagaacgacgagagactgcagggcagcgacctgttctggagaggcgtgggcagcaacatgagcagaaacagctgggaggccagaaccaccaacctgagaatggactgcagaaagaagcacaaggacgccaagagaaagatgaagcccaagtag

SEQ ID NO: 290820 - protein, 1861 aa, Artificial Sequence
  derived and/or modified sequence
MMDLVLEEDVTVPGTLSGCSGLVPSVPDDLDGINPNAGLGNGLLPNVSEETVSPTRARNMKDFENQITELKKENFNLKLRIYFLEERMQQEFHGPTEHIYKTNIELKVEVESLKRELQEREQLLIKASKAVESLAEAGGSEIQRVKEDARKKVQQVEDLLTKRILLLEKDVTAAQAELEKAFAGTETEKALRLRLESKLSEMKKMHEGDLAMALVLDEKDRLIEELKLSLKSKEALIQCLKEEKSQMACPDENVSSGELRGLCAAPREEKERETEAAQMEHQKERNSFEERIQALEEDLREKEREIATEKKNSLKRDKAIQGLTMALKSKEKKVEELNSEIEKLSAAFAKAREALQKAQTQEFQGSEDYETALSGKEALSAALRSQNLTKSTENHRLRRSIKKITQELSDLQQERERLEKDLEEAHREKSKGDCTIRDLRNEVEKLRNEVNEREKAMENRYKSLLSESNKKLHNQEQVIKHLTESTNQKDVLLQKFNEKDLEVIQQNCYLMAAEDLELRSEGLITEKCSSQQPPGSKTIFSKEKKQSSDYEELIQVLKKEQDIYTHLVKSLQESDSINNLQAELNKIFALRKQLEQDVLSYQNLRKTLEEQISEIRRREEESFSLYSDQTSYLSICLEENNRFQVEHFSQEELKKKVSDLIQLVKELYTDNQHLKKTIFDLSCMGFQGNGFPDRLASTEQTEIMKDLSKGGCKNGYLRHTESKISDCDGAHAPGCLEEGAFINLLAPLFNEKATLLLESRPDLLKVVRELLLGQLFLTEQEVSGEHLDGKTEKTPKQKGELVHFVQTNSFSKPHDELKLSCEAQLVKAGEVPKVGLKDASVQTVATEGDLLRFKHEATREAWEEKPINTALSAEHRPENLHGVPGWQAALLSLPGITNREAKKSRLPILIKPSRSLGNMYRLPATQEVVTQLQSQILELQGELKEFKTCNKQLHQKLILAEAVMEGRPTPDKTLLNAQPPVGAAYQDSPGEQKGIKTTSSVWRDKEMDSDQQRSYEIDSEICPPDDLASLPSCKENPEDVLSPTSVATYLSSKSQPSAKVSVMGTDQSESINTSNETEYLKQKIHDLETELEGYQNFIFQLQKHSQCSEAIITVLCGTEGAQDGLSKPKNGSDGEEMTFSSLHQVRYVKHVKILGPLAPEMIDSRVLENLKQQLEEQEYKLQKEQNLNMQLFSEIHNLQNKFRDLSPPRYDSLVQSQARELSLQRQQIKDGHGICVISRQHMNTMIKAFEELLQASDVDYCVAEGFQEQLNQCAELLEKLEKLFLNGKSVGVEMNTQNELMERIEEDNLTYQHLLPESPEPSASHALSDYETSEKSFFSRDQKQDNETEKTSVMVNSFSQDLLMEHIQEIRTLRKRLEESIKTNEKLRKQLERQGSEFVQGSTSIFASGSELHSSLTSEIHFLRKQNQALNAMLIKGSRDKQKENDKLRESLSRKTVSLEHLQREYASVKEENERLQKEGSEKERHNQQLIQEVRCSGQELSRVQEEVKLRQQLLSQNDKLLQSLRVELKAYEKLDEEHRRLREASGEGWKGQDPFRDLHSLLMEIQALRLQLERSIETSSTLQSRLKEQLARGAEKAQEGALTLAVQAVSIPEVPLQPDKHDGDKYPMESDNSFDLFDSSQAVTPKSVSETPPLSGNDTDSLSCDSGSSATSTPCVSRLVTGHHLWASKNGRHVLGLIEDYEALLKQISQGQRLLAEMDIQTQEAPSSTSQELGTKGPHPAPLSKFVSSVSTAKLTLEEAYRRLKLLWRVSLPEDGQCPLHCEQIGEMKAEVTKLHKKLFEQEKKLQNTMKLLQLSKRQEKVIFDQLVVTHKILRKARGNLELRPGGAHPGTCSPSRPGS

SEQ ID NO: 290821 - DNA, 5586 bp, Artificial Sequence
  derived and/or modified sequence
atgatggaccttgtgcttgaggaggacgtcaccgtgcctggcacactgtcaggatgtagtggactcgtccctagcgtgccagacgacctcgacgggatcaatccaaacgctgggttgggcaacggcctgctgcctaacgtttccgaagaaaccgtttctcctaccagagcgaggaacatgaaagattttgagaatcagatcaccgaattgaaaaaagaaaatttcaacttgaagctacggatctatttcttagaggagcggatgcaacaggaattccatggcccaaccgaacacatatataagaccaacattgagctgaaagtagaagtcgagagcctgaagagggaactgcaggagagggaacagctacttattaaagctagcaaggcagtggagtcattggctgaggcaggtgggtctgaaattcagagggtcaaagaggacgctaggaagaaggtacagcaggtggaagatctcctgacgaaaaggatactgctgcttgaaaaagacgtgacagccgcccaggcagaactcgaaaaggcgtttgcagggacagaaaccgagaaggcactgcgcctgagactggagtccaagctgagtgagatgaaaaaaatgcacgagggagacctggcgatggctctcgtgttagatgagaaagacaggctcattgaggagctcaaactaagcctcaaaagtaaggaggcactgattcagtgccttaaagaagagaagtctcagatggcttgtcccgacgaaaacgtgtcttccggcgaactgcggggactgtgcgccgcaccacgggaggagaaggaacgagagactgaagccgctcaaatggaacaccagaaagaaagaaactccttcgaagagcggatccaagctctggaagaagaccttcgcgaaaaggagagggagatagcaacagagaagaaaaactctctaaagagggacaaggccatccaaggattaacaatggctcttaagtctaaggagaagaaggtcgaagagctgaattccgagatcgagaagctgtcagccgccttcgccaaagcaagggaggcccttcagaaggctcaaacccaggagtttcagggtagcgaagattatgaaactgccctgagtggaaaggaggccctgtccgctgctttgcgctcccaaaatcttaccaagagcaccgaaaatcaccggctcaggcggagtatcaagaaaatcactcaagaattgtcggacttgcaacaagagcgagaaaggctcgagaaagatctggaagaggcccatagagaaaagtccaaaggggactgtaccatccgggacttgcggaacgaggtggagaagctacgtaacgaggtaaatgaacgtgagaaggctatggagaacagatataaaagtctcctgagcgaatcaaacaaaaagcttcacaaccaagaacaggttatcaaacatttgacggaatcaaccaatcagaaggatgtgttgttgcagaaatttaacgagaaagacttggaagtgattcaacagaattgttatctcatggccgcagaagacctggaactccgctcagaagggctaataacagaaaagtgctcatcacagcagccccccggatccaaaacaatattctcaaaggagaagaagcaatcatctgactatgaggagctgatccaggtgctgaaaaaggaacaggatatctacacacatctagtaaaaagccttcaggaatccgattctatcaataacctgcaggcagaactgaataagatttttgccttgcggaagcagttggagcaggacgtgctgagctaccagaacctgcgcaaaaccttagaagagcagatcagcgaaatcagacgacgcgaggaggagtcattttctctgtattccgatcagacatcttacctctccatctgtctggaggagaacaaccggttccaggtggagcactttagtcaggaggagctgaaaaagaaggtgtcggacttgattcagcttgtgaaggagctgtacacagacaatcaacacctgaagaaaactattttcgatctttcatgcatggggtttcaggggaacgggttccccgatagactagccagcaccgagcaaaccgagattatgaaggatctgtctaaagggggttgcaaaaatggttatctaagacacacagagagcaagataagtgactgcgatggtgcccacgctcccggctgcctcgaggagggtgcattcataaacttgctggcccctttattcaacgagaaagctaccttgctgctcgagtcaagaccagacttacttaaagtcgtgcgagagctccttttgggacagttattcttgaccgaacaggaagtttcaggagagcatctagacggtaagaccgaaaagacacccaaacaaaagggggaactagtccactttgtgcagacgaatagtttctctaagccacatgatgagctgaagctcagctgtgaagctcagctggtgaaggccggcgaggtgcccaaagtggggctcaaggatgccagtgtgcagaccgtagcaactgaaggcgacctgctgcgatttaaacacgaggccacaagggaggcttgggaggagaaaccaattaacacagccctctcggccgaacacaggccagaaaacttgcacggtgtacctggctggcaggcagctctgctgagcctccctggcatcaccaatcgcgaagcaaagaagtcacgacttccaattctgattaaaccaagccgttcgttgggaaatatgtaccgcctgccagctacacaggaggtcgtgacccagcttcaaagccagatcctggaactgcagggtgaacttaaagaattcaagacatgcaacaaacagttgcaccagaagctgatccttgccgaggcagttatggagggccgacccacaccagataagacgctgctcaatgcccaaccacctgttggcgccgcatatcaggattccccaggggaacagaagggaattaaaacaacttcctccgtttggcgtgacaaggaaatggacagcgatcagcagagaagctatgaaatagacagtgaaatttgtccacctgacgacttagctagcctaccgtcttgcaaagaaaacccagaagatgttctcagtcctacgtctgtagcaacgtaccttagcagtaagagccagccctctgctaaagtgagcgtgatgggcactgaccagtctgagtcgattaacacctccaacgaaaccgaatacctgaagcagaagattcatgaccttgaaacagagcttgaaggctatcagaatttcatcttccaactgcagaaacactctcagtgttctgaggccattatcacagtgctctgtgggactgagggagcccaggacggcctgtcaaaacctaagaacgggagcgacggtgaagagatgaccttttcttctttgcatcaagtgcggtacgtcaagcacgtgaagatactcggacccctggcacccgagatgatagacagccgcgtgcttgaaaatctgaagcagcagctggaggaacaagagtataagctgcagaaagagcaaaatctcaacatgcagctgttttctgagatccacaacttgcagaacaagtttagagacctgtctcctcccaggtatgattctctggtgcagtctcaagccagggaactgagcttgcagcggcagcagatcaaagatgggcacggcatatgcgtgatatcccgtcagcacatgaacactatgatcaaggccttcgaggaacttctgcaggcctctgatgtagattactgtgttgctgaaggattccaggagcagctcaaccagtgtgccgaactcctggagaagctcgagaagctgttcctgaatggaaaaagtgtgggagtggagatgaatacccagaatgaactcatggaacggattgaagaggacaacctgacatatcagcatctcctgcctgagtctccggagccgtctgccagccacgcattgtcggactacgaaacctctgaaaagtcattcttcagccgcgaccagaagcaggataatgaaacagagaaaacctcagtgatggttaacagcttctcgcaggacctgctcatggaacacatacaggaaatacgtactctccgcaagcgtctcgaggagtccattaaaactaacgaaaagttgcgcaagcagctggaaagacaggggagtgaatttgtgcaggggagcacgagcattttcgctagtggttccgagctgcattcatctctaaccagcgaaatacatttcttgcgcaagcaaaaccaggccctgaacgcaatgctcatcaaggggagcagggacaagcaaaaggagaacgataaactacgagagagcctgtccaggaaaaccgtttcccttgagcacctacaacgtgagtacgctagtgttaaggaggaaaatgagcgtctgcagaaggaaggcagtgagaaggaaaggcataaccagcagcttatccaggaggtgcgctgtagcgggcaggaactctcgagggtgcaggaggaggtgaaactccgtcagcagctgttgtcacaaaatgataaattgctgcagtcgttgcgtgtggaactgaaagcgtatgagaagttagatgaggaacatcgccggctgcgagaggcttccggcgaggggtggaagggccaagacccatttagggatctccatagtctattgatggagatccaggctctgaggttacagctcgagcgctctatcgagacctcaagtaccctgcagtccaggctgaaggagcagttggccaggggagccgagaaggcgcaggagggtgcgttgaccctagccgtgcaagccgttagcatcccagaagtccctctgcagcccgataagcatgacggtgacaaataccctatggagagtgacaacagctttgacctgttcgattcatcgcaggccgttaccccgaaaagcgtcagcgaaactccccccttgtcaggaaacgacacagactctttatcctgtgactccgggtcatcagctactagcaccccctgtgtgtccagattggtgaccggccaccacttatgggcgagtaaaaacggaaggcacgtcctgggccttatcgaggattacgaagcactcctgaagcagatctcccaaggccaacggctgctcgccgaaatggacatccaaacccaggaagccccctcatccacatcacaggagctgggtacgaagggcccacatccagcacctctgagcaagttcgtgagttccgtgagcactgccaagttgacacttgaggaggcatacagacgactgaaactactgtggcgagtgtctctgcctgaggacggtcagtgtccattgcactgtgaacaaataggcgagatgaaagccgaagtcacaaagctccacaaaaagctttttgaacaggagaagaagctacagaatacaatgaaactgcttcaactctccaagcgccaggagaaggtcatttttgaccagctcgtagtaacccacaagattttgcgaaaagcacggggaaatctagagctgcgccccgggggtgcgcatcccggtacctgctccccttcccgccccggttcatag

SEQ ID NO: 290822 - DNA, 5586 bp, Artificial Sequence
  derived and/or modified sequence
atgatggacctggtgctggaggaggatgtgacagtgcccggcaccctgagcggctgcagcggcctggtgcccagcgtgcctgatgacctggatggcatcaaccccaatgccggcctgggcaatggcctgctgcccaacgtgtctgaggagaccgtgagccccacccgggccaggaacatgaaggactttgagaaccagatcacagagctgaagaaggagaacttcaacctgaagctgcgcatctacttcctggaggagaggatgcagcaggagttccacggccccacagagcacatctacaagaccaacatcgagctgaaggtggaggtggagagcctgaagcgggagctgcaggagcgggagcagctgctgatcaaggccagcaaggctgtggagagcctggccgaggccggcggcagcgagatccagagggtgaaggaggatgccaggaagaaggtgcagcaggtggaggacctgctgaccaagaggatcctgctgctggagaaggatgtgacagctgcccaggccgagctggagaaggcctttgctggaacagaaacagagaaggccctgcggctgcggctggagagcaagctgtctgagatgaagaagatgcatgaaggagacctggccatggccctggtgctggatgagaaggaccggctgattgaggagctgaagctgagcctgaagagcaaggaggccctgatccagtgcctgaaggaggagaagagccagatggcctgcccagatgaaaatgtgagcagcggggagctgcggggcctgtgtgccgccccccgggaggagaaggagcgggagacagaggccgcccagatggagcaccagaaggagagaaattcctttgaggagcgcatccaggccctggaggaggacctgcgggagaaggagcgggagatcgccacagagaagaagaacagcctgaagagggacaaggccatccagggcctgaccatggccctgaagagcaaggagaagaaggtggaggagctgaacagcgagattgagaagctgtctgctgcctttgccaaggcccgggaggccctgcagaaggcccagacccaggagttccagggctctgaagattatgaaacagccctgagcggcaaggaggccctgtctgctgccctgcggagccagaacctgaccaagagcacagagaaccaccggctgcggcgcagcatcaagaagatcacccaggagctgagtgacctgcagcaggagcgggagcggctggagaaggacctggaggaggcccaccgggagaagagcaaaggagactgcaccatccgggacctgagaaatgaggtggagaagctgagaaatgaggtgaatgaaagagagaaggccatggagaaccgctacaagagcctgctgtctgagagcaacaagaagctgcacaaccaggagcaggtgatcaagcacctgacagagagcaccaaccagaaggatgtgctgctgcagaagttcaatgagaaggacctggaggtgatccagcagaactgctacctgatggctgctgaggacctggagctgcggtctgagggcctcatcacagagaagtgcagcagccagcagcccccaggcagcaagaccatcttcagcaaggagaagaagcagagcagtgactatgaggagctgatccaggtgctgaagaaggagcaggacatctacacccacctggtgaagagcctgcaggagagtgacagcatcaacaacctgcaggccgagctgaacaagatctttgccctgaggaagcagctggagcaggatgtgctgagctaccagaacctgaggaagaccctggaggagcagatcagcgagatcagaagaagagaggaggagagcttcagcctgtacagcgaccagaccagctacctgagcatctgcctggaggagaacaaccgcttccaggtggagcacttcagccaggaggagctgaagaagaaggtgtctgacctgatccagctggtgaaggagctgtacacagacaaccagcacctgaagaagaccatctttgacctgagctgcatgggcttccagggcaatggcttcccagaccggctggccagcacagagcagacagagatcatgaaggacctgagcaaaggaggctgcaagaatggctacctgcggcacacagagagcaagatcagtgactgtgatggagcccacgcccctggctgcctggaggagggcgccttcatcaacctgctggcccccctcttcaatgagaaggccaccctgctgctggagagcaggccagacctgctgaaggtggtgcgggagctgctgctgggccagctgttcctgacagagcaggaggtgtctggagagcacctggatggcaagacagagaagacccccaagcagaagggggagctggtgcactttgtgcagaccaacagcttcagcaagccccatgatgagctgaagctgagctgtgaggcccagctggtgaaggccggggaggtgcccaaggtgggcctgaaggatgcctctgtgcagacagtggccacagaaggagacctgctgcgcttcaagcatgaggccacccgggaggcctgggaggagaagcccatcaacacagccctgtctgctgagcacaggcctgagaacctgcatggagtgcccggctggcaggccgccctgctgagcctgcccggcatcaccaaccgggaggccaagaagagccggctgcccatcctgatcaagcccagccgcagcctgggcaacatgtaccgcctgcctgccacccaggaggtggtgacccagctgcagagccagatcctggagctgcagggcgagctgaaggagttcaagacctgcaacaagcagctgcaccagaagctgatcctggccgaggccgtgatggagggccggcccaccccagacaagaccctgctgaatgcccagccccctgtgggcgccgcctaccaggacagccctggagagcagaagggcatcaagaccaccagctctgtgtggagggacaaggagatggacagcgaccagcagaggagctatgaaattgattctgagatctgccccccagatgacctggccagcctgcccagctgcaaggaaaatccagaagatgtgctgagccccacctctgtggccacctacctgagcagcaagagccagcccagcgccaaggtgtctgtgatgggcacagaccagagcgagagcatcaacaccagcaatgaaacagagtacctgaagcagaagatccatgacctggagacagagctggagggctaccagaacttcatcttccagctgcagaagcacagccagtgcagcgaggccatcatcaccgtgctgtgtggcacagagggcgcccaggacggcctgagcaagcccaagaatggaagtgatggagaggagatgaccttcagcagcctgcaccaggtgcgctacgtgaagcacgtgaagatcctgggccccctggcccctgagatgattgacagccgggtgctggagaacctgaagcagcagctggaggagcaggagtacaagctgcagaaggagcagaacctgaacatgcagctgttcagcgagatccacaacctgcagaacaagttccgggacctgagccccccaagatatgacagcctggtgcagagccaggcccgggagctgagcctgcagaggcagcagatcaaggatggccacggcatctgtgtgatcagccggcagcacatgaacaccatgatcaaggcctttgaggagctgctgcaggccagtgatgtggactactgtgtggccgagggcttccaggagcagctgaaccagtgtgccgagctgctggagaagctggagaagctgttcctgaatggcaagtctgtgggcgtggagatgaacacccagaatgagctgatggagcgcatcgaggaggacaacctgacctaccagcacctgctgcctgagagccctgagcccagcgccagccacgccctgagtgactatgagaccagcgagaagagcttcttcagccgggaccagaagcaggacaatgaaacagagaagacctctgtgatggtgaacagcttcagccaggacctgctgatggagcacatccaggagatccgcaccctgaggaagaggctggaggagagcatcaagaccaatgagaagctgaggaagcagctggagcggcagggcagcgagtttgtgcagggcagcaccagcatctttgccagcggcagcgagctgcacagcagcctgaccagcgagatccacttcctgaggaagcagaaccaggccctgaatgccatgctgatcaagggcagccgggacaagcagaaggaaaatgacaagctgcgggagagcctgagcaggaagacagtgtccctggagcacctgcagcgggagtatgcctctgtgaaggaggagaatgaaaggctgcagaaggagggcagcgagaaggagcggcacaaccagcagctgatccaggaggtgcgctgcagcggccaggagctgagccgggtgcaggaggaggtgaagctgcggcagcagctgctgagccagaatgacaagctgctgcagagcctgcgggtggagctgaaggcctatgagaagctggatgaggagcaccggcggctgcgggaggccagcggggagggctggaagggccaggaccccttccgggacctgcacagcctgctgatggagatccaggccctgcggctgcagctggagaggagcattgagaccagcagcaccctgcagagccggctgaaggagcagctggcccggggagctgagaaggcccaggagggcgccctgaccctggccgtgcaggccgtgtccatccctgaggtgcccctgcagcctgacaagcatgatggagacaagtaccccatggagagtgacaacagctttgacctgtttgacagcagccaggccgtgacccccaagtctgtgtctgagaccccacccctgtctggaaatgacacagacagcctgagctgtgacagcggcagcagcgccaccagcaccccctgtgtgtcccggctggtgacaggccaccacctgtgggccagcaagaatggccgccacgtgctgggcctgattgaggactatgaggccctgctgaagcagatcagccagggccagaggctgctggccgagatggacatccagacccaggaggcccccagcagcaccagccaggagctgggcaccaagggcccccacccagcccccctgagcaagtttgtgtcctctgtgtccacagccaagctgaccctggaggaggcctacagaaggctgaagctgctgtggagggtgtccctgcctgaagatggccagtgccccctgcactgtgagcagatcggggagatgaaggccgaggtgaccaagctgcacaagaagctgtttgagcaggagaagaagctgcagaacaccatgaagctgctgcagctgagcaagaggcaggagaaggtgatctttgaccagctggtggtgacccacaagatcctgaggaaggcccggggcaacctggagctgcggcctgggggcgcccaccctggcacctgcagccccagcaggcctggcagctag

SEQ ID NO: 290823 - DNA, 5586 bp, Artificial Sequence
  derived and/or modified sequence
atgatggacctggtgctggaggaggacgtgaccgtgcccggcaccctctccgggtgtagtggcctggttcctagcgtgcccgacgaccttgacgggattaaccccaatgcaggcctggggaatgggctgcttccgaatgtgtctgaggaaactgtcagccccacccgggcccggaatatgaaagacttcgaaaatcagattacagaactgaagaaggaaaacttcaacctgaaactacgcatctatttcctagaggagagaatgcagcaggaatttcacgggccaaccgagcacatctacaagacaaatatcgaattgaaggtggaagtggaaagtctgaagcgtgagctccaagagcgggagcagttgctgatcaaagcatccaaggccgtcgaatccttggccgaagctggaggcagcgaaatacagcgcgtaaaagaggacgcacggaagaaagttcagcaggtggaggatctgttgacaaagcggatcctgctgctggagaaagatgtgactgctgcacaggcggaattagagaaggcttttgctggaactgagactgagaaggcactgcgcctcagactggagtctaaactgtctgagatgaaaaagatgcatgaaggcgatctcgctatggcactcgttttggatgaaaaagatcgactgattgaagagctcaaattgtccctaaaatccaaggaggctttaatccagtgcctgaaggaagagaagtcccagatggcctgtcccgatgaaaacgtgagctcaggagaactgaggggcctctgcgccgctccacgagaagaaaaggaacgcgaaacggaggccgcgcagatggagcatcagaaagaacgtaatagcttcgaagagcgcattcaagctctcgaggaggacctgcgagagaaggagagggagattgccaccgaaaaaaaaaactcactcaagagggacaaagccattcaggggctcacaatggcactgaagagcaaggagaaaaaggtcgaagagctcaatagcgaaatcgaaaaattatctgcagcgtttgccaaggccagggaggccctgcagaaggctcaaactcaggagtttcagggttcggaggactacgagaccgctttgtccggcaaagaagccctgtctgcggccttgcgttctcagaatctgacaaaaagtacggagaaccatcgcttgcggcggtctatcaagaaaattactcaggagctcagtgacctgcaacaagagcgcgaacggctggaaaaggaccttgaagaggctcaccgcgaaaaatcaaaaggggactgcacgatccgggatctgcggaacgaagtggaaaaactgcggaacgaggtaaatgagcgggaaaaagccatggaaaatcgatataagtccctgctgtcggagagtaacaaaaaactgcataatcaggagcaagtgattaagcatctgacagagtccactaaccagaaagacgtgctgcttcagaaattcaacgaaaaggatttggaggtcatccagcagaattgctacctcatggctgcagaggacttggagcttcgatccgagggccttatcaccgaaaagtgctcctcacagcaaccgcctgggagcaaaactatcttttccaaggagaagaaacagagctctgattatgaggaactcatccaggttctgaaaaaagagcaggatatctacacgcacctcgttaaatcactccaggaatctgactcaatcaataacctacaagccgaactcaacaaaatatttgctctgcgaaaacagctggagcaggacgtcctcagctatcagaatctaagaaaaaccctagaggagcaaattagtgagatcaggcgtcgagaggaagaatcattctccttatactccgaccagacctcctatctcagtatctgcctggaggagaataatcgcttccaggttgagcatttctcacaggaggaactgaaaaaaaaagtcagcgacctcattcagctggtgaaggaactctacacagataatcagcatctgaaaaaaactatattcgatctatcctgcatggggttccaggggaatggctttcctgatcggttagcctccaccgagcagacagaaatcatgaaggacctctctaaaggagggtgtaaaaatggctatctgcgccacacggaaagtaaaatatcggactgcgatggggcacacgccccgggctgcctggaggagggggcttttataaatctcctggctcctctgttcaatgagaaggctaccctgctcctcgagtcgcgtccagatcttctcaaagtggtgcgtgaactactgctgggtcagctgttcttgactgaacaagaggtttctggcgagcacctggacggaaaaactgagaaaactccaaagcagaaaggcgagctcgtccactttgtgcagactaatagcttctcaaaacctcatgatgaactcaaattgtcttgtgaagcacaactggtaaaagcaggggaggtccccaaagttggacttaaggatgccagcgtgcaaaccgtcgcaaccgagggtgatttgctgcgatttaaacatgaagccacccgtgaagcatgggaggagaaacctatcaatactgccctaagcgccgaacatcggccagagaacttacacggagtgcccggatggcaggccgcgttgctcagtctacctggcatcactaacagggaggctaagaaaagccggcttcccatcctgattaaaccttccagatcccttggcaatatgtatcggttgccagccacgcaggaggtcgtcacacagcttcagagccagatcctggaactccagggagaactcaaagagtttaagacatgcaataaacagcttcatcagaagctgattctcgccgaggccgtgatggagggacggccaacaccagataaaacactgctgaacgcgcagccgccagttggagcagcttatcaggatagtcccggggagcagaagggcatcaagacgacttcaagcgtttggcgagacaaggagatggattcagaccaacagaggtcttacgagatcgactccgagatctgtccccctgatgatttagctagtttgccctcatgcaaagagaacccagaagacgttctctctcccacttccgtcgccacttacctctcttccaaaagtcaacccagcgccaaggtgtccgtcatgggcacggatcagtctgagagcataaatacctcaaacgagaccgagtacctcaagcagaagattcacgatttggaaactgagttagagggctaccagaattttatcttccagctccagaaacactcccagtgcagcgaagctatcattaccgtgttgtgcggcaccgaaggtgcacaggatggtttaagtaaaccaaagaatggttctgacggggaagagatgaccttttcctcgctccaccaggtgcgctacgtcaagcatgtcaaaatcctgggacctcttgcccctgaaatgatagactcccgtgtgctggaaaatctcaaacagcaactcgaagagcaggagtataagctgcagaaggagcagaatcttaatatgcagctcttcagcgaaatccacaatctgcagaacaagttcagagacctgagtcctccacggtatgacagcctcgtgcaatcccaagccagagaattgtctctacagaggcagcaaataaaagatggacatggcatttgcgttatcagcaggcagcatatgaacacaatgatcaaagccttcgaagagctactacaggccagtgatgttgactactgcgttgcggagggtttccaggaacagctgaaccagtgtgccgagttattagagaagctggaaaaactctttctgaacgggaagagcgtcggagtagagatgaatacgcaaaacgagttgatggagaggattgaggaggataaccttacatatcagcatttactgcctgaatctccagaacccagcgcctctcatgcgctgtccgactatgaaacctctgagaaaagtttcttttcccgagaccaaaagcaggacaatgaaacggagaagacatccgtcatggtcaatagcttctctcaagacctattgatggagcacattcaagagatacggaccctgcggaagcgcttggaagagtctataaagactaatgagaagctacgtaagcaactggaaagacagggaagtgaattcgtgcaagggagtactagcatttttgcctcagggagcgagctgcacagctctctgacaagcgagatccacttcctccgaaagcagaaccaagccctgaacgctatgttgattaagggcagtcgagacaaacagaaggagaatgacaagctacgtgagagcctatcacggaaaactgtatcactcgagcatttacagagagagtatgcctctgtcaaggaggaaaatgaaagactgcaaaaagagggatcagagaaagaacgacataaccagcaattgattcaggaggttaggtgctctgggcaagaacttagtcgggtgcaggaagaagtcaaactgcggcagcagttgctgtcccagaacgataagctgctacaatcactgcgggtagaactaaaggcctacgagaagctggacgaggaacaccggagattacgcgaagcttcaggagaaggatggaaaggacaagacccctttcgggacctgcattctctgctcatggaaatacaggcactacggctacagctggaaagatcaatcgaaacttcgtcgactctgcaatcccgcctcaaggaacagctggcaagaggggccgaaaaggcgcaagagggagcccttacactggcggttcaggccgtgagtattcccgaggttccgctccagccggacaagcacgacggcgacaagtatcctatggagtccgacaacagcttcgatttgtttgattctagtcaggccgtaactcctaaaagcgtcagcgaaacaccaccactgagtggtaatgacactgactctctgagctgcgacagtgggagcagcgctacgagtaccccttgtgtaagccggctcgtgacaggtcaccatctgtgggcaagcaagaatggtaggcacgtcttaggactaatcgaggattatgaggcactgcttaaacagatctcacagggccaaagactcctggcagaaatggatattcagactcaggaggctccatcctctacaagtcaggagttaggaaccaagggcccccaccctgcacccttaagtaagtttgttagtagtgtctctacagctaagctgactctggaagaggcctaccgcagactgaagctactttggcgtgtgtctctacccgaagacggccaatgccccctccactgcgagcaaatcggagagatgaaggccgaggtgactaaacttcataagaagctgttcgagcaagagaaaaaacttcaaaacaccatgaaattattgcagctgtccaaaaggcaggagaaggttatttttgaccagctcgtagtgactcacaaaatactgaggaaagcaagaggtaaccttgagctgaggcctggaggtgcacatcccggtacctgctctccctccagaccgggaagctag

SEQ ID NO: 290824 - DNA, 5585 bp, Artificial Sequence
  derived and/or modified sequence
atgatggacctcgtactggaagaagacgtgaccgttccaggaactctgtcaggctgttccgggcttgtgccctctgttcccgacgatctggacggtataaaccccaacgctggtctggggaatggcctgcttcccaatgtctccgaggagaccgtgtcccctacccgagctagaaacatgaaagattttgagaatcagattacagaactgaagaaggagaacttcaatctgaagctacggatttactttctggaagaaagaatgcaacaagaattccacgggccaacagaacatatatacaaaaccaacatagagctgaaagtcgaggtggaatcactcaagcgcgagctgcaagaaagagagcagttgttgatcaaggcctccaaggctgtcgaatccctggccgaggctgggggatccgagattcagcgcgtcaaggaagacgccaggaagaaggtgcagcaggtggaagacctgctcacaaaacgaattttactgctggaaaaggatgttacagcagcccaagccgaactggagaaggccttcgcgggaaccgagactgaaaaagccctgcgtctcagactcgaatcgaagctctcggagatgaagaagatgcacgaaggcgatctcgccatggccttggttttggacgagaaagacaggctgatagaagaattgaagttatctcttaagtccaaggaggcactcattcaatgcctaaaagaggagaagtcccaaatggcttgccctgacgagaacgtttcttccggcgaattaagaggcctttgcgccgctcctcgggaagagaaagaaagagagactgaggctgcccagatggaacaccagaaggaaaggaactcctttgaggaacgcatccaagccctcgaggaagatctaagggagaaggagcgtgaaatagcaaccgagaagaaaaacagccttaaacgggataaggcaatccagggactgactatggcactcaaatccaaagaaaaaaaggtagaggaattgaattcagagatcgaaaaactgagcgctgcctttgccaaggctcgggaggcactacagaaagcccaaacacaagagttccaggggtctgaggattatgaaaccgccctgagcggaaaggaagctctgagcgcagcgctccgcagtcagaaccttaccaaatcaactgagaaccatagactgcggcgtagtatcaagaagatcacccaggagctgtctgacctccagcaagagagggagaggcttgagaaggacttggaggaagcccaccgagagaagtccaaaggggattgtaccatccgcgacctgcgaaatgaggtggagaagctcagaaatgaagtgaacgagcgcgagaaggccatggagaaccggtataagtctctgctgagtgagagcaataagaagctccacaatcaggagcaagttattaaacacctgacagagtccactaatcaaaaggacgtgcttctgcaaaagtttaacgagaaagacctggaggtgatacagcagaattgctacctcatggctgccgaagacctcgagttgaggtctgaagggctgataacagagaaatgttcctcgcagcaacccccaggatctaaaacaatttttagtaaagaaaagaagcagtcctctgattacgaggaattaatccaggtgctaaaaaaagagcaggatatctacacacatctagtaaagtcactgcaggagtccgacagtatcaacaacttacaggctgaactgaataaaatttttgcactgcggaagcagctggagcaggatgtgttatcatatcagaatttgaggaaaacactcgaggagcaaatttccgagatccggagacgcgaggaagagagttttagcctatactccgatcaaacaagctatcttagcatttgtctggaagagaacaatcgctttcaggtagaacatttcagtcaagaggagctaaaaaaaaaggtgagtgacctgattcaacttgtcaaggaactctataccgataaccagcacctgaaaaagacaatattcgatttgagctgtatgggatttcagggcaacggtttcccagatagactcgccagcacagaacagactgaaatcatgaaggacttgtctaagggaggctgtaagaatgggtacctcagacatactgagagtaagatctctgactgtgacggcgcacatgctcctggctgccttgaggagggcgcatttattaacctgctggcacccctgttcaacgagaaagccacgctgctccttgaatcccgccctgaccttttgaaagtggtgagagagctcttacttggtcagttgtttttgacagagcaggaggtctccggcgagcacctggacggaaaaacagaaaagacaccaaagcagaaaggtgagctagtgcactttgtacagaccaattctttctctaagccgcatgatgaactcaaactctcgtgtgaggcccagttagtgaaggccggtgaggtacctaaggtgggcctcaaagacgcatctgtgcaaaccgtggcgaccgaaggtgaccttctgaggttcaagcatgaagcaacacgggaagcatgggaggagaagccgatcaacacagcactcagcgccgaacaccgtcccgagaatctgcatggagtcccgggatggcaggctgcgttactctcattgccaggtataacaaatagggaggccaagaagagccggcttccgatcttgatcaagcccagtcgcagtcttggtaacatgtaccgactgcctgcaacccaagaggtcgtcacacagttgcagtcgcagatcctcgaactgcagggcgaactaaaagaattcaaaacatgcaataaacagctgcatcaaaagctgatcctggctgaggccgtgatggagggccgaccaactcctgacaagacattacttaatgcccagcccccagtgggagcagcttatcaggattctcccggagagcaaaaaggaataaagacaacctccagtgtgtggagggataaagagatggactctgaccagcagcgctcttatgaaatcgactctgagatctgcccccctgacgacctggcatcactcccctcgtgcaaagagaatcccgaagacgttctgtcccctacatccgtggcaacctatttgtcttccaaaagccagcccagcgcaaaggtatcagtcatgggaacggatcagtctgagtccatcaataccagtaatgaaactgaatacctgaaacagaagatccacgatctggagacagagcttgaggggtaccagaactttatatttcagttgcagaaacactctcagtgcagcgaagccatcatcactgtcctgtgcgggacagagggcgctcaggatggcttaagcaagcccaagaatggaagcgacggcgaagaaatgaccttctcctccctgcaccaggtgaggtatgttaagcacgtgaaaatcctaggaccacttgcacccgaaatgatcgatagcagggtcttggagaatttgaagcagcaacttgaggagcaggagtataaactgcaaaaagagcagaacttgaatatgcaactattcagcgagatccataatctacagaataagttccgggacctgtcgcctcctcgctacgatagcctcgttcagtcacaggccagggagttgagcctgcaacggcagcagataaaagatggtcacggtatttgcgtgatctcacgacaacacatgaataccatgatcaaggcctttgaagagcttctccaggcctccgatgtggattattgcgtcgctgaggggttccaagagcaattgaaccagtgcgcagaactgctggagaagctagagaaattatttctgaatgggaaatcggtcggcgtagaaatgaacacacagaacgaactgatggagagaatcgaggaagacaaccttacataccaacacttactccctgaaagccctgagcccagcgcctcacacgccctttctgattacgaaaccagcgaaaaaagttttttcagtcgggatcagaagcaagataatgaaaccgaaaagacatctgtaatggtgaattcattcagccaagatttgcttatggaacacatccaggaaatcagaacattgaggaaaagattggaggaatcaatcaagactaatgagaagctacggaagcaactggagcgccagggatccgaatttgtccaggggtccacgagcatatttgcaagtggttccgaactccacagttcactgacgtctgagatccatttcttgagaaagcagaaccaggctcttaatgctatgctaattaaggggagcagggataaacagaaagagaatgataaactgagggagtctctgagccgcaaaacagtctctctcgaacatctgcagagggagtacgccagcgtgaaggaggaaaatgagagactgcagaaggagggctccgagaaagagcgacacaatcagcagttgattcaggaggtccgatgttctgggcaggaattgtcccgcgtacaggaagaggtgaagttgcgacagcagttactctctcagaacgacaaattactgcagtcgctgagagtggaattaaaggcctacgagaagttggatgaagaacaccggaggctccgggaagcttccggggagggttggaagggccaagacccctttagggaccttcacagtctgctgatggagatccaagcactgagattacagctggagcggtccattgagacatcttcgactctccagtcccggttaaaggaacagttggcaagaggcgctgagaaagcgcaggaaggcgcactcactctggcagtccaggccgtgtccatcccggaagtgcctctgcagccggataagcacgacggcgacaaatacccaatggaatccgataattcattcgatctgtttgatagtagccaggccgtcacacctaaatcggtgtccgaaaccccccctctgagcggcaacgatactgattctctcagctgtgactccgggtcctcagccacgtccacgccatgtgtttctagacttgttacgggccatcatctctgggccagcaagaatgggcgacatgtgttgggactgatcgaagactatgaggcactactgaaacagatttcccaggggcagcgactgctagcagagatggacattcagacacaagaggcccctagttctactagtcaggaactcggtacaaaagggcctcaccctgcccctctaagtaaatttgtgagcagcgtgtccaccgccaagctgacgttggaggaagcctaccggcgtttaaagttgctttggagagtcagcctcccagaggatgggcagtgtcccctgcattgcgagcagattggcgagatgaaggcagaggtcacaaagctacacaagaaactgttcgagcaggagaaaaagttacaaaatacgatgaagttgctgcagttgtcaaagcgccaggagaaagtgatctttgaccagctcgtcgtcacacacaagatcctgaggaaggctaggggcaatctggaactacgccctggcggagcgcacccgggaacttgcagtcctagtcgcccagggagcta

SEQ ID NO: 290825 - DNA, 6134 bp, Artificial Sequence
  derived and/or modified sequence
aggaagaagcgccgggaaagatggcggcgtctgtggtttgaattccagcggcgccgccagagtctgaacaagagctggggtggagggggcggggacctggggagcccggcgggtcgctatcgcggggggtactagtggcgccgccgccacagacaccaacgctgtcgccacctctgtagccatgatggacttggtgttggaagaggacgtcaccgtccctgggacgctcagcggctgcagtggccttgttcccagtgtaccagatgacctggatggcatcaaccccaatgctgggttgggaaatggtctgctcccaaatgtgtcagaagaaacagtgtctcccaccagagcacggaacatgaaggactttgaaaatcaaatcactgaattgaagaaagaaaactttaacctaaagctccgcatctatttccttgaggaaagaatgcaacaggaatttcatggccccactgaacatatctacaaaactaacattgagctcaaggtggaagtagaaagtctgaagcgggaactccaggagagagagcagctgctcatcaaagcctccaaagcagttgagagcttagctgaagcaggtggctctgaaatccagcgggtgaaagaagatgctcgaaagaaggtgcagcaggtggaagatctcctaactaaaagaatactccttttggaaaaggatgtgacagccgcccaggcagaactggaaaaggcctttgcagggacagagacggagaaggctcttcggttgcgtttggaaagcaagctttcagagatgaagaagatgcacgagggggacttggcgatggctctggtcctggatgagaaagacagactgattgaggagttgaagctgtctttgaagagcaaagaagctttaattcagtgccttaaagaggagaaatctcagatggcatgtcctgatgagaatgtgtcatctggagagctccgaggactttgtgctgctccaagggaagaaaaggagagagaaactgaggctgcacaaatggagcatcagaaggagagaaacagctttgaagagaggatccaggcacttgaagaggacctgagagagaaggaaagagaaattgctacagagaagaaaaatagtctaaagagggataaagccattcagggtttaaccatggcattaaaatcaaaggaaaaaaaggttgaagaacttaactctgaaattgaaaagctcagtgctgcctttgctaaagccagagaggccctacagaaagcacagacccaggaatttcaggggtctgaagactatgagactgctctatcaggaaaggaagccctttcggctgcgctgcgctcacaaaacctcaccaagagtacagagaaccacagactgcgtagaagcattaagaagatcacccaggagctgagtgacttgcagcaggagagggagagactggagaaggacctggaggaagcccatcgagagaagagcaaaggagactgcaccatccgtgatcttagaaatgaagttgaaaaattacgcaatgaagtgaatgaaagagagaaagcaatggaaaatcgttacaagagtcttctgagtgaaagcaataaaaaattgcacaatcaagagcaagtgatcaaacatctaacagaaagtaccaatcagaaggacgtgttgcttcagaaattcaatgaaaaagatttggaagtaatacagcagaactgctatttaatggctgcagaggatcttgagctcaggagtgaaggcttaataacagaaaagtgctcttctcaacagccaccaggcagcaaaaccatcttctctaaggaaaagaaacaatcatcagactatgaagagctgattcaggtcttaaagaaagagcaggacatctatacccatctggtcaaatctctgcaggaatcagacagtatcaacaacctgcaggctgagttaaacaagatttttgccctgcggaagcaactggagcaggatgtgctttcatatcagaatttgcggaagaccttggaggagcagatcagcgaaattcggaggcgggaagaagaatcattttcactttatagtgatcaaacatcttatctaagtatttgccttgaagaaaacaatcggtttcaagtggaacatttttctcaagaagaacttaagaaaaaggtcagtgaccttatacagctagtgaaggagctgtatacagacaaccagcacctgaagaaaaccatttttgatctctcctgcatgggtttccagggaaatgggtttccagatagacttgcgtctacagaacaaacagagattatgaaagacctttccaaaggaggctgcaaaaatggatacttaaggcacacggagtctaagatttcagattgtgatggggcccacgcacctggctgcctagaagaaggtgcattcataaacctgcttgcccctttgttcaatgagaaggccacattattactggaatccaggccagaccttctgaaagtggtacgggaactgcttctgggacaactattcttgacagagcaggaagtttctggagaacaccttgatggtaaaactgagaagacacctaagcaaaaaggtgaacttgtacattttgtccaaaccaactcattttccaagccacatgatgaactgaagttgtcttgtgaggcccagctagtaaaggcaggcgaagtgcccaaggtaggactgaaagatgcctcagtgcagactgtggccacggagggcgacctgctgagattcaagcatgaagcaacaagagaggcttgggaagagaaaccgatcaacactgcactcagcgcagagcatcggccagagaacctgcacggggtgcctgggtggcaggctgccctcctttccctccctggtattaccaacagagaggctaagaagtcccgcttgccaatcctaataaaaccatcccggtcattaggaaatatgtatcgtctccctgccacccaggaggtggtgacgcagctgcagagccagatcttggagctgcagggggagctgaaggagtttaaaacttgtaataagcaacttcaccaaaagttaattctggctgaagcagtgatggaggggaggccaacgcccgacaaaacgttgctgaatgctcagccccctgtgggagcagcctaccaggacagcccaggagagcagaaaggaattaaaaccacatcttctgtctggagagacaaggaaatggacagtgatcagcaaagaagctacgagattgactctgagatttgcccacctgatgaccttgccagcttgccatcatgcaaagaaaatcctgaagatgttctgagcccaacttcagtagctacttacctgagttccaagagtcagccttctgctaaagtcagtgtgatggggactgatcagtcagagagcattaatacctcaaatgagacagaatacttaaaacagaaaatccatgacttggaaactgagctggaaggctaccagaatttcatatttcagcttcaaaagcactcccagtgcagtgaggccataattacagttttgtgtgggacagaaggggcccaggatggcttgagcaagcccaagaatggttctgatggggaagaaatgaccttttcaagtttgcaccaagtgcgatacgtgaaacacgtgaaaatcctcggtccgctggccccagagatgattgacagcagggtgctggagaacctcaaacagcagctggaggaacaggaatacaagctgcagaaggagcagaatttgaacatgcaacttttcagtgagatccataatctgcagaataagttcagagatctctcacctcccagatacgattcattagttcagtcccaagccagggagctctcccttcaacggcagcagattaaggatggccatggcatctgtgtcatctcccgtcaacacatgaacaccatgattaaggcatttgaggagttgctgcaggccagtgatgtggattactgtgtggccgagggtttccaggaacagctgaatcaatgtgctgagctgctggagaaattggaaaagctatttctcaacggaaaatcagttggagtggaaatgaacacccagaatgaactgatggagaggattgaggaagacaacttaacctaccaacatcttctgcctgaatctcctgagccttcagcctctcatgcgctctctgattatgaaacatctgaaaagtccttcttctcacgagaccagaagcaagataatgagacagagaagacttcagttatggtgaacagtttttctcaagacttactaatggaacacatacaggaaattcgaactttgagaaagcgtttagaagaatctattaaaacaaatgagaagctacggaaacagttggaacggcaaggatctgaatttgttcaaggttctacaagcatttttgcttctggttcagagcttcatagttctctaacatcagaaattcatttcttgaggaagcagaaccaggccctcaatgcaatgctcattaaaggatccagagataaacagaaggagaatgacaaattacgagagtccctctccaggaagaccgtgagcctggagcaccttcagcgggagtatgccagcgtgaaggaagaaaatgaaaggctgcagaaagaaggcagcgagaaggagagacacaaccagcagctgatccaggaggtccgctgcagcggccaggagctgagcagggtgcaggaggaggtgaagttgaggcagcagctgctctcacagaatgacaagctattgcagtctctccgagtggagctgaaggcgtatgagaagctggatgaagagcacaggagactgagagaggcgtcgggagaaggctggaaggggcaggatcctttcagggacctgcacagcctcctgatggagatccaggctctgcgcttgcaactagaaaggagcatcgaaaccagcagcactctgcagagcaggctcaaggaacagctggcaaggggggcagagaaggcacaggaaggagccctcactctggctgtccaagccgtgtccatccctgaggtgccccttcagcctgacaaacacgatggtgacaaatatcccatggaaagtgataattcatttgatctgtttgattcctcccaggcagtgacaccaaaatcagtttcagagactcctccactctctgggaatgacacggactccctctcctgcgacagtggcagttcggcaactagcactccgtgtgtgtcccgcctggtcactggccaccacctgtgggccagcaagaatggccgccatgtcctgggcctgattgaggactatgaggccctgctcaaacagatcagccagggacagaggctccttgctgaaatggacattcaaacccaagaggctcccagctccacaagtcaagagctgggaacaaagggtccacacccagcaccactgagcaagtttgtgagcagtgtgagcacggccaagctgaccctggaagaggcctacaggcggctgaagcttctctggagagtctcactccccgaggatggccagtgcccccttcactgtgagcagattggagaaatgaaggcagaggtcaccaaactacataaaaaattgtttgaacaagaaaagaagttgcaaaacaccatgaagcttttgcagctgagcaagcgccaggaaaaagtcatctttgatcaattggtcgtaacccacaaaatccttcggaaggccagaggaaacctggagcttaggcctgggggagcccatccaggaacatgcagtcccagcagaccaggctcctgagaagaactttcagccaataaagcttgtgcttcccccaccgagctcacgctgtctctttgttccaagtgtggttcctatttattgaggaagaaagagctgtctggccaaaggaaatctattttttcccttcatgttttctctctgaaagttggcttgagagttgttgtcagaaaggtgcaggtgctccacaaacgggtggtaaaaaggcctcgagctcttggatgttgtatttcagatcaggggcaggcaccggagttgaggctgtgcgccttggtgggcttcacgtcttcccctggatttgcttagtactcagccagtgccacagtttgaagattctcattaaatgattcatttcatttcaccttga

SEQ ID NO: 290826 - DNA, 5586 bp, Artificial Sequence
  derived and/or modified sequence
atgatggacctggtgctggaggaggacgtgaccgtgcccggcaccctgagcggctgcagcggcctggtgcccagcgtgcccgacgacctggacggcatcaaccccaacgccggcctgggcaacggcctgctgcccaacgtgagcgaggagaccgtgagccccaccagagccagaaacatgaaggacttcgagaaccagatcaccgagctgaagaaggagaacttcaacctgaagctgagaatctacttcctggaggagagaatgcagcaggagttccacggccccaccgagcacatctacaagaccaacatcgagctgaaggtggaggtggagagcctgaagagagagctgcaggagagagagcagctgctgatcaaggccagcaaggccgtggagagcctggccgaggccggcggcagcgagatccagagagtgaaggaggacgccagaaagaaggtgcagcaggtggaggacctgctgaccaagagaatcctgctgctggagaaggacgtgaccgccgcccaggccgagctggagaaggccttcgccggcaccgagaccgagaaggccctgagactgagactggagagcaagctgagcgagatgaagaagatgcacgagggcgacctggccatggccctggtgctggacgagaaggacagactgatcgaggagctgaagctgagcctgaagagcaaggaggccctgatccagtgcctgaaggaggagaagagccagatggcctgccccgacgagaacgtgagcagcggcgagctgagaggcctgtgcgccgcccccagagaggagaaggagagagagaccgaggccgcccagatggagcaccagaaggagagaaacagcttcgaggagagaatccaggccctggaggaggacctgagagagaaggagagagagatcgccaccgagaagaagaacagcctgaagagagacaaggccatccagggcctgaccatggccctgaagagcaaggagaagaaggtggaggagctgaacagcgagatcgagaagctgagcgccgccttcgccaaggccagagaggccctgcagaaggcccagacccaggagttccagggcagcgaggactacgagaccgccctgagcggcaaggaggccctgagcgccgccctgagaagccagaacctgaccaagagcaccgagaaccacagactgagaagaagcatcaagaagatcacccaggagctgagcgacctgcagcaggagagagagagactggagaaggacctggaggaggcccacagagagaagagcaagggcgactgcaccatcagagacctgagaaacgaggtggagaagctgagaaacgaggtgaacgagagagagaaggccatggagaacagatacaagagcctgctgagcgagagcaacaagaagctgcacaaccaggagcaggtgatcaagcacctgaccgagagcaccaaccagaaggacgtgctgctgcagaagttcaacgagaaggacctggaggtgatccagcagaactgctacctgatggccgccgaggacctggagctgagaagcgagggcctgatcaccgagaagtgcagcagccagcagccccccggcagcaagaccatcttcagcaaggagaagaagcagagcagcgactacgaggagctgatccaggtgctgaagaaggagcaggacatctacacccacctggtgaagagcctgcaggagagcgacagcatcaacaacctgcaggccgagctgaacaagatcttcgccctgagaaagcagctggagcaggacgtgctgagctaccagaacctgagaaagaccctggaggagcagatcagcgagatcagaagaagagaggaggagagcttcagcctgtacagcgaccagaccagctacctgagcatctgcctggaggagaacaacagattccaggtggagcacttcagccaggaggagctgaagaagaaggtgagcgacctgatccagctggtgaaggagctgtacaccgacaaccagcacctgaagaagaccatcttcgacctgagctgcatgggcttccagggcaacggcttccccgacagactggccagcaccgagcagaccgagatcatgaaggacctgagcaagggcggctgcaagaacggctacctgagacacaccgagagcaagatcagcgactgcgacggcgcccacgcccccggctgcctggaggagggcgccttcatcaacctgctggcccccctgttcaacgagaaggccaccctgctgctggagagcagacccgacctgctgaaggtggtgagagagctgctgctgggccagctgttcctgaccgagcaggaggtgagcggcgagcacctggacggcaagaccgagaagacccccaagcagaagggcgagctggtgcacttcgtgcagaccaacagcttcagcaagccccacgacgagctgaagctgagctgcgaggcccagctggtgaaggccggcgaggtgcccaaggtgggcctgaaggacgccagcgtgcagaccgtggccaccgagggcgacctgctgagattcaagcacgaggccaccagagaggcctgggaggagaagcccatcaacaccgccctgagcgccgagcacagacccgagaacctgcacggcgtgcccggctggcaggccgccctgctgagcctgcccggcatcaccaacagagaggccaagaagagcagactgcccatcctgatcaagcccagcagaagcctgggcaacatgtacagactgcccgccacccaggaggtggtgacccagctgcagagccagatcctggagctgcagggcgagctgaaggagttcaagacctgcaacaagcagctgcaccagaagctgatcctggccgaggccgtgatggagggcagacccacccccgacaagaccctgctgaacgcccagccccccgtgggcgccgcctaccaggacagccccggcgagcagaagggcatcaagaccaccagcagcgtgtggagagacaaggagatggacagcgaccagcagagaagctacgagatcgacagcgagatctgcccccccgacgacctggccagcctgcccagctgcaaggagaaccccgaggacgtgctgagccccaccagcgtggccacctacctgagcagcaagagccagcccagcgccaaggtgagcgtgatgggcaccgaccagagcgagagcatcaacaccagcaacgagaccgagtacctgaagcagaagatccacgacctggagaccgagctggagggctaccagaacttcatcttccagctgcagaagcacagccagtgcagcgaggccatcatcaccgtgctgtgcggcaccgagggcgcccaggacggcctgagcaagcccaagaacggcagcgacggcgaggagatgaccttcagcagcctgcaccaggtgagatacgtgaagcacgtgaagatcctgggccccctggcccccgagatgatcgacagcagagtgctggagaacctgaagcagcagctggaggagcaggagtacaagctgcagaaggagcagaacctgaacatgcagctgttcagcgagatccacaacctgcagaacaagttcagagacctgagcccccccagatacgacagcctggtgcagagccaggccagagagctgagcctgcagagacagcagatcaaggacggccacggcatctgcgtgatcagcagacagcacatgaacaccatgatcaaggccttcgaggagctgctgcaggccagcgacgtggactactgcgtggccgagggcttccaggagcagctgaaccagtgcgccgagctgctggagaagctggagaagctgttcctgaacggcaagagcgtgggcgtggagatgaacacccagaacgagctgatggagagaatcgaggaggacaacctgacctaccagcacctgctgcccgagagccccgagcccagcgccagccacgccctgagcgactacgagaccagcgagaagagcttcttcagcagagaccagaagcaggacaacgagaccgagaagaccagcgtgatggtgaacagcttcagccaggacctgctgatggagcacatccaggagatcagaaccctgagaaagagactggaggagagcatcaagaccaacgagaagctgagaaagcagctggagagacagggcagcgagttcgtgcagggcagcaccagcatcttcgccagcggcagcgagctgcacagcagcctgaccagcgagatccacttcctgagaaagcagaaccaggccctgaacgccatgctgatcaagggcagcagagacaagcagaaggagaacgacaagctgagagagagcctgagcagaaagaccgtgagcctggagcacctgcagagagagtacgccagcgtgaaggaggagaacgagagactgcagaaggagggcagcgagaaggagagacacaaccagcagctgatccaggaggtgagatgcagcggccaggagctgagcagagtgcaggaggaggtgaagctgagacagcagctgctgagccagaacgacaagctgctgcagagcctgagagtggagctgaaggcctacgagaagctggacgaggagcacagaagactgagagaggccagcggcgagggctggaagggccaggaccccttcagagacctgcacagcctgctgatggagatccaggccctgagactgcagctggagagaagcatcgagaccagcagcaccctgcagagcagactgaaggagcagctggccagaggcgccgagaaggcccaggagggcgccctgaccctggccgtgcaggccgtgagcatccccgaggtgcccctgcagcccgacaagcacgacggcgacaagtaccccatggagagcgacaacagcttcgacctgttcgacagcagccaggccgtgacccccaagagcgtgagcgagaccccccccctgagcggcaacgacaccgacagcctgagctgcgacagcggcagcagcgccaccagcaccccctgcgtgagcagactggtgaccggccaccacctgtgggccagcaagaacggcagacacgtgctgggcctgatcgaggactacgaggccctgctgaagcagatcagccagggccagagactgctggccgagatggacatccagacccaggaggcccccagcagcaccagccaggagctgggcaccaagggcccccaccccgcccccctgagcaagttcgtgagcagcgtgagcaccgccaagctgaccctggaggaggcctacagaagactgaagctgctgtggagagtgagcctgcccgaggacggccagtgccccctgcactgcgagcagatcggcgagatgaaggccgaggtgaccaagctgcacaagaagctgttcgagcaggagaagaagctgcagaacaccatgaagctgctgcagctgagcaagagacaggagaaggtgatcttcgaccagctggtggtgacccacaagatcctgagaaaggccagaggcaacctggagctgagacccggcggcgcccaccccggcacctgcagccccagcagacccggcagctag

SEQ ID NO: 290827 - protein, 1020 aa, Artificial Sequence
  derived and/or modified sequence
MRRPGDHGLQDQEVLQTLTKFCFPFYVDSLTVSQVGQNFTFVLTDIDSKQRFGFCRLSSGAKSCFCILSYLPWFEVFYKLLNILADYTTKRQENQWNELLETLHKLPIPDPGVSVHLSVHSYFTVPDTRELPSIPENRNLTEYFVAVDVNNMLHLYASMLYERRILIICSKLSTLTACIHGSAAMLYPMYWQHVYIPVLPPHLLDYCCAPMPYLIGIHLSLMEKVRNMALDDVVILNVDTNTLETPFDDLQSLPNDVISSLKNRLKKVSTTTGDGVARAFLKAQAAFFGSYRNALKIEPEEPITFCEEAFVSHYRSGAMRQFLQNATQLQLFKQFIDGRLDLLNSGEGFSDVFEEEINMGEYAGSDKLYHQWLSTVRKGSGAILNTVKTKANPAMKTVYKFAKDHAKMGIKEVKNRLKQKDIAENGCAPTPEEQLPKTAPSPLVEAKDPKLREDRRPITVHFGQVRPPRPHVVKRPKSNIAVEGRRTSVPSPEHLVKPLRHYAVFLSEDSSDDECQREEGPSSGFTESFFFSAPFEWPQPYRTLRESDSAEGDEAESPEQQVRKSTGPVPAPPDRAASIDLLEDVFSNLDMEAALQPLGQAKSLEDLRAPKDLREQPGTFDYQRLDLGGSERSRGVTVALKLTHPYNKLWSLGQDDMAIPSKPPAASPEKPSALLGNSLALPRRPQNRDSILNPSDKEEVPTPTLGSITIPRPQGRKTPELGIVPPPPIPRPAKLQAAGAALGDVSERLQTDRDRRAALSPGLLPGVVPQGPTELLQPLSPGPGAAGTSSDALLALLDPLSTAWSGSTLPSRPATPNVATPFTPQFSFPPAGTPTPFPQPPLNPFVPSMPAAPPTLPLVSTPAGPFGAPPASLGPAFASGLLLSSAGFCAPHRSQPNLSALSMPNLFGQMPMGTHTSPLQPLGPPAVAPSRIRTLPLARSSARAAETKQGLALRPGDPPLLPPRPPQGLEPTLQPSAPQQARDPFEDLLQKTKQDVSPSPALAPAPDSVEQLRKQWETFE

SEQ ID NO: 290828 - protein, 794 aa, Artificial Sequence
  derived and/or modified sequence
MLYPMYWQHVYIPVLPPHLLDYCCAPMPYLIGIHLSLMEKVRNMALDDVVILNVDTNTLETPFDDLQSLPNDVEEPITFCEEAFVSHYRSGAMRQFLQNATQLQLFKQFIDGRLDLLNSGEGFSDVFEEEINMGEYAGSDKLYHQWLSTVRKGSGAILNTVKTKANPAMKTVYKFAKDHAKMGIKEVKNRLKQKDIAENGCAPTPEEQLPKTAPSPLVEAKDPKLREDRRPITVHFGQVRPPRPHVVKRPKSNIAVEGRRTSVPSPEHLVKPLRHYAVFLSEDSSDDECQREEGPSSGFTESFFFSAPFEWPQPYRTLRESDSAEGDEAESPEQQVRKSTGPVPAPPDRAASIDLLEDVFSNLDMEAALQPLGQAKSLEDLRAPKDLREQPGTFDYQRLDLGGSERSRGVTVALKLTHPYNKLWSLGQDDMAIPSKPPAASPEKPSALLGNSLALPRRPQNRDSILNPSDKEEVPTPTLGSITIPRPQGRKTPELGIVPPPPIPRPAKLQAAGAALGDVSERLQTDRDRRAALSPGLLPGVVPQGPTELLQPLSPGPGAAGTSSDALLALLDPLSTAWSGSTLPSRPATPNVATPFTPQFSFPPAGTPTPFPQPPLNPFVPSMPAAPPTLPLVSTPAGPFGAPPASLGPAFASGLLLSSAGFCAPHRSQPNLSALSMPNLFGQMPMGTHTSPLQPLGPPAVAPSRIRTLPLARSSARAAETKQGLALRPGDPPLLPPRPPQGLEPTLQPSAPQQARDPFEDLLQKTKQDVSPSPALAPAPDSVEQLRKQWETFE

SEQ ID NO: 290829 - DNA, 3063 bp, Artificial Sequence
  derived and/or modified sequence
atgcggcgcccgggcgatcatggcctgcaggaccaggaagtgctacagacactgactaagttctgcttcccattttacgtagatagtctgaccgtttctcaggtcggtcagaacttcacctttgtgttaactgatatcgactcgaagcaaaggtttggtttttgtcgcctgtcttccggggccaaaagctgtttctgcattctgtcatacttgccatggtttgaggtgttctacaagcttctcaatatcctcgctgattacaccaccaagagacaggagaatcagtggaacgaacttctcgaaacccttcacaagctcccaatccccgacccaggtgtcagtgtgcatcttagtgttcactcttattttaccgtcccggacacgcgtgagctccccagtatacccgagaacagaaatctgactgaatattttgttgcagttgacgtcaacaacatgcttcacctgtacgcctccatgctgtacgaaaggcgcatcttgatcatctgcagtaagctttccactctgactgcttgcatacacgggagtgcagccatgctctatccgatgtattggcagcacgtctacattccagtgcttcctccacatctgctggactactgctgtgcccccatgccctatctgattggcatccacctctccctgatggagaaggttaggaatatggccctggacgacgtggtaatcctgaacgttgacacaaacaccctagaaaccccgtttgacgacttgcaatctctccctaatgacgtgatttccagcctcaagaatcgtctgaagaaggtcagcactacaacaggcgatggagtggccagagccttccttaaagcccaggcagccttctttggaagctacaggaatgccttaaagatcgagcctgaagaaccgattaccttctgcgaggaggctttcgtttctcactaccgaagcggcgctatgcggcaattcctgcaaaacgccacacaattgcagcttttcaagcagttcatcgatgggcggctggatctgctgaattcaggcgagggcttctccgacgttttcgaagaggagattaacatgggggagtacgcaggttcagacaagctataccatcagtggctctcaacggttcggaaagggagtggtgccatcctcaacacagtgaaaacaaaggccaaccctgcaatgaagactgtgtataaatttgccaaggatcatgcaaaaatgggaatcaaagaggtgaaaaataggctcaaacagaaggacatagcggaaaacgggtgcgccccaacccctgaagaacagcttccaaagacagcccccagcccacttgtggaggcaaaggaccctaagcttagagaggacaggcgccccatcacagtgcattttgggcaggtacggccaccgcggcctcacgtggtgaaacgcccaaaaagtaatattgccgtggaggggcgccggacttctgtaccgtctccagaacacctcgtgaaacccctgcgccactacgccgtgttccttagcgaggactcaagcgacgatgagtgtcagcgggaggagggccccagctctgggttcacagaatcatttttcttctccgcccccttcgagtggccccagccctaccgcaccctgcgtgagtctgactctgccgagggggacgaggccgagagtcccgagcagcaggtccggaagagcaccggaccagttcctgccccccctgatcgggctgcaagtatcgatctccttgaggacgttttcagtaatttagacatggaagccgctctgcagcccctgggccaggcaaaaagcctcgaagacctcagggcccccaaggatcttcgggagcagccaggaaccttcgattaccaacggctcgacttgggcggcagtgaacgctctcgaggcgttacggttgctctcaaacttacccatccgtataacaagctttggagcctcggccaagatgatatggcaattcctagcaaacccccagccgcctcacctgagaaaccctcggctctgcttgggaatagcctcgccttacctcggagacctcagaatcgcgattctattctgaatcccagtgataaagaagaagtgccgaccccaacgctggggagtatcaccatacctaggccccagggcaggaagacccccgaactgggcattgttccccccccacccattcccagacctgccaaattgcaggccgcgggcgctgccctcggcgacgttagcgagagacttcagacagaccgggaccgtcgggcagccttatccccaggcctgctgcctggagtggtcccgcaaggtcccacagagctgctgcaacccttgtcacctggacccggagccgctggtacgtcctctgatgccttgcttgcccttctggatcctcttagcacagcttggtccggctccacattgccgtcccggccagccacacctaatgtggctactccatttacaccacaatttagcttcccacccgccggcacccctactcctttccctcagcctcccctaaaccctttcgtcccgagtatgcctgcagcaccaccgactctgcctctggtatctacccccgctgggccttttggagccccacctgcgtctcttggtccagcttttgcaagcggtctcttgctgtcatctgccggcttctgtgcgccacacaggtcccagcccaatctcagcgctttgagcatgcccaatctcttcgggcaaatgccaatggggactcatactagcccgctacagcccctcggcccaccagcggtggcacctagtcggattcgtaccctgcccctggcccggtcttccgccagggccgctgagactaaacagggactggcactgaggccaggtgatccacctctgctgcccccgagacccccccagggcttggaacctacactgcaaccgagcgctccacagcaagcaagagacccctttgaggacctcctgcaaaagaccaaacaagatgtctctccttcacccgcactggcccccgccccagacagcgtggagcagttgaggaagcagtgggagacattcgaatag

SEQ ID NO: 290830 - DNA, 2385 bp, Artificial Sequence
  derived and/or modified sequence
atgttgtatcctatgtattggcagcatgtgtacatccccgtcttgcctccacaccttctggactactgctgtgccccgatgccctacctgattggtatccacctctcgctcatggaaaaagtgaggaacatggccctggatgatgttgtcatcttgaatgtggacacaaacacacttgaaactccattcgatgatctgcagagtttacctaacgacgtggaggaacctattacattttgcgaagaggctttcgtcagtcactaccggagcggggcgatgcggcagttccttcaaaacgccacccaattacaactcttcaaacagtttatagacgggcgacttgatctcctcaactccggagagggtttttcggatgtgtttgaagaggaaatcaacatgggtgagtacgcagggtccgacaagctctaccaccagtggttgtcaacggttcgcaaaggctccggtgctatactgaatacagtgaagactaaggctaatccggcgatgaaaacagtgtataagttcgccaaggaccatgccaagatgggcatcaaggaagtgaagaatagactcaagcagaaagacatcgccgaaaacggctgtgccccgaccccggaagaacaactgccaaaaaccgcccccagccctttggtggaggccaaggatcccaaactgcgagaagaccgtcggcccattacagtccacttcggccaagtgagacctccgagaccccacgttgtgaaacggccgaagtccaacatcgctgtcgagggtcgccgaaccagcgtgcccagcccggagcacttagtgaagccattgcgtcactacgcagtctttctgagcgaagacagtagcgatgacgaatgtcagagagaagaaggcccctcgtcaggttttacagagagtttcttcttcagtgctccgtttgagtggccccaaccttaccgaacactcagggaatcagactccgctgaaggtgatgaggcagaatctcccgagcagcaagttaggaaaagcactggacctgtcccggcgcctcctgaccgggcagcttccatcgatctcctcgaagacgtgttctcaaacctcgacatggaagcagccctccagcccttaggacaggctaaaagcctcgaggatcttagggcgccgaaagatctcagagaacaacctggcactttcgactatcagcgtctggatctgggcgggtccgagagatcgcgaggggtgaccgtcgccctgaaattgacccatccttataataagctatggagtctcggccaggatgatatggccatcccatcaaagcccccagccgcttccccggagaagccatctgctctcttggggaattccctagcgctgccaaggcggccccagaatagagactcgattctgaatcctagcgacaaggaggaggtccccaccccaacgcttggctcaatcacaatccccaggccccagggccgaaaaaccccagagctggggattgtgcccccacccccaataccgcgaccagccaagcttcaagcagccggggctgccctgggcgacgtttccgaaagactccaaaccgaccgcgatcgcagggccgccctcagccctgggttgttgcctggagttgtgccacagggacccactgagctcctgcagcccctgtccccaggaccgggcgcagccggaaccagctctgatgcactgctggccctgctcgaccctctcagtaccgcctggagtggcagcacccttcctagccgccccgcaaccccaaatgtggctactcctttcacgccacagttcagctttccacctgccgggacccctacgccgttcccacagcctccactgaatcccttcgttccctccatgcctgcggcaccacctacactgccgctcgtttctaccccggcagggccattcggagctccacctgccagcctaggccccgcattcgcatcgggcttgctcctaagctccgcaggattttgcgcgccgcatcggtctcagcctaatctttccgctctctccatgcctaatctgtttggacagatgccaatgggtacccacaccagcccattgcagcctttgggcccccctgcagttgccccctcacggataagaacactcccgctggctaggagttctgccagagcagcagaaacgaagcaaggtttagccttgcgacctggcgacccacccctcctcccccctaggcctccccaggggcttgagccgaccctgcagcctagcgccccccaacaggcccgagatccgtttgaagatctgctgcagaaaacgaagcaggatgtttcaccatcgcccgccctggcacctgccccagactcagtggaacaactgaggaagcagtgggagacattcgaatag

SEQ ID NO: 290831 - DNA, 3063 bp, Artificial Sequence
  derived and/or modified sequence
atgaggaggcctggggaccacggcctgcaggaccaggaggtgctgcagaccctgaccaagttctgcttccccttctacgtggacagcctgactgtgtcccaggtgggccagaacttcacctttgtgctgacagacatcgacagcaagcagcgcttcggcttctgccgcctgagcagcggggccaagagctgcttctgcatcctgagctacctgccctggtttgaggtgttctacaagctgctgaacatcctggccgactacaccaccaagaggcaggagaaccagtggaatgagctgctggagaccctgcacaagctgcccatcccagaccccggggtgtctgtgcacctgtctgtgcacagctacttcaccgtgcctgacacccgggagctgcccagcatccctgagaacagaaacctgacagagtactttgtggccgtggatgtgaacaacatgctgcacctgtatgcctccatgctgtatgaaagacgcatcctgatcatctgcagcaagctgagcaccctgacagcctgcatccacggcagcgctgccatgctgtaccccatgtactggcagcacgtgtacatccctgtgctgcccccccacctgctggactactgctgtgcccccatgccctacctgattggcatccacctgagcctgatggagaaggtgaggaacatggccctggatgatgtggtgatcctgaatgtggacaccaacaccctggagaccccatttgatgacctgcagagcctgcccaatgatgtgatcagcagcctgaagaaccggctgaagaaggtgtccaccaccactggagatggagtggcccgggccttcctgaaggcccaggccgccttcttcggcagctacagaaatgccctgaagattgagcctgaggagcccatcaccttctgtgaggaggcctttgtgagccactaccgcagcggggccatgaggcagttcctgcagaatgccacccagctgcagctgttcaagcagttcattgatggccgcctggacctgctgaacagcggggagggcttcagtgatgtgtttgaggaggagatcaacatgggagaatatgccggcagtgacaagctgtaccaccagtggctgagcacagtgaggaagggcagcggggccatcctgaacacagtgaagaccaaggccaacccagccatgaagacagtgtacaagtttgccaaggaccacgccaagatgggcatcaaggaggtgaagaaccggctgaagcagaaggacattgctgaaaatggctgtgcccccaccccagaggagcagctgcccaagacagcccccagccccctggtggaggccaaggaccccaagctgagagaagatagaagacccatcaccgtgcacttcggccaggtgcggcccccccggccccacgtggtgaagaggcccaagagcaacattgctgtggagggccgccgcacctctgtgcccagccctgagcacctggtgaagcccctgcggcactatgctgtgttcctgtctgaggacagcagtgatgatgagtgccagcgggaggagggccccagcagcggcttcacagagagcttcttcttcagcgccccctttgagtggccccagccctaccgcaccctgcgggagagtgacagcgcagaaggagatgaagctgagagccctgagcagcaggtgaggaagagcacaggccctgtgcctgcccccccagaccgggccgccagcattgacctgctggaggatgtgttcagcaacctggacatggaggccgccctgcagcccctgggccaggccaagagcctggaggacctgcgggcccccaaggacctgcgggagcagcccggcacctttgactaccagaggctggacctgggcggcagcgagaggagcagaggagtgacagtggccctgaagctgacccacccctacaacaagctgtggagcctgggccaggatgacatggccatccccagcaagcccccagctgccagccctgagaagcccagcgccctgctgggcaacagcctggccctgccccggcggccccagaacagagacagcatcctgaaccccagcgacaaggaggaggtgcccacccccaccctgggcagcatcaccatcccccggccccagggcaggaagaccccagagctgggcatcgtgcccccaccacccatccccaggcctgccaagctgcaggccgccggggccgccctgggagatgtgtctgagcggctgcagacagaccgggacagaagagctgccctgagccctggcctgctgcccggggtggtgccccagggccccacagagctgctgcagcccctgagccctggccctggagctgctggcaccagcagtgatgccctgctggccctgctggaccccctgagcacagcctggagcggcagcaccctgcccagcaggcctgccaccccaaatgtggccacccccttcaccccccagttctccttccccccagctggcacccccacccccttcccccagccccccctgaacccctttgtgcccagcatgcctgctgccccacccaccctgcccctggtgtccaccccagctggcccctttggagcccccccagccagcctgggccctgcctttgccagcggcctgctgctgagcagcgctggcttctgtgccccccacaggagccagcccaacctgagcgccctgtccatgcccaacctgtttggccagatgcccatgggcacccacaccagccccctgcagcccctgggccccccagctgtggcccccagccgcatccgcaccctgcccctggcccggagcagcgcccgggctgctgagaccaagcagggcctggccctgcggcctggggacccccccctgctgccccccaggcctccccagggcctggagcccaccctgcagcccagcgccccccagcaggcccgggacccctttgaggacctgctgcagaagaccaagcaggatgtgagccccagccctgccctggccccagccccagacagcgtggagcagctgaggaagcagtgggagacctttgaatag

SEQ ID NO: 290832 - DNA, 2385 bp, Artificial Sequence
  derived and/or modified sequence
atgctgtaccccatgtactggcagcacgtgtacatccctgtgctgcccccccacctgctggactactgctgtgcccccatgccctacctgattggcatccacctgagcctgatggagaaggtgaggaacatggccctggatgatgtggtgatcctgaatgtggacaccaacaccctggagaccccatttgatgacctgcagagcctgcccaatgatgtggaggagcccatcaccttctgtgaggaggcctttgtgagccactaccgcagcggggccatgaggcagttcctgcagaatgccacccagctgcagctgttcaagcagttcattgatggccgcctggacctgctgaacagcggggagggcttcagtgatgtgtttgaggaggagatcaacatgggagaatatgccggcagtgacaagctgtaccaccagtggctgagcacagtgaggaagggcagcggggccatcctgaacacagtgaagaccaaggccaacccagccatgaagacagtgtacaagtttgccaaggaccacgccaagatgggcatcaaggaggtgaagaaccggctgaagcagaaggacattgctgaaaatggctgtgcccccaccccagaggagcagctgcccaagacagcccccagccccctggtggaggccaaggaccccaagctgagagaagatagaagacccatcaccgtgcacttcggccaggtgcggcccccccggccccacgtggtgaagaggcccaagagcaacattgctgtggagggccgccgcacctctgtgcccagccctgagcacctggtgaagcccctgcggcactatgctgtgttcctgtctgaggacagcagtgatgatgagtgccagcgggaggagggccccagcagcggcttcacagagagcttcttcttcagcgccccctttgagtggccccagccctaccgcaccctgcgggagagtgacagcgcagaaggagatgaagctgagagccctgagcagcaggtgaggaagagcacaggccctgtgcctgcccccccagaccgggccgccagcattgacctgctggaggatgtgttcagcaacctggacatggaggccgccctgcagcccctgggccaggccaagagcctggaggacctgcgggcccccaaggacctgcgggagcagcccggcacctttgactaccagaggctggacctgggcggcagcgagaggagcagaggagtgacagtggccctgaagctgacccacccctacaacaagctgtggagcctgggccaggatgacatggccatccccagcaagcccccagctgccagccctgagaagcccagcgccctgctgggcaacagcctggccctgccccggcggccccagaacagagacagcatcctgaaccccagcgacaaggaggaggtgcccacccccaccctgggcagcatcaccatcccccggccccagggcaggaagaccccagagctgggcatcgtgcccccaccacccatccccaggcctgccaagctgcaggccgccggggccgccctgggagatgtgtctgagcggctgcagacagaccgggacagaagagctgccctgagccctggcctgctgcccggggtggtgccccagggccccacagagctgctgcagcccctgagccctggccctggagctgctggcaccagcagtgatgccctgctggccctgctggaccccctgagcacagcctggagcggcagcaccctgcccagcaggcctgccaccccaaatgtggccacccccttcaccccccagttctccttccccccagctggcacccccacccccttcccccagccccccctgaacccctttgtgcccagcatgcctgctgccccacccaccctgcccctggtgtccaccccagctggcccctttggagcccccccagccagcctgggccctgcctttgccagcggcctgctgctgagcagcgctggcttctgtgccccccacaggagccagcccaacctgagcgccctgtccatgcccaacctgtttggccagatgcccatgggcacccacaccagccccctgcagcccctgggccccccagctgtggcccccagccgcatccgcaccctgcccctggcccggagcagcgcccgggctgctgagaccaagcagggcctggccctgcggcctggggacccccccctgctgccccccaggcctccccagggcctggagcccaccctgcagcccagcgccccccagcaggcccgggacccctttgaggacctgctgcagaagaccaagcaggatgtgagccccagccctgccctggccccagccccagacagcgtggagcagctgaggaagcagtgggagacctttgaatag

SEQ ID NO: 290833 - DNA, 3063 bp, Artificial Sequence
  derived and/or modified sequence
atgcggcggcccggcgaccacggcctgcaggaccaggaggtgctgcagactctgactaagttctgcttccctttctatgtggacagtcttacagtctcccaggttggtcaaaactttacctttgtactgactgatatcgactcaaagcagcgtttcggcttttgccgactgagcagtggcgccaaatcgtgcttttgtattctcagctacctcccctggtttgaagtattctataaattgctgaacatcctggcagattatacaacaaaaaggcaagaaaatcagtggaatgagctgctggagacccttcacaagttgccaattcccgatcctggagtttctgttcatttgagcgtgcacagctactttaccgtgccagatacaagggagctgccttcaatccccgagaaccgcaatttaactgagtatttcgtagcagtcgatgtgaataatatgctccacctctacgccagcatgctttatgagaggaggatcctgatcatctgttcaaagctgtccaccctcactgcgtgcatacacggatcagctgctatgttgtacccaatgtactggcagcatgtatacatccccgtattgcctccccatttactggattattgctgtgcgcccatgccttatttaataggaattcacctctcactgatggaaaaggtacggaacatggccctggacgacgtcgtgattcttaacgtcgacactaatacactggaaactccattcgatgacctacagagcttacccaatgacgtgatatcttctctcaagaacagactcaaaaaggtgtcaactactactggggatggtgttgcaagggcttttctcaaggcccaagccgctttttttggcagctatcgaaacgctttgaaaattgagccagaggagcctataacattctgtgaagaggcgttcgtatctcactataggtcaggggctatgaggcagttcttgcagaatgctacacagctgcagctgtttaagcagtttattgacgggcgcttggacctactgaattctggcgaaggattcagtgatgtgttcgaggaggaaatcaatatgggtgagtacgccggctcggacaaattataccaccagtggctgagcaccgtgcgcaaggggtctggcgctattttaaacacagttaaaacaaaagccaaccccgccatgaagacagtttacaagttcgccaaggatcatgcaaaaatgggcattaaggaggttaaaaatcggctgaaacagaaagacatcgcagagaacgggtgtgcaccaactcctgaagagcaactacccaagaccgcaccatcccctctggtggaggctaaggaccccaaactcagggaggatagaaggccaatcacagtccatttcggccaggtccgaccgccgaggccccatgtcgtgaaacgtcctaaatcgaatattgcagttgaaggtcggaggacttcggtgccttcccctgagcacctcgttaaaccgttgcgtcactatgccgtttttcttagtgaagacagtagtgacgacgaatgccaacgggaggagggcccttcttccggctttacagaaagtttcttcttcagtgcacctttcgagtggcctcagccatataggacccttcgagagtctgactcagccgagggcgatgaggccgaatcccccgagcagcaagtacgaaaatcaacgggccccgttccggcccctcctgatagagctgcgagcatagatctattggaggacgttttcagcaacttggatatggaggcagcactgcaaccattagggcaggctaaaagcttagaagacctcagagccccaaaagacctgcgcgagcaaccaggaacgttcgattaccagcgcctcgatcttgggggaagcgaaaggagtaggggcgtgaccgtcgccctcaagctgacacatccttacaataaactatggtccttgggacaggacgacatggccatccccagtaaacctcccgctgcatcccctgaaaaaccttctgccttacttggcaactccctggctctgccccggcgccctcagaacagggattccattttaaatcccagtgacaaagaagaagtccctacacctactctcggctctatcacaattccaaggcctcagggccggaaaactcccgagctgggaatcgtgccacctcctcctattcccagaccggccaagcttcaggctgccggcgccgctctcggagacgttagcgaaaggctccagacagatcgcgacaggcgcgctgccctgagtcctggactgttacccggggttgttcctcaggggcccacggagctgctgcagcccttatctccaggccctggcgctgcagggacctcatctgacgctttgttagctctgctagatcccttgtccacggcttggtctgggtccaccctgccctcgcgcccagcgacacccaacgtcgcgacccctttcactccccagttttccttcccacctgcaggaacacctaccccgttccctcaacctcccttgaacccttttgtgccaagcatgcctgctgccccccccacactgccactcgtgtccactcccgccggcccattcggtgctcctccagcatctctgggaccagccttcgcatccgggttactgctgagttctgctgggttctgcgcacctcatcgcagtcagcccaacctgtccgccttgagtatgcctaacctgttcggacagatgccaatgggaacgcacacctcaccactgcagccattaggaccaccagccgttgcaccgtccaggatccgaacattgccactcgctcgcagcagtgcacgggccgccgagacaaaacagggcttggccttgaggccaggggatccgcctcttctgcccccacgcccgcctcagggattggagcccactctacaaccaagtgccccgcaacaagcccgggaccctttcgaggatttattgcagaagacaaagcaggacgtcagtccctcgccagcgctcgcacctgcccctgattcagtcgagcagctgaggaaacagtgggaaactttcgaatag

SEQ ID NO: 290834 - DNA, 2385 bp, Artificial Sequence
  derived and/or modified sequence
atgctgtaccccatgtactggcagcacgtgtacatccccgtgctgcctcctcatttgctggactattgttgtgcgccaatgccatacttgattggcatacacctcagtcttatggaaaaagtccggaacatggccttagatgatgttgtcatactgaacgtggatacgaacactctcgagaccccgtttgacgacctccagagcctccctaacgacgtagaggagcctattaccttttgtgaggaggccttcgttagccattaccgctctggcgctatgcgccagttcctgcagaacgccacccagctgcagttgtttaagcaattcattgatggcagattagacctgcttaactcaggggagggcttctcagatgtctttgaagaggagattaatatgggcgaatacgcagggtcggacaagctctatcatcagtggctaagtactgttagaaaggggtccggcgctattctcaatacagtgaaaacgaaggccaaccctgctatgaagactgtctacaagtttgccaaggatcacgccaaaatgggcatcaaggaagtgaagaacagattaaagcagaaagatattgccgagaatggctgcgccccaacaccagaggaacagctcccaaaaaccgccccctctcccctcgtggaggccaaggatccaaagctgagggaggacaggcgcccgataacagtccacttcggtcaagtgcgaccccctcgtccccacgtggtgaaaagaccaaaaagcaatatcgccgtagagggccggagaacgtctgtcccctccccggagcatttggtgaaacctttacggcattacgctgtgtttctgagtgaagactcttctgatgacgagtgtcagcgagaggagggccctagtagtggttttactgaatcgttcttctttagcgcgccctttgagtggcctcagccatatcgcacgttgcgggagtctgactccgccgagggagacgaggctgagagccccgagcagcaagtgaggaaatcaacgggccctgttccggccccccccgaccgggccgcaagtatagatcttcttgaagatgtgttctctaatctggacatggaagcagcccttcagcctctgggccaagcaaaatctctggaagaccttcgcgccccaaaagatttaagagaacaacctgggacattcgactaccaacgactggatctcgggggctccgagagatccaggggcgtgactgtcgctttaaagcttactcatccgtataacaagctctggtccctgggacaggacgacatggccataccttcaaaaccccccgcagcctctcctgaaaagccaagcgctttgctgggcaactctctggcccttccgagaaggccacaaaacagggatagtattctcaacccatctgataaagaggaggtccccactccaaccttgggaagcattaccatccctcgcccgcaaggccggaagacacctgagctagggattgtgccgccaccccctataccgcgacccgcgaagctccaggcagccggggctgcgctcggcgacgtctcagagagactacaaactgatcgcgatcgacgcgctgctctctcccccggcttactgcctggagtggttcctcaggggcccactgaactgctgcaaccgctgtctcctggcccaggggccgccggcaccagcagtgacgcgctgctggccctcctcgatccgctcagtacagcatggtcaggctcaactctgccctctcgtccggccaccccaaatgtcgcaacgccattcaccccacaatttagcttccctcccgccggaacaccgaccccatttcctcagccaccgctaaatccgttcgtgccaagcatgccagcggctccaccaacattgccactggtctctaccccggctggacccttcggggccccgcccgccagtctaggtccagccttcgcatcagggctgttgttatcaagtgcgggtttttgtgccccccatagaagtcaaccaaacctttccgctctgtctatgccaaatctgtttggacagatgcccatgggcacccacaccagtcccttgcagcctctcggtccccccgcagttgctcccagtcgtattagaactctccctttggcgcgatcgtccgccagggctgctgagactaaacagggcctggccctgaggccaggcgatccaccgctgttaccgccccgaccaccgcagggactggagcccactctccaacctagcgctccccagcaggccagggaccctttcgaggacctgttacaaaagaccaaacaggacgtctccccatccccagccctggcaccagcaccggactctgttgagcagctaagaaagcagtgggagactttcgagtag

SEQ ID NO: 290835 - DNA, 3063 bp, Artificial Sequence
  derived and/or modified sequence
atgcgtagaccaggcgaccatggcctgcaggaccaagaagtgctccaaactctcaccaagttttgttttcccttctatgtggacagcctcaccgtgagccaggttggccagaatttcacttttgtactgacagacatagattcaaaacagaggttcggattctgcaggctgagttcaggagctaaaagttgcttctgtatcctgagttatctaccatggttcgaggtgttttataagttattgaatattcttgctgattataccaccaagaggcaggaaaaccagtggaacgagcttttagagacgctgcacaagctgcctatccccgaccctggggtttctgtccacttaagcgtacattcctattttactgtaccagataccagagaactccccagcatcccagaaaaccggaaccttactgagtactttgttgccgtggacgtgaacaatatgctgcacctgtacgcctccatgctgtatgagagacgtatcctgatcatctgtagtaagttgtcaacattgaccgcgtgtatccacggctctgctgccatgctgtacccaatgtattggcagcatgtttacataccggttctcccgccacacctgctggactattgctgcgcccctatgccctacttgatcggaatccatcttagtctgatggaaaaagtgcgtaacatggctctggacgatgtcgtgatcctgaacgtggacacaaatacactggaaaccccttttgatgaccttcagtcactgccgaatgatgtaatcagcagtctgaagaatcgccttaaaaaagtgagcaccaccacaggtgatggagtggctagagcattcctcaaggctcaggccgctttctttggcagttaccgcaacgcattaaaaatagagccagaggaacccatcacattctgtgaagaagcctttgtgtctcactaccggtccggcgcaatgagacagttcctgcagaacgctacccagctgcagttgttcaagcagttcatcgatgggaggctagaccttttgaattcaggggagggattttctgatgtctttgaggaggagatcaacatgggggagtacgccggatccgacaagctctatcaccagtggctgagcactgtacgtaaggggtctggagcaattttaaatacggtcaagactaaagctaacccagccatgaaaaccgtgtataagttcgctaaagatcatgccaaaatgggtatcaaagaggtgaaaaacaggctgaagcagaaagatatagcagaaaatggatgcgctcccactcctgaagagcagttgcctaagacggcaccttcaccactggttgaggcaaaggatcccaaacttcgggaagacaggcgtcccatcacagtccatttcggtcaggtcagaccgcctagacctcacgttgtgaaacgccctaagtctaatatcgccgtagagggtaggagaacctcagtgccctcacccgaacatctggtgaaaccactcaggcattacgcagtgttcttgagcgaggactctagcgacgacgaatgccagagagaagagggtcccagtagcggttttaccgaaagctttttcttctccgctccgttcgaatggcctcagccctacaggacactgcgtgaatcagacagcgccgaaggcgatgaggcggagtctccagagcagcaggtcagaaagtctaccggcccagtaccggcacctccagatagagcagcttctatcgatctgctggaggatgtgttctcaaacctggacatggaagctgctctgcagccgctcggacaggccaaaagcttagaggatctgcgcgctccaaaagatttgagggagcagcccggaactttcgactatcaacggctggatctggggggtagtgagaggtctcgcggagtgacagtggctttgaagctaacacacccttataataagctatggtcccttggccaggacgatatggcaataccatctaagccacccgcagcgagccctgaaaaacctagcgcccttctagggaacagtctggcgttacctaggcgcccacaaaaccgggactccatcctgaaccccagcgacaaggaggaggttccgacccctaccctcggatctatcacaattcctcgtcctcagggaagaaagaccccggagcttggcatcgtgcccccacccccaatccccaggccagccaagctgcaggcagctggggctgcccttggcgacgtgtccgagcgcttgcagactgaccgggatcggagagctgccttgtctcctggcctgcttcccggtgtcgtgccccagggccctacggagttgcttcaacccttgagtcccggtccaggtgcggcaggcacatcctctgacgcactgctggctctgcttgaccctctgagcactgcgtggagtgggagcacactaccgagtcgaccggctactcccaacgtagcaacgccattcacacctcagttctctttccccccagccggtactcccaccccattcccgcagcccccactcaacccctttgtgcctagcatgcccgcagctccacctacactgccacttgtcagtacccccgctggtccttttggggcacccccagcaagcctcggcccagcatttgcatcaggcctgttactctctagcgcaggcttctgcgcccctcaccgatcccagccaaacctgtcagctctgtctatgccaaatctgtttgggcagatgccgatgggaacacacacatcccctctacagcccctcgggccacctgctgtggctccttcccgaattagaaccctccccctcgccagatcttcagctagagctgccgagacaaaacaggggctggcgctgcgtccaggcgacccaccactgctcccgccaagaccccctcaaggtctcgagccgacactgcagccatcagcccctcagcaggccagggatccatttgaagatctactccaaaaaactaaacaggacgtgtctcccagccctgcgctggctcccgctcctgactctgtggagcagctgagaaagcaatgggagacttttgagtag

SEQ ID NO: 290836 - DNA, 2385 bp, Artificial Sequence
  derived and/or modified sequence
atgctttatcctatgtattggcagcacgtctatattccagtcttgcctccccatttgctggactactgctgtgccccaatgccatatctgattggaatccatctttccttgatggagaaggtgcgcaatatggctctggatgacgttgttatccttaacgttgacaccaacacccttgaaaccccgtttgatgatttgcaaagtttacccaacgatgtggaagaacccattacattctgcgaggaagcctttgtgtcgcactaccggtcaggtgcaatgcggcagtttttacagaacgcaacacagctgcaactctttaagcaatttattgatggccgactggacctacttaattctggcgaaggcttcagcgacgtgttcgaggaagagattaacatgggagagtatgctggctccgataagctataccatcagtggctgtcaaccgtgcgaaagggatcaggcgcaatactgaataccgtgaaaaccaaagcgaatccggcaatgaagactgtatataaattcgcaaaagaccacgcaaaaatgggaattaaggaggtcaaaaacagattaaaacagaaagacatagctgagaacggctgcgcccctacgcccgaggagcagctgccaaagactgcaccatcccccctcgtggaagccaaagaccctaaactgagagaagacaggcgccctattactgtgcactttggccaagtgagaccaccgaggccacatgtggtgaaacgtccaaagagcaacatcgcagtcgagggaaggagaacctccgtgccttccccagagcatctggtgaagccactgaggcactatgctgttttcctatccgaggattcttctgacgacgagtgtcagagggaagaggggcctagcagtggattcaccgagagtttttttttctctgccccatttgagtggccccaaccctacagaacacttagagagtctgattctgctgagggcgatgaagcagaatcccctgaacagcaggtcaggaaatctaccggccctgtgccagcaccacccgatcgtgctgcttcaattgaccttctggaagacgttttttctaatcttgacatggaggcggctctgcagcccttgggacaagcaaaaagccttgaggacctacgcgcacctaaagacctgcgcgagcaaccaggaaccttcgactaccaacggctagaccttggaggttcggagcgttccaggggagtcactgtcgcactcaaactaacacacccctacaacaagttgtggtcccttggacaggatgatatggcaattcctagcaagccgccagctgcgtctcctgagaaaccttccgcattgttgggaaactcattagcactgccaaggaggcctcaaaaccgggacagtatcttgaacccctcagacaaagaggaagttccaacaccaacactgggatctataacgattcctaggcctcagggtaggaagactcccgaactgggtatagtcccccctccccctatccccagacctgccaagctgcaggctgctggggctgccctcggtgatgtctctgagcgactgcaaactgacagggatagacgggctgcactttccccagggctactgccaggagtggtaccacagggcccaacggaactgctgcagccgcttagccctgggccaggagcggctggcacatcctcagatgctctcctcgctcttttagacccattgagtaccgcttggagtggctctaccttacccagcagaccagcgacaccaaacgtcgccacaccattcacgccacagttctcattccctccagccggaacaccaacgccctttccccagccccctttgaatcccttcgtgccttcaatgcccgcagcaccgcctaccctgccattagtctcaacacccgctggtccgtttggggcacctccggctagcctggggcctgccttcgcctcaggcctgctgttgagcagtgccggtttctgcgctcctcataggtcccagcctaatttgtctgctctgagtatgccaaatctgtttgggcagatgcctatggggactcacacatcaccacttcagcccctcggtcctcctgccgtggccccttcgcgtatacggacgctgcctctcgcgaggagttctgccagggctgctgagacaaaacaggggttggcactgcgaccaggagatcccccactcctgcccccacgccctccccaaggccttgagccaaccttgcagcccagtgccccacagcaggcacgggatccatttgaggacttactgcagaaaactaaacaggatgtgagtcccagcccagcccttgcacctgccccagatagcgtggaacagttgcggaagcagtgggaaaccttcgagtag

SEQ ID NO: 290837 - DNA, 3063 bp, Artificial Sequence
  derived and/or modified sequence
atgagaagacccggcgaccacggcctgcaggaccaggaggtgctgcagaccctgaccaagttctgcttccccttctacgtggacagcctgaccgtgagccaggtgggccagaacttcaccttcgtgctgaccgacatcgacagcaagcagagattcggcttctgcagactgagcagcggcgccaagagctgcttctgcatcctgagctacctgccctggttcgaggtgttctacaagctgctgaacatcctggccgactacaccaccaagagacaggagaaccagtggaacgagctgctggagaccctgcacaagctgcccatccccgaccccggcgtgagcgtgcacctgagcgtgcacagctacttcaccgtgcccgacaccagagagctgcccagcatccccgagaacagaaacctgaccgagtacttcgtggccgtggacgtgaacaacatgctgcacctgtacgccagcatgctgtacgagagaagaatcctgatcatctgcagcaagctgagcaccctgaccgcctgcatccacggcagcgccgccatgctgtaccccatgtactggcagcacgtgtacatccccgtgctgcccccccacctgctggactactgctgcgcccccatgccctacctgatcggcatccacctgagcctgatggagaaggtgagaaacatggccctggacgacgtggtgatcctgaacgtggacaccaacaccctggagacccccttcgacgacctgcagagcctgcccaacgacgtgatcagcagcctgaagaacagactgaagaaggtgagcaccaccaccggcgacggcgtggccagagccttcctgaaggcccaggccgccttcttcggcagctacagaaacgccctgaagatcgagcccgaggagcccatcaccttctgcgaggaggccttcgtgagccactacagaagcggcgccatgagacagttcctgcagaacgccacccagctgcagctgttcaagcagttcatcgacggcagactggacctgctgaacagcggcgagggcttcagcgacgtgttcgaggaggagatcaacatgggcgagtacgccggcagcgacaagctgtaccaccagtggctgagcaccgtgagaaagggcagcggcgccatcctgaacaccgtgaagaccaaggccaaccccgccatgaagaccgtgtacaagttcgccaaggaccacgccaagatgggcatcaaggaggtgaagaacagactgaagcagaaggacatcgccgagaacggctgcgcccccacccccgaggagcagctgcccaagaccgcccccagccccctggtggaggccaaggaccccaagctgagagaggacagaagacccatcaccgtgcacttcggccaggtgagaccccccagaccccacgtggtgaagagacccaagagcaacatcgccgtggagggcagaagaaccagcgtgcccagccccgagcacctggtgaagcccctgagacactacgccgtgttcctgagcgaggacagcagcgacgacgagtgccagagagaggagggccccagcagcggcttcaccgagagcttcttcttcagcgcccccttcgagtggccccagccctacagaaccctgagagagagcgacagcgccgagggcgacgaggccgagagccccgagcagcaggtgagaaagagcaccggccccgtgcccgccccccccgacagagccgccagcatcgacctgctggaggacgtgttcagcaacctggacatggaggccgccctgcagcccctgggccaggccaagagcctggaggacctgagagcccccaaggacctgagagagcagcccggcaccttcgactaccagagactggacctgggcggcagcgagagaagcagaggcgtgaccgtggccctgaagctgacccacccctacaacaagctgtggagcctgggccaggacgacatggccatccccagcaagccccccgccgccagccccgagaagcccagcgccctgctgggcaacagcctggccctgcccagaagaccccagaacagagacagcatcctgaaccccagcgacaaggaggaggtgcccacccccaccctgggcagcatcaccatccccagaccccagggcagaaagacccccgagctgggcatcgtgccccccccccccatccccagacccgccaagctgcaggccgccggcgccgccctgggcgacgtgagcgagagactgcagaccgacagagacagaagagccgccctgagccccggcctgctgcccggcgtggtgccccagggccccaccgagctgctgcagcccctgagccccggccccggcgccgccggcaccagcagcgacgccctgctggccctgctggaccccctgagcaccgcctggagcggcagcaccctgcccagcagacccgccacccccaacgtggccacccccttcaccccccagttcagcttcccccccgccggcacccccacccccttcccccagccccccctgaaccccttcgtgcccagcatgcccgccgccccccccaccctgcccctggtgagcacccccgccggccccttcggcgccccccccgccagcctgggccccgccttcgccagcggcctgctgctgagcagcgccggcttctgcgccccccacagaagccagcccaacctgagcgccctgagcatgcccaacctgttcggccagatgcccatgggcacccacaccagccccctgcagcccctgggcccccccgccgtggcccccagcagaatcagaaccctgcccctggccagaagcagcgccagagccgccgagaccaagcagggcctggccctgagacccggcgacccccccctgctgccccccagacccccccagggcctggagcccaccctgcagcccagcgccccccagcaggccagagaccccttcgaggacctgctgcagaagaccaagcaggacgtgagccccagccccgccctggcccccgcccccgacagcgtggagcagctgagaaagcagtgggagaccttcgagtag

SEQ ID NO: 290838 - DNA, 2385 bp, Artificial Sequence
  derived and/or modified sequence
atgctgtaccccatgtactggcagcacgtgtacatccccgtgctgcccccccacctgctggactactgctgcgcccccatgccctacctgatcggcatccacctgagcctgatggagaaggtgagaaacatggccctggacgacgtggtgatcctgaacgtggacaccaacaccctggagacccccttcgacgacctgcagagcctgcccaacgacgtggaggagcccatcaccttctgcgaggaggccttcgtgagccactacagaagcggcgccatgagacagttcctgcagaacgccacccagctgcagctgttcaagcagttcatcgacggcagactggacctgctgaacagcggcgagggcttcagcgacgtgttcgaggaggagatcaacatgggcgagtacgccggcagcgacaagctgtaccaccagtggctgagcaccgtgagaaagggcagcggcgccatcctgaacaccgtgaagaccaaggccaaccccgccatgaagaccgtgtacaagttcgccaaggaccacgccaagatgggcatcaaggaggtgaagaacagactgaagcagaaggacatcgccgagaacggctgcgcccccacccccgaggagcagctgcccaagaccgcccccagccccctggtggaggccaaggaccccaagctgagagaggacagaagacccatcaccgtgcacttcggccaggtgagaccccccagaccccacgtggtgaagagacccaagagcaacatcgccgtggagggcagaagaaccagcgtgcccagccccgagcacctggtgaagcccctgagacactacgccgtgttcctgagcgaggacagcagcgacgacgagtgccagagagaggagggccccagcagcggcttcaccgagagcttcttcttcagcgcccccttcgagtggccccagccctacagaaccctgagagagagcgacagcgccgagggcgacgaggccgagagccccgagcagcaggtgagaaagagcaccggccccgtgcccgccccccccgacagagccgccagcatcgacctgctggaggacgtgttcagcaacctggacatggaggccgccctgcagcccctgggccaggccaagagcctggaggacctgagagcccccaaggacctgagagagcagcccggcaccttcgactaccagagactggacctgggcggcagcgagagaagcagaggcgtgaccgtggccctgaagctgacccacccctacaacaagctgtggagcctgggccaggacgacatggccatccccagcaagccccccgccgccagccccgagaagcccagcgccctgctgggcaacagcctggccctgcccagaagaccccagaacagagacagcatcctgaaccccagcgacaaggaggaggtgcccacccccaccctgggcagcatcaccatccccagaccccagggcagaaagacccccgagctgggcatcgtgccccccccccccatccccagacccgccaagctgcaggccgccggcgccgccctgggcgacgtgagcgagagactgcagaccgacagagacagaagagccgccctgagccccggcctgctgcccggcgtggtgccccagggccccaccgagctgctgcagcccctgagccccggccccggcgccgccggcaccagcagcgacgccctgctggccctgctggaccccctgagcaccgcctggagcggcagcaccctgcccagcagacccgccacccccaacgtggccacccccttcaccccccagttcagcttcccccccgccggcacccccacccccttcccccagccccccctgaaccccttcgtgcccagcatgcccgccgccccccccaccctgcccctggtgagcacccccgccggccccttcggcgccccccccgccagcctgggccccgccttcgccagcggcctgctgctgagcagcgccggcttctgcgccccccacagaagccagcccaacctgagcgccctgagcatgcccaacctgttcggccagatgcccatgggcacccacaccagccccctgcagcccctgggcccccccgccgtggcccccagcagaatcagaaccctgcccctggccagaagcagcgccagagccgccgagaccaagcagggcctggccctgagacccggcgacccccccctgctgccccccagacccccccagggcctggagcccaccctgcagcccagcgccccccagcaggccagagaccccttcgaggacctgctgcagaagaccaagcaggacgtgagccccagccccgccctggcccccgcccccgacagcgtggagcagctgagaaagcagtgggagaccttcgagtag

SEQ ID NO: 290839 - DNA, 3348 bp, Artificial Sequence
  derived and/or modified sequence
gaccatggcgttcgccgggctggagcgagtacattaacccctggaggcggcggcggcggcgagggagcgagcctcgagcgggcgggccccagcctgagggaagggaggaaggggcggggagagcgccagagggaggccggtcggccgcgggcgggcgggcagcgcagcgccgagcggggcccgcgggcccatgaggaggcctggggaccatgggctccaggatcaagaagttctacagactttgaccaagttttgtttccccttctatgtggacagcctcacagttagccaagttggccagaacttcacattcgtgctcactgacattgacagcaaacagagattcgggttctgccgcttatcttcaggagcgaagagctgcttctgtatcttaagctatctcccctggttcgaggtattttataagctgcttaacatcctggcagattacacgacaaaaagacaggaaaatcagtggaatgagcttcttgaaactctgcacaaacttcccatccctgacccaggagtgtctgtccatctcagcgtgcattcttattttactgtgcctgataccagagaacttcccagcatacctgagaatagaaatctgacagaatattttgtggctgtggatgttaacaacatgttgcatctgtacgccagtatgctgtacgaacgccggatactcatcatttgcagcaaactcagcactctgactgcctgcatccacgggtctgcggcgatgctctaccccatgtactggcagcacgtgtacatccccgtgctgccgccgcatctgctggactactgctgtgctcccatgccctacctcataggaatccatttaagtttaatggagaaagtcagaaacatggccctggatgatgtcgtgatcctgaatgtggacaccaacaccctggaaacccccttcgatgacctccagagcctcccaaacgacgtgatctcttccctgaagaacaggctgaaaaaggtctccacaaccactggggatggtgtggccagagcgttcctcaaggcccaggctgctttcttcggtagctaccgaaacgctctgaaaatcgagccggaggagccgatcactttctgtgaggaagccttcgtgtcccactaccgctccggagccatgaggcagttcctgcagaacgccacacagctgcagctcttcaagcagtttattgatggtcgattagatcttctcaattccggcgaaggtttcagtgatgtttttgaagaggaaatcaacatgggcgagtacgctggcagtgacaaactgtaccatcagtggctctccactgtccggaaaggaagtggagcaattctgaatactgtaaagaccaaagcaaatccggccatgaagactgtctacaagttcgcaaaagatcatgcaaaaatgggaataaaagaggtgaaaaaccgcttgaagcaaaaggacattgccgagaatggctgcgcccccaccccagaagagcagctgccaaagactgcaccgtccccactggtggaggccaaggaccccaagctccgagaagaccggcggccaatcacagtccactttggacaggtgcgcccacctcgtccacatgttgttaagagaccaaagagcaacatcgcagtggaaggccggaggacgtctgtgccgagccctgagcacctggtaaagcccttgcgacactatgcggtcttcctctccgaagactcctctgatgatgaatgccagcgggaagagggcccgagctctggcttcaccgagagctttttcttctccgctccctttgaatggccgcagccgtatcggacactcagggagtcagacagcgcggaaggcgacgaggcagagagtccagagcagcaagtgcggaagtccacaggccctgtcccagctccccctgaccgggctgccagcatcgaccttctggaagacgtcttcagcaacctggacatggaggccgcactgcagccactgggccaggccaagagcttagaggaccttcgtgcccccaaagacctgagggagcagccagggacctttgactatcagaggctggatctgggcgggagtgagaggagccgcggggtgacagtggccttgaagcttacccacccgtacaacaagctctggagcctgggccaggacgacatggccatccccagcaagcccccagctgcctcccctgagaagccctcagccctgctcggaaactccctggccctgcctcgaaggccccagaaccgggacagcatcctgaaccccagtgacaaggaggaggtgcccacccctactctgggcagcatcaccatcccccggccccaaggcaggaagaccccagagctgggcatcgtgcctccaccgcccattccccgcccggccaagctccaggctgccggcgccgcacttggtgacgtctcagagcggctgcagacggatcgggacaggcgagctgccctgagtccagggctcctgcctggtgttgtcccccaaggccccactgaactgctccagccgctcagccctggccccggggctgcaggcacgagcagtgacgccctgctcgccctcctggacccgctcagcacagcctggtcaggcagcaccctcccgtcacgccccgccaccccgaatgtagccaccccattcaccccccaattcagcttcccccctgcagggacacccaccccattcccacagccaccactcaacccctttgtcccatccatgccagcagccccacccaccctgcccctggtctccacaccagccgggcctttcggggcccctccagcttccctggggccggcttttgcgtccggcctcctgctgtccagtgctggcttctgtgcccctcacaggtctcagcccaacctctccgccctctccatgcccaacctctttggccagatgcccatgggcacccacacgagccccctacagccgctgggtcccccagcagttgccccgtcgaggatccgaacgttgcccctggcccgctcaagtgccagggctgctgagaccaagcaggggctggccctgaggcctggagaccccccgcttctgcctcccaggccccctcaaggcctggagccaacactgcagccctctgctcctcaacaggccagagacccctttgaggatttgttacagaaaaccaagcaagacgtgagcccgagtccggccctggccccggccccagactcggtggagcagctcaggaagcagtgggagaccttcgagtgagccgggccctgagggtgggggatgcaccgaggcccgagggtccgtccactgctgcggttccgaggctcccccgccactctctctctgcccaggtt

SEQ ID NO: 290840 - DNA, 2557 bp, Artificial Sequence
  derived and/or modified sequence
gaacgccggatactcatcatttgcagcaaactcagcactctgactgcctgcatccacgggtctgcggcgatgctctaccccatgtactggcagcacgtgtacatccccgtgctgccgccgcatctgctggactactgctgtgctcccatgccctacctcataggaatccatttaagtttaatggagaaagtcagaaacatggccctggatgatgtcgtgatcctgaatgtggacaccaacaccctggaaacccccttcgatgacctccagagcctcccaaacgacgtggaggagccgatcactttctgtgaggaagccttcgtgtcccactaccgctccggagccatgaggcagttcctgcagaacgccacacagctgcagctcttcaagcagtttattgatggtcgattagatcttctcaattccggcgaaggtttcagtgatgtttttgaagaggaaatcaacatgggcgagtacgctggcagtgacaaactgtaccatcagtggctctccactgtccggaaaggaagtggagcaattctgaatactgtaaagaccaaagcaaatccggccatgaagactgtctacaagttcgcaaaagatcatgcaaaaatgggaataaaagaggtgaaaaaccgcttgaagcaaaaggacattgccgagaatggctgcgcccccaccccagaagagcagctgccaaagactgcaccgtccccactggtggaggccaaggaccccaagctccgagaagaccggcggccaatcacagtccactttggacaggtgcgcccacctcgtccacatgttgttaagagaccaaagagcaacatcgcagtggaaggccggaggacgtctgtgccgagccctgagcacctggtaaagcccttgcgacactatgcggtcttcctctccgaagactcctctgatgatgaatgccagcgggaagagggcccgagctctggcttcaccgagagctttttcttctccgctccctttgaatggccgcagccgtatcggacactcagggagtcagacagcgcggaaggcgacgaggcagagagtccagagcagcaagtgcggaagtccacaggccctgtcccagctccccctgaccgggctgccagcatcgaccttctggaagacgtcttcagcaacctggacatggaggccgcactgcagccactgggccaggccaagagcttagaggaccttcgtgcccccaaagacctgagggagcagccagggacctttgactatcagaggctggatctgggcgggagtgagaggagccgcggggtgacagtggccttgaagcttacccacccgtacaacaagctctggagcctgggccaggacgacatggccatccccagcaagcccccagctgcctcccctgagaagccctcagccctgctcggaaactccctggccctgcctcgaaggccccagaaccgggacagcatcctgaaccccagtgacaaggaggaggtgcccacccctactctgggcagcatcaccatcccccggccccaaggcaggaagaccccagagctgggcatcgtgcctccaccgcccattccccgcccggccaagctccaggctgccggcgccgcacttggtgacgtctcagagcggctgcagacggatcgggacaggcgagctgccctgagtccagggctcctgcctggtgttgtcccccaaggccccactgaactgctccagccgctcagccctggccccggggctgcaggcacgagcagtgacgccctgctcgccctcctggacccgctcagcacagcctggtcaggcagcaccctcccgtcacgccccgccaccccgaatgtagccaccccattcaccccccaattcagcttcccccctgcagggacacccaccccattcccacagccaccactcaacccctttgtcccatccatgccagcagccccacccaccctgcccctggtctccacaccagccgggcctttcggggcccctccagcttccctggggccggcttttgcgtccggcctcctgctgtccagtgctggcttctgtgcccctcacaggtctcagcccaacctctccgccctctccatgcccaacctctttggccagatgcccatgggcacccacacgagccccctacagccgctgggtcccccagcagttgccccgtcgaggatccgaacgttgcccctggcccgctcaagtgccagggctgctgagaccaagcaggggctggccctgaggcctggagaccccccgcttctgcctcccaggccccctcaaggcctggagccaacactgcagccctctgctcctcaacaggccagagacccctttgaggatttgttacagaaaaccaagcaagacgtgagcccgagtccggccctggccccggccccagactcggtggagcagctcaggaagcagtgggagaccttcgagtgagccgggccctgagggtgggggatgcaccgaggcccgagggtccgtccactgctgcggttccgaggctcccccgccactctctctctgcccaggttctgctggt

SEQ ID NO: 290841 - protein, 913 aa, Artificial Sequence
  derived and/or modified sequence
MTSRLRALGGRINNIRTSELPKEKTRSEVICSIHFLDGVVQTFKVTKQDTGQVLLDMVHNHLGVTEKEYFGLQHDDDSVDSPRWLEASKAIRKQLKGGFPCTLHFRVRFFIPDPNTLQQEQTRHLYFLQLKMDICEGRLTCPLNSAVVLASYAVQSHFGDYNSSIHHPGYLSDSHFIPDQNEDFLTKVESLHEQHSGLKQSEAESCYINIARTLDFYGVELHSGRDLHNLDLMIGIASAGVAVYRKYICTSFYPWVNILKISFKRKKFFIHQRQKQAESREHIVAFNMLNYRSCKNLWKSCVEHHTFFQAKKLLPQEKNVLSQYWTMGSRNTKKSVNNQYCKKVIGGMVWNPAMRRSLSVEHLETKSLPSRSPPITPNWRSPRLRHEIRKPRHSSADNLANEMTYITETEDVFYTYKGSLAPQDSDSEVSQNRSPHQESLSENNPAQSYLTQKSSSSVSPSSNAPGSCSPDGVDQQLLDDFHRVTKGGSTEDASQYYCDKNDNGDSYLVLIRITPDEDGKFGFNLKGGVDQKMPLVVSRINPESPADTCIPKLNEGDQIVLINGRDISEHTHDQVVMFIKASRESHSRELALVIRRRAVRSFADFKSEDELNQLFPEAIFPMCPEGGDTLEGSMAQLKKGLESGTVLIQFEQLYRKKPGLAITFAKLPQNLDKNRYKDVLPYDTTRVLLQGNEDYINASYVNMEIPAANLVNKYIATQGPLPHTCAQFWQVVWDQKLSLIVMLTTLTERGRTKCHQYWPDPPDVMNHGGFHIQCQSEDCTIAYVSREMLVTNTQTGEEHTVTHLQYVAWPDHGVPDDSSDFLEFVNYVRSLRVDSEPVLVHCSAGIGRTGVLVTMETAMCLTERNLPIYPLDIVRKMRDQRAMMVQTSSQYKFVCEAILRVYEEGLVQMLDPS

SEQ ID NO: 290842 - DNA, 6710 bp, Artificial Sequence
  derived and/or modified sequence
gacggcggccaggtcgcgccgcgagcgagcttccgcgccgcccgcacgcgcgacctacctgggcgctccgcgcccccggatgctgcagttacaggttattcagcgatagttatgacctcccggttacgtgcgttgggtggaagaattaataatatacgcacctcggagttacccaaagagaaaactcgatcagaagtcatttgcagcatccactttttagatggcgtggtacagacctttaaagttactaaacaagacactggccaggttcttctggatatggtgcacaaccacctgggtgtgactgaaaaggaatattttggtttacagcatgatgacgactccgtggactctcctagatggctggaagcaagcaaagccatcaggaagcagttaaaaggaggtttcccctgtaccctgcattttcgagtaagattttttatacctgatcccaacacactgcagcaagaacaaaccaggcacttgtatttcttacaactgaagatggatatttgcgaaggaaggttaacctgccctcttaactcagcagtggttctagcgtcctatgccgtacaatctcattttggagactataattcttccatacatcatccaggctatctttccgatagtcactttatacccgatcaaaatgaggactttttaacaaaagtcgaatctctgcatgagcagcacagtgggctaaaacaatcagaagcagaatcctgctatatcaacatagcgcggaccctcgacttctatggagtagaactgcacagtggtagggatctgcacaatttagacctaatgattggaattgcttccgcgggtgttgctgtgtaccgaaaatacatttgcacaagtttctatccttgggtgaacattctcaaaatttctttcaaaaggaaaaagttcttcatacatcagcgacagaaacaggctgaatccagggaacatattgtggccttcaacatgctgaattaccgatcttgcaaaaacttgtggaaatcctgtgttgagcaccatacgttctttcaggcaaagaagctactacctcaggaaaagaatgttctgtctcagtactggactatgggctctcggaacaccaaaaagtcggtaaataaccaatattgcaaaaaggtgattggcgggatggtgtggaacccagccatgcggagatccttatcagtggagcacttagaaaccaagagtctgccttctcgttcccctcccattactcccaactggcgaagtcctcggctccggcacgaaatccgaaagccacgccactcttctgcagataaccttgcaaatgaaatgacctacatcacggaaacggaagatgtattttacacgtacaagggctctctggcccctcaagacagcgattctgaagtttctcagaaccgaagcccgcaccaagagagtttatccgagaacaatccggcacaaagctacctgacccagaagtcatccagttctgtgtctccatcttcaaatgctccaggctcctgctcacctgacggcgttgatcagcagctcttagatgacttccacagggtgaccaaagggggctccaccgaggacgccagccagtactactgtgacaagaatgataatggtgacagctacttagtcttgatccgtatcacaccagatgaagatggaaaatttggatttaatcttaagggaggagtggatcaaaagatgcctcttgtggtatcaaggataaacccagagtcacctgcggacacctgcattcctaagctgaacgaaggggatcaaatcgtgttaatcaatggccgggacatctcagaacacacgcatgaccaagtggtgatgttcatcaaagccagccgggagtcccactcacgggagctggccctggtgatcaggaggagagctgtccgctcatttgctgacttcaagtctgaagatgaactgaaccagcttttccccgaagccattttccccatgtgtccggagggtggggacactttggagggatccatggcacagctaaagaagggcctcgaaagcgggacggtgctgatccagtttgagcaactctacagaaaaaagccaggtttggccatcacgtttgcaaagctgcctcaaaatttggacaaaaaccgatataaagatgtgctgccttatgacaccacccgggtattattgcagggaaatgaagattatattaatgcaagttacgtgaacatggaaattcctgctgctaaccttgtgaacaagtacatcgccactcaggggcccctgccgcatacctgtgcacagttttggcaggttgtctgggatcagaagttgtcactcattgtcatgttgacgactctcacagaacgagggcggaccaaatgtcaccagtactggccagatccccccgacgtcatgaaccacggcggctttcacatccagtgtcagtcagaggactgcaccatcgcctatgtgtcccgagaaatgctggtcacaaacacccagaccggggaagaacacacagtgacacatctccagtacgtcgcatggcctgaccacggtgtgcccgatgactcctccgactttctggaatttgtaaactatgtgaggtctctgagagtggacagcgagcccgtcctagttcactgcagtgctggaataggtcgaaccggtgtgttggtcactatggaaacagccatgtgcctaactgagaggaacctgcccatttacccactggatattgtccgaaaaatgcgagaccagcgcgccatgatggtgcagacatcaagccagtacaagtttgtgtgtgaagcgattcttcgtgtgtatgaagaaggtttagtccaaatgctggatcctagttaagacaactgtgaaaaagttcattcctctttcccaagggcatcctccttgaaagaggaggacagacctctctggaagcagcaagaggaaccagtagctgtgggaaaggaatgggcacctctgaacccaggcactttaaacttctatagaaaagatatcgtgtacataggaactggtgtagataagcatgcaattatggcatcatttaggcctgtatttctatggaaagatacaaaaaggatctcagtttggggcctgtcctaatgccttcttccctaacatcaccacacacacccctgtcggcatcctggagcaattgagaccggacacccacagagctgttgtcctcccagcaacaagatggtgtggttatcttgggtcatttggatgttttgtttgtttctgtgtgtcagactgtaagggctgagctttctgtgcttctaggtggagctggaacaattcagattcacccgccctgatgctaaggaaaccctgacgtatgtactagatggcagggcactgggggtcaggctgaaggctgagcaacacctctctgccctccctccctttgtcccatctcccagcgacttccaatattcatgtttctgagaattgtgtccctcttcaggttccctcttggtgcctaacctggattagtaatgtgcattcaggtgaattttcagctgaggctctgagaactggtactctcagtgtgttctggtcatcttgtggcttagttgtagaagcaggtgtgtctcttgcctctgcttgcctcctactgcacactcagcacccaggactggaatcaccgactactgaatctcctacatgtattgctgctacttcaagctcctccacttgaaaccttatgattttcccaaggggagatgggacagtgtcatctaaatattccgaatgtttggccttctgagaaaagagcttctagtaattgaaccatgggaaacccagcttctggagggttggccgtggggctgtgtacatgtgtgtgcccaggggtgagtgtttctcaggattcctaacgattcaaattaccgttgagtatatataaagaatgagtctctgtatggaagaacaaatgtgtgcattcacccccagtcacaatggtctccattgcatttcaaaggagaggatcagactatctgaatataaacacaatctgatgttaatttattctaagaacaccatcattttgattgtcctaaagaattctgcctttgtgaataccgtgttaaatttttttaaatttgtgacaggattgtagcaaattattatttaaggaaaataaattgtgtaaacatttaatgtggtatttttgaacagcggtttttatgtactcagaagaggaagtaaagccaggttcttaatggtatttatagaaaagatgttttcatattataatgcacataaatgaagccattttgatattcagcaaattcggtgccaattgaatagtttgctggtagcaagacggatgaagacctatatgggagattctttatctctagagctagcatatttacttgcatactttgtttcttttccacatggatattttactgctaaatggcagaggtgggagggagatgtcacacagtaccataaccccatattgaaaacaagaaaccaccagaaagtttgcagctaaggggcaggggattcagttcctacgcccactcagcactaactacttgcgggcctggttgcttagaagctctacctctctttcattatctgtaaaatagaaacaatacttaggactttagttggaacatgaggattgaataagatcacgctattcatgtgactttttatcggctagaacagcaacagacactgctgtgggtgagttacttagaaaagtttagttatcagtgattagcccaaaaacacatcagtcaaaaatagaatccactggatttttgtctctctttttagagacagggtctcactgtcgcccaggctggagtacagtggcatgatcattgttcactgcagcctcaaattcctgggctcaagcaatcctcgcacctcagcctcctgagtagccgggactataggcacatgccacctcacctggcttgtgtgtgtgtgtgtgtgtgtgtgtgtgtgtgtgtgtgtgtgtgtgtgtgtgtgtgtgtgtgtagagacaggatcttgatgtgttgcctaggctggtctcaaactcctggcctcaagtgatcttcccacctcagcctccaaaactgttgggattataggcgtgagccactgtgcccagcctaactgggtttttatgagaggaaaatagaaaatgctcttctagaagagagagaacaagagcacaaaataatctggactcacaaaaattcagcaagctccaagaaagggggatggagggaacgctggcaaaaatttaaatgccattaggatatttagcaagttattactgtttggtaaaaatgcatcatcaccctgtgtgcaaaatgcttgcaaagtagtctaaatgtctttggagatgggtgttttactgcttttttccaaaaacaaattgtttattatggttgcagaaatgcagccattacggtcacataaatttctaaaaagcctaccaaaggttgcaagcagtcttctgccactgggcaggccagcagttcagacccagcgaggttgccaggaacaaatccaggaaatactgggaagaacaagacaagagaattacctaaaagagcaaacaattcaagtaaatcctgtagctattaccacttaaaatccgtagctcaagattcctgtttcaccaccttatacacttaagcaattatacttaagcctttttttagtcctaagtgaagaactacatcagaatcaggataagtattttgcctgggaaatttggctgcatatgaatggagaagacatttacatcctatgttctggcactttctgaaagatctaattaaacatgttgatgtgccaatttaatcaagatgagagatccctgctggtgtcaccctctagaacctgcacttggtgttttgactttccagaagaaaaaaatgcaactttggttagggggcagtggttggatcacacagttgtctttcgtttcctaccacagtaattcatatttaaatatgcttttagattagtgtggatactattgctgctgtgttgctacctgacctttttctggggggggtacctcagaaatgagcatttgagggcaagcgaaaaagccctcttcatcctccagaggcaacaaagaggcagcagaaatggggaaagattgtgagaggcagggcttgggtctagacctggacttaggcaagatatgttgccctcaaccctgagttttcttatatgtaaaaagggaaggttgggctggactagatgaggtcaagatttgccattctgggaggctgatattccagagaatcaaaattaatcctaaaccaaagctttatggctgctacagagacatgtcacatttctgagacttgtcaccaagagtttgtccctcagactttggcgctgttgaatgcaaagacaaggatggccaccttctggttcttgcctgttgtcctcagctgagagcagtctcggtaaaggtggcaaagattctgtgacctcagaccggggaccaaatgcttgggagtctgatggccgggctgggccaccattctcatagctctcattctgtttggagcaaccaaaggatttgtgtgaagttatttggaaaaggaccttaactgagcagtaatcttttttctgtatatttggaatgtttttcattctgacctgttctgtcagtgattctactgaaaaacaatttaatcaatataaaaatgttcaagctatgcaac

SEQ ID NO: 290843 - DNA, 6716 bp, Artificial Sequence
  derived and/or modified sequence
atgctcagacggcggccaggtcgcgccgcgagcgagcttccgcgccgcccgcacgcgcgacctacctgggcgctccgcgcccccggatgctgcaggttattcagcgatagttatgacctcccggttacgtgcgttgggtggaagaattaataatatacgcacctcggagttacccaaagagaaaactcgatcagaagtcatttgcagcatccactttttagatggcgtggtacagacctttaaagttactaaacaagacactggccaggttcttctggatatggtgcacaaccacctgggtgtgactgaaaaggaatattttggtttacagcatgatgacgactccgtggactctcctagatggctggaagcaagcaaagccatcaggaagcagttaaaaggaggtttcccctgtaccctgcattttcgagtaagattttttatacctgatcccaacacactgcagcaagaacaaaccaggcacttgtatttcttacaactgaagatggatatttgcgaaggaaggttaacctgccctcttaactcagcagtggttctagcgtcctatgccgtacaatctcattttggagactataattcttccatacatcatccaggctatctttccgatagtcactttatacccgatcaaaatgaggactttttaacaaaagtcgaatctctgcatgagcagcacagtgggctaaaacaatcagaagcagaatcctgctatatcaacatagcgcggaccctcgacttctatggagtagaactgcacagtggtagggatctgcacaatttagacctaatgattggaattgcttccgcgggtgttgctgtgtaccgaaaatacatttgcacaagtttctatccttgggtgaacattctcaaaatttctttcaaaaggaaaaagttcttcatacatcagcgacagaaacaggctgaatccagggaacatattgtggccttcaacatgctgaattaccgatcttgcaaaaacttgtggaaatcctgtgttgagcaccatacgttctttcaggcaaagaagctactacctcaggaaaagaatgttctgtctcagtactggactatgggctctcggaacaccaaaaagtcggtaaataaccaatattgcaaaaaggtgattggcgggatggtgtggaacccagccatgcggagatccttatcagtggagcacttagaaaccaagagtctgccttctcgttcccctcccattactcccaactggcgaagtcctcggctccggcacgaaatccgaaagccacgccactcttctgcagataaccttgcaaatgaaatgacctacatcacggaaacggaagatgtattttacacgtacaagggctctctggcccctcaagacagcgattctgaagtttctcagaaccgaagcccgcaccaagagagtttatccgagaacaatccggcacaaagctacctgacccagaagtcatccagttctgtgtctccatcttcaaatgctccaggctcctgctcacctgacggcgttgatcagcagctcttagatgacttccacagggtgaccaaagggggctccaccgaggacgccagccagtactactgtgacaagaatgataatggtgacagctacttagtcttgatccgtatcacaccagatgaagatggaaaatttggatttaatcttaagggaggagtggatcaaaagatgcctcttgtggtatcaaggataaacccagagtcacctgcggacacctgcattcctaagctgaacgaaggggatcaaatcgtgttaatcaatggccgggacatctcagaacacacgcatgaccaagtggtgatgttcatcaaagccagccgggagtcccactcacgggagctggccctggtgatcaggaggagagctgtccgctcatttgctgacttcaagtctgaagatgaactgaaccagcttttccccgaagccattttccccatgtgtccggagggtggggacactttggagggatccatggcacagctaaagaagggcctcgaaagcgggacggtgctgatccagtttgagcaactctacagaaaaaagccaggtttggccatcacgtttgcaaagctgcctcaaaatttggacaaaaaccgatataaagatgtgctgccttatgacaccacccgggtattattgcagggaaatgaagattatattaatgcaagttacgtgaacatggaaattcctgctgctaaccttgtgaacaagtacatcgccactcaggggcccctgccgcatacctgtgcacagttttggcaggttgtctgggatcagaagttgtcactcattgtcatgttgacgactctcacagaacgagggcggaccaaatgtcaccagtactggccagatccccccgacgtcatgaaccacggcggctttcacatccagtgtcagtcagaggactgcaccatcgcctatgtgtcccgagaaatgctggtcacaaacacccagaccggggaagaacacacagtgacacatctccagtacgtcgcatggcctgaccacggtgtgcccgatgactcctccgactttctggaatttgtaaactatgtgaggtctctgagagtggacagcgagcccgtcctagttcactgcagtgctggaataggtcgaaccggtgtgttggtcactatggaaacagccatgtgcctaactgagaggaacctgcccatttacccactggatattgtccgaaaaatgcgagaccagcgcgccatgatggtgcagacatcaagccagtacaagtttgtgtgtgaagcgattcttcgtgtgtatgaagaaggtttagtccaaatgctggatcctagttaagacaactgtgaaaaagttcattcctctttcccaagggcatcctccttgaaagaggaggacagacctctctggaagcagcaagaggaaccagtagctgtgggaaaggaatgggcacctctgaacccaggcactttaaacttctatagaaaagatatcgtgtacataggaactggtgtagataagcatgcaattatggcatcatttaggcctgtatttctatggaaagatacaaaaaggatctcagtttggggcctgtcctaatgccttcttccctaacatcaccacacacacccctgtcggcatcctggagcaattgagaccggacacccacagagctgttgtcctcccagcaacaagatggtgtggttatcttgggtcatttggatgttttgtttgtttctgtgtgtcagactgtaagggctgagctttctgtgcttctaggtggagctggaacaattcagattcacccgccctgatgctaaggaaaccctgacgtatgtactagatggcagggcactgggggtcaggctgaaggctgagcaacacctctctgccctccctccctttgtcccatctcccagcgacttccaatattcatgtttctgagaattgtgtccctcttcaggttccctcttggtgcctaacctggattagtaatgtgcattcaggtgaattttcagctgaggctctgagaactggtactctcagtgtgttctggtcatcttgtggcttagttgtagaagcaggtgtgtctcttgcctctgcttgcctcctactgcacactcagcacccaggactggaatcaccgactactgaatctcctacatgtattgctgctacttcaagctcctccacttgaaaccttatgattttcccaaggggagatgggacagtgtcatctaaatattccgaatgtttggccttctgagaaaagagcttctagtaattgaaccatgggaaacccagcttctggagggttggccgtggggctgtgtacatgtgtgtgcccaggggtgagtgtttctcaggattcctaacgattcaaattaccgttgagtatatataaagaatgagtctctgtatggaagaacaaatgtgtgcattcacccccagtcacaatggtctccattgcatttcaaaggagaggatcagactatctgaatataaacacaatctgatgttaatttattctaagaacaccatcattttgattgtcctaaagaattctgcctttgtgaataccgtgttaaatttttttaaatttgtgacaggattgtagcaaattattatttaaggaaaataaattgtgtaaacatttaatgtggtatttttgaacagcggtttttatgtactcagaagaggaagtaaagccaggttcttaatggtatttatagaaaagatgttttcatattataatgcacataaatgaagccattttgatattcagcaaattcggtgccaattgaatagtttgctggtagcaagacggatgaagacctatatgggagattctttatctctagagctagcatatttacttgcatactttgtttcttttccacatggatattttactgctaaatggcagaggtgggagggagatgtcacacagtaccataaccccatattgaaaacaagaaaccaccagaaagtttgcagctaaggggcaggggattcagttcctacgcccactcagcactaactacttgcgggcctggttgcttagaagctctacctctctttcattatctgtaaaatagaaacaatacttaggactttagttggaacatgaggattgaataagatcacgctattcatgtgactttttatcggctagaacagcaacagacactgctgtgggtgagttacttagaaaagtttagttatcagtgattagcccaaaaacacatcagtcaaaaatagaatccactggatttttgtctctctttttagagacagggtctcactgtcgcccaggctggagtacagtggcatgatcattgttcactgcagcctcaaattcctgggctcaagcaatcctcgcacctcagcctcctgagtagccgggactataggcacatgccacctcacctggcttgtgtgtgtgtgtgtgtgtgtgtgtgtgtgtgtgtgtgtgtgtgtgtgtgtgtgtgtgtgtgtagagacaggatcttgatgtgttgcctaggctggtctcaaactcctggcctcaagtgatcttcccacctcagcctccaaaactgttgggattataggcgtgagccactgtgcccagcctaactgggtttttatgagaggaaaatagaaaatgctcttctagaagagagagaacaagagcacaaaataatctggactcacaaaaattcagcaagctccaagaaagggggatggagggaacgctggcaaaaatttaaatgccattaggatatttagcaagttattactgtttggtaaaaatgcatcatcaccctgtgtgcaaaatgcttgcaaagtagtctaaatgtctttggagatgggtgttttactgcttttttccaaaaacaaattgtttattatggttgcagaaatgcagccattacggtcacataaatttctaaaaagcctaccaaaggttgcaagcagtcttctgccactgggcaggccagcagttcagacccagcgaggttgccaggaacaaatccaggaaatactgggaagaacaagacaagagaattacctaaaagagcaaacaattcaagtaaatcctgtagctattaccacttaaaatccgtagctcaagattcctgtttcaccaccttatacacttaagcaattatacttaagcctttttttagtcctaagtgaagaactacatcagaatcaggataagtattttgcctgggaaatttggctgcatatgaatggagaagacatttacatcctatgttctggcactttctgaaagatctaattaaacatgttgatgtgccaatttaatcaagatgagagatccctgctggtgtcaccctctagaacctgcacttggtgttttgactttccagaagaaaaaaatgcaactttggttagggggcagtggttggatcacacagttgtctttcgtttcctaccacagtaattcatatttaaatatgcttttagattagtgtggatactattgctgctgtgttgctacctgacctttttctggggggggtacctcagaaatgagcatttgagggcaagcgaaaaagccctcttcatcctccagaggcaacaaagaggcagcagaaatggggaaagattgtgagaggcagggcttgggtctagacctggacttaggcaagatatgttgccctcaaccctgagttttcttatatgtaaaaagggaaggttgggctggactagatgaggtcaagatttgccattctgggaggctgatattccagagaatcaaaattaatcctaaaccaaagctttatggctgctacagagacatgtcacatttctgagacttgtcaccaagagtttgtccctcagactttggcgctgttgaatgcaaagacaaggatggccaccttctggttcttgcctgttgtcctcagctgagagcagtctcggtaaaggtggcaaagattctgtgacctcagaccggggaccaaatgcttgggagtctgatggccgggctgggccaccattctcatagctctcattctgtttggagcaaccaaaggatttgtgtgaagttatttggaaaaggaccttaactgagcagtaatcttttttctgtatatttggaatgtttttcattctgacctgttctgtcagtgattctactgaaaaacaatttaatcaatataaaaatgttcaagctatgcaacactgt

SEQ ID NO: 290844 - protein, 782 aa, Artificial Sequence
  derived and/or modified sequence
MDICEGRLTCPLNSAVVLASYAVQSHFGDYNSSIHHPGYLSDSHFIPDQNEDFLTKVESLHEQHSGLKQSEAESCYINIARTLDFYGVELHSGRDLHNLDLMIGIASAGVAVYRKYICTSFYPWVNILKISFKRKKFFIHQRQKQAESREHIVAFNMLNYRSCKNLWKSCVEHHTFFQAKKLLPQEKNVLSQYWTMGSRNTKKSVNNQYCKKVIGGMVWNPAMRRSLSVEHLETKSLPSRSPPITPNWRSPRLRHEIRKPRHSSADNLANEMTYITETEDVFYTYKGSLAPQDSDSEVSQNRSPHQESLSENNPAQSYLTQKSSSSVSPSSNAPGSCSPDGVDQQLLDDFHRVTKGGSTEDASQYYCDKNDNGDSYLVLIRITPDEDGKFGFNLKGGVDQKMPLVVSRINPESPADTCIPKLNEGDQIVLINGRDISEHTHDQVVMFIKASRESHSRELALVIRRRAVRSFADFKSEDELNQLFPEAIFPMCPEGGDTLEGSMAQLKKGLESGTVLIQFEQLYRKKPGLAITFAKLPQNLDKNRYKDVLPYDTTRVLLQGNEDYINASYVNMEIPAANLVNKYIATQGPLPHTCAQFWQVVWDQKLSLIVMLTTLTERGRTKCHQYWPDPPDVMNHGGFHIQCQSEDCTIAYVSREMLVTNTQTGEEHTVTHLQYVAWPDHGVPDDSSDFLEFVNYVRSLRVDSEPVLVHCSAGIGRTGVLVTMETAMCLTERNLPIYPLDIVRKMRDQRAMMVQTSSQYKFVCEAILRVYEEGLVQMLDPS

SEQ ID NO: 290845 - DNA, 2280 bp, Artificial Sequence
  derived and/or modified sequence
atggccggcagcaagcagagccaccaggaggccgtgaagagacacctgtacttcctgcagctgaagatggacatctgcgagggcagactgacctgccccctgaacagcgccgtggtgctggccagctacgccgtgcagagccacttcggcgactacaacagcagcatccaccaccccggctacctgagcgacagccacttcatccccgaccagaacgaggacttcctgaccaaggtggagagcctgcacgagcagcacagcggcctgaagcagagcgaggccgagagctgctacatcaacatcgccagaaccctggacttctacggcgtggagctgcacagcggcagagacctgcacaacctggacctgatgatcggcatcgccagcgccggcgtggccgtgtacagaaagtacatctgcaccagcttctacccctgggtgaacatcctgaagatcagcttcaagagaaagaagttcttcatccaccagagacagaagcaggccgagagcagagagcacatcgtggccttcaacatgctgaactacagaagctgcaagaacctgtggaagagctgcgtggagcaccacaccttcttccaggccaagaagctgctgccccaggagaagaacgtgctgagccagtactggaccatgggcagcagaaacaccaagaagagaagccccagactgagacacgagatcagaaagcccagacacagcagcgccgacaacctggccaacgagatgacctacatcaccgagaccgaggacgtgttctacacctacaagggcagcctggccccccaggacagcgacagcgaggtgagccagaacagaagcccccaccaggagagcctgagcgagaacaaccccgcccagagctacctgacccagaagagcagcagcagcgtgagccccagcagcaacgcccccggcagctgcagccccgacggcgtggaccagcagctgctggacgacttccacagagtgaccaagggcggcagcaccgaggacgccagccagtactactgcgacaagaacgacaacggcgacagctacctggtgctgatcagaatcacccccgacgaggacggcaagttcggcttcaacctgaagggcggcgtggaccagaagatgcccctggtggtgagcagaatcaaccccgagagccccgccgacacctgcatccccaagctgaacgagggcgaccagatcgtgctgatcaacggcagagacatcagcgagcacacccacgaccaggtggtgatgttcatcaaggccagcagagagagccacagcagagagctggccctggtgatcagaagaagagccgtgagaagcttcgccgacttcaagagcgaggacgagctgaaccagctgttccccgaggccatcttccccatgtgccccgagggcggcgacaccctggagggcagcatggcccagctgaagaagggcctggagagcggcaccgtgctgatccagttcgagcagctgtacagaaagaagcccggcctggccatcaccttcgccaagctgccccagaacctggacaagaacagatacaaggacgtgctgccctacgacaccaccagagtgctgctgcagggcaacgaggactacatcaacgccagctacgtgaacatggagatccccgccgccaacctggtgaacaagtacatcgccacccagggccccctgccccacacctgcgcccagttctggcaggtggtgtgggaccagaagctgagcctgatcgtgatgctgaccaccctgaccgagagaggcagaaccaagtgccaccagtactggcccgacccccccgacgtgatgaaccacggcggcttccacatccagtgccagagcgaggactgcaccatcgcctacgtgagcagagagatgctggtgaccaacacccagaccggcgaggagcacaccgtgacccacctgcagtacgtggcctggcccgaccacggcgtgcccgacgacagcagcgacttcctggagttcgtgaactacgtgagaagcctgagagtggacagcgagcccgtgctggtgcactgcagcgccggcatcggcagaaccggcgtgctggtgaccatggagaccgccatgtgcctgaccgagagaaacctgcccatctaccccctggacatcgtgagaaagatgagagaccagagagccatgatggtgcagaccagcagccagtacaagttcgtgtgcgaggccatcctgagagtgtacgaggagggcctggtgcagatgctggaccccagctag

SEQ ID NO: 290846 - DNA, 2280 bp, Artificial Sequence
  derived and/or modified sequence
atggcaggaagcaaacaatcacaccaggaagccgtaaagagacacttatattttttgcagctgaaaatggacatctgtgaaggtcggcttacctgccccctgaattctgcagtggttttagcttcttatgctgtgcagtctcacttcggtgattacaacagttcaatccaccatcctgggtacctcagcgattcccactttatccccgatcagaacgaggacttcctgaccaaagtggagtccctccacgaacaacacagtggcttgaaacagtccgaagcggaatcctgctacatcaatatcgctcggactctggatttctacggggtcgagctgcatagcggccgggacctccacaacctcgaccttatgatcggtatcgcaagcgcaggcgtagccgtgtataggaaatacatttgcaccagtttttacccctgggtgaacatactgaagatttcatttaaacggaagaaatttttcatccatcagagacagaaacaggccgaaagcagagaacacattgttgcctttaatatgctgaattaccggagctgcaaaaacctgtggaagagctgtgtggaacaccatacatttttccaggcaaaaaaactcctcccccaagagaagaacgtactgagtcagtactggactatggggtccaggaacacaaagaaaagaagcccccggctccgacatgagatcaggaaacctaggcattcttcagccgataacttagccaatgagatgacatacattacagagactgaagacgtgttttatacctacaagggaagcctggcccctcaggattctgactccgaggtgtcccaaaatagatcaccgcaccaggagagtctcagcgagaataaccccgcccaaagttatctgacccaaaaatcgagcagctcagtcagtccatcttccaacgcgccgggcagctgtagcccagatggggtggatcagcagctactggatgattttcatcgcgtgacgaaagggggtagtaccgaagacgcctcgcagtattactgtgacaagaacgataatggggatagttacttggtcctgatacgaattaccccggacgaggatggaaaattcggcttcaatctgaaggggggagtggaccagaagatgcccctggttgtgtcccgcatcaatcccgagtcaccggcagacacttgcatcccaaagctgaatgaaggagaccagatcgtgcttatcaacggccgggatatcagcgaacatacacatgaccaggtggtaatgtttattaaagcgagccgcgagagccatagtagggagttagcactagtgattcggagaagggcggtcagaagtttcgcagattttaagtcagaggatgagcttaatcaactgtttccggaagccatttttcccatgtgccctgaaggtggagacactctggaggggtccatggcccagttgaagaaaggtttagagtccggtactgtgctaatccagtttgaacagctgtaccgcaaaaaaccgggccttgccattacctttgccaagcttccgcagaatctggacaagaatcgctacaaagatgtactgccatatgacactacgcgggtcctgctgcaaggcaacgaagactacatcaatgctagttatgtcaacatggagatccccgccgctaaccttgttaacaagtacatagccacccaaggacctctgccgcatacatgcgctcaattctggcaagttgtctgggaccagaagttgagccttattgtgatgctcactaccctcactgagaggggccgaaccaagtgccatcagtattggccagatccacctgatgtgatgaatcatggaggattccacatacagtgtcagtccgaggattgtacgatcgcatatgtgtctcgagagatgctggttaccaacactcagactggcgaagagcatactgtcacacacctccagtacgttgcctggcccgatcacggggtgcctgacgactcaagcgattttctcgaatttgtaaactacgtacgctccctgcgcgtcgatagtgagccggtgctggtccactgctcagctggcatcggaagaacaggggtgctggtgacgatggagactgctatgtgcctgacagaacgcaacctgcctatctaccctctcgatatcgtgcggaagatgcgggaccagcgtgccatgatggtgcagacatccagtcaatacaagttcgtgtgcgaagcgatactaagagtctacgaggaaggccttgttcagatgctcgatcccagctag

SEQ ID NO: 290847 - DNA, 2280 bp, Artificial Sequence
  derived and/or modified sequence
atggccggcagcaagcagagccaccaggaggccgtgaagaggcacctgtacttcctgcagctgaagatggacatctgtgagggccgcctgacctgccccctgaacagcgctgtggtgctggccagctatgctgtgcagagccactttggagactacaacagcagcatccaccaccctggctacctgagtgacagccacttcatcccagaccagaatgaagacttcctgaccaaggtggagagcctgcacgagcagcacagcggcctgaagcagagcgaggccgagagctgctacatcaacatcgcccggaccctggacttctacggcgtggagctgcacagcggccgggacctgcacaacctggacctgatgattggaattgccagcgctggggtggccgtgtacaggaagtacatctgcaccagcttctacccctgggtgaacatcctgaagatctccttcaagaggaagaagttcttcatccaccagaggcagaagcaggccgagagccgggagcacatcgtggccttcaacatgctgaactaccgcagctgcaagaacctgtggaagagctgtgtggagcaccacaccttcttccaggccaagaagctgctgccccaggagaagaatgtgctgagccagtactggaccatgggcagcaggaacaccaagaagaggagcccccggctgcggcatgagatcaggaagcccaggcacagcagcgctgacaacctggccaatgagatgacctacatcacagaaacagaagatgtgttctacacctacaagggcagcctggccccccaggacagcgacagcgaggtgtcccagaacagaagcccccaccaggagagcctgtctgagaacaacccagcccagagctacctgacccagaagagcagcagctctgtgagccccagcagcaatgcccctggcagctgcagcccagatggagtggaccagcagctgctggatgacttccaccgggtgaccaagggcggcagcacagaagatgccagccagtactactgtgacaagaatgacaatggagacagctacctggtgctgatccgcatcaccccagatgaagatggcaagtttggcttcaacctgaagggcggcgtggaccagaagatgcccctggtggtgagccgcatcaaccctgagagccctgctgacacctgcatccccaagctgaatgaaggagaccagatcgtgctgatcaatggccgggacatcagcgagcacacccatgaccaggtggtgatgttcatcaaggccagccgggagagccacagccgggagctggccctggtgatcagaagaagagctgtgcgcagctttgctgacttcaagtcagaagatgagctgaaccagctgtttcctgaggccatcttccccatgtgcccagagggcggggacaccctggagggctccatggcccagctgaagaagggcctggagagcggcaccgtgctgatccagtttgagcagctgtacaggaagaagccaggcctggccatcacctttgccaagctgccccagaacctggacaagaaccgctacaaggatgtgctgccctatgacaccaccagggtgctgctgcagggcaatgaagactacatcaatgccagctatgtgaacatggagatcccagctgccaacctggtgaacaagtacatcgccacccagggccccctgccccacacctgtgcccagttctggcaggtggtgtgggaccagaagctgagcctcatcgtgatgctgaccaccctgacagagcggggccgcaccaagtgccaccagtactggccagaccccccagatgtgatgaaccacggcggcttccacatccagtgccagagcgaggactgcaccatcgcctacgtgtcccgggagatgctggtgaccaacacccagacaggagaggagcacacagtgacccacctgcagtatgtggcctggccagaccacggcgtgcctgatgacagcagtgacttcctggagtttgtgaactacgtgcgcagcctgcgggtggacagcgagcctgtgctggtgcactgcagcgctggcatcggccgcactggagtgctggtgaccatggagacagccatgtgcctgacagagaggaacctgcccatctaccccctggacatcgtgaggaagatgagggaccagagggccatgatggtgcagaccagcagccagtacaagtttgtgtgtgaggccatcctgcgggtgtatgaggagggcctggtgcagatgctggaccccagctag

SEQ ID NO: 290848 - DNA, 2280 bp, Artificial Sequence
  derived and/or modified sequence
atggccggcagcaagcagagccaccaggaggccgtgaagcggcacctgtactttcttcagcttaagatggacatatgcgaaggaaggttgacctgtcccctcaactcggctgtcgtgctggcatcctacgccgttcaaagtcactttggcgattacaacagcagtatccaccaccctggttacttatctgattctcactttataccggatcaaaacgaggacttcctgaccaaggtcgaatctttacacgagcagcacagcggtcttaagcagagcgaggcagagtcatgttatattaacatagcacgcacgctcgacttctacggggtcgaactgcattccggccgggatctccacaacttggacctcatgatcggcatagcgagtgcaggggtggccgtataccggaaatacatctgtacaagtttttatccatgggttaatattcttaagatctcattcaagcgcaaaaagtttttcattcaccagcggcagaaacaggccgaatcgagagaacacattgtagcctttaatatgctgaactaccgaagctgcaaaaacttgtggaagtcctgtgtcgaacatcatacgttctttcaagctaagaagctgctaccccaggagaagaatgttctgtctcagtattggaccatgggttctagaaatactaagaagcggtcaccgcgccttcggcacgaaatacgaaaacctcggcatagttccgccgacaacttggctaacgagatgacatatatcacagaaacagaggatgtcttctacacctacaaaggctctctcgctccacaggactctgacagtgaggtgtctcagaaccgtagcccccaccaggagagcctgtctgaaaataacccagcccaatcatacctaacccagaagtctagttcctccgtgtctccatctagcaacgccccagggagctgcagtcctgatggcgtggatcaacagcttctggatgatttccacagggtcacaaaaggaggatcaaccgaggatgcctcacaatactactgcgataaaaacgacaacggggattcctacttagtgttaatccgtattacacccgatgaggatgggaaattcggatttaatcttaaagggggagtggatcagaagatgcccctcgtagtatcccggattaaccccgagagccctgctgacacttgtataccgaagctgaacgaaggggatcagatcgtccttataaacggtcgagatatctcagagcacacacacgaccaggtggttatgttcattaaggcttccagggaatcacacagcagagaactggctttagtgattaggcgaagggccgtgcggtccttcgccgacttcaagagcgaagatgaactgaaccagcttttcccagaggctatctttccaatgtgccctgaaggaggggatacacttgaaggatccatggcgcagctaaagaaaggcctggagagcggcacagtgttgattcagtttgaacagttgtacaggaaaaagccaggtctggctattaccttcgccaaactgcctcagaacttggataagaatcggtataaggatgtgctgccctatgatactacgcgcgtgcttctgcaggggaatgaggattatattaacgcaagctacgttaacatggagatcccagccgcaaacctggtgaacaaatacatagcgacacagggaccactgcctcacacctgcgcccagttttggcaagtggtgtgggaccaaaaactcagtcttattgtgatgttaactacactgaccgagcggggaagaaccaagtgccaccagtactggccagatccgccggacgtgatgaaccatggggggttccatatacagtgccaatcagaggactgtacgatcgcatacgtttcaagggaaatgctggtgaccaatacccagaccggagaggaacacaccgtgacacatttacagtacgtcgcttggccagatcacggcgtccctgatgacagctcagactttctggagtttgtaaactacgttaggtcactgagagttgacagcgaaccggtgctggttcactgcagcgctggcatcgggcgcaccggagtgctggtgactatggagactgctatgtgtcttaccgagagaaatcttccaatatatcctctggacatcgtgcgcaagatgagggaccaaagagcaatgatggtccagactagctctcagtataagtttgtgtgcgaagcaattcttagagtttatgaagaaggacttgtgcagatgcttgacccaagttag

SEQ ID NO: 290849 - DNA, 2821 bp, Artificial Sequence
  derived and/or modified sequence
ctcagacggcggccaggtcgcgccgcgagcgagcttccgcgccgcccgcacgcgcgacctacctgggcgctccgcgcccccggatgctgcaggttattcagcgatagttatgacctcccggttacgtgcgttgggtggaagaattaataatatacgcacctcggagttacccaaagagaaaactcgatcagaagtcatttgcagcatccactttttagatggcgtggtacagacctttaaagttactaaacaagacactggccaggttcttctggatatggtgcacaaccacctgggtgtgactgaaaaggaatattttggtttacagcatgatgacgactccgtggactctcctagatggctggaagcaagcaaagccatcaggaagcagttaaaaggcacttgtatttcttacaactgaagatggatatttgcgaaggaaggttaacctgccctcttaactcagcagtggttctagcgtcctatgccgtacaatctcattttggagactataattcttccatacatcatccaggctatctttccgatagtcactttatacccgatcaaaatgaggactttttaacaaaagtcgaatctctgcatgagcagcacagtgggctaaaacaatcagaagcagaatcctgctatatcaacatagcgcggaccctcgacttctatggagtagaactgcacagtggtagggatctgcacaatttagacctaatgattggaattgcttccgcgggtgttgctgtgtaccgaaaatacatttgcacaagtttctatccttgggtgaacattctcaaaatttctttcaaaaggaaaaagttcttcatacatcagcgacagaaacaggctgaatccagggaacatattgtggccttcaacatgctgaattaccgatcttgcaaaaacttgtggaaatcctgtgttgagcaccatacgttctttcaggcaaagaagctactacctcaggaaaagaatgttctgtctcagtactggactatgggctctcggaacaccaaaaagcgaagtcctcggctccggcacgaaatccgaaagccacgccactcttctgcagataaccttgcaaatgaaatgacctacatcacggaaacggaagatgtattttacacgtacaagggctctctggcccctcaagacagcgattctgaagtttctcagaaccgaagcccgcaccaagagagtttatccgagaacaatccggcacaaagctacctgacccagaagtcatccagttctgtgtctccatcttcaaatgctccaggctcctgctcacctgacggcgttgatcagcagctcttagatgacttccacagggtgaccaaagggggctccaccgaggacgccagccagtactactgtgacaagaatgataatggtgacagctacttagtcttgatccgtatcacaccagatgaagatggaaaatttggatttaatcttaagggaggagtggatcaaaagatgcctcttgtggtatcaaggataaacccagagtcacctgcggacacctgcattcctaagctgaacgaaggggatcaaatcgtgttaatcaatggccgggacatctcagaacacacgcatgaccaagtggtgatgttcatcaaagccagccgggagtcccactcacgggagctggccctggtgatcaggaggagagctgtccgctcatttgctgacttcaagtctgaagatgaactgaaccagcttttccccgaagccattttccccatgtgtccggagggtggggacactttggagggatccatggcacagctaaagaagggcctcgaaagcgggacggtgctgatccagtttgagcaactctacagaaaaaagccaggtttggccatcacgtttgcaaagctgcctcaaaatttggacaaaaaccgatataaagatgtgctgccttatgacaccacccgggtattattgcagggaaatgaagattatattaatgcaagttacgtgaacatggaaattcctgctgctaaccttgtgaacaagtacatcgccactcaggggcccctgccgcatacctgtgcacagttttggcaggttgtctgggatcagaagttgtcactcattgtcatgttgacgactctcacagaacgagggcggaccaaatgtcaccagtactggccagatccccccgacgtcatgaaccacggcggctttcacatccagtgtcagtcagaggactgcaccatcgcctatgtgtcccgagaaatgctggtcacaaacacccagaccggggaagaacacacagtgacacatctccagtacgtcgcatggcctgaccacggtgtgcccgatgactcctccgactttctggaatttgtaaactatgtgaggtctctgagagtggacagcgagcccgtcctagttcactgcagtgctggaataggtcgaaccggtgtgttggtcactatggaaacagccatgtgcctaactgagaggaacctgcccatttacccactggatattgtccgaaaaatgcgagaccagcgcgccatgatggtgcagacatcaagccagtacaagtttgtgtgtgaagcgattcttcgtgtgtatgaagaaggtttagtccaaatgctggatcctagttaagacaactgtgaaaaagttcattcctctttcccaagggcatcctccttgaaagaggaggacagacctctctggaagcagcaagaggaaccagtagctgtgggaaaggaatgggcacctctgaacccaggcactttaaacttctatagaaaagatatcgtgtacataggaactggtgtagataagc

SEQ ID NO: 290850 - DNA, 2280 bp, Artificial Sequence
  derived and/or modified sequence
atggccggtagcaagcagagccaccaggaggcagttaagaggcatctgtacttcctgcagctcaagatggatatctgtgagggccgactgacatgcccactcaatagcgccgttgtcctggcatcttacgcggttcagagtcactttggagattacaacagcagtattcatcatccgggatatctttcggattctcacttcataccggaccaaaacgaagatttcttaactaaggttgagagcttgcacgagcagcatagtggacttaaacagagcgaggcggagtcctgctacattaatatcgctaggacattagacttttatggggtcgagctccattcggggagagacttacataatctggacttaatgatcggaatcgcaagcgcaggagtcgcggtgtacaggaagtatatttgcacctcgttttacccttgggtgaacatcctcaagatctctttcaagcgtaaaaaatttttcatccaccagcgccagaagcaggctgagtctagggagcatattgtcgctttcaatatgctcaattatcgctcttgtaagaatctctggaaatcatgcgtggaacaccatacgttttttcaggccaagaagctcttgccccaagagaagaatgtcctttctcagtactggacaatgggctccaggaacacaaaaaagcgaagtccccgactcagacacgagattagaaaacctaggcattcctccgccgataatctggcgaacgaaatgacctacatcaccgagactgaagatgtcttttacacttataaaggatcattggccccacaagacagcgactccgaagtaagtcagaaccgatcaccgcatcaagagagcctttctgaaaataatcctgcacagagctacttaacccaaaaatcttcttcttccgtgagtcccagctctaacgccccaggatcatgtagtcccgatggcgttgatcaacagctgctcgatgactttcatcgcgtcactaaggggggtagcactgaggacgccagccaatattactgtgacaaaaatgataacggggactcataccttgtgctgatacggattactcccgatgaggacggaaaatttggtttcaacctaaagggtggagtggaccagaagatgccactggtcgtgagtcgcatcaaccctgagagcccagccgatacctgcataccaaagttgaatgagggagatcagatcgtccttattaacgggcgagatatatctgaacacacacacgaccaagtagtcatgttcattaaggcctccagagagtctcactcgagagagctagcattagtaatccgacgcagggcggttcgcagctttgccgacttcaagagcgaggatgagctcaaccaactctttccagaggccatttttcctatgtgtccggaagggggagacacactcgaaggcagtatggcccagcttaaaaaaggccttgagagcgggacagttctcattcagttcgaacagctctaccggaaaaaacccggattggctataactttcgcaaagctgccccaaaatctggataagaatcggtataaagacgtgcttccatacgataccacgcgtgtgctccttcaaggaaacgaggattacatcaatgcatcatacgtgaacatggagattcctgctgccaatctggtgaataagtacattgccactcagggacctcttccacacacctgcgcccagttctggcaggttgtgtgggaccagaaattatccttaattgttatgctcacaaccttaaccgagcggggtcgaacgaaatgccatcagtactggcccgatcccccagacgtaatgaatcatggaggattccacattcagtgtcagagtgaagactgcaccattgcttacgtgagtagggagatgcttgtgacaaatacccagaccggtgaggagcacacagtcacacatttacagtatgtggcatggcccgaccatggagtgcctgacgactcttccgattttctagagttcgttaattatgtacgctccctacgggtggactccgaacccgtgctcgtgcactgttccgcagggattggacgaaccggcgtcctggttactatggagaccgcaatgtgtctaactgagagaaatctgcccatctaccccctggacattgtcaggaaaatgcgggaccagcgcgctatgatggtccaaactagttcacaatacaagtttgtgtgtgaagcaatactgagagtctacgaagagggcctggtgcagatgctagatccctcttag

SEQ ID NO: 290851 - DNA, 8765 bp, Artificial Sequence
  derived and/or modified sequence
gaagggtggtatcccgttgtggagtagaatgtaactatgaccttctgggatttgggcaccagatttatcttactgcaacaggagccatggtgggagccacccccataactcttatagagctggtgggccaccaggactgccagatatatatatatattttttgaaacagggtcttgctatgttgcccagactggcctcaaactcctggactcaaaggatcctccctcagcctcctgagtagctgggattataggcacataccaccacgactagctgccagatcatcttatcttggaccaggcttctaccattaattcacatgctttaaaaaaattaaaaattaaaaaaatgaaaaataaaaaaacttaaaagattttacctatattcctggaacatagttatcttaccccagctttgtagttcctgtttaaggaaattccctctgaaggaaattttagctctcaagagtcaaagaagatgtatagaggtggtatctgttagtttttgtttgtttgttaaggatctaggcagagaggtcattacatttttctgaagttgaggtcacaggtggggtacccacaagagaggtcattacatttctgaagttaggcatcccaggcatctcttctaaagaactatcctgtattctaattgttaaataaatatcttcttcattgtgagcctccacaactgctgtttctgataaatttagatcattctttgcagaattttatatactggcaatctcaaaactaggctccttcaagattcctaggaagtctcccaagctcgggttgggttccactattctagtttctttgtgtatgatgccatggggttgactcagaaactttgctcaatatatgacaaggcagcatttggtgagtggtgatctccacgtttatcttctcatttatatccctaggaagacatactgattagctgagcttgtcaatgaaagcccgggttcaccattggattatctataactctcctttctctttttttctctcagtagcattgtaggaggagagaacacttaattctggttgaatgtcagcttggataaacatagaaacaaactagaaagaactgatgatgttctcctaggtggaaaagatggagattccaataccaaataggtgtgaatcagcaaatgtatgttatactgtctctcaaggccaggtgttcaatacattgtgggtagttaattataatcaaagtaataatattagagttacgacatggatcctaagctttttagccattaaacatataagaaatttgtagcatagtgagtttttttataacatgatcatccaggttaaaataagacacaattgacctcacatatcctatctgagctccgattttgtcatctgtaaaaatggagatagtggtacctaccttacagagttatgaggctgagataagagggaaagttacaaagtagtaccatgtacaaagcccggaactgtgcaaataggaggttgtaatactgtttgaagcattcccatctcaaaaagccagttccttggcctttataaatttgaaggaataatgaaactgatttgtttcaattgtgaaaattatttctctcctgcccctgtgcacttctgccctgtctatattagatttcaagaggtttcccttttgtcatcttggccagacaatggaatgtctatcccgtttgaatctgggtttaaaaaagcatgggagctagtggccaagtgtcacatgtatgccgcatccctaaatagaagtctccccagggcgcttcctgacctgcgcaatgctgccgaaggcctcctttccccgctccccaggcagaggagcaaagtcacaggctgaggggcctgccacgacttgcccacaaaacaggtctggagtttggaagttacatttgctggttgcccagagatgagtgcagaattcagcttggaggtcctggaaacttctagtttactgatgtttatgcttttgctcatgcacccacagttcctgggacacagaatgctcacctgggggtttgtaccccagccaagaaggtgtcttcacagactcccctccttttagcaacttcatgcagatggagcttgggtggatggatcctggcacagtgttcagaacagtggccctgccagtgtgtgggcgccgcttgtgcagagcccctgtgggttctggtcctcaagggcaggggcgctcactgacagcggaacccatagtaccagcccatctttggtgggctgtttccaccccattcatccctgctcagctcttcataggacagcctgtgctggcagaaaattgcccccaccagtcaagacgtagggcatcaacatgagccatcagtaatgacagggcagctttgcagagcgtaaggtagcacctgataccttggaccaaaaccgtatttttatgtatctttcacatgtacagctcttgtctttgactcatcaaactttcttttttttttttttttgcttatttcagtttgagtatgaattaatgaaaacaattgtttcataggcacttgtatttcttacaactgaagatggatatttgcgaaggaaggttaacctgccctcttaactcagcagtggttctagcgtcctatgccgtacaatctcattttggagactataattcttccatacatcatccaggctatctttccgatagtcactttatacccgatcaaaatgaggactttttaacaaaagtcgaatctctgcatgagcagcacagtgggctaaaacaatcagaagcagaatcctgctatatcaacatagcgcggaccctcgacttctatggagtagaactgcacagtggtagggatctgcacaatttagacctaatgattggaattgcttccgcgggtgttgctgtgtaccgaaaatacatttgcacaagtttctatccttgggtgaacattctcaaaatttctttcaaaaggaaaaagttcttcatacatcagcgacagaaacaggctgaatccagggaacatattgtggccttcaacatgctgaattaccgatcttgcaaaaacttgtggaaatcctgtgttgagcaccatacgttctttcaggcaaagaagctactacctcaggaaaagaatgttctgtctcagtactggactatgggctctcggaacaccaaaaagtcggtaaataaccaatattgcaaaaaggtgattggcgggatggtgtggaacccagccatgcggagatccttatcagtggagcacttagaaaccaagagtctgccttctcgttcccctcccattactcccaactggcgaagtcctcggctccggcacgaaatccgaaagccacgccactcttctgcagataaccttgcaaatgaaatgacctacatcacggaaacggaagatgtattttacacgtacaagggctctctggcccctcaagacagcgattctgaagtttctcagaaccgaagcccgcaccaagagagtttatccgagaacaatccggcacaaagctacctgacccagaagtcatccagttctgtgtctccatcttcaaatgctccaggctcctgctcacctgacggcgttgatcagcagctcttagatgacttccacagggtgaccaaagggggctccaccgaggacgccagccagtactactgtgacaagaatgataatggtgacagctacttagtcttgatccgtatcacaccagatgaagatggaaaatttggatttaatcttaagggaggagtggatcaaaagatgcctcttgtggtatcaaggataaacccagagtcacctgcggacacctgcattcctaagctgaacgaaggggatcaaatcgtgttaatcaatggccgggacatctcagaacacacgcatgaccaagtggtgatgttcatcaaagccagccgggagtcccactcacgggagctggccctggtgatcaggaggagagctgtccgctcatttgctgacttcaagtctgaagatgaactgaaccagcttttccccgaagccattttccccatgtgtccggagggtggggacactttggagggatccatggcacagctaaagaagggcctcgaaagcgggacggtgctgatccagtttgagcaactctacagaaaaaagccaggtttggccatcacgtttgcaaagctgcctcaaaatttggacaaaaaccgatataaagatgtgctgccttatgacaccacccgggtattattgcagggaaatgaagattatattaatgcaagttacgtgaacatggaaattcctgctgctaaccttgtgaacaagtacatcgccactcaggggcccctgccgcatacctgtgcacagttttggcaggttgtctgggatcagaagttgtcactcattgtcatgttgacgactctcacagaacgagggcggaccaaatgtcaccagtactggccagatccccccgacgtcatgaaccacggcggctttcacatccagtgtcagtcagaggactgcaccatcgcctatgtgtcccgagaaatgctggtcacaaacacccagaccggggaagaacacacagtgacacatctccagtacgtcgcatggcctgaccacggtgtgcccgatgactcctccgactttctggaatttgtaaactatgtgaggtctctgagagtggacagcgagcccgtcctagttcactgcagtgctggaataggtcgaaccggtgtgttggtcactatggaaacagccatgtgcctaactgagaggaacctgcccatttacccactggatattgtccgaaaaatgcgagaccagcgcgccatgatggtgcagacatcaagccagtacaagtttgtgtgtgaagcgattcttcgtgtgtatgaagaaggtttagtccaaatgctggatcctagttaagacaactgtgaaaaagttcattcctctttcccaagggcatcctccttgaaagaggaggacagacctctctggaagcagcaagaggaaccagtagctgtgggaaaggaatgggcacctctgaacccaggcactttaaacttctatagaaaagatatcgtgtacataggaactggtgtagataagcatgcaattatggcatcatttaggcctgtatttctatggaaagatacaaaaaggatctcagtttggggcctgtcctaatgccttcttccctaacatcaccacacacacccctgtcggcatcctggagcaattgagaccggacacccacagagctgttgtcctcccagcaacaagatggtgtggttatcttgggtcatttggatgttttgtttgtttctgtgtgtcagactgtaagggctgagctttctgtgcttctaggtggagctggaacaattcagattcacccgccctgatgctaaggaaaccctgacgtatgtactagatggcagggcactgggggtcaggctgaaggctgagcaacacctctctgccctccctccctttgtcccatctcccagcgacttccaatattcatgtttctgagaattgtgtccctcttcaggttccctcttggtgcctaacctggattagtaatgtgcattcaggtgaattttcagctgaggctctgagaactggtactctcagtgtgttctggtcatcttgtggcttagttgtagaagcaggtgtgtctcttgcctctgcttgcctcctactgcacactcagcacccaggactggaatcaccgactactgaatctcctacatgtattgctgctacttcaagctcctccacttgaaaccttatgattttcccaaggggagatgggacagtgtcatctaaatattccgaatgtttggccttctgagaaaagagcttctagtaattgaaccatgggaaacccagcttctggagggttggccgtggggctgtgtacatgtgtgtgcccaggggtgagtgtttctcaggattcctaacgattcaaattaccgttgagtatatataaagaatgagtctctgtatggaagaacaaatgtgtgcattcacccccagtcacaatggtctccattgcatttcaaaggagaggatcagactatctgaatataaacacaatctgatgttaatttattctaagaacaccatcattttgattgtcctaaagaattctgcctttgtgaataccgtgttaaatttttttaaatttgtgacaggattgtagcaaattattatttaaggaaaataaattgtgtaaacatttaatgtggtatttttgaacagcggtttttatgtactcagaagaggaagtaaagccaggttcttaatggtatttatagaaaagatgttttcatattataatgcacataaatgaagccattttgatattcagcaaattcggtgccaattgaatagtttgctggtagcaagacggatgaagacctatatgggagattctttatctctagagctagcatatttacttgcatactttgtttcttttccacatggatattttactgctaaatggcagaggtgggagggagatgtcacacagtaccataaccccatattgaaaacaagaaaccaccagaaagtttgcagctaaggggcaggggattcagttcctacgcccactcagcactaactacttgcgggcctggttgcttagaagctctacctctctttcattatctgtaaaatagaaacaatacttaggactttagttggaacatgaggattgaataagatcacgctattcatgtgactttttatcggctagaacagcaacagacactgctgtgggtgagttacttagaaaagtttagttatcagtgattagcccaaaaacacatcagtcaaaaatagaatccactggatttttgtctctctttttagagacagggtctcactgtcgcccaggctggagtacagtggcatgatcattgttcactgcagcctcaaattcctgggctcaagcaatcctcgcacctcagcctcctgagtagccgggactataggcacatgccacctcacctggcttgtgtgtgtgtgtgtgtgtgtgtgtgtgtgtgtgtgtgtgtgtgtgtgtgtgtgtgtgtgtgtagagacaggatcttgatgtgttgcctaggctggtctcaaactcctggcctcaagtgatcttcccacctcagcctccaaaactgttgggattataggcgtgagccactgtgcccagcctaactgggtttttatgagaggaaaatagaaaatgctcttctagaagagagagaacaagagcacaaaataatctggactcacaaaaattcagcaagctccaagaaagggggatggagggaacgctggcaaaaatttaaatgccattaggatatttagcaagttattactgtttggtaaaaatgcatcatcaccctgtgtgcaaaatgcttgcaaagtagtctaaatgtctttggagatgggtgttttactgcttttttccaaaaacaaattgtttattatggttgcagaaatgcagccattacggtcacataaatttctaaaaagcctaccaaaggttgcaagcagtcttctgccactgggcaggccagcagttcagacccagcgaggttgccaggaacaaatccaggaaatactgggaagaacaagacaagagaattacctaaaagagcaaacaattcaagtaaatcctgtagctattaccacttaaaatccgtagctcaagattcctgtttcaccaccttatacacttaagcaattatacttaagcctttttttagtcctaagtgaagaactacatcagaatcaggataagtattttgcctgggaaatttggctgcatatgaatggagaagacatttacatcctatgttctggcactttctgaaagatctaattaaacatgttgatgtgccaatttaatcaagatgagagatccctgctggtgtcaccctctagaacctgcacttggtgttttgactttccagaagaaaaaaatgcaactttggttagggggcagtggttggatcacacagttgtctttcgtttcctaccacagtaattcatatttaaatatgcttttagattagtgtggatactattgctgctgtgttgctacctgacctttttctggggggggtacctcagaaatgagcatttgagggcaagcgaaaaagccctcttcatcctccagaggcaacaaagaggcagcagaaatggggaaagattgtgagaggcagggcttgggtctagacctggacttaggcaagatatgttgccctcaaccctgagttttcttatatgtaaaaagggaaggttgggctggactagatgaggtcaagatttgccattctgggaggctgatattccagagaatcaaaattaatcctaaaccaaagctttatggctgctacagagacatgtcacatttctgagacttgtcaccaagagtttgtccctcagactttggcgctgttgaatgcaaagacaaggatggccaccttctggttcttgcctgttgtcctcagctgagagcagtctcggtaaaggtggcaaagattctgtgacctcagaccggggaccaaatgcttgggagtctgatggccgggctgggccaccattctcatagctctcattctgtttggagcaaccaaaggatttgtgtgaagttatttggaaaaggaccttaactgagcagtaatcttttttctgtatatttggaatgtttttcattctgacctgttctgtcagtgattctactgaaaaacaatttaatcaatataaaaatgttcaagctatgcaacactgt

SEQ ID NO: 290852 - DNA, 2349 bp, Artificial Sequence
  derived and/or modified sequence
atggacatctgcgagggcagactgacctgccccctgaacagcgccgtggtgctggccagctacgccgtgcagagccacttcggcgactacaacagcagcatccaccaccccggctacctgagcgacagccacttcatccccgaccagaacgaggacttcctgaccaaggtggagagcctgcacgagcagcacagcggcctgaagcagagcgaggccgagagctgctacatcaacatcgccagaaccctggacttctacggcgtggagctgcacagcggcagagacctgcacaacctggacctgatgatcggcatcgccagcgccggcgtggccgtgtacagaaagtacatctgcaccagcttctacccctgggtgaacatcctgaagatcagcttcaagagaaagaagttcttcatccaccagagacagaagcaggccgagagcagagagcacatcgtggccttcaacatgctgaactacagaagctgcaagaacctgtggaagagctgcgtggagcaccacaccttcttccaggccaagaagctgctgccccaggagaagaacgtgctgagccagtactggaccatgggcagcagaaacaccaagaagagcgtgaacaaccagtactgcaagaaggtgatcggcggcatggtgtggaaccccgccatgagaagaagcctgagcgtggagcacctggagaccaagagcctgcccagcagaagcccccccatcacccccaactggagaagccccagactgagacacgagatcagaaagcccagacacagcagcgccgacaacctggccaacgagatgacctacatcaccgagaccgaggacgtgttctacacctacaagggcagcctggccccccaggacagcgacagcgaggtgagccagaacagaagcccccaccaggagagcctgagcgagaacaaccccgcccagagctacctgacccagaagagcagcagcagcgtgagccccagcagcaacgcccccggcagctgcagccccgacggcgtggaccagcagctgctggacgacttccacagagtgaccaagggcggcagcaccgaggacgccagccagtactactgcgacaagaacgacaacggcgacagctacctggtgctgatcagaatcacccccgacgaggacggcaagttcggcttcaacctgaagggcggcgtggaccagaagatgcccctggtggtgagcagaatcaaccccgagagccccgccgacacctgcatccccaagctgaacgagggcgaccagatcgtgctgatcaacggcagagacatcagcgagcacacccacgaccaggtggtgatgttcatcaaggccagcagagagagccacagcagagagctggccctggtgatcagaagaagagccgtgagaagcttcgccgacttcaagagcgaggacgagctgaaccagctgttccccgaggccatcttccccatgtgccccgagggcggcgacaccctggagggcagcatggcccagctgaagaagggcctggagagcggcaccgtgctgatccagttcgagcagctgtacagaaagaagcccggcctggccatcaccttcgccaagctgccccagaacctggacaagaacagatacaaggacgtgctgccctacgacaccaccagagtgctgctgcagggcaacgaggactacatcaacgccagctacgtgaacatggagatccccgccgccaacctggtgaacaagtacatcgccacccagggccccctgccccacacctgcgcccagttctggcaggtggtgtgggaccagaagctgagcctgatcgtgatgctgaccaccctgaccgagagaggcagaaccaagtgccaccagtactggcccgacccccccgacgtgatgaaccacggcggcttccacatccagtgccagagcgaggactgcaccatcgcctacgtgagcagagagatgctggtgaccaacacccagaccggcgaggagcacaccgtgacccacctgcagtacgtggcctggcccgaccacggcgtgcccgacgacagcagcgacttcctggagttcgtgaactacgtgagaagcctgagagtggacagcgagcccgtgctggtgcactgcagcgccggcatcggcagaaccggcgtgctggtgaccatggagaccgccatgtgcctgaccgagagaaacctgcccatctaccccctggacatcgtgagaaagatgagagaccagagagccatgatggtgcagaccagcagccagtacaagttcgtgtgcgaggccatcctgagagtgtacgaggagggcctggtgcagatgctggaccccagctag

SEQ ID NO: 290853 - DNA, 2349 bp, Artificial Sequence
  derived and/or modified sequence
atggatatttgcgaagggcggctaacttgccctttaaatagcgccgtggtacttgcttcctatgctgtccagtcccatttcggcgactacaattccagcatccaccaccccggttatctgagtgacagccactttattcctgaccagaatgaagacttcctgacaaaggtggagtccctgcacgagcagcactccgggctgaagcaaagtgaggctgaatcatgttacatcaatatagcccgcactctggatttttacggtgtagaattgcattctggccgcgatttacataatcttgatctgatgataggaatcgcgagtgctggtgttgcagtatatcgtaagtacatctgcacttctttctacccctgggttaacattctaaagatttctttcaagcgcaagaaattcttcatccatcagaggcagaaacaggcggaatcaagagagcacatcgtggcgttcaacatgctcaattaccgaagctgcaaaaacctgtggaaatcttgtgttgaacatcataccttctttcaggccaaaaagctgctgccgcaagaaaagaacgtgctgtcacagtactggactatggggtctcggaatacgaagaagtctgttaacaatcagtactgtaagaaggtgattggtggcatggtgtggaaccctgccatgcgtcgttcgctaagtgtcgagcacctggagaccaaatcgctgccctctagatcacccccaatcacccccaattggaggtctccacgcttaaggcatgagatcagaaagccaagacactcctccgcggacaaccttgccaatgaaatgacttatatcacagaaaccgaggacgtgttctatacatacaagggctccctcgctccccaggatagcgactccgaggtgtctcagaacaggagtccccatcaggagtcgctgtctgaaaacaatcccgcacagtcctatttgacccagaaatcctcttcctccgtgtcaccttcctctaacgcccctggaagttgcagccctgacggggtggaccaacaactcctggacgactttcatagggttacaaagggcggctctacagaggacgcttcccagtactactgcgacaaaaatgataacggggactcctacctagtcctcatcagaatcactcctgatgaggacgggaagtttggttttaacctcaaaggaggtgtcgaccaaaagatgccgttggttgtaagtagaatcaacccagagagccctgccgatacgtgtattcccaagctcaatgaaggggaccaaattgtcctgattaacggccgcgatataagcgaacacacacacgaccaggtggttatgttcattaaggcctcccgggagtcccactcgcgggaactggcactcgtaatacgcaggagagccgttcgcagctttgccgatttcaagagtgaggacgagctaaatcaactgttccctgaggctatcttccctatgtgccctgaaggaggcgatacccttgaaggctccatggcccagcttaagaaggggctggaatccggcacagtcttgatccaatttgaacagctctacaggaagaaacccgggctggccattactttcgcaaagcttcctcaaaacctggataagaaccgctataaagacgtgctcccttacgataccactagggttcttctgcagggaaacgaggattatattaatgcatcttacgtcaacatggaaatacctgcagccaacttggtgaataaatacattgcgacccaaggtcctctcccccacacctgcgcacagttttggcaggtcgtgtgggatcagaaactcagtctcatcgtaatgctcacaaccctgaccgaacgtggtcggaccaagtgtcaccagtattggcccgaccctccggatgtgatgaaccatggggggtttcatatccagtgtcagtccgaagattgtacaattgcttacgtttccagggaaatgttggttactaatacacagaccggcgaagaacacaccgtgacacatctgcagtatgtagcctggcccgatcatggagtccccgacgacagcagtgattttctcgagttcgttaattacgtcaggtctctgcgggtggattcggaacctgtgttggtccactgcagcgccgggatcgggagaactggtgtcctcgtgaccatggagaccgccatgtgtttgactgagcgaaacttgcccatctatcccctggatatcgtgagaaagatgcgcgatcagcgggcgatgatggtccaaacctccagtcagtataaatttgtctgtgaggccatcctgcgcgtgtacgaagagggattagtccagatgctagacccatcatag

SEQ ID NO: 290854 - DNA, 2349 bp, Artificial Sequence
  derived and/or modified sequence
atggacatctgtgagggccgcctgacctgccccctgaacagcgctgtggtgctggccagctatgctgtgcagagccactttggagactacaacagcagcatccaccaccctggctacctgagtgacagccacttcatcccagaccagaatgaagacttcctgaccaaggtggagagcctgcacgagcagcacagcggcctgaagcagagcgaggccgagagctgctacatcaacatcgcccggaccctggacttctacggcgtggagctgcacagcggccgggacctgcacaacctggacctgatgattggaattgccagcgctggggtggccgtgtacaggaagtacatctgcaccagcttctacccctgggtgaacatcctgaagatctccttcaagaggaagaagttcttcatccaccagaggcagaagcaggccgagagccgggagcacatcgtggccttcaacatgctgaactaccgcagctgcaagaacctgtggaagagctgtgtggagcaccacaccttcttccaggccaagaagctgctgccccaggagaagaatgtgctgagccagtactggaccatgggcagcaggaacaccaagaagtctgtgaacaaccagtactgcaagaaggtgattggaggcatggtgtggaacccagccatgaggaggagcctgtctgtggagcacctggagaccaagagcctgcccagccgcagcccccccatcacccccaactggaggagcccccggctgcggcatgagatcaggaagcccaggcacagcagcgctgacaacctggccaatgagatgacctacatcacagaaacagaagatgtgttctacacctacaagggcagcctggccccccaggacagcgacagcgaggtgtcccagaacagaagcccccaccaggagagcctgtctgagaacaacccagcccagagctacctgacccagaagagcagcagctctgtgagccccagcagcaatgcccctggcagctgcagcccagatggagtggaccagcagctgctggatgacttccaccgggtgaccaagggcggcagcacagaagatgccagccagtactactgtgacaagaatgacaacggggacagctacctggtgctgatccgcatcaccccagatgaagatggcaagtttggcttcaacctgaagggcggcgtggaccagaagatgcccctggtggtgagccgcatcaaccctgagagccctgctgacacctgcatccccaagctgaatgaaggagaccagatcgtgctgatcaatggccgggacatcagcgagcacacccatgaccaggtggtgatgttcatcaaggccagccgggagagccacagccgggagctggccctggtgatcagaagaagagctgtgcgcagctttgctgacttcaagtcagaagatgagctgaaccagctgtttcctgaggccatcttccccatgtgcccagagggcggggacaccctggagggctccatggcccagctgaagaagggcctggagagcggcaccgtgctgatccagtttgagcagctgtacaggaagaagccaggcctggccatcacctttgccaagctgccccagaacctggacaagaaccgctacaaggatgtgctgccctatgacaccaccagggtgctgctgcagggcaatgaagactacatcaatgccagctatgtgaacatggagatcccagctgccaacctggtgaacaagtacatcgccacccagggccccctgccccacacctgtgcccagttctggcaggtggtgtgggaccagaagctgagcctgattgtgatgctgaccaccctgacagagcggggccgcaccaagtgccaccagtactggccagaccccccagatgtgatgaaccacggcggcttccacatccagtgccagagcgaggactgcaccatcgcctacgtgtcccgggagatgctggtgaccaacacccagacaggagaggagcacacagtgacccacctgcagtatgtggcctggccagaccatggagtgcctgatgacagcagtgacttcctggagtttgtgaactacgtgcgcagcctgcgggtggacagcgagcctgtgctggtgcactgcagcgctggcattggaagaactggagtgctggtgaccatggagacagccatgtgcctgacagaaagaaacctgcccatctaccccctggacatcgtgaggaagatgagggaccagagggccatgatggtgcagaccagcagccagtacaagtttgtgtgtgaggccatcctgcgggtgtatgaggagggcctggtgcagatgctggaccccagctag

SEQ ID NO: 290855 - DNA, 2349 bp, Artificial Sequence
  derived and/or modified sequence
atggacatctgcgagggccggctgacctgccccctgaacagcgccgtggtgctggcctcgtacgctgtgcaaagccatttcggcgactacaacagttcgatccaccaccctggatacctgagcgattcccacttcattcccgaccagaacgaggatttcttgactaaggtcgagagtctccacgagcagcactcgggattgaagcagagcgaagcggagagctgttacatcaatattgcccgaacccttgacttctatggtgtggagctgcacagcggcagggatctccacaacctcgatttgatgatcggcatcgcctcggctggggtggccgtctacagaaagtacatctgtactagtttctacccgtgggtgaacatcttgaagatctcatttaagcggaagaagttcttcatccatcaaaggcagaaacaggcagaaagtcgcgagcacattgtggcgtttaatatgcttaactacaggtcatgtaagaacctctggaagtcatgcgtcgagcatcacaccttcttccaagccaaaaaattactgcctcaggagaaaaacgtgctgtcacagtactggacaatgggttcgcggaataccaaaaagagcgtgaataatcaatactgcaagaaagtgattggcgggatggtatggaatcctgccatgcgccggagcctgtctgtggaacacctcgagactaagtcactgcctagccggtcacccccgattacacctaattggcgctctcctcgcctgcgccacgaaattaggaagccacggcattcgagcgccgacaacctggccaatgaaatgacgtacatcactgaaaccgaggacgtgttttacacttataagggcagcctagccccgcaggatagcgactcagaggtgagccagaaccgatctcctcaccaggaaagcctgtctgagaacaaccccgctcaatcatacttaacgcagaagagtagctcttctgtgtctccttcaagtaacgccccaggctcttgttctcccgacggagtagaccagcagttactggatgattttcatcgggtgactaaggggggttccaccgaggatgcctctcaatactactgcgacaagaatgacaacggcgactcctacctggtgctgatccgcatcactccagatgaagatggaaaattcggctttaacctgaaggggggagtggatcaaaaaatgcctctagtcgtgtcacgtataaatcccgagtcacctgcggatacatgtatccccaagttgaacgagggagatcagatcgtactgataaatggcagggacatcagcgaacacacccatgaccaagtggttatgtttattaaggccagccgggagtcccattccagggagctggcactggtgattagacgcagagcagtgagaagtttcgccgattttaaatctgaggatgagctgaatcagctattcccagaggccatctttccaatgtgccccgagggcggggatacgctggaaggctctatggcacaattgaagaaaggactagaatctggcacagttctgatccagttcgagcagttgtatcgcaagaagccgggattagctatcacatttgccaagcttccacagaatctggacaaaaatcgatataaagacgtgttgccttatgacactaccagagtgctcctacagggcaatgaggactatattaacgcatcttatgtcaacatggagattccagcggcaaacctcgtgaacaaatatattgctacacaggggcctctgcctcacacatgtgctcagttttggcaggtcgtatgggaccagaagctctccctcatcgttatgctgacaactcttacagagcggggaagaaccaaatgccaccaatattggcccgacccgcctgatgtcatgaaccacggcgggttccacattcagtgtcaaagtgaggattgtaccatcgcctatgtgagtagggaaatgttggtcacgaacactcagactggggaagagcacaccgtgacacatctccagtacgttgcctggcccgatcatggagtgcctgacgatagtagcgattttctcgagtttgtaaattacgttagaagtcttcgagtagacagtgagcctgtcttggttcactgctccgccggcattggccgcaccggtgtgctcgtcacaatggagacagctatgtgccttacagagcgcaatttaccgatctaccccctggatattgtccgaaaaatgcgggatcagcgcgcaatgatggttcaaaccagcagccagtacaagtttgtctgtgaagccattttgcgagtctacgaggaaggactagtacagatgcttgacccctcctag

SEQ ID NO: 290856 - DNA, 2093 bp, Artificial Sequence
  derived and/or modified sequence
aggtgcactgacaatagacatgtcagggggtcaagttagtgactgtgctctgcaagtgggatgaacagccagaaaagcagcccccaccacctctgttaggtgggagacctcttcctgccggtgggaagccactttgtgctgggtcttcagaggaggctggccctcctgagggtctgggaacccccattgctccaggagtttatccgagaacaatccggcacaaagctacctgacccagaagtcatccagttctgtgtctccatcttcaaatgctccaggctcctgctcacctgacggcgttgatcagcagctcttagatgacttccacagggtgaccaaagggggctccaccgaggacgccagccagtactactgtgacaagaatgataatggtgacagctacttagtcttgatccgtatcacaccagatgaagatggaaaatttggatttaatcttaagggaggagtggatcaaaagatgcctcttgtggtatcaaggataaacccagagtcacctgcggacacctgcattcctaagctgaacgaaggggatcaaatcgtgttaatcaatggccgggacatctcagaacacacgcatgaccaagtggtgatgttcatcaaagccagccgggagtcccactcacgggagctggccctggtgatcaggaggagagctgtccgctcatttgctgacttcaagtctgaagatgaactgaaccagcttttccccgaagccattttccccatgtgtccggagggtggggacactttggagggatccatggcacagctaaagaagggcctcgaaagcgggacggtgctgatccagtttgagcaactctacagaaaaaagccaggtttggccatcacgtttgcaaagctgcctcaaaatttggacaaaaaccgatataaagatgtgctgccttatgacaccacccgggtattattgcagggaaatgaagattatattaatgcaagttacgtgaacatggaaattcctgctgctaaccttgtgaacaagtacatcgccactcaggggcccctgccgcatacctgtgcacagttttggcaggttgtctgggatcagaagttgtcactcattgtcatgttgacgactctcacagaacgagggcggaccaaatgtcaccagtactggccagatccccccgacgtcatgaaccacggcggctttcacatccagtgtcagtcagaggactgcaccatcgcctatgtgtcccgagaaatgctggtcacaaacacccagaccggggaagaacacacagtgacacatctccagtacgtcgcatggcctgaccacggtgtgcccgatgactcctccgactttctggaatttgtaaactatgtgaggtctctgagagtggacagcgagcccgtcctagttcactgcagtgctggaataggtcgaaccggtgtgttggtcactatggaaacagccatgtgcctaactgagaggaacctgcccatttacccactggatattgtccgaaaaatgcgagaccagcgcgccatgatggtgcagacatcaagccagtacaagtttgtgtgtgaagcgattcttcgtgtgtatgaagaaggtttagtccaaatgctggatcctagttaagacaactgtgaaaaagttcattcctctttcccaagggcatcctccttgaaagaggaggacagacctctctggaagcagcaagaggaaccagtagctgtgggaaaggaatgggcacctctgaacccaggcactttaaacttctatagaaaagatatcgtgtacataggaactggtgtagataagcatgcaattatggcatcatttaggcctgtatttctatggaaagatacaaaaaggatctcagtttggggcctgtcctaatgccttcttccctaacatcaccacacacacccctgtcggcatcctggagcaattgagaccggacacccacagagctgttgtcctcccagcaacaagatggtgtggttatcttgggtcatttggatgttttgtttgtttctgtgtgtcagactgtaagggctgagctttctgtgcttctaggtggagctggaacaattcagattcaccc

SEQ ID NO: 290857 - DNA, 2349 bp, Artificial Sequence
  derived and/or modified sequence
atggacatctgcgaaggtcgactaacatgcccacttaacagcgccgttgtccttgcctcatatgcggtgcaaagtcacttcggggactacaacagctccatccaccatcctgggtatctctcggattcacacttcatacccgatcaaaacgaagatttcctgacaaaagtagagagcttacacgagcaacactccggtctgaaacaatcagaggctgaatcatgctacattaatattgctaggaccctggacttttacggtgttgaattacattctggtcgtgatctgcacaatttagatcttatgattggcatcgccagcgccggagtagctgtatacaggaaatacatctgtacctcattttacccatgggtaaatatattaaagatttcttttaaaagaaaaaagtttttcatacaccaacgacagaagcaagcagaaagcagggaacacatcgtggcttttaatatgctgaattatcgtagctgtaagaatctgtggaagtcctgcgtggaacaccatacgtttttccaggctaaaaaactcctgccccaagagaagaacgtgctgtctcagtactggaccatgggaagcaggaatacaaagaagtctgtgaataatcagtactgtaagaaggtcattgggggtatggtgtggaacccggctatgagaaggagtctcagcgtggaacatctggagacaaaatcactcccctctagatcccctccgattactccgaactggcgctcaccgagactccgccatgagatccggaaacctcgtcattcctccgcagacaatctggcaaacgagatgacttatatcacagagacggaggacgtgttctatacttacaagggttctctggctccccaggactctgacagtgaagtatcccaaaatcgaagccctcaccaggaaagtttgtctgagaacaaccctgcacagtcttacttgactcaaaagtccagctcttccgtctccccctcatcaaacgcacctggctcttgcagcccggatggagtggaccaacaactccttgacgattttcaccgagtcaccaagggcggtagtaccgaggatgcctcccagtattattgtgacaagaatgataacggagactcttacctagtccttattcgaatcacccctgatgaggacggcaaattcggattcaacctcaagggaggcgttgatcaaaaaatgcccctggtagtctcacggatcaatccagagtcccccgctgatacatgcatccccaaactgaacgaaggtgatcagattgtactgattaacggaagggatataagtgagcacacccatgatcaggtcgtgatgttcatcaaggcatcgcgcgaatcacactctcgcgaactggccttagtgatccgacgacgcgctgtacggtcgtttgccgacttcaagagcgaggatgagctgaaccaactgtttcctgaagcaattttccccatgtgccctgagggtggggataccttagaaggatccatggcccagctgaaaaaaggcctggagtccggcacagtcctgatccagtttgaacaattatatagaaaaaagcccggactggccatcaccttcgcaaagctgccacagaacttggataagaataggtacaaggatgtgctcccttacgacaccactcgagtgctgttacaagggaacgaagactacattaacgcatcctacgtcaatatggaaatccctgccgctaacctggtcaataagtatatcgctactcaagggccactccctcatacttgtgcacagttttggcaggtggtctgggatcaaaaactgagcctcatcgtcatgttaactactttaaccgaaagaggccgaaccaagtgtcaccagtattggccagatccccctgacgtgatgaatcatgggggttttcacatccagtgccagagcgaagactgcacaattgcctacgtatcacgggagatgcttgtgaccaacacccaaaccggtgaagaacataccgtcacacacctccaatacgtggcctggccggaccatggggtccctgacgatagttctgactttctcgagtttgttaattacgtgagatcactcagggtggactcagagccagtcctagttcactgtagcgcagggatcggtaggaccggagtgctggtcactatggagaccgctatgtgtcttaccgagcgaaaccttcctatataccctctagatatagtgaggaagatgcgcgaccagcgagctatgatggtccaaactagttctcagtacaaatttgtgtgtgaggctatactgcgtgtatacgaagagggcttggtgcagatgttggacccttcctag

SEQ ID NO: 290858 - protein, 2566 aa, Artificial Sequence
  derived and/or modified sequence
MEVLQCDGCDFRAPSYEDLKAHIQDVHTAFLQPTDVAEDNVNELRCGSVNASNQTEVEFSSIKDEFAIAEDLSGQNATSLGTGGYYGHSPGYYGQHIAANPKPTNKFFQCKFCVRYFRSKNLLIEHTRKVHGAQAEGSSSGPPVPGSLNYNIMMHEGFGKVFSCQFCTYKSPRRARIIKHQKMYHKNNLKETTAPPPAPAPMPDPVVPPVSLQDPCKELPAEVVERSILESMVKPLTKSRGNFCCEWCSYQTPRRERWCDHMMKKHRSMVKILSSLRQQQEGTNLPDVPNKSAPSPTSNSTYLTMNAASREIPNTTVSNFRGSMGNSIMRPNSSASKFSPMSYPQMKPKSPHNSGLVNLTERSRYGMTDMTNSSADLETNSMLNDSSSDEELNEIDSENGLSAMDHQTSGLSAEQLMGSDGNKLLETKGIPFRRFMNRFQCPFCPFLTMHRRSISRHIENIHLSGKTAVYKCDECPFTCKSSLKLGAHKQCHTGTTSDWDAVNSQSESISSSLNEGVVSYESSSINGRKSGVMLDPLQQQQPPQPPPPPPPPPPSQPQPLQQPQPPQLQPPHQVPPQPQTQPPPTQQPQPPTQAAPLHPYKCTMCNYSTTTLKGLRVHQQHKHSFCDNLPKFEGQPSSLPLENETDSHPSSSNTVKKSQTSILGLSSKNNFVAKASRKLANDFPLDLSPVKKRTRIDEIASNLQSKINQTKQQEDAVINVEDDEEEEEDNEVEIEVELDREEEPTEPIIEVPTSFSAQQIWVRDTSEPQKEPNFRNITHDYNATNGAEIELTLSEDEEDYYGSSTNLKDHQVSNTALLNTQTPIYGTEHNSENTDFGDSGRLYYCKHCDFNNKSARSVSTHYQRMHPYIKFSFRYILDPNDHSAVYRCLECYIDYTNFEDLQQHYGEHHPEAMNVLNFDHSDLIYRCRFCSYTSPNVRSLMPHYQRMHPTVKINNAMIFSSYVVEQQEGLNTESQTLREILNSAPKNMATSTPVARGGGLPATFNKNTPKTFTPECENQKDPLVNTVVVYDCDVCSFASPNMHSVLVHYQKKHPEEKASYFRIQKTMRMVSVDRGSALSQLSFEVGAPMSPKMSNMGSPPPPQPPPPDLSTELYYCKHCSYSNRSVVGVLVHYQKRHPEIKVTAKYIRQAPPTAAMMRGVEGPQGSPRPPAPIQQLNRSSSERDGPPVENEMFFCQHCDYGNRTVKGVLIHYQKKHRDFKANADVIRQHTATIRSLCDRNQKKPASCVLVSPSNLERDKTKLRALKCRQCSYTSPYFYALRKHIKKDHPALKATVTSIMRWAFLDGLIEAGYHCEWCIYSHTEPNGLLLHYQRRHPEHYVDYTYMATKLWAGPDPSPPSLTMPAEAKTYRCRDCVFEAVSIWDITNHYQAFHPWAMNGDESVLLDIIKEKDAVEKPILSSEELAGPVNCENSIPTPFPEQEAECPEDARLSPEKSLQLASANPAISSTPYQCTVCQSEYNNLHGLLTHYGKKHPGMKVKAADFAQDIDINPGAVYKCRHCPYINTRIHGVLTHYQKRHPSIKVTAEDFVHDVEQSADISQNDVEETSRIFKQGYGAYRCKLCPYTHGTLEKLKIHYEKYHNQPEFDVFSQSPPKLPVPLEPEMTTEVSPSQVSITEEEVGEEPVSTSHFSTSHLVSHTVFRCQLCKYFCSTRKGIARHYRIKHNNVRAQPEGKNNLFKCALCAYTNPIRKGLAAHYQKRHDIDAYYTHCLAASRTISDKPNKVIIPSPPKDDSPQLSEELRRAVEKKKCSLCSFQSFSKKGIVSHYMKRHPGVFPKKQHASKLGGYFTAVYADEHEKPTLMEEEERGNFEKAEVEGEAQEIEWLPFRCIKCFKLSFSTAELLCMHYTDHHSRDLKRDFIILGNGPRLQNSTYQCKHCDSKLQSTAELTSHLNIHNEEFQKRAKRQERRKQLLSKQKYADGAFADFKQERPFGHLEEVPKIKERKVVGYKCKFCVEVHPTLRAICNHLRKHVQYGNVPAVSAAVKEADDPAHLFLDGLEAAKDASGALVGRVDGEHCLLDGMLEDETRPGGYHCSQCDRVLMSMQGLRSHERSHLALAMFTREDKYSCQYCSFVSAFRHNLDRHMQTHHGHHKPFRCKLCSFKSSYNSRLKTHILKAHAGEHAYKCSWCSFSTMTISQLKEHSLKVHGKALTLPRPRIVSLLSSHSHHSSQKATPAEEVEDSNDSSYSEPPDVQQQLNHYQSAALARNNSRVSPVPLSGAAAGTEQKTEAVLHCEFCEFSSGYIQSIRRHYRDKHGGKKLFKCKDCSFYTGFKSAFTMHVEAGHSAVPEEGPKDLRCPLCLYHTKYKRNMIDHIVLHREERVVPIEVCRSKLSKYLQGVVFRCDKCTFTCSSDESLQQHIEKHNELKPYKCQLCYYETKHTEELDSHLRDEHKVSRNFELVGRVNLDQLEQMKEKMESSSSDDEDKEEEMNSKAEDRELMRFSDHGAALNTEKRFPCEFCGRAFSQGSEWERHVLRHGMALNDTKQVSREEIHPKEIMENSVKMPSIEEKEDDEAIGIDFSLKNETVAICVVTADKSLLENAEAKKE

SEQ ID NO: 290859 - DNA, 7701 bp, Artificial Sequence
  derived and/or modified sequence
atggaggtgctgcagtgcgacggctgcgacttcagagcccccagctacgaggacctgaaggcccacatccaggacgtgcacaccgccttcctgcagcccaccgacgtggccgaggacaacgtgaacgagctgagatgcggcagcgtgaacgccagcaaccagaccgaggtggagttcagcagcatcaaggacgagttcgccatcgccgaggacctgagcggccagaacgccaccagcctgggcaccggcggctactacggccacagccccggctactacggccagcacatcgccgccaaccccaagcccaccaacaagttcttccagtgcaagttctgcgtgagatacttcagaagcaagaacctgctgatcgagcacaccagaaaggtgcacggcgcccaggccgagggcagcagcagcggcccccccgtgcccggcagcctgaactacaacatcatgatgcacgagggcttcggcaaggtgttcagctgccagttctgcacctacaagagccccagaagagccagaatcatcaagcaccagaagatgtaccacaagaacaacctgaaggagaccaccgcccccccccccgcccccgcccccatgcccgaccccgtggtgccccccgtgagcctgcaggacccctgcaaggagctgcccgccgaggtggtggagagaagcatcctggagagcatggtgaagcccctgaccaagagcagaggcaacttctgctgcgagtggtgcagctaccagacccccagaagagagagatggtgcgaccacatgatgaagaagcacagaagcatggtgaagatcctgagcagcctgagacagcagcaggagggcaccaacctgcccgacgtgcccaacaagagcgcccccagccccaccagcaacagcacctacctgaccatgaacgccgccagcagagagatccccaacaccaccgtgagcaacttcagaggcagcatgggcaacagcatcatgagacccaacagcagcgccagcaagttcagccccatgagctacccccagatgaagcccaagagcccccacaacagcggcctggtgaacctgaccgagagaagcagatacggcatgaccgacatgaccaacagcagcgccgacctggagaccaacagcatgctgaacgacagcagcagcgacgaggagctgaacgagatcgacagcgagaacggcctgagcgccatggaccaccagaccagcggcctgagcgccgagcagctgatgggcagcgacggcaacaagctgctggagaccaagggcatccccttcagaagattcatgaacagattccagtgccccttctgccccttcctgaccatgcacagaagaagcatcagcagacacatcgagaacatccacctgagcggcaagaccgccgtgtacaagtgcgacgagtgccccttcacctgcaagagcagcctgaagctgggcgcccacaagcagtgccacaccggcaccaccagcgactgggacgccgtgaacagccagagcgagagcatcagcagcagcctgaacgagggcgtggtgagctacgagagcagcagcatcaacggcagaaagagcggcgtgatgctggaccccctgcagcagcagcagcccccccagccccccccccccccccccccccccccccccagccagccccagcccctgcagcagccccagcccccccagctgcagcccccccaccaggtgcccccccagccccagacccagcccccccccacccagcagccccagccccccacccaggccgcccccctgcacccctacaagtgcaccatgtgcaactacagcaccaccaccctgaagggcctgagagtgcaccagcagcacaagcacagcttctgcgacaacctgcccaagttcgagggccagcccagcagcctgcccctggagaacgagaccgacagccaccccagcagcagcaacaccgtgaagaagagccagaccagcatcctgggcctgagcagcaagaacaacttcgtggccaaggccagcagaaagctggccaacgacttccccctggacctgagccccgtgaagaagagaaccagaatcgacgagatcgccagcaacctgcagagcaagatcaaccagaccaagcagcaggaggacgccgtgatcaacgtggaggacgacgaggaggaggaggaggacaacgaggtggagatcgaggtggagctggacagagaggaggagcccaccgagcccatcatcgaggtgcccaccagcttcagcgcccagcagatctgggtgagagacaccagcgagccccagaaggagcccaacttcagaaacatcacccacgactacaacgccaccaacggcgccgagatcgagctgaccctgagcgaggacgaggaggactactacggcagcagcaccaacctgaaggaccaccaggtgagcaacaccgccctgctgaacacccagacccccatctacggcaccgagcacaacagcgagaacaccgacttcggcgacagcggcagactgtactactgcaagcactgcgacttcaacaacaagagcgccagaagcgtgagcacccactaccagagaatgcacccctacatcaagttcagcttcagatacatcctggaccccaacgaccacagcgccgtgtacagatgcctggagtgctacatcgactacaccaacttcgaggacctgcagcagcactacggcgagcaccaccccgaggccatgaacgtgctgaacttcgaccacagcgacctgatctacagatgcagattctgcagctacaccagccccaacgtgagaagcctgatgccccactaccagagaatgcaccccaccgtgaagatcaacaacgccatgatcttcagcagctacgtggtggagcagcaggagggcctgaacaccgagagccagaccctgagagagatcctgaacagcgcccccaagaacatggccaccagcacccccgtggccagaggcggcggcctgcccgccaccttcaacaagaacacccccaagaccttcacccccgagtgcgagaaccagaaggaccccctggtgaacaccgtggtggtgtacgactgcgacgtgtgcagcttcgccagccccaacatgcacagcgtgctggtgcactaccagaagaagcaccccgaggagaaggccagctacttcagaatccagaagaccatgagaatggtgagcgtggacagaggcagcgccctgagccagctgagcttcgaggtgggcgcccccatgagccccaagatgagcaacatgggcagccccccccccccccagccccccccccccgacctgagcaccgagctgtactactgcaagcactgcagctacagcaacagaagcgtggtgggcgtgctggtgcactaccagaagagacaccccgagatcaaggtgaccgccaagtacatcagacaggccccccccaccgccgccatgatgagaggcgtggagggcccccagggcagccccagaccccccgcccccatccagcagctgaacagaagcagcagcgagagagacggcccccccgtggagaacgagatgttcttctgccagcactgcgactacggcaacagaaccgtgaagggcgtgctgatccactaccagaagaagcacagagacttcaaggccaacgccgacgtgatcagacagcacaccgccaccatcagaagcctgtgcgacagaaaccagaagaagcccgccagctgcgtgctggtgagccccagcaacctggagagagacaagaccaagctgagagccctgaagtgcagacagtgcagctacaccagcccctacttctacgccctgagaaagcacatcaagaaggaccaccccgccctgaaggccaccgtgaccagcatcatgagatgggccttcctggacggcctgatcgaggccggctaccactgcgagtggtgcatctacagccacaccgagcccaacggcctgctgctgcactaccagagaagacaccccgagcactacgtggactacacctacatggccaccaagctgtgggccggccccgaccccagcccccccagcctgaccatgcccgccgaggccaagacctacagatgcagagactgcgtgttcgaggccgtgagcatctgggacatcaccaaccactaccaggccttccacccctgggccatgaacggcgacgagagcgtgctgctggacatcatcaaggagaaggacgccgtggagaagcccatcctgagcagcgaggagctggccggccccgtgaactgcgagaacagcatccccacccccttccccgagcaggaggccgagtgccccgaggacgccagactgagccccgagaagagcctgcagctggccagcgccaaccccgccatcagcagcaccccctaccagtgcaccgtgtgccagagcgagtacaacaacctgcacggcctgctgacccactacggcaagaagcaccccggcatgaaggtgaaggccgccgacttcgcccaggacatcgacatcaaccccggcgccgtgtacaagtgcagacactgcccctacatcaacaccagaatccacggcgtgctgacccactaccagaagagacaccccagcatcaaggtgaccgccgaggacttcgtgcacgacgtggagcagagcgccgacatcagccagaacgacgtggaggagaccagcagaatcttcaagcagggctacggcgcctacagatgcaagctgtgcccctacacccacggcaccctggagaagctgaagatccactacgagaagtaccacaaccagcccgagttcgacgtgttcagccagagcccccccaagctgcccgtgcccctggagcccgagatgaccaccgaggtgagccccagccaggtgagcatcaccgaggaggaggtgggcgaggagcccgtgagcaccagccacttcagcaccagccacctggtgagccacaccgtgttcagatgccagctgtgcaagtacttctgcagcaccagaaagggcatcgccagacactacagaatcaagcacaacaacgtgagagcccagcccgagggcaagaacaacctgttcaagtgcgccctgtgcgcctacaccaaccccatcagaaagggcctggccgcccactaccagaagagacacgacatcgacgcctactacacccactgcctggccgccagcagaaccatcagcgacaagcccaacaaggtgatcatccccagcccccccaaggacgacagcccccagctgagcgaggagctgagaagagccgtggagaagaagaagtgcagcctgtgcagcttccagagcttcagcaagaagggcatcgtgagccactacatgaagagacaccccggcgtgttccccaagaagcagcacgccagcaagctgggcggctacttcaccgccgtgtacgccgacgagcacgagaagcccaccctgatggaggaggaggagagaggcaacttcgagaaggccgaggtggagggcgaggcccaggagatcgagtggctgcccttcagatgcatcaagtgcttcaagctgagcttcagcaccgccgagctgctgtgcatgcactacaccgaccaccacagcagagacctgaagagagacttcatcatcctgggcaacggccccagactgcagaacagcacctaccagtgcaagcactgcgacagcaagctgcagagcaccgccgagctgaccagccacctgaacatccacaacgaggagttccagaagagagccaagagacaggagagaagaaagcagctgctgagcaagcagaagtacgccgacggcgccttcgccgacttcaagcaggagagacccttcggccacctggaggaggtgcccaagatcaaggagagaaaggtggtgggctacaagtgcaagttctgcgtggaggtgcaccccaccctgagagccatctgcaaccacctgagaaagcacgtgcagtacggcaacgtgcccgccgtgagcgccgccgtgaaggaggccgacgaccccgcccacctgttcctggacggcctggaggccgccaaggacgccagcggcgccctggtgggcagagtggacggcgagcactgcctgctggacggcatgctggaggacgagaccagacccggcggctaccactgcagccagtgcgacagagtgctgatgagcatgcagggcctgagaagccacgagagaagccacctggccctggccatgttcaccagagaggacaagtacagctgccagtactgcagcttcgtgagcgccttcagacacaacctggacagacacatgcagacccaccacggccaccacaagcccttcagatgcaagctgtgcagcttcaagagcagctacaacagcagactgaagacccacatcctgaaggcccacgccggcgagcacgcctacaagtgcagctggtgcagcttcagcaccatgaccatcagccagctgaaggagcacagcctgaaggtgcacggcaaggccctgaccctgcccagacccagaatcgtgagcctgctgagcagccacagccaccacagcagccagaaggccacccccgccgaggaggtggaggacagcaacgacagcagctacagcgagccccccgacgtgcagcagcagctgaaccactaccagagcgccgccctggccagaaacaacagcagagtgagccccgtgcccctgagcggcgccgccgccggcaccgagcagaagaccgaggccgtgctgcactgcgagttctgcgagttcagcagcggctacatccagagcatcagaagacactacagagacaagcacggcggcaagaagctgttcaagtgcaaggactgcagcttctacaccggcttcaagagcgccttcaccatgcacgtggaggccggccacagcgccgtgcccgaggagggccccaaggacctgagatgccccctgtgcctgtaccacaccaagtacaagagaaacatgatcgaccacatcgtgctgcacagagaggagagagtggtgcccatcgaggtgtgcagaagcaagctgagcaagtacctgcagggcgtggtgttcagatgcgacaagtgcaccttcacctgcagcagcgacgagagcctgcagcagcacatcgagaagcacaacgagctgaagccctacaagtgccagctgtgctactacgagaccaagcacaccgaggagctggacagccacctgagagacgagcacaaggtgagcagaaacttcgagctggtgggcagagtgaacctggaccagctggagcagatgaaggagaagatggagagcagcagcagcgacgacgaggacaaggaggaggagatgaacagcaaggccgaggacagagagctgatgagattcagcgaccacggcgccgccctgaacaccgagaagagattcccctgcgagttctgcggcagagccttcagccagggcagcgagtgggagagacacgtgctgagacacggcatggccctgaacgacaccaagcaggtgagcagagaggagatccaccccaaggagatcatggagaacagcgtgaagatgcccagcatcgaggagaaggaggacgacgaggccatcggcatcgacttcagcctgaagaacgagaccgtggccatctgcgtggtgaccgccgacaagagcctgctggagaacgccgaggccaagaaggagtag

SEQ ID NO: 290860 - DNA, 7701 bp, Artificial Sequence
  derived and/or modified sequence
atggaggtgctgcagtgcgatggctgtgacttcagggcacctagctatgaggatttaaaggctcacatccaggatgtgcataccgctttcctacagcccactgatgtcgcagaagacaacgtaaacgaactgcggtgcggaagcgtgaatgcttctaatcagactgaggtggagttcagctctattaaggacgagttcgccattgccgaggatttgagtgggcagaacgcaactagtttgggtaccggtggatattacggtcacagccccggatattatggccagcacattgcagccaaccccaagcccactaataagtttttccagtgtaaattctgcgtccgctacttcagatctaagaacctgctcattgaacacactcggaaagtgcatggtgcacaggctgagggcagtagctctggccccccggtcccagggtcactcaactataacattatgatgcatgaggggttcgggaaagtcttcagctgccaattctgtacttacaagtctcctcggagagcacgtatcatcaagcaccagaagatgtaccacaagaataatctcaaagagacaacggctccacctcctgcaccagctccaatgcctgaccccgtcgtgccgcccgtgtcactgcaagacccctgtaaagagctgcctgcagaggtggttgaacgctctattttggagtccatggtcaagccactaaccaagagcagagggaatttttgctgcgagtggtgttcctaccagacaccgcggcgcgagcgatggtgcgaccacatgatgaaaaaacatagaagcatggtgaagatcctttcctcacttagacagcaacaggaaggcaccaatctgcctgacgtgcctaacaagtccgcgcctagccccacaagtaactccacttatttaactatgaacgctgcgagtagagaaattccaaacacaaccgtgagcaattttcggggttctatgggcaattccatcatgcggcctaacagcagtgcctctaagttttccccaatgtcttacccccagatgaagcccaaaagtcctcacaattcaggactcgtgaatctgacagagagaagtaggtatggcatgaccgatatgactaactcttccgccgacctcgagactaactctatgctgaacgactcttcgtccgacgaagagctgaacgaaatcgactctgaaaatgggctcagcgcaatggaccaccagacttctggcctttcggcagaacagctcatgggatctgacggcaacaaattactggaaactaaaggcattccattcagaagatttatgaatcggttccagtgccctttttgccccttcctcacaatgcacaggcgctcgatcagcaggcacatcgagaatattcatctgagcggcaaaacagctgtgtacaagtgtgacgagtgcccctttacttgcaagtcctccctgaagctaggcgcccataaacagtgccacacggggaccacatcagattgggatgctgtaaactcacagtcagagtcaattagttcatctctcaatgaaggggtggtaagttatgaatcaagcagtattaacgggcggaagtccggtgtcatgctagacccgctccagcaacagcagcccccgcagccaccgccccctccccctcctccgcctccgagccagccccagcctctccagcagcctcagccccctcagctgcagcctcctcatcaggtgcctcctcagccacagactcaaccccccccgacacagcaacctcagccccctacacaggctgctcccctgcatccttacaagtgtactatgtgcaattacagcactactaccttaaagggtttgcgtgtccatcagcagcacaaacatagcttttgtgacaatctgccaaagtttgaagggcagccatccagcctgcctctggagaatgagacggacagccatcctagttccagtaatactgtgaagaaatcgcagacaagtatccttgggcttagcagtaaaaacaacttcgtcgccaaggctagcagaaagttggctaacgatttccctcttgatttgagtccagttaagaagcgcacaaggattgacgaaattgcatcgaatctgcaaagcaagatcaaccagaccaagcaacaggaggatgctgtaattaacgtcgaagacgatgaggaggaagaggaagacaatgaggtggaaatcgaggtggagctggatagggaagaagaaccaactgaacctatcatcgaggtgccgactagtttttccgcccagcagatctgggtgcgggacacatcagaaccacagaaagaaccaaatttcaggaacatcactcatgattacaacgccacaaacggtgcggagatcgagctgactctgtcggaggatgaagaagattattacggatcctcaacgaatcttaaagatcatcaagtctctaatacagctctgttgaatacccagacacccatatacggtactgaacacaacagcgaaaatactgacttcggggactccggacgcttgtactactgcaagcactgcgactttaacaataagtctgccaggtcagtgtccacacactatcagaggatgcacccatatattaagttctctttcagatatatcctggaccctaatgaccacagcgccgtctataggtgccttgaatgctacatcgactacacaaatttcgaggaccttcagcagcattatggggagcaccaccctgaggccatgaacgttctgaattttgaccattcggatctgatctaccggtgccgtttctgctcttatacgagccccaacgtgaggagccttatgccccactaccagaggatgcatccaaccgtaaagatcaataatgccatgatattttcgtcctatgtggttgagcagcaggaaggtctgaataccgagtctcagaccctccgggagatcctgaacagtgcgcccaagaatatggctacctcaactcctgtggcgcgggggggcggtttgcccgccacatttaataagaacacgccaaagacttttacacctgagtgcgaaaatcaaaaagacccactggttaacacagttgtcgtctacgactgtgatgtgtgttcgttcgcctctcctaacatgcatagcgtacttgttcactatcagaagaaacaccctgaagagaaagcatcttattttcgcatccaaaaaacaatgcgcatggtcagcgtggatagggggtcagctctatcgcagctcagctttgaggttggcgctcctatgtcacctaagatgtcaaacatggggtcaccccccccccctcaaccgcccccccctgatttaagtacggagctctactactgcaaacactgctcttactcaaaccgatccgttgtcggagtgttagtgcattatcaaaaacgccatcctgaaattaaggtcacagcaaagtacatccgccaggcgcccccaacagcagccatgatgagaggggtcgaaggacctcagggatcgccgcggcccccagcccctatccaacaattgaataggagttcctcagaacgggacggcccccccgtggagaacgaaatgttcttctgtcaacattgcgattacggcaacaggaccgtgaagggcgtgctgatccattaccagaaaaaacacagggactttaaagccaatgccgacgttatcagacagcacacggctacaattagaagtctttgtgatcgcaatcagaaaaaacctgcgagttgtgtcctcgtgtcccctagcaacctggaacgcgataaaaccaagctgcgagccctgaagtgccgccaatgctcatacacatccccctacttctacgctctgagaaagcatatcaagaaagaccaccccgctctgaaggccacggttacttccataatgcgctgggcattcctggatggactgatcgaagctggataccactgtgagtggtgtatctatagccacactgaacccaacggattgctcctccattatcagcggaggcacccagagcattatgtggattacacttatatggcgaccaaattgtgggccggccccgatccaagtcccccttctcttacaatgcctgccgaagcaaaaacctacagatgccgcgactgtgtcttcgaggccgtcagcatttgggatataaccaaccattaccaggccttccacccctgggccatgaacggcgatgaatcggtactcttggatataataaaggagaaggacgctgtggaaaagccaattttaagttccgaagagctggctgggcccgttaattgcgagaattccatacctacaccctttcccgagcaggaagccgaatgcccagaagatgctagactgagcccagagaagtccctccaattggccagtgccaacccagccatcagcagcactccttaccaatgcactgtctgccagagcgagtacaataacctgcacggcctgctgacccactatggcaagaaacaccccggcatgaaagtgaaggcagctgactttgctcaagatatcgacattaaccccggcgctgtgtataaatgtcggcactgcccctatatcaacacccgtatccacggcgtgctgacacattaccagaaacgtcacccttccatcaaagtgaccgcagaagattttgtccacgatgtcgagcagagtgcagacatctctcaaaacgatgtggaggagacttcccgaatcttcaaacaggggtatggcgcatatcgctgtaaactctgtccgtacactcatggcacacttgaaaagctgaaaattcactatgaaaagtatcacaatcagccagagtttgatgtatttagccagtctcctcccaaactgcctgtgccactggagccagaaatgaccacggaggttagcccgtcacaggtctctattactgaagaggaggttggcgaagagcccgtttccacaagtcacttttccacttctcacctcgtgagtcatacagtttttagatgtcagctgtgtaagtacttttgctcaacgcggaagggtatcgctagacactatcgcataaagcacaataatgtgagagcccagccggagggtaagaacaacctgttcaaatgcgctttgtgcgcctatacaaacccgatccgaaaaggccttgccgctcattatcaaaaacgacacgacatagatgcttactacacccattgcctggccgctagcaggactatctcagacaaaccaaataaagtaattatcccaagcccccccaaggatgacagcccacagctgtccgaagagctaagacgtgctgtggaaaaaaagaaatgttccctgtgctcatttcagtccttttcgaagaaaggcattgtgtcccactacatgaagcgtcacccgggcgtattcccaaagaaacagcatgcctccaagctcggaggctatttcactgccgtgtacgccgatgaacacgagaaacctaccctgatggaggaggaggaaagagggaacttcgaaaaagctgaggttgagggtgaagctcaggaaatcgagtggttgccgttcagatgtatcaagtgtttcaagttgtctttcagtacggccgagttgctgtgcatgcactatacggaccatcactcccgggatttgaagcgagacttcattatactgggtaacggaccccgccttcaaaatagtacatatcagtgcaagcactgtgacagtaagctgcagtccacggccgagctgactagccacctgaatatacacaatgaagagttccagaagcgggccaagaggcaggagcgtaggaaacagctcctcagtaagcagaaatatgccgacggcgcattcgccgactttaagcaggaacgcccattcggtcacttggaggaagtgcctaaaatcaaggaacggaaagtggtaggatacaagtgcaaattctgcgttgaggtacaccctacacttcgtgccatctgtaaccatttacgcaagcacgtccagtacggcaatgtgcccgccgtttctgctgctgtcaaggaagccgatgaccctgcgcatctcttcttggatggactcgaggccgccaaggatgccagcggcgctttggtcgggagggtggacggagaacattgcctactcgatggcatgctcgaagacgagacacggccaggagggtaccactgctcccagtgcgacagagtgctgatgtcaatgcagggtttgcgcagccatgaacggtctcatctggccctggccatgttcaccagggaggataagtacagctgtcagtactgttccttcgtatctgcctttagacacaatctggatcggcacatgcagacacatcacggtcaccataaacctttccgctgtaagctttgctcatttaaatcatcctacaactcccggttaaaaacacatatcttgaaagcccatgcgggggagcacgcttataaatgcagttggtgctctttctctacgatgacgatctcacagcttaaggagcacagcctgaaagtacacggaaaggctctgacgttgcccagacccagaatcgtctctctcttatcttcacatagtcatcatagcagccagaaggccactccagctgaggaggtggaagattctaatgattccagctattctgaacccccagacgttcagcagcaactgaaccactaccaaagcgctgccctcgcccggaacaatagcagggtaagcccagttccattgtcaggggctgctgcaggaaccgagcaaaagaccgaggccgttctccactgtgagttctgcgagttttcatctggttacatacagtccatccggcgtcactacagagacaagcacggcgggaagaagctctttaaatgtaaggactgctccttttataccggttttaagagcgcgttcacaatgcatgtggaagccggtcactcagcagtgccggaagagggccccaaggatctcagatgtccactctgtctctatcacacaaaatacaaacgaaatatgatcgaccatatcgtgctgcatagagaagagcgggtcgtgccgatcgaagtctgcagaagtaaactcagcaagtacctccagggcgtcgttttcaggtgcgataagtgcacattcacctgctcctccgatgagagtctacagcagcatatcgaaaagcacaacgagttgaagccctataagtgtcagctgtgctactacgagaccaaacatactgaagaactggatagccatctgagggacgaacataaagtgtcacgcaacttcgaacttgttgggagggtcaacctcgatcaacttgagcagatgaaagaaaaaatggaatcttcaagctccgacgacgaggacaaagaggaggagatgaacagcaaagccgaggacagggagctcatgcgttttagtgaccatggagctgcactcaacaccgagaagcgatttccctgcgagttttgcggccgcgccttctcacagggctccgagtgggagcgacacgtgctccgtcacggcatggccctgaacgatactaagcaggtctccagagaagaaattcaccccaaggagatcatggaaaattcagtgaagatgccttccattgaggagaaggaggatgacgaagcaatcggtatcgacttttcattgaagaatgaaacagtggctatttgcgtggtaactgccgataagtcgctgctcgagaacgccgaggccaagaaagagtag

SEQ ID NO: 290861 - DNA, 7701 bp, Artificial Sequence
  derived and/or modified sequence
atggaggtgctgcagtgtgatggctgtgacttccgggcccccagctatgaggacctgaaggcccacatccaggatgtgcacacagccttcctgcagcccacagatgtggccgaggacaacgtgaatgagctgcgctgtggctctgtgaatgccagcaaccagacagaggtggagttcagcagcatcaaggatgaatttgccatcgccgaggacctgagcggccagaatgccaccagcctgggcaccggcggctactacggccacagccctggctactacggccagcacatcgccgccaaccccaagcccaccaacaagttcttccagtgcaagttctgtgtgcgctacttccgcagcaagaacctgctgattgagcacaccaggaaggtgcatggagcccaggccgagggcagcagcagcggcccccctgtgcccggcagcctgaactacaacatcatgatgcatgagggctttgggaaggtgttcagctgccagttctgcacctacaagagcccccggcgggcccgcatcatcaagcaccagaagatgtaccacaagaacaacctgaaggagaccacagcccctcctccagccccagcccccatgccagaccctgtggtgccccctgtgtccctgcaggacccctgcaaggagctgcctgctgaggtggtggagaggagcatcctggagagcatggtgaagcccctgaccaagagccggggcaacttctgctgtgagtggtgcagctaccagaccccccggcgggagcgctggtgtgaccacatgatgaagaagcaccgctccatggtgaagatcctgagcagcctgcggcagcagcaggagggcaccaacctgcctgatgtgcccaacaagagcgcccccagccccaccagcaacagcacctacctgaccatgaatgctgccagccgggagatccccaacaccaccgtgagcaacttccggggctccatgggcaacagcatcatgaggcccaacagcagcgccagcaagttcagccccatgagctacccccagatgaagcccaagagcccccacaacagcggcctggtgaacctgacagagaggagccgctatggcatgacagacatgaccaacagcagcgctgacctggagaccaacagcatgctgaatgacagcagcagtgatgaggagctgaatgaaattgattctgaaaatggcctgagcgccatggaccaccagaccagcggcctgtctgctgagcagctgatgggcagtgatggcaacaagctgctggagaccaagggcatccccttccgccgcttcatgaaccgcttccagtgccccttctgccccttcctgaccatgcacagaagaagcatcagccgccacatcgagaacatccacctgagcggcaagacagctgtgtacaagtgtgatgagtgccccttcacctgcaagagcagcctgaagctgggcgcccacaagcagtgccacacaggcaccaccagtgactgggatgctgtgaacagccagagcgagagcatcagcagcagcctgaatgaaggagtggtgtcctatgagagcagcagcatcaatggaaggaagagcggcgtgatgctggaccccctgcagcagcagcagcccccccagcccccacctcctcctcctcctcctccacccagccagccccagcccctgcagcagccccagcccccccagctgcagcccccccaccaggtgcccccccagccccagacccagcccccacccacccagcagccccagccccccacccaggccgcccccctgcacccctacaagtgcaccatgtgcaactacagcaccaccaccctgaagggcctgcgggtgcaccagcagcacaagcacagcttctgtgacaacctgcccaagtttgagggccagcccagcagcctgcccctggagaatgaaacagacagccaccccagcagcagcaacacagtgaagaagagccagaccagcatcctgggcctgagcagcaagaacaactttgtggccaaggccagcaggaagctggccaatgacttccccctggacctgagccctgtgaagaagaggaccagaattgatgaaattgccagcaacctgcagagcaagatcaaccagaccaagcagcaggaggatgctgtgatcaacgtggaggatgatgaggaggaggaggaggacaatgaggtggagattgaggtggagctggaccgggaggaggagcccacagagcccatcatcgaggtgcccaccagcttcagcgcccagcagatctgggtgcgggacaccagcgagccccagaaggagcccaacttcaggaacatcacccatgactacaatgccaccaatggagctgagattgagctgaccctgtctgaagatgaggaggactactacggcagcagcaccaacctgaaggaccaccaggtgagcaacacagccctgctgaacacccagacccccatctatggaacagagcacaacagcgagaacacagactttggagacagcggccgcctgtactactgcaagcactgtgacttcaacaacaagagcgcccggtctgtgtccacccactaccagaggatgcacccctacatcaagttctccttccgctacatcctggaccccaatgaccacagcgctgtgtaccgctgcctggagtgctacatcgactacaccaactttgaggacctgcagcagcactatggagagcaccaccctgaggccatgaatgtgctgaactttgaccacagcgacctgatctaccgctgccgcttctgcagctacaccagccccaacgtgcgcagcctgatgccccactaccagaggatgcaccccaccgtgaagatcaacaatgccatgatcttcagcagctatgtggtggagcagcaggagggcctgaacacagagagccagaccctgcgggagatcctgaacagcgcccccaagaacatggccaccagcacccctgtggcccggggcggcggcctgcctgccaccttcaacaagaacacccccaagaccttcaccccagaatgtgagaaccagaaggaccccctggtgaacacagtggtggtgtatgactgtgatgtgtgcagctttgccagccccaacatgcacagcgtgctggtgcactaccagaagaagcaccctgaggagaaggccagctacttccgcatccagaagaccatgaggatggtgtctgtggaccggggcagcgccctgagccagctgagctttgaggtgggcgcccccatgagccccaagatgagcaacatgggcagccccccaccaccccagcccccacctccagacctgagcacagagctgtactactgcaagcactgcagctacagcaacagatctgtggtgggcgtgctggtgcactaccagaagaggcaccctgagatcaaggtgacagccaagtacatccggcaggccccacccacagctgccatgatgagaggagtggagggcccccagggcagcccccggcccccagcccccatccagcagctgaacagaagcagcagcgagagagatggcccccctgtggagaatgagatgttcttctgccagcactgtgactatggcaacagaacagtgaagggcgtgctgatccactaccagaagaagcaccgggacttcaaggccaatgctgatgtgatccggcagcacacagccaccatccgcagcctgtgtgacaggaaccagaagaagccagccagctgtgtgctggtgagccccagcaacctggagcgggacaagaccaagctgcgggccctgaagtgccggcagtgcagctacaccagcccctacttctacgccctgaggaagcacatcaagaaggaccacccagccctgaaggccaccgtgaccagcatcatgcgctgggccttcctggatggcctcatcgaggccggctaccactgtgagtggtgcatctacagccacacagagcccaacggcctgctgctgcactaccagaggaggcaccctgagcactacgtggactacacctacatggccaccaagctgtgggccggccctgaccccagcccccccagcctgaccatgcctgctgaggccaagacctaccgctgccgggactgtgtgtttgaggccgtgtccatctgggacatcaccaaccactaccaggccttccacccctgggccatgaatggagatgaatctgtgctgctggacatcatcaaggagaaggatgctgtggagaagcccatcctgagcagcgaggagctggccggccctgtgaactgtgagaacagcatccccacccccttccctgagcaggaggctgaatgtccagaagatgcccggctgagccctgagaagagcctgcagctggccagcgccaacccagccatcagcagcaccccctaccagtgcaccgtgtgccagagcgagtacaacaacctgcacggcctgctgacccactacggcaagaagcaccctggcatgaaggtgaaggctgctgactttgcccaggacatcgacatcaaccctggagctgtgtacaagtgccgccactgcccctacatcaacacccgcatccacggcgtgctgacccactaccagaagaggcaccccagcatcaaggtgacagctgaggactttgtgcatgatgtggagcagagcgctgacatcagccagaatgatgtggaggagaccagccgcatcttcaagcagggctacggggcctaccgctgcaagctgtgcccctacacccacggcaccctggagaagctgaagatccactatgagaagtaccacaaccagcctgagtttgatgtgttcagccagagcccccccaagctgcctgtgcccctggagcctgagatgaccacagaggtgagccccagccaggtgtccatcacagaggaggaggtgggggaggagcctgtgtccaccagccacttcagcaccagccacctggtgagccacacagtgttccgctgccagctgtgcaagtacttctgcagcaccaggaaaggaattgcccggcactaccgcatcaagcacaacaacgtgcgggcccagcctgagggcaagaacaacctcttcaagtgtgccctgtgtgcctacaccaaccccatcaggaagggcctggccgcccactaccagaagagacatgacattgatgcctactacacccactgcctggccgccagcaggaccatcagtgacaagcccaacaaggtgatcatccccagcccccccaaggatgacagcccccagctgtctgaggagctgcggcgggctgtggagaagaagaagtgcagcctgtgcagcttccagagcttcagcaagaagggcatcgtgagccactacatgaagaggcaccctggggtcttccccaagaagcagcacgccagcaagctgggcggctacttcaccgctgtgtatgcagatgaacatgagaagcccaccctgatggaggaggaggagcggggcaactttgagaaggccgaggtggagggggaggcccaggagattgagtggctgcccttccgctgcatcaagtgcttcaagctgtccttcagcacagctgagctgctgtgcatgcactacacagaccaccacagccgggacctgaagagggacttcatcatcctgggcaatggcccccggctgcagaacagcacctaccagtgcaagcactgtgacagcaagctgcagagcacagctgagctgaccagccacctgaacatccacaatgaggagttccagaagagggccaagaggcaggagaggaggaagcagctgctgagcaagcagaagtatgcagatggagcctttgctgacttcaagcaggagcggcccttcggccacctggaggaggtgcccaagatcaaggagaggaaggtggtgggctacaagtgcaagttctgtgtggaggtgcaccccaccctgcgggccatctgcaaccacctgaggaagcacgtgcagtatggaaatgtgcctgctgtgtctgctgctgtgaaggaggctgatgatcctgcccacctgttcctggatggcctggaggccgccaaggatgccagcggggccctggtgggccgggtggatggagagcactgcctgctggatggcatgctggaggatgagaccaggcctgggggctaccactgcagccagtgtgacagagtgctgatgtccatgcagggcctgcggagccatgagaggagccacctggccctggccatgttcacccgggaggacaagtacagctgccagtactgcagctttgtgtctgccttccgccacaacctggacagacacatgcagacccaccacggccaccacaagcccttccgctgcaagctgtgcagcttcaagagcagctacaacagccggctgaagacccacatcctgaaggcccacgccggggagcacgcctacaagtgctcctggtgcagcttcagcaccatgaccatcagccagctgaaggagcacagcctgaaggtgcacggcaaggccctgaccctgccccggcccagaattgtgtccctgctgagcagccacagccaccacagcagccagaaggccaccccagctgaggaggtggaggacagcaatgacagcagctacagcgagcccccagatgtgcagcagcagctgaaccactaccagagcgctgccctggccaggaacaacagccgggtgtcccctgtgcccctgtctggagctgctgctggaacagagcagaagacagaagctgtgctgcactgtgagttctgtgagttcagcagcggctacatccagagcatcagaagacactacagagacaagcacggcggcaagaagctgttcaagtgcaaggactgcagcttctacacaggcttcaagagcgccttcaccatgcacgtggaggccggccacagcgctgtgcctgaggagggccccaaggacctgcgctgccccctgtgcctgtaccacaccaagtacaagaggaacatgattgaccacatcgtgctgcaccgggaggagcgggtggtgcccatcgaggtgtgccgcagcaagctgagcaagtacctgcagggcgtggtgttccgctgtgacaagtgcaccttcacctgcagcagtgatgagagcctgcagcagcacatcgagaagcacaatgagctgaagccctacaagtgccagctgtgctactatgagaccaagcacacagaggagctggacagccacctgagagatgagcacaaggtgtccaggaactttgagctggtgggccgggtgaacctggaccagctggagcagatgaaggagaagatggagagcagcagcagtgatgatgaggacaaggaggaggagatgaacagcaaggccgaggaccgggagctgatgaggttcagtgaccacggggccgccctgaacacagagaagcgcttcccctgtgagttctgtggccgggccttcagccagggcagcgagtgggagcggcacgtgctgcggcacggcatggccctgaatgacaccaagcaggtgtcccgggaggagatccaccccaaggagatcatggagaacagcgtgaagatgcccagcattgaggagaaggaggatgatgaggccatcggcatcgacttcagcctgaagaatgaaacagtggccatctgtgtggtgacagctgacaagagcctgctggagaatgctgaggccaagaaggagtag

SEQ ID NO: 290862 - DNA, 7701 bp, Artificial Sequence
  derived and/or modified sequence
atggaggtgctgcagtgcgacggctgcgacttccgggcccccagctacgaagacctgaaggcccacatccaggacgttcatactgcctttttgcaaccaactgacgtggctgaggacaatgtcaacgaactgcgttgcgggtcggtgaacgcgtccaaccaaaccgaggtggaattcagctcaattaaggacgaatttgctattgcagaagacctttcaggccagaacgcgacctccctgggtaccggagggtactacggccatagtccgggttactacgggcaacacatcgccgccaacccaaagccaaccaacaaatttttccagtgcaagttctgcgtccgttatttccggtcaaagaatttgcttatcgaacataccaggaaggtgcatggggctcaggctgaaggctcttctagcggcccccctgtgcctggatcgctaaactacaatatcatgatgcatgaaggatttggaaaggtgttctcttgtcagttctgcacttataagtcgccccggagagcacgcatcatcaagcaccagaagatgtaccataagaacaatctgaaggagactaccgcaccacccccggcacctgctcccatgccagatcctgttgtcccacctgtcagcctgcaggatccttgtaaggaacttccagctgaagtggtggaacgcagcattctggagtcaatggtgaagccactcaccaagagcaggggaaatttctgttgcgagtggtgttcctaccagacaccccgccgcgagcggtggtgcgatcacatgatgaagaaacatcgtagtatggtcaagatcctcagttcgctgcggcagcaacaggaagggaccaacttaccagatgttcctaataagtccgcgccttccccgacgagtaattctacctatctcaccatgaatgcagcctctagagaaattcctaacaccaccgtctccaacttccgggggagcatgggcaactctattatgcggcccaacagctcagcctcgaaattctcacctatgtcctatcctcagatgaagccaaagtctccccacaacagcggattggtgaatctgacagagcggtcgcgctacggcatgactgatatgacgaactcctcggcggacctagaaaccaattctatgcttaatgattcttctagtgatgaagagctgaatgagatagactctgaaaatggtctgtccgccatggaccatcagacatcggggctgtcagcagaacagctgatgggctccgatgggaataagctgctcgagacaaagggcattcctttcaggagatttatgaaccgttttcaatgtcccttttgccccttccttacaatgcaccggagaagcatcagtagacacatcgaaaacatccacctgtcaggcaaaacagcagtctacaaatgcgatgagtgtcccttcacttgcaagagctccttgaaactgggggcccacaagcaatgccacaccggtaccacctccgattgggacgccgtaaattcgcagtctgaaagcatttctagttcattaaacgaaggcgttgtgtcctacgaaagtagctccatcaatggaaggaagagtggagttatgttggatccactccagcagcagcagccaccacagccaccccctccaccccccccaccgccaccatcccagccacagccattacaacagccacagcctccccagctacagccccctcatcaggtcccaccacagcctcaaacccagccgcctccaacacaacagccccagcctcctactcaagcggcgccactgcatccgtataagtgtacaatgtgcaattactccactacaacgctcaagggcctcagggtgcatcagcaacacaagcactcattctgcgataaccttccaaagtttgaggggcagccttctagcctgccacttgagaatgaaaccgacagtcatcctagcagctcgaatacagtaaagaaatcgcagacgtctatacttggcttatcgtccaaaaacaattttgtggccaaagcttctcgcaagttggcaaatgacttcccgctggatctcagtcccgtaaagaagagaacccgaatcgatgagattgcctcaaatctacagagcaagataaatcaaaccaaacagcaggaggacgctgtgataaacgtcgaggacgatgaagaggaagaggaagacaacgaggttgagatagaggtcgagctggatcgtgaggaagaaccaacagaaccaattattgaggtaccaacatctttttcagctcaacagatatgggtacgggacacatcagaaccacagaaagaacccaactttagaaacatcactcatgactataacgccaccaatggcgcagagattgagctcactctgtcagaagatgaggaggactactacggttcaagcacaaacctcaaggatcaccaggttagcaatacagccttactgaatacccagaccccgatatacggcaccgagcacaattcggagaacactgattttggggattcaggacgcctgtactattgtaagcactgcgacttcaacaataagtcagcacggtctgtatctacgcattatcagaggatgcacccctatatcaaattttcctttagatatatcctcgacccaaatgatcatagcgccgtataccgctgcctggaatgttacattgactatacaaacttcgaagacttgcagcagcattatggcgagcaccaccccgaggccatgaatgtgctgaactttgaccacagtgacctgatttacagatgcaggttctgttcatacacgtcccctaatgtgagatccttgatgccgcactaccagaggatgcacccaaccgtgaagattaataatgctatgattttttccagctatgttgtggagcagcaggaagggttgaatactgaatcacagacactgagagaaattctaaattccgctcctaagaatatggcgacttctacaccagtggcacgggggggaggccttccagccaccttcaacaagaacactcctaaaacattcacccccgaatgcgagaatcagaaggaccctttagtcaatacagttgtggtctatgattgcgatgtctgtagttttgccagccctaatatgcactcagtgctcgtgcactatcagaaaaaacaccctgaagagaaggcaagttacttccgcatccagaaaaccatgcgcatggtcagcgtggaccgtggaagcgccctctcacaattatcatttgaggtcggggcccctatgtccccgaagatgtctaatatggggtcaccaccaccgccacagcctccgccccctgacctcagtactgagctctattattgcaaacattgttcatacagcaacagaagcgtggtgggtgtgctcgtgcactaccagaagcgtcaccctgagattaaagtaactgccaagtacattcgacaggcaccacctacagcagctatgatgcgaggcgtggaaggtccccaaggctcccctagaccacctgcgccaatacagcagctcaatcggtctagttctgaacgcgatggccctccagttgaaaacgagatgtttttctgtcagcactgcgactatgggaacaggacagtgaaaggcgttttaatccactaccaaaagaagcatagagacttcaaagccaacgctgacgtgatccgccagcatactgccactattagatctctgtgtgaccgcaaccagaaaaagccggccagctgcgttctggtcagcccaagcaatttggaacgggataagaccaaacttcgagctcttaagtgccgccagtgcagttatacctccccatatttctacgccctgaggaaacacattaagaaagaccacccagcccttaaagccaccgtgacgtctatcatgagatgggccttcctggatgggcttatagaggcaggctatcactgtgaatggtgcatatactctcacacagaacccaatggtctgctcctgcactatcagcgcaggcatcctgaacactacgtagattatacctatatggccacaaaattgtgggcagggccagacccttctccaccatccctcaccatgccagccgaggctaagacttacagatgccgggactgcgtgtttgaggccgtcagcatctgggatatcactaaccactaccaagccttccacccctgggctatgaatggtgatgagagtgttctactcgatatcattaaggagaaggacgcggttgagaagcccattctttcttcggaggaactggccggacccgtcaactgtgagaacagcatcccaactcccttccctgagcaggaggctgagtgcccggaagacgcaagactcagtcctgagaagagcctccagttagctagcgctaatccagccatctcctcgactccatatcagtgcaccgtctgtcaatcagaatacaacaaccttcatggactattaacccattacggtaaaaagcatcctggtatgaaggtcaaagctgctgatttcgctcaggatattgatataaacccaggagctgtttacaagtgtcgccattgtccatatattaataccagaattcacggcgtgttgacccactaccagaaacgccacccaagtattaaagtcacagcagaggattttgtgcacgatgttgaacagtctgcagacatctcacaaaatgatgttgaggaaacctcccggatctttaagcagggctacggagcctaccgatgcaagctgtgtccgtacacccatggaacgttggagaaactgaagatacactacgaaaaataccacaaccaacctgaatttgacgtgttctcgcagtcacccccgaaattgcctgtacccctggagcccgaaatgactacagaggtctcccccagtcaggtgagcatcaccgaggaggaagtaggtgaggagccagtttccacgagccatttctccacatcccacctcgtgagtcacacggtttttaggtgccagctctgtaagtacttttgctccacacgaaaggggatcgccagacattaccggataaaacacaacaacgtgagagcgcaacctgaaggcaagaataatttatttaaatgcgccctgtgtgcatacactaatcctatccgtaaaggactcgctgctcactaccagaaacgccacgacatagacgcttattacacccactgccttgccgcctccaggactattagcgataagcctaacaaagtgatcattccgagcccaccaaaggatgatagcccccagctgtcagaggaacttcgaagagccgtcgagaaaaaaaagtgcagtctgtgctcatttcagagttttagtaaaaagggaatcgtgagccactacatgaaaagacaccccggagtgttcccaaagaaacaacacgcatcaaaattaggaggatattttaccgcagtatacgcggacgaacatgagaagccgaccctcatggaagaggaggagcgcggcaatttcgagaaagccgaagtagagggcgaggctcaagaaattgagtggcttccatttagatgtataaaatgctttaaactgagtttcagcaccgccgaactgctgtgcatgcattacacagatcatcatagccgtgacctcaagagggattttattatactgggcaacggcccacgcctgcaaaacagtacttaccaatgcaaacactgcgatagtaaactgcaatcgacagccgagctgaccagccacctcaacatacacaacgaggagttccagaagcgtgcgaaacggcaggagaggcgtaaacaattgctcagcaagcaaaagtacgcagatggagcctttgcagatttcaagcaggaacggccattcggtcacctggaagaggtaccaaaaatcaaagagcggaaggtagtcggctacaagtgcaaattttgtgtcgaagtacatcccactctacgtgctatttgcaaccacttaagaaagcacgtacagtatggaaacgtgcccgcagtgtctgcagctgtgaaagaagctgatgatccggcccacttattcctcgacggtttggaagccgccaaggacgcctccggggctttggtggggagagtggacggcgagcattgtctgctcgacgggatgctggaagatgaaacacgcccaggaggatatcattgttctcagtgtgacagagttttgatgtccatgcagggactgagatctcacgaaagaagccacctggcactcgccatgtttacaagagaagataaatattcatgtcagtactgctccttcgtctcagccttccgccacaatctggaccgccatatgcagacacatcatggccaccataagcctttcaggtgtaagctgtgctcttttaaatccagctacaactcacgactgaagacccatatcttaaaggctcacgcaggagaacatgcgtataaatgttcatggtgcagtttcagcactatgactatctcccagcttaaagaacattcattgaaggtgcacgggaaagccctaactttaccccggccgaggatcgtcagcctattgagtagccatagtcaccactcctcgcagaaggcaactccagcagaagaagttgaggattccaatgattcctcttactccgagccccctgatgtccagcagcagctgaatcactaccaatcagcggctcttgcccgcaataatagtcgtgtgtctccagtgcccctcagtggtgcagccgccgggaccgaacagaagactgaggcagtcttacattgcgagttctgcgagttctcgtccggctatatacaatccatccgcaggcattaccgagacaagcatggcggtaaaaagctgtttaagtgcaaggattgtagcttctacaccggatttaaatctgcattcactatgcacgttgaggctggccacagcgccgtgccagaagaaggtcccaaggacctcaggtgccctctgtgtctttaccacaccaaatacaagagaaacatgatcgatcatatcgtgttgcatcgggaggaacgagtcgttcctatagaggtgtgtcgtagcaagctgagcaagtatctacagggagttgtctttaggtgtgataagtgtactttcacctgcagtagcgacgaatccctccagcagcacatagagaagcataatgagctgaagccttataagtgtcagctgtgctattatgaaacaaagcacacagaagaactagacagccacctccgggacgagcacaaagtgtctcgaaactttgaattggtggggagggtgaacctcgaccagctagaacagatgaaagaaaagatggagtcctcaagctcagacgacgaggataaggaggaagagatgaatagcaaggctgaggatcgggaactgatgcgcttttcagatcacggggccgcgctgaacaccgagaagcgtttcccctgtgagttctgtggtcgggcattctctcagggctctgagtgggagaggcacgtactgcggcacggaatggcactgaatgacactaagcaggtgagtcgcgaggaaatccaccctaaggaaattatggagaactcagtgaaaatgccctccattgaagaaaaggaagatgatgaggctattgggatcgacttcagcctcaaaaatgagactgtcgccatttgtgttgtgacagccgacaagagcctgctggagaatgccgaagccaaaaaggagtag

SEQ ID NO: 290863 - DNA, 7700 bp, Artificial Sequence
  derived and/or modified sequence
atggaagtactgcaatgcgatggatgtgatttcagggccccttcatacgaggatctcaaagcacatattcaggatgtgcacaccgctttcttgcagcctacagacgttgcggaggataatgtcaatgagctccgttgcggctctgttaacgctagcaatcagaccgaagtcgaattctcttcaatcaaggacgagttcgccatcgcagaggacctgtcaggtcagaacgccacctctttaggtaccggtgggtactatggacactcccccggttactacggacagcacatagctgcaaacccaaagccgactaataagttttttcagtgcaaattttgtgtgaggtatttcagatccaaaaatctcttgatcgagcacacaaggaaggtgcacggtgctcaggcagaaggctcatctagtggaccacctgtccccggttccctgaactataacatcatgatgcatgagggtttcgggaaagtgtttagctgccagttctgcacatataaatctcctcggagggcgagaattattaaacaccagaagatgtaccataaaaacaacttgaaggagacaacggcccctccccctgctcctgcccctatgcctgatcccgtagtccctcccgtcagtctacaagatccgtgtaaagagctgcctgctgaagtcgtcgaacggagcattctggaaagcatggttaagcctcttacaaagagtcgaggcaacttttgctgcgagtggtgttcttaccagacccctaggcgggaaaggtggtgcgatcacatgatgaagaagcatcgatctatggtgaagatcctctcaagccttcgacagcagcaggagggaactaatttgccagacgtgccgaataaatccgctccttcacctaccagtaatagtacatacctgacaatgaacgccgcaagccgcgagatccctaacactaccgtgagcaatttcagaggcagcatgggaaattccataatgaggccaaactcctccgcctccaaattttcccccatgagctaccctcagatgaagcctaagtcaccccataacagtgggttagtgaatctcaccgaacgctcacggtacggcatgaccgacatgactaacagttcggccgacttagaaacaaacagcatgttgaacgacagttcctcagacgaagagctgaatgagattgatagtgagaacggcttgagtgccatggatcatcagacctctggattgagcgcagagcagttgatgggttccgacggaaacaagctgctggaaactaagggtatccctttcaggcgcttcatgaataggttccaatgccctttttgcccttttctgaccatgcaccgcagaagtattagcaggcatatcgagaacattcacttgagcgggaaaactgcagtgtacaaatgcgatgagtgcccattcacatgcaagtcctcgttgaaactgggcgcacataaacagtgccatactgggactacgtctgattgggacgcggttaacagtcagagtgagtctatctctagttccttgaatgaaggagtcgtgagctacgagtcctcgtccattaatggacgcaagagcggggttatgctcgacccactgcaacagcaacaaccccctcagcctcctcccccaccgcctccccctcccccatcccagccccagcccctgcagcagcctcaaccaccacagctgcaaccccctcaccaggtacctccacagccccagacccagccacccccaactcaacagccacaaccccctacccaagctgccccactgcacccttacaagtgcacaatgtgcaactattcaaccacgaccctcaagggattacgagtgcatcagcagcataagcattcattttgcgacaacctgccaaagtttgaggggcaaccatcctcattgcctctggagaatgagacggactctcatccttcatcgagcaataccgtgaaaaagtctcagacaagcattctggggttgagcagtaagaataattttgttgccaaggcatctcggaagttggccaacgacttccctctggatctgtcacctgtgaagaaaaggactcggatagacgagattgcatccaatcttcagagtaagatcaatcaaaccaagcaacaggaagatgccgtcatcaacgttgaggacgacgaagaggaagaggaggataacgaggttgagatcgaagtggagttagacagggaggaagaacccacagaaccgatcattgaggtacccaccagcttctctgctcagcaaatctgggtgagagatactagcgaaccacagaaggagccaaactttagaaatattacacacgattataacgccactaatggagccgagattgagctgactctctctgaagatgaagaggactattatggctcctctaccaacctcaaggaccaccaggtatcaaacaccgctcttctcaacacccagactcctatttacggcaccgaacacaacagtgaaaatactgatttcggcgatagtggacggctttattactgcaaacattgtgatttcaataataaaagcgcacgcagtgtgagtacacactaccagcggatgcatccctacatcaagttcagcttcaggtacattctcgacccaaatgatcattccgctgtgtatcgctgtctcgagtgctacattgactatacaaactttgaggacctccagcagcactacggtgaacatcacccagaggccatgaatgtgctgaattttgaccatagtgacttgatatacaggtgcaggttctgcagttacacatctccaaatgtccgctcgttgatgcctcactatcaaaggatgcatcctacagtaaagatcaataacgcaatgatcttctctagctacgttgttgagcagcaagagggcctgaataccgagtctcagactttacgggaaatactcaactccgcccctaagaatatggcaacttcaacccctgtcgctcgcggtgggggactgcctgcaacgttcaacaaaaatacaccaaaaacgttcacccctgagtgtgaaaatcagaaggatccactcgtcaacactgtggtagtttacgactgtgatgtttgctccttcgcctctccgaatatgcactctgtgctggtgcactatcagaagaaacatcccgaagagaaggcttcctattttagaatccaaaagaccatgaggatggtcagtgtggatcggggaagcgctttatcccagctctcttttgaggtcggtgctcccatgagtccaaagatgagtaacatgggaagccctccacctcctcaacctccccctcctgacctgagcaccgagttatattactgcaagcactgcagttacagtaaccgctcagtggtaggtgtgctcgtccactaccagaagcgccacccagagattaaagtgaccgcaaaatacatcaggcaggctccccctacagcggcaatgatgcgcggagtcgaggggccacagggttctccaaggccccctgctcctattcagcaacttaatagaagcagttctgaaagagacgggcctccagtggaaaatgaaatgtttttctgtcagcactgcgattacggcaatcggacagtgaaaggagtgctcatccactatcagaagaagcaccgcgacttcaaggcgaacgcggacgtgattcggcaacacaccgctactattcgttcattatgtgaccgcaatcaaaagaagcccgcttcatgcgtgctcgtgtccccatctaacttggaacgcgacaagaccaaattgcgggcattgaagtgtcgtcagtgcagctatacctctccctatttctacgctctccggaaacatatcaaaaaagatcaccctgccctgaaagccactgtgactagcattatgcgttgggctttcttagatggattgatcgaagctggttatcactgtgagtggtgcatctactcccatactgagccaaatggcctattgctccactaccagcgaaggcatcctgaacattacgtggattatacgtatatggctacgaaattgtgggcgggacccgacccatcccccccaagcctcaccatgccagccgaagccaagacctaccgatgtagggactgtgtgtttgaagccgtgtcaatttgggatatcaccaaccactaccaagcattccacccatgggccatgaacggagacgagtccgtgcttttggatattatcaaggagaaggacgccgttgagaagcctatcctgtcttcagaagaactcgctggacctgtcaattgcgaaaacagtatccctacacctttcccagagcaggaggccgagtgcccagaagatgcgagactatcccccgaaaagtcgctccagcttgcttccgccaacccggcaatctcctcaactccctaccaatgtactgtgtgccagagcgaatataacaacttacacgggttactcactcattatggcaaaaagcaccccggaatgaaggtgaaggccgcagacttcgcccaagatattgacataaatcctggagcagtgtataagtgcagacattgcccttacattaatacccgcatacatggagtcttaactcactatcaaaagcgtcatccttcaatcaaagtcaccgcggaggatttcgtccacgacgtggagcagtcagcggacattagccagaacgatgtcgaagaaaccagccgcatcttcaagcaagggtacggagcttacagatgtaagttgtgcccatacacccacggtaccttggaaaaacttaagatccattacgagaagtaccataatcaacccgagtttgatgttttttcgcagagccctccgaaattgcccgtgcccctggagcccgagatgacaaccgaggtgagtcccagccaggtgagcataacagaggaggaggtaggcgaggagccagtctcaactagtcacttcagcacgtcccatctggtgtcacacacagtttttcgctgccagctctgcaagtatttctgcagtactcgcaagggaatcgccaggcactacagaattaagcataacaatgtcagagcccagcctgaggggaagaacaacctctttaagtgcgctctgtgcgcttacacaaatccaatacgcaaggggcttgcagctcactatcagaagagacatgacatcgatgcgtattatacccactgccttgccgcatcccggactattagcgataaacccaacaaagttattatccccagccctccgaaggatgacagcccacagctgtctgaggaactgcgtagggctgtagagaaaaaaaaatgctccctatgctctttccaatcatttagtaaaaagggaatcgtgtcacactatatgaagcggcatcccggagtatttccaaaaaaacagcatgcttctaaactgggcggatatttcaccgccgtctacgctgatgagcacgagaaacccacgctcatggaggaagaggaacgcggaaattttgagaaagctgaggtcgaaggcgaggcccaagagattgaatggcttccttttcgctgcattaaatgctttaagctatctttttcgaccgcagagctgctttgcatgcattatactgaccatcactctagagatctgaagcgtgatttcataatcttgggcaatggccctcgactccagaactcgacttaccagtgcaagcactgcgattccaaattgcagtctactgccgagctaactagccacctcaatatccacaatgaggaattccaaaagagagctaagaggcaggagagaagaaaacagctcttgtctaaacagaaatatgcagacggggcatttgccgattttaagcaggaacggccatttgggcacctggaggaggttccaaaaatcaaagaacggaaggtcgttggatacaaatgtaagttctgcgtggaggtgcaccccaccctcagggccatctgcaaccatctgcggaagcatgtacaatacgggaacgtgcctgctgtttcggccgcagtcaaagaggccgatgatcctgctcatctcttcttagacggcctggaagcagccaaagatgcttcgggagcactggtgggccgagttgatggcgaacactgtctcttggacggcatgctggaagacgagactaggcccggtggataccactgctctcagtgtgacagggtgttaatgtctatgcagggtctaagaagccacgagcgttcacatctggctcttgcgatgtttacaagggaagataagtatagttgtcagtactgcagcttcgtctccgccttcagacacaacttggacaggcatatgcagacacaccacggtcaccataagccattcagatgtaagctgtgctccttcaaaagttcgtacaacagccggcttaaaacgcacattctgaaagctcatgcaggagaacatgcctacaagtgcagctggtgcagcttttctacaatgacaatcagtcagcttaaagagcacagtcttaaagtgcacggcaaggccctaaccctgccacgccctcggatcgtcagcttactcagtagccatagccaccatagctctcaaaaggcgactcccgcagaagaggttgaggactccaacgacagcagctactctgagccacccgacgtccagcaacaattaaatcattaccagtctgctgcactcgcacgtaacaattctcgagtcagccctgtacctctgagtggcgctgccgcaggaacagaacagaaaacagaagccgttctgcattgcgaattttgcgagtttagctccggctacattcagagtatcaggaggcattaccgagataagcatgggggaaagaagctctttaaatgcaaagactgttctttttatacgggcttcaaatctgccttcacgatgcacgttgaggctgggcattccgccgtccccgaagagggaccgaaagacctgcgatgcccgctttgcctgtaccacaccaaatataaaaggaatatgatagaccacatcgtgctgcacagagaggagcgggtggtaccaatcgaggtgtgtcggtctaagctgtccaaatatctccagggagtcgtgttcaggtgtgataagtgcacatttacgtgttctagtgatgaatctttacagcagcacatcgagaagcacaatgaactcaagccctataaatgtcagctttgctattatgagacaaagcacaccgaggaacttgattctcatctccgggacgagcataaggtaagccggaacttcgaactcgtcggtcgagttaatcttgaccaattagagcagatgaaggagaagatggagagctccagctccgatgatgaggataaagaagaagagatgaacagtaaagccgaagatcgggagctgatgaggtttagtgaccatggtgctgctctgaacactgaaaaaaggttcccctgcgagttctgcggtagagcattttcccaaggatcagagtgggaacgacacgtccttaggcacgggatggccctcaatgacacgaaacaggttagtcgtgaggagatacatcctaaggagatcatggagaattccgttaaaatgccttccatcgaggagaaggaagatgatgaagcgattggaatcgacttctccctcaagaatgaaaccgtggccatttgcgttgtaactgcagacaaatccttattagagaacgccgaagctaaaaaggagta

SEQ ID NO: 290864 - DNA, 8442 bp, Artificial Sequence
  derived and/or modified sequence
ggagagggagggagggagagagagagagagggagagagacggatatctcaggtcatctgcagctgcagcgagtctgaggagccgaggaaggcagggaagatggcgatcctccattgctgagacccggcagaagcacatgagactcccaaacaacttccacaacaataacccgagcaggaagaggagaaagagaaagaggataaggaggcggtggggctggagaacccgaagcacctcccggcgccgggacgcttcttctgttcctaatgtgagaggctagacccagatcatggaggtgcttcagtgtgatggctgtgatttccgagccccgtcttatgaagatctcaaggcacacattcaggatgtccacacggcatttctgcagccaactgatgttgctgaggacaatgtgaatgagctacgatgtgggtccgtgaatgccagtaatcagacagaggtggagttttcttctataaaggatgaatttgccattgcagaagatttatcaggtcaaaatgcaacttcattggggaccggaggttactatggccacagtccaggatattatggtcagcatattgccgctaatcccaaaccaacaaacaagttttttcaatgcaagttctgtgtacgctacttcaggtcaaaaaacctcctcatagaacacactagaaaggtccatggagctcaagctgaagggagttcatcaggaccccctgtcccgggatccttaaattataatatcatgatgcacgagggatttggaaaggtcttctcttgccagttttgcacatacaagtcaccaagaagggcaagaataattaagcatcagaagatgtatcacaaaaacaatttgaaggagaccactgctcccccacctgctcctgctccaatgccagaccctgtggttccgcccgtatcactgcaggacccctgcaaggaactgccagcagaggttgtggagcgcagcatcttagagtctatggtcaagcctttgaccaaatctcgaggcaacttttgttgtgagtggtgcagctaccagaccccccgccgagaacgctggtgtgaccacatgatgaagaaacaccgcagtatggtcaagatcctttccagtctcagacagcaacaagaaggaactaatctacctgatgtgccgaacaagagtgcccccagccccacttccaactccacctatctgaccatgaatgctgcaagccgggagatacccaatactaccgtctccaacttcaggggctccatgggcaactccatcatgagacccaattcttcagcttccaagttttcgcccatgtcttaccctcagatgaagccgaagtcacctcacaattctggtctagttaacttgacagagagatcccgttatggaatgactgacatgaccaattcttctgctgacctggaaactaacagcatgctaaatgactctagttctgatgaagagttaaatgaaatagacagtgagaatggtttaagtgctatggatcaccagacatcaggcctgtctgcagagcagctgatgggctcagatggcaacaaattattggagaccaaggggattccatttagaagattcatgaataggttccagtgccccttttgtcctttcctcaccatgcatcgacgtagcatctctcgtcacatagaaaacatccacttatctggaaagacagctgtctacaaatgtgacgaatgtccgtttacttgcaagagctcgttgaaacttggggctcacaaacagtgtcacacgggtacaacgtcagattgggatgctgtgaattcccagagtgaaagcatttcttcctcactgaatgaaggtgtggtgtcttatgagagctcaagcatcaatggtagaaagtcaggagtcatgttggatcccttgcagcagcaacagccaccgcagccaccaccaccgccgccgccaccaccaccatcacagccacagccactgcagcagccacagccaccacagctgcagccaccacatcaggtgccaccccagccacaaacacagccaccaccaacgcagcagccacagccacccacacaagccgcacctctgcacccatacaaatgcaccatgtgtaattactccaccacaactctgaaagggctaagagtccatcagcagcataaacattcattctgtgacaacttgccaaaattcgaggggcagccctcaagcctaccattggaaaatgagacagacagccacccctcttccagcaacactgtgaagaaaagtcagacctcaattcttgggttgtcctccaagaacaattttgtagctaaagcctctaggaagctcgccaatgactttcctctagatttgtcacccgtgaagaagagaaccaggattgacgagatagcaagcaaccttcagagcaaaattaaccaaaccaaacagcaggaagatgcagtgatcaatgttgaggatgatgaagaggaagaggaagacaacgaagtcgagatagaggttgagttggacagggaggaagaaccgacagaacccatcatagaggttcccacttccttttctgcccaacagatatgggtaagagataccagtgagccccagaaagagcccaacttcagaaacatcacccacgattacaatgccaccaatggggctgagattgagctcaccctttctgaagatgaagaggattattatggctcctcaacaaacttgaaagatcaccaagtttccaatactgctctgctgaatacccaaactcccatctatgggactgagcacaatagtgaaaacacagactttggtgactctggaaggctttactattgtaaacactgtgactttaacaacaaatctgcccggagtgttagcacccactaccaacgaatgcacccatacattaaattcagctttaggtacatcttggaccccaatgatcacagtgcagtgtacaggtgcctggaatgctacatcgattacaccaacttcgaagatctccagcagcattatggcgagcaccacccagaagccatgaatgtactcaactttgatcactcggacctgatctaccggtgtcggttttgttcatacacgagcccgaatgttagaagcctgatgccacattaccaaagaatgcatcccacggtgaagatcaacaacgcgatgatattttcaagctatgtcgtggagcagcaggaagggctgaatacagaatcccagaccctgagggagattctgaattcggctcccaagaacatggcgacttccacacctgtggctcgtggtggtggtttgccagctacgttcaacaaaaacactcctaagacctttactcctgaatgtgaaaatcagaaggaccctttggtcaacactgttgttgtttatgattgtgatgtttgttcgtttgcaagccccaacatgcattctgtcttggttcattatcagaagaaacaccccgaagaaaaggcttcctactttaggatccagaaaactatgcgaatggtgtctgtggacaggggctctgccctttctcaattatcatttgaggtgggtgctccaatgtctcccaaaatgtccaacatgggttccccaccccccccacaacccccgccaccagacctcagtactgagctttactactgcaaacactgttcctacagcaatcggtcagttgtgggagtgcttgtccactaccagaaaagacacccagaaataaaggttactgccaaatatatcagacaggctcctcccacagctgcaatgatgagaggggtcgaagggccccaaggctccccccggccacccgcccccatacaacagctgaaccgaagcagctctgagagagatggccctcctgtggagaatgagatgttcttttgccagcactgtgattatgggaaccggacggtcaaaggggtactcattcattatcagaagaagcaccgagacttcaaggccaatgcagatgtgatccggcagcatacggccaccattcgaagcctctgcgaccgaaatcagaagaagcctgccagctgcgtgcttgtctccccctctaatctggagcgggacaaaacgaaactccgagcactcaaatgtaggcagtgctcatatacctccccctacttctatgcactgaggaagcatatcaagaaagaccaccccgccctgaaagccacagtcacgtccatcatgcgatgggcatttctagatggcttgatagaagctggctaccactgcgagtggtgcatctactcccatacggagcccaacggtttgctcctgcattaccaacggaggcatccagaacactatgttgattacacctacatggctactaaactgtgggctgggccagacccatcccctccctctctcacaatgccagccgaagccaaaacctacagatgcagggactgtgttttcgaagctgtttccatctgggacatcactaatcactaccaagcattccacccctgggccatgaatggtgatgagtcagtgctactggacatcatcaaggagaaagatgctgtggagaagcccattctttcatccgaagagttggcaggccctgtgaattgtgaaaacagtatacccacccctttcccggagcaggaagctgaatgtccagaggatgcaagactgtcccctgagaaaagcctgcagctagcttcagccaaccccgccatatcctccaccccataccagtgcacggtatgccaatctgagtataacaacttgcacggccttctcactcattatgggaagaagcaccctggcatgaaagtgaaggctgctgactttgcccaggacattgacatcaacccaggtgccgtctacaaatgcaggcattgcccatacatcaacacccgcatccacggcgtactgacccactaccagaagcgacacccgtccatcaaggtgaccgctgaggactttgtgcacgacgtagagcagtctgctgacatatcccagaatgacgtggaggagacgagcaggatcttcaagcaagggtatggcgcctaccggtgcaaactgtgtccgtacacacacggcactttggagaaactaaaaatccactacgagaagtatcacaatcagcctgaatttgatgtcttttcccagtcgcccccgaagctgccagtccccctcgagcccgagatgaccactgaagtgagcccttcccaagtctccatcactgaggaggaggtgggagaggagcccgtgtccacttctcacttctctacctcccacctggtctcccacactgtgttccggtgccagctctgcaagtacttctgctccacgaggaaggggatcgccaggcactaccgcatcaagcacaataatgtccgagcccagccagaaggcaagaacaacctcttcaagtgtgccctgtgtgcctacaccaaccccatccgcaaaggtctggcagcccactaccagaagcgccacgacattgatgcgtattacactcactgcttggcagcctccaggaccatcagcgacaagcccaacaaagtgatcatcccatccccgcccaaggacgactcccctcagctgagcgaggaactccggcgggcagtggagaagaaaaagtgctccttgtgctctttccagtcgttcagcaagaagggcatcgtgtcccattacatgaaacgccacccaggggtgttcccaaagaagcagcacgccagcaagttggggggctacttcacggccgtctatgcagatgagcatgagaagcccacactgatggaagaagaggagagaggcaactttgagaaagccgaggtggagggtgaagctcaggaaatcgagtggctcccattccgctgcatcaaatgcttcaagctgtcctttagcactgcagagctgctgtgcatgcattacactgaccaccacagtcgggacctaaagagggacttcatcattctgggcaacggcccccgcttgcagaactccacctaccagtgtaagcactgtgatagcaaactgcaaagcacagccgagctgacctcacacttgaacattcacaatgaggaattccagaagcgtgccaaacgtcaggagaggaggaaacagcttttgagcaagcagaaatatgcagatggtgcttttgcagatttcaaacaagagaggccttttggtcacttagaagaggtgccaaagatcaaggagaggaaagtggtgggctacaaatgtaaattctgtgtggaagtgcacccaacgctccgagccatctgcaatcacctccgaaagcacgtccagtatggcaatgtcccagctgtgtcagctgctgtgaaggaggcggatgaccctgcccacttgttcctggatggattggaagcagccaaagacgccagtggcgccctggtgggccgggtggatggtgaacactgcttgcttgatggaatgttggaggatgaaacccggccggggggataccattgcagtcaatgtgacagagtcctgatgtccatgcaggggctgcgttctcatgagaggagccacctggccctggccatgtttacccgcgaggacaagtacagctgccagtattgctcgtttgtttctgctttcaggcacaatttggatcgccatatgcaaacccaccacggacaccataaaccattccgatgcaaactctgctccttcaagtcctcctataacagccggctgaaaacacatatactcaaagctcatgctggtgagcatgcctacaagtgttcttggtgctcattctccaccatgacaatcagccagctgaaggaacactccctcaaggtccacggaaaagccctgaccctccccaggccacggatcgtcagtctcctctcctcacactcccaccactcctcccaaaaagctaccccggctgaagaagtggaagactccaatgactcatcatattcagagcccccagatgttcagcagcagttgaaccactatcagtcagctgccctggcaaggaacaacagccgtgttagccctgtgcctctttctggggctgctgctggcactgagcagaaaactgaagccgtgcttcactgcgaattctgtgaattctcctccggctacatccagagcatcaggcgtcattaccgggacaagcatggtgggaagaagcttttcaagtgcaaagactgctccttttacacaggctttaaatctgcttttactatgcacgtggaagctgggcactcagcagttcccgaggagggccccaaagatcttcgctgtcctctctgcctctatcacaccaaatacaagcgcaacatgattgaccacatcgtgctgcaccgagaagagcgtgttgtccccattgaagtttgccggtccaaactgtccaaatacttgcagggagtagttttccgctgtgataagtgtaccttcacctgctccagtgatgagagcctccagcaacatatagaaaagcacaatgaactgaaaccttacaaatgccagctctgctactatgagaccaagcacacggaggaactggacagccaccttcgggatgagcataaggtaagccgtaactttgagctggttggacgggttaacttggatcagctggaacagatgaaggagaaaatggagagctccagcagcgatgatgaggacaaggaagaagaaatgaacagcaaggctgaagacagagagctgatgagattttctgaccacggggctgctcttaacactgagaagcgttttccatgtgaattttgtggacgggcgttttcacagggctctgagtgggaaagacatgtgctgagacacggcatggcattgaatgacaccaagcaggtgagcagagaagaaatccacccaaaagagatcatggagaacagtgttaaaatgccctccatagaggaaaaggaagatgacgaggccattgggatagacttttccctaaagaatgaaacagtagccatctgtgtagtaactgccgacaaatctctcctggagaatgcagaggccaaaaaagaatgagcgtttggtgaaattcttaatcaaaccttacttgaacagtgatgaaaaagtgggagggctggcttgggctgagaagggagggacagaaaagagaagacagaacaaagctgctttttaggactgaacaatctattttcaaagcactggtacctgtgtgagtgagtatgtaaattaaagttatttaaatggttggaatatgtggctccttttccatcactacatcttttcttccggatcttcatcatggaagtttcatttgttgcggaatatggaagcacctcccaatggtacggtgcaccctgtggtggtcttggacagtatgtggaaacagaagctccatgacggtagaagacttctcattggggagcaactttttgacgcacaacttttggtgcgtttttctagttttaataccttaagctttttcaagacctaactgcagccgctttggg

SEQ ID NO: 290865 - protein, 208 aa, Artificial Sequence
  derived and/or modified sequence
  misc_feature (1)..(1): Xaa can be any naturally occurring amino acid
XEHSLKVHGKALTLPRPRIVSLLSSHSHHSSQKATPAEEVEDSNDSSYSEPPDVQQQLNHYQSAALARNNSRVSPVPLSGAAAGTEQKTEAVLHCEFCEFSSGYIQSIRRHYRDKHGGKKLFKCKDCSFYTGFKSAFTMHVEAGHSAVPEEGPKDLRCPLCLYHTKYKRNMIDHIVLHRGNLSNLVFLDAAGGRQQRWPSRDALSEWQ

SEQ ID NO: 290866 - protein, 463 aa, Artificial Sequence
  derived and/or modified sequence
MQTHHGHHKPFRCKLCSFKSSYNSRLKTHILKAHAGEHAYKCSWCSFSTMTISQLKEHSLKVHGKALTLPRPRIVSLLSSHSHHSSQKATPAEEVEDSNDSSYSEPPDVQQQLNHYQSAALARNNSRVSPVPLSGAAAGTEQKTEAVLHCEFCEFSSGYIQSIRRHYRDKHGGKKLFKCKDCSFYTGFKSAFTMHVEAGHSAVPEEGPKDLRCPLCLYHTKYKRNMIDHIVLHREERVVPIEVCRSKLSKYLQGVVFRCDKCTFTCSSDESLQQHIEKHNELKPYKCQLCYYETKHTEELDSHLRDEHKVSRNFELVGRVNLDQLEQMKEKMESSSSDDEDKEEEMNSKAEDRELMRFSDHGAALNTEKRFPCEFCGRAFSQGSEWERHVLRHGMALNDTKQVSREEIHPKEIMENSVKMPSIEEKEDDEAIGIDFSLKNETVAICVVTADKSLLENAEAKKE

SEQ ID NO: 290867 - DNA, 627 bp, Artificial Sequence
  derived and/or modified sequence
tgagagcacagcctgaaggtgcacggcaaggccctgaccctgcccagacccagaatcgtgagcctgctgagcagccacagccaccacagcagccagaaggccacccccgccgaggaggtggaggacagcaacgacagcagctacagcgagccccccgacgtgcagcagcagctgaaccactaccagagcgccgccctggccagaaacaacagcagagtgagccccgtgcccctgagcggcgccgccgccggcaccgagcagaagaccgaggccgtgctgcactgcgagttctgcgagttcagcagcggctacatccagagcatcagaagacactacagagacaagcacggcggcaagaagctgttcaagtgcaaggactgcagcttctacaccggcttcaagagcgccttcaccatgcacgtggaggccggccacagcgccgtgcccgaggagggccccaaggacctgagatgccccctgtgcctgtaccacaccaagtacaagagaaacatgatcgaccacatcgtgctgcacagaggcaacctgagcaacctggtgttcctggacgccgccggcggcagacagcagagatggcccagcagagacgccctgagcgagtggcagtag

SEQ ID NO: 290868 - DNA, 1392 bp, Artificial Sequence
  derived and/or modified sequence
atgcagacccaccacggccaccacaagcccttcagatgcaagctgtgcagcttcaagagcagctacaacagcagactgaagacccacatcctgaaggcccacgccggcgagcacgcctacaagtgcagctggtgcagcttcagcaccatgaccatcagccagctgaaggagcacagcctgaaggtgcacggcaaggccctgaccctgcccagacccagaatcgtgagcctgctgagcagccacagccaccacagcagccagaaggccacccccgccgaggaggtggaggacagcaacgacagcagctacagcgagccccccgacgtgcagcagcagctgaaccactaccagagcgccgccctggccagaaacaacagcagagtgagccccgtgcccctgagcggcgccgccgccggcaccgagcagaagaccgaggccgtgctgcactgcgagttctgcgagttcagcagcggctacatccagagcatcagaagacactacagagacaagcacggcggcaagaagctgttcaagtgcaaggactgcagcttctacaccggcttcaagagcgccttcaccatgcacgtggaggccggccacagcgccgtgcccgaggagggccccaaggacctgagatgccccctgtgcctgtaccacaccaagtacaagagaaacatgatcgaccacatcgtgctgcacagagaggagagagtggtgcccatcgaggtgtgcagaagcaagctgagcaagtacctgcagggcgtggtgttcagatgcgacaagtgcaccttcacctgcagcagcgacgagagcctgcagcagcacatcgagaagcacaacgagctgaagccctacaagtgccagctgtgctactacgagaccaagcacaccgaggagctggacagccacctgagagacgagcacaaggtgagcagaaacttcgagctggtgggcagagtgaacctggaccagctggagcagatgaaggagaagatggagagcagcagcagcgacgacgaggacaaggaggaggagatgaacagcaaggccgaggacagagagctgatgagattcagcgaccacggcgccgccctgaacaccgagaagagattcccctgcgagttctgcggcagagccttcagccagggcagcgagtgggagagacacgtgctgagacacggcatggccctgaacgacaccaagcaggtgagcagagaggagatccaccccaaggagatcatggagaacagcgtgaagatgcccagcatcgaggagaaggaggacgacgaggccatcggcatcgacttcagcctgaagaacgagaccgtggccatctgcgtggtgaccgccgacaagagcctgctggagaacgccgaggccaagaaggagtag

SEQ ID NO: 290869 - DNA, 627 bp, Artificial Sequence
  derived and/or modified sequence
taggagcactctctgaaggtgcacggcaaagctctgacactgccaaggccccgcatcgtcagtctgttgtctagccacagccatcattccagccaaaaggcgactccagccgaggaggtggaggatagcaatgatagctcatatagcgagccccccgacgtccaacagcagttgaaccattaccagagcgcagccttggctagaaacaacagtcgggtgtcccccgttcccctgtctggagcagccgcgggaacggagcagaaaacagaggcagtgctgcactgcgagttctgtgagtttagttcaggctatatccagtccatcaggcgccattatcgggataagcatgggggcaaaaaacttttcaaatgtaaggactgttccttctatactgggtttaaatccgccttcaccatgcatgtcgaggccgggcacagcgctgtgcccgaagaaggccctaaagatctgagatgccctctgtgcctgtaccacactaagtacaagaggaacatgatagaccacatcgtgctgcatagaggcaatctgtccaatctcgtatttttggatgcagcagggggtcgacagcaaagatggccaagccgggatgccctgtccgagtggcagtag

SEQ ID NO: 290870 - DNA, 1392 bp, Artificial Sequence
  derived and/or modified sequence
atgcagactcatcacgggcatcataagcctttccgttgcaaattgtgcagcttcaagtcttcgtacaattcccgcctgaagacccatatactgaaagcacatgccggcgaacacgcctacaagtgctcttggtgcagtttctctactatgaccatttctcagctcaaggaacactctctgaaggtgcatggcaaagcgctgacgttgcctcgcccaagaattgtgtccctcttgtccagtcatagtcaccactcctcacagaaggccacccctgccgaagaggtggaagattctaacgattccagctactctgagccacctgatgtgcagcagcaattgaaccactaccaaagcgctgctctagccagaaataattcgcgagtctcccccgtccccttgtcaggcgccgcggccggcactgagcagaagaccgaggcagtactccattgcgaattctgcgaattcagctccggatacatccagtccatccgacgccactatcgcgacaagcatggcggaaagaaactgttcaagtgtaaggactgctcgttttacactggctttaagtcagctttcaccatgcacgtggaggcgggacattccgctgtaccagaagaagggccgaaggatctgcgctgtccgctctgtctgtatcatactaagtacaagaggaatatgattgaccacatcgtgttgcatagggaggaacgggtggtcccaatcgaagtatgccgcagcaaactctccaagtatctgcagggagtggtttttcgttgtgataaatgcacatttacttgctcatctgatgagtcgctgcagcagcatatagaaaaacacaatgaattgaagccttacaagtgtcaactgtgttattacgaaactaagcatacagaggaattggatagtcacttgcgggacgagcacaaggtttctcgaaacttcgagttggtcggtcgggttaacctggaccagctggaacaaatgaaggagaaaatggagtccagtagttctgacgacgaggacaaagaagaagagatgaacagtaaggccgaggaccgggagctgatgagattcagcgaccacggagctgcgttgaataccgaaaagaggttcccatgcgaattttgcggccgggccttcagtcaggggagtgagtgggagcgccacgtcctccgacacggcatggccttgaatgacacaaaacaggtctccagggaagagatccacccgaaagagatcatggaaaacagtgtgaaaatgcccagtattgaagagaaggaagatgacgaggctattggaatcgacttctcacttaaaaatgaaactgtggcaatctgtgtagtgactgcagacaaaagtctacttgaaaacgctgaggcaaaaaaggagtag

SEQ ID NO: 290871 - DNA, 627 bp, Artificial Sequence
  derived and/or modified sequence
tgagagcacagcctgaaggtgcacggcaaggccctgaccctgccccggcccagaattgtgtccctgctgagcagccacagccaccacagcagccagaaggccaccccagctgaggaggtggaggacagcaatgacagcagctacagcgagcccccagatgtgcagcagcagctgaaccactaccagagcgctgccctggccaggaacaacagccgggtgtcccctgtgcccctgtctggagctgctgctggaacagagcagaagacagaagctgtgctgcactgtgagttctgtgagttcagcagcggctacatccagagcatcagaagacactacagagacaagcacggcggcaagaagctgttcaagtgcaaggactgcagcttctacacaggcttcaagagcgccttcaccatgcacgtggaggccggccacagcgctgtgcctgaggagggccccaaggacctgcgctgccccctgtgcctgtaccacaccaagtacaagaggaacatgattgaccacatcgtgctgcaccggggcaacctgagcaacctggtgttcctggatgctgctgggggccggcagcagcgctggcccagcagagatgccctgtctgagtggcagtag

SEQ ID NO: 290872 - DNA, 1392 bp, Artificial Sequence
  derived and/or modified sequence
atgcagacccaccacggccaccacaagcccttccgctgcaagctgtgcagcttcaagagcagctacaacagccggctgaagacccacatcctgaaggcccatgctggggagcacgcctacaagtgctcctggtgcagcttcagcaccatgaccatcagccagctgaaggagcacagcctgaaggtgcacggcaaggccctgaccctgccccggccccgcatcgtgtccctgctgagcagccacagccaccacagcagccagaaggccaccccagctgaggaggtggaggacagcaatgacagcagctacagcgagcccccagatgtgcagcagcagctgaaccactaccagagcgctgccctggccaggaacaacagccgggtgtcccctgtgcccctgagcggggctgctgctggaacagagcagaagacagaggccgtgctgcactgtgagttctgtgagttcagcagcggctacatccagagcatccgccgccactacagagacaagcatggaggcaagaagctgttcaagtgcaaggactgcagcttctacacaggcttcaagagcgccttcaccatgcacgtggaggccggccacagcgctgtgcctgaggagggccccaaggacctgcgctgccccctgtgcctgtaccacaccaagtacaagaggaacatgattgaccacatcgtgctgcaccgggaggagcgggtggtgcccatcgaggtgtgccgcagcaagctgagcaagtacctgcagggcgtggtgttccgctgtgacaagtgcaccttcacctgcagcagtgatgagagcctgcagcagcacatcgagaagcacaatgagctgaagccctacaagtgccagctgtgctactatgagaccaagcacacagaggagctggacagccacctgagagatgagcacaaggtgtccaggaactttgagctggtgggccgggtgaacctggaccagctggagcagatgaaggagaagatggagagcagcagcagtgatgatgaggacaaggaggaggagatgaacagcaaggcagaagatcgggagctgatgaggttcagtgaccatggagctgccctgaacacagagaagcgcttcccctgtgagttctgtggccgggccttcagccagggcagcgagtgggagagacatgtgctgcggcacggcatggccctgaatgacaccaagcaggtgtcccgggaggagatccaccccaaggagatcatggagaacagcgtgaagatgcccagcattgaggagaaggaggatgatgaggccatcggcatcgacttcagcctgaagaatgagaccgtggccatctgtgtggtgacagctgacaagagcctgctggagaatgctgaggccaagaaggagtag

SEQ ID NO: 290873 - DNA, 627 bp, Artificial Sequence
  derived and/or modified sequence
tgagagcacagcctgaaggtgcacggcaaggccctgaccctgcccagacctcgaattgtatcgctgttgtcatcacactctcaccactcgtcacaaaaagctactcctgcagaggaagtcgaagatagtaacgattctagctattcagaacctcccgatgtgcagcagcagcttaaccactatcagagtgccgctctcgctcggaacaactcccgggtctcccccgtcccgctgtcaggcgctgctgcaggaacggagcagaagaccgaggctgtcctgcactgcgagttctgcgaattctcatccggatatatccaatccattaggcgtcactatagagacaaacacggcggaaagaagctgttcaagtgtaaggattgctctttctatacaggcttcaagagtgctttcaccatgcacgttgaggccgggcactcggctgttcccgaggagggcccgaaggacttgcggtgccccctgtgcctgtaccacaccaagtataagcgaaacatgattgatcatatcgtccttcatcgcggcaatttgtctaatctggtcttcttggacgcggctggggggcggcaacagcggtggccttcacgggatgccctgagtgagtggcagtag

SEQ ID NO: 290874 - DNA, 1392 bp, Artificial Sequence
  derived and/or modified sequence
atgcagacccaccacggccaccacaagcccttccggtgcaagctgtgtagcttcaaaagctcttacaacagcagactgaagactcatattctcaaagcccacgccggggagcacgcctacaagtgcagctggtgctctttctctaccatgaccatcagccagctcaaggaacactccttaaaagttcacggcaaagctcttaccctgcctagaccccgcattgtgtcgctgttatcaagtcactcccaccattcctcccaaaaagccactcccgctgaggaagtggaggactccaatgacagtagctactctgagccaccagacgttcagcagcagcttaaccactatcaatccgccgccctagctagaaataacagcagagtcagcccggtccccctgagcggagcagcagctggcaccgagcagaagactgaggcagttctgcattgtgagttttgcgagttctccagcgggtatatccagtccatcagacgccattatagagataaacacggtgggaaaaagttgttcaaatgtaaagattgctcattctacacggggtttaaaagcgcttttacaatgcatgtggaagctggccattccgcagtgcccgaggaaggccctaaagatctgagatgtcctctttgcctgtatcataccaagtataagcggaatatgattgatcacattgtgttgcatcgagaggagcgagtcgtgcccatagaagtctgcagaagcaaactctcaaaatacctccagggagttgtctttcggtgcgataagtgtacttttacttgttcaagcgatgagtcgctgcagcagcatattgaaaaacataacgaactgaagccatacaaatgtcaattgtgttactacgagactaaacatacagaggagctcgattcccacctccgggacgagcacaaagtatctagaaactttgagctcgttggcagagtaaatcttgaccagcttgaacagatgaaagagaaaatggagtctagcagcagcgacgatgaggataaggaggaggagatgaatagcaaggccgaagaccgggagctgatgcggtttagcgatcatggggccgcccttaacaccgagaaaaggtttccttgcgagttctgcggccgagcattctcacaggggagcgagtgggagcgccatgtgctgcggcacggcatggctctgaacgatacaaagcaagtaagcagggaggaaatccacccaaaggagataatggagaatagcgtgaagatgccaagcatcgaggaaaaggaggatgatgaggccattgggatcgacttttctcttaaaaacgaaacagttgccatctgtgtggtgacggcggataaaagtctgctggagaacgctgaggctaaaaaggagtag

SEQ ID NO: 290875 - DNA, 627 bp, Artificial Sequence
  derived and/or modified sequence
taagagcattccctcaaggtccatgggaaagcactcacactgcctagacctagaatcgtctcgttgttgagcagccattcacaccactccagccagaaagccacccccgctgaggaagtggaagacagcaacgatagttcatactctgagcctcctgacgtgcagcagcagttgaaccattaccagtctgccgcactggcacgtaacaatagtagagtcagccctgttccgctgtcaggggctgccgctggcaccgagcagaagaccgaagctgtgctgcattgcgaattttgtgagtttagctccggctacatacagagtatccgcaggcactatcgcgacaaacacggaggcaagaagctgtttaagtgtaaagattgttcattctatactgggtttaagtccgctttcactatgcacgtggaagctggtcactctgcagtgccagaggagggtccgaaggacctgcgttgccctctgtgtctgtaccatacaaagtacaagagaaacatgattgaccacattgtcctacaccgaggcaatttgagcaacctggtctttctagacgctgcaggcggaagacagcagagatggccaagccgtgacgcactttcagagtggcagtag

SEQ ID NO: 290876 - DNA, 1392 bp, Artificial Sequence
  derived and/or modified sequence
atgcagacccatcacggccaccacaagccatttagatgcaagctctgtagtttcaagtcctcctataactctcgactcaagacacatattctgaaggcacacgcgggagaacacgcatataagtgctcatggtgctccttctctaccatgactatttcccagttgaaagagcactcgctcaaggtgcatggcaaggcacttactctgccaagacctcgcatagtttctctgctctcaagtcattctcaccatagctcacagaaggccaccccggcagaagaggtggaggacagcaatgacagcagctattctgagcctcctgatgtgcagcagcagcttaaccactatcagagtgctgcattagcccgaaacaacagccgggtgtccccggttcctttaagcggtgctgccgctggcaccgaacagaagacggaggctgtcctgcattgtgagttctgtgagttttcaagcgggtacatccagtctattcggcgtcactatcgcgataagcacggcggtaaaaaattatttaaatgcaaagactgctcattctataccggcttcaaatccgcgttcactatgcacgttgaggcgggtcatagtgccgtgcccgaggagggcccaaaggacctgcggtgtcccctgtgcctttaccacacgaagtacaagaggaatatgatcgatcacatcgtcttgcatagagaagagcgcgtcgtgcctatcgaggtgtgtcggtcaaaattatctaaatatttacagggggttgtgtttaggtgtgataagtgtactttcacatgtagtagtgacgagtcgctccaacagcacatcgagaagcacaatgaactgaaaccctacaagtgtcaactatgctattacgaaactaagcataccgaagaactggactcgcatctgcgggacgaacacaaggtgtctcgcaatttcgagcttgtgggacgcgtaaacctggatcagcttgagcagatgaaggaaaaaatggaatcttcaagctcagacgacgaggacaaggaagaggaaatgaactccaaagccgaggatcgtgaattgatgaggttcagcgaccacggggcagctctgaataccgagaaacggttcccctgcgaattttgcggcagggccttcagccagggaagcgaatgggaaaggcacgtcttgcggcacggaatggctctgaacgatactaagcaggtgtccagggaagaaatacatcctaaagagatcatggagaactctgtgaaaatgccaagcatcgaggaaaaggaggacgacgaggcaattgggatcgattttagcctgaagaatgaaaccgttgcaatctgcgtcgtgactgcagataagagcctgctggagaacgcagaggccaagaaagagtag

SEQ ID NO: 290877 - DNA, 1233 bp, Artificial Sequence
  derived and/or modified sequence
ggaacactccctcaaggtccacggaaaagccctgaccctccccaggccacggatcgtcagtctcctctcctcacactcccaccactcctcccaaaaagctaccccggctgaagaagtggaagactccaatgactcatcatattcagagcccccagatgttcagcagcagttgaaccactatcagtcagctgccctggcaaggaacaacagccgtgttagccctgtgcctctttctggggctgctgctggcactgagcagaaaactgaagccgtgcttcactgcgaattctgtgaattctcctccggctacatccagagcatcaggcgtcattaccgggacaagcatggtgggaagaagcttttcaagtgcaaagactgctccttttacacaggctttaaatctgcttttactatgcacgtggaagctgggcactcagcagttcccgaggagggccccaaagatcttcgctgtcctctctgcctctatcacaccaaatacaagcgcaacatgattgaccacatcgtgctgcaccgaggtaacctttctaacttggttttcttggatgcagcggggggcaggcagcagagatggccttctagggatgctctctcagagtggcagtagcacctgtgccttgttcctcaccttatcttcaggcaagaaaccacagtgataaccacagtgacagccaaaagggcaaaaacaccttcctgctgggagtatttcctccacctggagggaggcaaaggtgatggattctgcagtgaacatttccgtagggcttcccagcatgggggatttgtacattctgacaattctgccacccacagccttgcgtagactgcatagaaggaatgaacaagaaacaaaatgggtgggtgaaagcaaatgtgaaatgtggagagctctatggctgtgagagattctttcaagaagaccaaaatgatttccaaagcagaacatggaacttcccttgaaatggttgaagggagagagaattctttaaaataatgtatattatacattctaataatagtctctattatatattctaataataattagaaaatccatgggctttggatttaaattctggttttagagcccactgtgtttaacctctccatccattaaaagagatgattgtacctatgagataatgggtaaagtgtccagtggtttttcataatggatgcataatgactgctcaataaatgttggttcctgctgat

SEQ ID NO: 290878 - DNA, 1771 bp, Artificial Sequence
  derived and/or modified sequence
gagtaagaaggccccactcatggttcacacctgctgctatgttacctggagcctcagtcaccttttctgtaaaatggggctgagaacaggagattgatcggatggcgttagatttggcaaatgcaggcattttaaaaatgagaattggaggaattgctatgatttacccaaagtttggatcgccatatgcaaacccaccacggacaccataaaccattccgatgcaaactctgctccttcaagtcctcctataacagccggctgaaaacacatatactcaaagctcatgctggtgagcatgcctacaagtgttcttggtgctcattctccaccatgacaatcagccagctgaaggaacactccctcaaggtccacggaaaagccctgaccctccccaggccacggatcgtcagtctcctctcctcacactcccaccactcctcccaaaaagctaccccggctgaagaagtggaagactccaatgactcatcatattcagagcccccagatgttcagcagcagttgaaccactatcagtcagctgccctggcaaggaacaacagccgtgttagccctgtgcctctttctggggctgctgctggcactgagcagaaaactgaagccgtgcttcactgcgaattctgtgaattctcctccggctacatccagagcatcaggcgtcattaccgggacaagcatggtgggaagaagcttttcaagtgcaaagactgctccttttacacaggctttaaatctgcttttactatgcacgtggaagctgggcactcagcagttcccgaggagggccccaaagatcttcgctgtcctctctgcctctatcacaccaaatacaagcgcaacatgattgaccacatcgtgctgcaccgagaagagcgtgttgtccccattgaagtttgccggtccaaactgtccaaatacttgcagggagtagttttccgctgtgataagtgtaccttcacctgctccagtgatgagagcctccagcaacatatagaaaagcacaatgaactgaaaccttacaaatgccagctctgctactatgagaccaagcacacggaggaactggacagccaccttcgggatgagcataaggtaagccgtaactttgagctggttggacgggttaacttggatcagctggaacagatgaaggagaaaatggagagctccagcagcgatgatgaggacaaggaagaagaaatgaacagcaaggctgaagacagagagctgatgagattttctgaccacggggctgctcttaacactgagaagcgttttccatgtgaattttgtggacgggcgttttcacagggctctgagtgggaaagacatgtgctgagacacggcatggcattgaatgacaccaagcaggtgagcagagaagaaatccacccaaaagagatcatggagaacagtgttaaaatgccctccatagaggaaaaggaagatgacgaggccattgggatagacttttccctaaagaatgaaacagtagccatctgtgtagtaactgccgacaaatctctcctggagaatgcagaggccaaaaaagaatgagcgtttggtgaaattcttaatcaaaccttacttgaacagtgatgaaaaagtgggagggctggcttgggctgagaagggagggacagaaaagagaagacagaacaaagctgctttttaggactgaacaatctattttcaaagcactggtacctgtgtgagtgagtatgtaaattaaagttatttaaatggttgg

SEQ ID NO: 290879 - DNA, 369 bp, Artificial Sequence
  derived and/or modified sequence
atgagcgccacctggtgcagccccgagggccagggcatgggccagggccccggcagagaggtgggcggcaacagcgccgccagcggccccgccagccccatcagagacccctgcctgagcgaggccggcctgaagggcccccccagcgcccaccccagaagactgtgcctgctgcacagactggtgtgcttcagcggcggcctgaccagcatccagctgagccccagaacctgctgcagccaccagtgggcccagctgttcagccccgcctgcttcccccagtggagagcccccggctgcagcctggacgacagcagaagcctgaccagaatcagacccgtgcacctgcccggccccagcctggactag

SEQ ID NO: 290880 - protein, 519 aa, Artificial Sequence
  derived and/or modified sequence
MFETEADEKREMALEEGKGPGAEDSPPSKEPSPGQELPPGQDLPPNKDSPSGQEPAPSQEPLSSKDSATSEGSPPGPDAPPSKDVPPCQEPPPAQDLSPCQDLPAGQEPLPHQDPLLTKDLPAIQESPTRDLPPCQDLPPSQVSLPAKALTEDTMSSGDLLAATGDPPAAPRPAFVIPEVRLDSTYSQKAGAEQGCSGDEEDAEEAEEVEEGEEGEEDEDEDTSDDNYGERSEAKRSSMIETGQGAEGGLSLRVQNSLRRRTHSEGSLLQEPRGPCFASDTTLHCSDGEGAASTWGMPSPSTLKKELGRNGGSMHHLSLFFTGHRKMSGADTVGDDDEASRKRKSKNLAKDMKNKLGIFRRRNESPGAPPAGKADKMMKSFKPTSEEALKWGESLEKLLVHKYGLAVFQAFLRTEFSEENLEFWLACEDFKKVKSQSKMASKAKKIFAEYIAIQACKEVNLDSYTREHTKDNLQSVTRGCFDLAQKRIFGLMEKDSYPRFLRSDLYLDLINQKKMSPPL

SEQ ID NO: 290881 - DNA, 2759 bp, Artificial Sequence
  derived and/or modified sequence
atcggctctgtcctgctctccacaggcctctgctgtgttgggagccactgccttcctcccctcccccaacctgtgggcccacagctcgccagctggcccttgaacccacttccctgcgcctctggctgcctcaatgtcactggggattagtgtgcatttgcggcttttggcggacactcccctcctggctgcagcctcaccctctggagcccagggatgggcttgggcctgggagccccctgaaccagggagcagccctgaccgtccgtttctctattttccctgacgtcagaaggcagagtgcttattcactttggaagcgcactcgcaggagcagaagaagagagtgtgctggtgcctgtcggagaacatcgccaagcagcaacagctggcagcatcacccccggacagcaagatgtttgagacggaggcagatgagaagagggagatggccttggaggaagggaaggggcctggtgccgaggattccccacccagcaaggagccctctcctggccaggagcttcctccaggacaagaccttccacccaacaaggactccccttctgggcaggaacccgctcccagccaagaaccactgtccagcaaagactcagctacctctgaaggatcccctccaggcccagatgctccgcccagcaaggatgtgccaccatgccaggaaccccctccagcccaagacctctcaccctgccaggacctacctgctggtcaagaacccctgcctcaccaggaccctctactcaccaaagacctccctgccatccaggaatcccccacccgggaccttccaccctgtcaagatctgcctcctagccaggtctccctgccagccaaggcccttactgaggacaccatgagctccggggacctactagcagctactggggacccacctgcggcccccaggccagccttcgtgatccctgaggtccggctggatagcacctacagccagaaggcaggggcagagcagggctgctcgggagatgaggaggatgcagaagaggccgaggaggtggaggagggggaggaaggggaggaggacgaggatgaggacaccagcgatgacaactacggagagcgcagtgaggccaagcgcagcagcatgatcgagacgggccagggggctgagggtggcctctcactgcgtgtgcagaactcgctgcggcgccggacgcacagcgagggcagcctgctgcaggagccccgagggccctgctttgcctccgacaccaccttgcactgctcagacggtgagggcgccgcctccacctggggcatgccttcgcccagcaccctcaagaaagagctgggccgcaatggtggctccatgcaccacctttccctcttcttcacaggacacaggaagatgagcggggctgacaccgttggggatgatgacgaagcctcccggaagagaaagagcaaaaacctagccaaggacatgaagaacaagctggggatcttcagacggcggaatgagtcccctggagcccctcccgcgggcaaggcagacaaaatgatgaagtcattcaagcccacctcagaggaagccctcaagtggggcgagtccttggagaagctgctggttcacaaatacgggttagcagtgttccaagccttccttcgcactgagttcagtgaggagaatctggagttctggttggcttgtgaggacttcaagaaggtcaagtcacagtccaagatggcatccaaggccaagaagatctttgctgaatacatcgcgatccaggcatgcaaggaggtcaacctggactcctacacgcgggagcacaccaaggacaacctgcagagcgtcacgcggggctgcttcgacctggcacagaagcgcatcttcgggctcatggaaaaggactcgtaccctcgctttctccgttctgacctctacctggaccttattaaccagaagaagatgagtcccccgctttaggggccactggagtcgagctcagcgttcacaccaggcgggctgggtcccctgcccacctgcctccctgccccctgtgacggagggggcaagcaagcccccagaggctgtgtctctggacagacggatagacatacggaagcgaggcctggaccaagagaggcccaggctactggaggagtagaaggatgggccccgtggggtccccactgccccggtacgagggggcccaagaccctggcaggtcaggggccctggccaagccagatctggagctgctgctccctgctgcggagaccgcggaggcttcgcgttgaccaagttccttaaagaactggctgatggggcaggaggtccaggcctgggctctcgggccctcctagagggccattggagcttgcagctcagacccccactttgagttttatttatttaaatagtagttggatgcttggcacgtcgtcctgtaataggaaacccttgcctcatcagttttcctgatttacaagtgcaatattttagccaatgccttgggagaagctgccatgcaaaggtggacaccattctccagcttcaggggatatgctcgtcccgggcaccggtggcaggcagctggccttctggactaaggcagcctggggggacactgcagtctggctacacacagagatctggcaccccctgggtggagtgtccctcgggggctttgggaaagcatggcaccctcagaccacacagtagccaagttctggagcaaataaaaggcctgtgttatttcttgttcttg

SEQ ID NO: 290882 - protein, 168 aa, Artificial Sequence
  derived and/or modified sequence
MKNKLGIFRRRNESPGAPPAGKADKMMKSFKPTSEEALKWGESLEKLLVHKYGLAVFQAFLRTEFSEENLEFWLACEDFKKVKSQSKMASKAKKIFAEYIAIQACKEVNLDSYTREHTKDNLQSVTRGCFDLAQKRIFGLMEKDSYPRFLRSDLYLDLINQKKMSPPL

SEQ ID NO: 290883 - DNA, 1560 bp, Artificial Sequence
  derived and/or modified sequence
atgtttgagaccgaggccgacgagaagcgggaaatggccctcgaggagggtaaaggccccggcgcagaggactctccgcccagcaaggaacctagtcctggacaggaactgccgcccggacaggacctgcctccaaataaagatagcccatctgggcaggagcccgcccccagccaggagcctctgagctcaaaggacagcgccacctccgaaggatcgcccccaggtccagatgcaccgccctccaaggacgtgccaccttgccaagaaccgccaccagcccaggatttgtccccgtgccaagacttacctgccggccaagagccccttcctcaccaggatcccctgctgacaaaagacctcccggcaatccaggagagccccactcgggacctgcccccatgtcaggatctgcctccatctcaagtgagcctgccagccaaagcacttactgaggacactatgtcgtctggtgaccttctggccgctacaggagaccccccagctgcgccaaggcctgccttcgtaataccagaggtgcgacttgactcaacatactcacagaaagccggggctgaacagggctgtagcggcgacgaagaagacgccgaggaggccgaggaggtggaggagggtgaagaaggcgaagaagacgaagacgaagatactagtgacgataactacggagaacgcagcgaggccaaacgctccagcatgattgaaaccggacagggagccgaaggcggattgtcgctgcgggtgcagaattctttgcgacgccgaacacattctgaagggtcgttgctccaggaaccaagggggccatgtttcgccagtgacaccaccctccactgttcagacggcgaaggcgctgccagcacctggggcatgccaagtccttctacacttaaaaaagagctggggcggaatggtggatccatgcaccatctttcacttttttttactggacatcggaagatgtctggggccgatactgtgggggacgatgatgaggcttcccggaaaagaaaatccaagaatctggctaaagatatgaaaaataaactgggtattttccggcgtaggaatgagagccctggggccccccccgctggcaaggcagataaaatgatgaaatcattcaaacccacttctgaagaagcactgaaatggggtgagtccctcgagaagcttctggttcacaagtacggcctggccgttttccaagctttcttgagaacagaattctcagaagagaatcttgagttctggctggcctgtgaggattttaagaaagttaaatcccagagtaaaatggcttctaaggcaaaaaagattttcgctgaatatattgccatccaagcgtgcaaggaagttaatctggactcctacacaagagaacacaccaaagataacctgcagtccgttacccggggatgttttgatctcgcgcagaaaaggattttcggcttaatggagaaagactcctacccgagatttctgaggtcggacctgtatcttgatctgattaatcaaaaaaagatgtcgccaccgctttag

SEQ ID NO: 290884 - DNA, 1560 bp, Artificial Sequence
  derived and/or modified sequence
atgttcgaaaccgaggccgacgaaaaaagggaaatggctctggaagaaggaaaagggccaggggctgaagacagcccaccatctaaagagccatcaccaggacaggaattaccacccggccaggatctcccacctaacaaggactcccctagcggccaggagccggcacctagccaggaacccttgtcgtctaaagactcagccacgtccgagggatctccccccggccccgatgcacctcctagtaaagacgtccccccttgccaggagccccctcctgcacaggatctctcaccctgtcaggacctgcctgccggtcaggagccactgcctcatcaggaccccctcctgaccaaagacctccctgctattcaggagagccctaccagggatttgcctccgtgtcaggacctgcctccaagtcaagtgtctctacccgctaaagctctgaccgaggacaccatgtcctctggcgatcttttagcggcgactggggaccccccggctgccccacgccctgcatttgttatccccgaagttagactcgactctacgtactcacagaaggcaggcgctgagcaaggctgctccggcgatgaagaggatgccgaggaagccgaagaggtggaggaaggcgaagagggagaggaagacgaagacgaagacacctcggacgacaactacggggagcgttccgaagccaagcgttcctccatgatagagactggccagggagcagagggtggattgtctctccgggtacaaaactcactcaggcgccggacacactctgaaggctccctactccaagagcctaggggcccgtgcttcgcctctgacacaacactgcactgcagcgatggagagggcgccgcttctacgtggggcatgcctagtccctcgaccctcaaaaaggagttggggaggaatggcggatcaatgcatcacctgtccctgtttttcaccggacatcgaaagatgtccggggctgacaccgtgggggacgacgatgaagcctcaaggaagaggaagtccaagaacctggctaaggatatgaagaacaaactcggtatcttccgaagaaggaatgagtcccccggcgcccccccagcgggcaaagccgataaaatgatgaagtcatttaagcccacatccgaggaggccctgaagtggggggagtcgttggaaaaacttcttgttcataagtacggccttgcggtgttccaggcattcttgcgcacggagttcagtgaggaaaacctggaattctggttggcttgcgaggacttcaaaaaagtcaaatcacagtctaaaatggcctctaaagccaagaagattttcgcggagtacatagccatccaagcatgcaaggaggttaacctcgactcatatacacgggaacacacgaaagacaacctgcagtcggtcactaggggatgcttcgatttagcccagaaaagaatatttgggctgatggaaaaggatagctatcctcggtttctaagaagcgacctatatcttgacctgattaaccagaaaaagatgagcccccctctgtag

SEQ ID NO: 290885 - DNA, 1560 bp, Artificial Sequence
  derived and/or modified sequence
atgtttgaaacagaagcagatgagaagcgggagatggccctggaggagggcaagggccctggagctgaggacagcccccccagcaaggagcccagccctggccaggagctgcccccaggccaggacctgccccccaacaaggacagccccagcggccaggagcccgcccccagccaggagcccctgagcagcaaggacagcgccaccagcgagggcagccccccaggcccagatgccccacccagcaaggatgtgcccccctgccaggagcccccaccagcccaggacctgagcccctgccaggacctgcctgctggccaggagcccctgccccaccaggaccccctgctgaccaaggacctgcctgccatccaggagagccccacccgggacctgcccccctgccaggacctgccccccagccaggtgtccctgcctgccaaggccctgacagaggacaccatgagcagcggggacctgctggccgccaccggggaccccccagctgcccccaggcctgcctttgtgattcctgaggtgcggctggacagcacctacagccagaaggccggggctgagcagggctgcagcggagatgaagaagatgctgaggaggccgaggaggtggaggagggggaggagggggaggaggatgaagatgaggacaccagtgatgacaactacggggagaggtctgaggccaagaggagctccatgattgagaccggccagggcgctgagggcggcctgagcctgcgggtgcagaacagcctgcggcggaggacccacagcgagggcagcctgctgcaggagccccggggcccctgctttgccagtgacaccaccctgcactgcagtgatggagagggcgccgccagcacctggggcatgcccagccccagcaccctgaagaaggagctgggcagaaatggaggctccatgcaccacctgagcctcttcttcaccggccacaggaagatgtctggagctgacacagtgggagatgatgatgaggccagcaggaagaggaagagcaagaacctggccaaggacatgaagaacaagctgggcatcttcagaagaagaaatgaaagccctggggcccctcctgctgggaaggctgacaagatgatgaagagcttcaagcccaccagcgaggaggccctgaagtggggcgagagcctggagaagctgctggtgcacaagtatggcctggccgtgttccaggccttcctgaggacagagttcagcgaggagaacctggagttctggctggcctgtgaggacttcaagaaggtgaagagccagagcaagatggccagcaaggccaagaagatctttgctgagtacatcgccatccaggcctgcaaggaggtgaacctggacagctacacccgggagcacaccaaggacaacctgcagagcgtgacccggggctgctttgacctggcccagaagaggatcttcggcctgatggagaaggacagctacccccgcttcctgcggagtgacctgtacctggacctgatcaaccagaagaagatgagcccccccctgtag

SEQ ID NO: 290886 - DNA, 1560 bp, Artificial Sequence
  derived and/or modified sequence
atgttcgagaccgaggccgacgagaagcgggagatggccctggaggagggcaaaggacccggggccgaagattcacctccctctaaggagccatcccctggccaagagctgccccctggccaggaccttccccccaataaagatagcccctccggccaggagcccgccccgtcccaggaaccactgtcctctaaggattcagccacttccgagggttcaccaccgggacctgacgcaccccccagcaaggacgtgcctccctgtcaagagcccccgccagcccaggatcttagtccctgtcaagacctcccagctgggcaggagcctttaccacaccaggatcccctgcttactaaggatcttcccgccatacaagaaagccctacccgggacctgcctccttgtcaggatctgcctccgagccaagtttcccttcctgcgaaagcattgacggaagacacgatgtcgtcaggggacctcctcgccgctaccggtgaccctcctgctgctccaagacccgccttcgtaatacctgaggttcgattggactccacatactcccagaaagccggtgccgaacagggttgtagcggggacgaagaagacgcggaagaagctgaggaggtagaagaaggagaggaaggcgaagaagacgaggatgaagacacaagtgatgataactacggcgagcgttccgaagctaaacgctcttctatgatcgagaccggccagggggccgaaggcgggctgagtcttcgtgtgcagaattcgctgagacggcggacccacagtgagggctcgcttctacaagagccacgcggtccttgttttgcttccgatacaacactgcattgtagcgatggcgagggtgccgcgagtacttggggaatgcctagcccgagtacgctgaaaaaggaacttggcagaaatgggggttctatgcatcacttgtccctgttctttactggccacagaaagatgagtggcgcagacactgtgggtgatgatgatgaggcctcccgaaaacgcaaaagcaagaacctggccaaagatatgaaaaacaaattggggatcttcaggcgccggaacgagagtcccggggctccccccgccggaaaggccgataaaatgatgaaaagctttaagcccacctcggaagaggcgctgaaatggggagaaagcctggaaaagctgttagttcacaagtacggtttggcagtgttccaggcttttctcaggaccgagttctctgaggagaacctggagttttggctcgcctgtgaagatttcaaaaaggtcaaaagtcagagcaaaatggccagcaaggccaagaagattttcgcagaatacatagccattcaggcctgcaaagaggttaatcttgattcctatacacgagagcacacaaaagataacctgcaatcagtgaccagaggatgcttcgacctggcacagaagcggatatttggattgatggagaaggactcataccctagatttctgcgctccgacctctatctcgatttgattaaccagaagaaaatgtctccccctctgtag

SEQ ID NO: 290887 - DNA, 1560 bp, Artificial Sequence
  derived and/or modified sequence
atgttcgagaccgaggccgacgagaagcgggagatggccctggaggaagggaagggacctggagcggaagattctccccctagtaaggagcctagccctggacaggagctgcccccaggccaagacctgccccctaacaaagattctccatctgggcaggaacccgctccgtcgcaagaacctctttcctccaaagattctgcaacctcggaggggtctccacctggccctgatgctcccccctccaaagatgtcccgccctgtcaggagccccctcctgctcaggatctgtccccctgccaagatctgcctgctggtcaggagcccctgcctcaccaggaccccttactgactaaggacttgccggctattcaagagtcccccaccagagatctccctccctgccaggatctgcctcccagccaggtcagtctacccgcaaaggcactgactgaagatacaatgagctctggagatctgctggctgccacaggtgaccctcccgcagcccctaggccagcgtttgtgattcctgaagtgcgactggactctacttactcccagaaggcgggcgcggaacagggttgctccggagatgaagaggatgccgaagaggccgaggaagttgaggagggtgaggagggggaggaggacgaggatgaggacacaagcgatgataactacggggaacgaagtgaggccaagagatcgagtatgatcgagacaggccagggggctgaggggggcctcagcttgcgggtgcagaattcccttcggcgtcgaacccactccgaaggttccctgctccaagagcccagaggtccttgcttcgcgagcgatacgacactgcactgttccgatggagagggcgccgcctcaacatggggtatgcctagcccatccacattgaagaaggagttagggcgcaacggggggtctatgcaccacctgagcttgttctttacaggccaccggaagatgagcggggccgacactgtgggcgatgacgacgaggcctctcggaaacgcaaatctaagaacttggcaaaggatatgaagaacaaactgggcatttttagacggaggaacgagagccccggtgccccgcctgcaggcaaagctgataagatgatgaagagcttcaagccaactagtgaggaggccctaaaatggggcgagtcactcgaaaaactgctggttcacaaatatgggctggctgtgtttcaagcatttctccgaactgagttcagcgaagagaatctcgagttttggttggcctgcgaggattttaagaaagtgaaatcccagagtaaaatggcttcaaaagcaaaaaaaatattcgctgaatatatcgccatacaggcatgtaaagaagttaacctggacagctatacccgagagcacactaaggataatctgcagtcggtaacaagaggttgcttcgacctggcacagaaacgcatcttcggccttatggaaaaagattcgtatcctagatttctgaggtccgacctatacctggacctcattaaccagaagaagatgtcacctcctctgtag

SEQ ID NO: 290888 - DNA, 1560 bp, Artificial Sequence
  derived and/or modified sequence
atgtttgagaccgaagccgatgagaagcgtgagatggcactggaagagggcaagggccctggagccgaagattctccacccagcaaagagcctagtccaggtcaggagcttccgccaggacaggatttgcccccaaacaaggacagcccttctggacaagagcccgcacctagtcaggaacctttgtcatcaaaggattccgccacctccgagggcagccctccaggaccggatgccccacctagcaaagacgtccctccatgtcaggagccacccccagcacaggatctttcaccttgccaagatctgccagccggtcaggaacctttgcctcaccaggacccactgctgacaaaagacctgccagccattcaggagagccccacccgggacctgcccccttgtcaagatctgccaccgtcccaggtgtccctgcctgctaaggctcttaccgaagacacgatgagtagtggcgaccttcttgctgccacaggcgatccacccgctgcaccgcgtcctgccttcgttatccccgaggtgcggctcgactccacttactcccagaaagcaggagcagagcagggctgcagcggggatgaggaagatgccgaggaggctgaggaggtagaggagggggaggaaggagaagaggatgaggacgaggatacttccgatgacaattacggggagaggtctgaggccaagcggagcagcatgatcgagaccggacagggcgctgaagggggactgtccttgagagttcagaatagcttaagaagacgcacacatagcgagggctcactgctgcaggaaccgaggggcccatgctttgcaagtgatacaacgcttcattgcagcgatggagaaggtgcagctagtacttggggcatgcccagtccctccacccttaagaaggaattgggcaggaatggcggatcaatgcatcacctttcactgttcttcaccgggcacagaaagatgtcaggcgctgataccgtcggagatgatgacgaagcctcaagaaagaggaaatccaaaaacctggctaaggacatgaagaataagctggggatatttcggcgacggaacgagtctccgggagcgcctcccgcagggaaggccgacaagatgatgaaatctttcaaaccaacttccgaagaggccttgaaatggggcgagtcgctggaaaagttgttagttcataagtacggccttgccgtgtttcaagcattcctgcgaaccgagttctccgaggaaaatttggagttctggcttgcatgcgaggactttaaaaaggtaaaatcgcaatccaaaatggcctcaaaagctaaaaaaatcttcgcggaatacatcgccatacaggcctgcaaggaggtgaaccttgatagctatacaagagaacacaccaaggacaatctgcagagtgtgacgcggggatgttttgatctggctcagaagcgtatcttcgggctcatggagaaggatagctatcctcgcttcctccggtcagatttgtacctggacctgattaaccaaaaaaaaatgtctccacccctgtag

SEQ ID NO: 290889 - DNA, 1560 bp, Artificial Sequence
  derived and/or modified sequence
atgttcgaaaccgaggctgacgaaaagcgggaaatggccctcgaggagggcaagggacctggggcagaggatagtcccccatctaaagagccgtccccaggccaggagctgcccccaggacaggatttgccacctaacaaggattctcccagcggacaagaacctgcccctagccaggaacctctgagctcaaaggacagcgccactagcgagggctcgcctccaggtccagacgctcccccatccaaagatgtaccaccctgccaggagcccccacctgcccaggatctgagcccctgtcaggatctgccagctggccaggagcccctccctcatcaagacccgctcttgaccaaagatctccccgcaatccaagagtctcccactagagacctgcccccatgtcaggacctgcctccatcgcaggtatctttacccgcaaaagctctcactgaagacaccatgtctagtggggatcttctcgcagccaccggcgaccctccagcggctcctcgccctgctttcgtgattccagaggtgcggctggatagtacttactcccagaaggctggcgcagaacaggggtgtagcggcgatgaagaagatgccgaggaagccgaggaggtggaggaaggagaggagggtgaggaggacgaagacgaggacactagtgacgataactacggggagcgttccgaggcaaagagatcgtctatgatcgagacgggtcagggcgctgaaggtggcctttcgctgcgcgtgcagaactcactcaggaggagaactcacagtgaaggaagtctgctgcaagaacctaggggcccatgttttgcatctgatacaactttgcattgttccgacggagaaggggcagcttctacttggggcatgccttctccctcaacccttaagaaggaactgggccgaaatgggggatctatgcatcacctttctctttttttcaccggacatagaaagatgagcggcgcagataccgtaggggacgacgacgaagccagccggaagaggaaatccaagaatcttgcaaaggatatgaagaataagctgggaatctttcgcagaaggaacgagtcccccggagcacctcctgctggtaaggctgacaagatgatgaagtcatttaagcccacctccgaggaagcccttaaatggggggagagccttgagaaactgctggtccacaaatatggactggccgtctttcaggcattcctccgtacagaattctccgaggagaatctcgaattttggctagcctgtgaagattttaagaaagtgaagagccagagcaagatggcatcaaaggctaaaaagatcttcgcagaatatattgctatccaggcttgtaaggaggtaaatctggattcctacacgagagaacatacaaaagataatttgcaatccgtcaccagagggtgctttgacctggcccaaaaacgaatcttcggcctgatggagaaagacagttatccccgattcctcagaagtgatctctacttggacctgatcaatcagaagaagatgtctcccccactgtag

SEQ ID NO: 290890 - DNA, 2862 bp, Artificial Sequence
  derived and/or modified sequence
ttctcggctgatctctctgggtaggtgccctctgggggcagtacccctgcctgagtggcacttcccctcctggctttgtttggtttggcctcgatttagaacagggttggcagaggcaggctgacttgcatttctggttttgggtttgttgctgcactttccccaaggggtgggcgggctctgactgacagtcaccactgggacaggcctgggccccaccctcaccacccaggaaaggggaaatgcggcccgctccccactcagtgccactctgtgccactccgtgccaggccctgagggcacccggttgctgcttccttccgtctttccccaaggactatcagagatgccagcgtgacccctgacacgtgtgtgcagcagcctgcagctgccccaagccatggctgaacactgactcccagctgtggggcttcaccattacagactccccagggcttcaaagacttctcagcttcgagcatggcttttggctgtcagggcagctgtacaatagtggatgtttgagacggaggcagatgagaagagggagatggccttggaggaagggaaggggcctggtgccgaggattccccacccagcaaggagccctctcctggccaggagcttcctccaggacaagaccttccacccaacaaggactccccttctgggcaggaacccgctcccagccaagaaccactgtccagcaaagactcagctacctctgaaggatcccctccaggcccagatgctccgcccagcaaggatgtgccaccatgccaggaaccccctccagcccaagacctctcaccctgccaggacctacctgctggtcaagaacccctgcctcaccaggaccctctactcaccaaagacctccctgccatccaggaatcccccacccgggaccttccaccctgtcaagatctgcctcctagccaggtctccctgccagccaaggcccttactgaggacaccatgagctccggggacctactagcagctactggggacccacctgcggcccccaggccagccttcgtgatccctgaggtccggctggatagcacctacagccagaaggcaggggcagagcagggctgctcgggagatgaggaggatgcagaagaggccgaggaggtggaggagggggaggaaggggaggaggacgaggatgaggacaccagcgatgacaactacggagagcgcagtgaggccaagcgcagcagcatgatcgagacgggccagggggctgagggtggcctctcactgcgtgtgcagaactcgctgcggcgccggacgcacagcgagggcagcctgctgcaggagccccgagggccctgctttgcctccgacaccaccttgcactgctcagacggtgagggcgccgcctccacctggggcatgccttcgcccagcaccctcaagaaagagctgggccgcaatggtggctccatgcaccacctttccctcttcttcacaggacacaggaagatgagcggggctgacaccgttggggatgatgacgaagcctcccggaagagaaagagcaaaaacctagccaaggacatgaagaacaagctggggatcttcagacggcggaatgagtcccctggagcccctcccgcgggcaaggcagacaaaatgatgaagtcattcaagcccacctcagaggaagccctcaagtggggcgagtccttggagaagctgctggttcacaaatacgggttagcagtgttccaagccttccttcgcactgagttcagtgaggagaatctggagttctggttggcttgtgaggacttcaagaaggtcaagtcacagtccaagatggcatccaaggccaagaagatctttgctgaatacatcgcgatccaggcatgcaaggaggtcaacctggactcctacacgcgggagcacaccaaggacaacctgcagagcgtcacgcggggctgcttcgacctggcacagaagcgcatcttcgggctcatggaaaaggactcgtaccctcgctttctccgttctgacctctacctggaccttattaaccagaagaagatgagtcccccgctttaggggccactggagtcgagctcagcgttcacaccaggcgggctgggtcccctgcccacctgcctccctgccccctgtgacggagggggcaagcaagcccccagaggctgtgtctctggacagacggatagacatacggaagcgaggcctggaccaagagaggcccaggctactggaggagtagaaggatgggccccgtggggtccccactgccccggtacgagggggcccaagaccctggcaggtcaggggccctggccaagccagatctggagctgctgctccctgctgcggagaccgcggaggcttcgcgttgaccaagttccttaaagaactggctgatggggcaggaggtccaggcctgggctctcgggccctcctagagggccattggagcttgcagctcagacccccactttgagttttatttatttaaatagtagttggatgcttggcacgtcgtcctgtaataggaaacccttgcctcatcagttttcctgatttacaagtgcaatattttagccaatgccttgggagaagctgccatgcaaaggtggacaccattctccagcttcaggggatatgctcgtcccgggcaccggtggcaggcagctggccttctggactaaggcagcctggggggacactgcagtctggctacacacagagatctggcaccccctgggtggagtgtccctcgggggctttgggaaagcatggcaccctcagaccacacagtagccaagttctggagcaaataaaaggcctgtgttatttcttgttcttga

SEQ ID NO: 290891 - DNA, 1560 bp, Artificial Sequence
  derived and/or modified sequence
atgttcgagaccgaggccgacgagaagagagagatggccctggaggagggcaagggccccggcgccgaggacagcccccccagcaaggagcccagccccggccaggagctgccccccggccaggacctgccccccaacaaggacagccccagcggccaggagcccgcccccagccaggagcccctgagcagcaaggacagcgccaccagcgagggcagcccccccggccccgacgccccccccagcaaggacgtgcccccctgccaggagcccccccccgcccaggacctgagcccctgccaggacctgcccgccggccaggagcccctgccccaccaggaccccctgctgaccaaggacctgcccgccatccaggagagccccaccagagacctgcccccctgccaggacctgccccccagccaggtgagcctgcccgccaaggccctgaccgaggacaccatgagcagcggcgacctgctggccgccaccggcgacccccccgccgcccccagacccgccttcgtgatccccgaggtgagactggacagcacctacagccagaaggccggcgccgagcagggctgcagcggcgacgaggaggacgccgaggaggccgaggaggtggaggagggcgaggagggcgaggaggacgaggacgaggacaccagcgacgacaactacggcgagagaagcgaggccaagagaagcagcatgatcgagaccggccagggcgccgagggcggcctgagcctgagagtgcagaacagcctgagaagaagaacccacagcgagggcagcctgctgcaggagcccagaggcccctgcttcgccagcgacaccaccctgcactgcagcgacggcgagggcgccgccagcacctggggcatgcccagccccagcaccctgaagaaggagctgggcagaaacggcggcagcatgcaccacctgagcctgttcttcaccggccacagaaagatgagcggcgccgacaccgtgggcgacgacgacgaggccagcagaaagagaaagagcaagaacctggccaaggacatgaagaacaagctgggcatcttcagaagaagaaacgagagccccggcgccccccccgccggcaaggccgacaagatgatgaagagcttcaagcccaccagcgaggaggccctgaagtggggcgagagcctggagaagctgctggtgcacaagtacggcctggccgtgttccaggccttcctgagaaccgagttcagcgaggagaacctggagttctggctggcctgcgaggacttcaagaaggtgaagagccagagcaagatggccagcaaggccaagaagatcttcgccgagtacatcgccatccaggcctgcaaggaggtgaacctggacagctacaccagagagcacaccaaggacaacctgcagagcgtgaccagaggctgcttcgacctggcccagaagagaatcttcggcctgatggagaaggacagctaccccagattcctgagaagcgacctgtacctggacctgatcaaccagaagaagatgagcccccccctgtag

SEQ ID NO: 290892 - protein, 494 aa, Artificial Sequence
  derived and/or modified sequence
MAASRRAKLNESHRLHQFFRDMDDEESWIKEKKLLVGSEDYGRDLTGVQNLRKKHKRLEAELAAHEPAIQGVLDTGKKLSDDNTIGKEEIQQRLAQFVEHWKELKQLAAARGQRLEESLEYQQFVANVEEEEAWINEKMTLVASEDYGDTLAAIQGLLKKHEAFETDFTVHKDRVNDVCTNGQDLIKKNNHHEENISSKMKGLNGKVSDLEKAAAQRKAKLDENSAFLQFNWKADVVESWIGEKENSLKTDDYGRDLSSVQTLLTKQETFDAGLQAFQQEGIANITALKDQLLAAKHVQSKAIEARHASLMKRWSQLLANSAARKKKLLEAQSHFRKVEDLFLTFAKKASAFNSWFENAEEDLTDPVRCNSLEEIKALREAHDAFRSSLSSAQADFNQLAELDRQIKSFRVASNPYTWFTMEALEETWRNLQKIIKERELELQKEQRRQEENDKLRQEFAQHANAFHQWIQETRCQRKDGQLQGGRVGDPRIPA

SEQ ID NO: 290893 - protein, 2477 aa, Artificial Sequence
  derived and/or modified sequence
MDPSGVKVLETAEDIQERRQQVLDRYHRFKELSTLRRQKLEDSYRFQFFQRDAEELEKWIQEKLQIASDENYKDPTNLQGKLQKHQAFEAEVQANSGAIVKLDETGNLMISEGHFASETIRTRLMELHRQWELLLEKMREKGIKLLQAQKLVQYLRECEDVMDWINDKEAIVTSEELGQDLEHVEVLQKKFEEFQTDMAAHEERVNEVNQFAAKLIQEQHPEEELIKTKQDEVNAAWQRLKGLALQRQGKLFGAAEVQRFNRDVDETISWIKEKEQLMASDDFGRDLASVQALLRKHEGLERDLAALEDKVKALCAEADRLQQSHPLSATQIQVKREELITNWEQIRTLAAERHARLNDSYRLQRFLADFRDLTSWVTEMKALINADELASDVAGAEALLDRHQEHKGEIDAHEDSFKSADESGQALLAAGHYASDEVREKLTVLSEERAALLELWELRRQQYEQCMDLQLFYRDTEQVDNWMSKQEAFLLNEDLGDSLDSVEALLKKHEDFEKSLSAQEEKITALDEFATKLIQNNHYAMEDVATRRDALLSRRNALHERAMRRRAQLADSFHLQQFFRDSDELKSWVNEKMKTATDEAYKDPSNLQGKVQKHQAFEAELSANQSRIDALEKAGQKLIDVNHYAKDEVAARMNEVISLWKKLLEATELKGIKLREANQQQQFNRNVEDIELWLYEVEGHLASDDYGKDLTNVQNLQKKHALLEADVAAHQDRIDGITIQARQFQDAGHFDAENIKKKQEALVARYEALKEPMVARKQKLADSLRLQQLFRDVEDEETWIREKEPIAASTNRGKDLIGVQNLLKKHQALQAEIAGHEPRIKAVTQKGNAMVEEGHFAAEDVKAKLHELNQKWEALKAKASQRRQDLEDSLQAQQYFADANEAESWMREKEPIVGSTDYGKDEDSAEALLKKHEALMSDLSAYGSSIQALREQAQSCRQQVAPTDDETGKELVLALYDYQEKSPREVTMKKGDILTLLNSTNKDWWKVEVNDRQGFVPAAYVKKLDPAQSASRENLLEEQGSIALRQEQIDNQTRITKEAGSVSLRMKQVEELYHSLLELGEKRKGMLEKSCKKFMLFREANELQQWINEKEAALTSEEVGADLEQVEVLQKKFDDFQKDLKANESRLKDINKVAEDLESEGLMAEEVQAVQQQEVYGMMPRDETDSKTASPWKSARLMVHTVATFNSIKELNERWRSLQQLAEERSQLLGSAHEVQRFHRDADETKEWIEEKNQALNTDNYGHDLASVQALQRKHEGFERDLAALGDKVNSLGETAERLIQSHPESAEDLQEKCTELNQAWSSLGKRADQRKAKLGDSHDLQRFLSDFRDLMSWINGIRGLVSSDELAKDVTGAEALLERHQEHRTEIDARAGTFQAFEQFGQQLLAHGHYASPEIKQKLDILDQERADLEKAWVQRRMMLDQCLELQLFHRDCEQAENWMAAREAFLNTEDKGDSLDSVEALIKKHEDFDKAINVQEEKIAALQAFADQLIAAGHYAKGDISSRRNEVLDRWRRLKAQMIEKRSKLGESQTLQQFSRDVDEIEAWISEKLQTASDESYKDPTNIQVSLMLSKHQKHQAFEAELHANADRIRGVIDMGNSLIERGACAGSEDAVKARLAALADQWQFLVQKSAEKSQKLKEANKQQNFNTGIKDFDFWLSEVEALLASEDYGKDLASVNNLLKKHQLLEADISAHEDRLKDLNSQADSLMTSSAFDTSQVKDKRDTINGRFQKIKSMAASRRAKLNESHRLHQFFRDMDDEESWIKEKKLLVGSEDYGRDLTGVQNLRKKHKRLEAELAAHEPAIQGVLDTGKKLSDDNTIGKEEIQQRLAQFVEHWKELKQLAAARGQRLEESLEYQQFVANVEEEEAWINEKMTLVASEDYGDTLAAIQGLLKKHEAFETDFTVHKDRVNDVCTNGQDLIKKNNHHEENISSKMKGLNGKVSDLEKAAAQRKAKLDENSAFLQFNWKADVVESWIGEKENSLKTDDYGRDLSSVQTLLTKQETFDAGLQAFQQEGIANITALKDQLLAAKHVQSKAIEARHASLMKRWSQLLANSAARKKKLLEAQSHFRKVEDLFLTFAKKASAFNSWFENAEEDLTDPVRCNSLEEIKALREAHDAFRSSLSSAQADFNQLAELDRQIKSFRVASNPYTWFTMEALEETWRNLQKIIKERELELQKEQRRQEENDKLRQEFAQHANAFHQWIQETRCQPAGASCMVEESGTLESQLEATKRKHQEIRAMRSQLKKIEDLGAAMEEALILDNKYTEHSTVGLAQQWDQLDQLGMRMQHNLEQQIQARNTTGVTEEALKEFSMMFKHFDKDKSGRLNHQEFKSCLRSLGYDLPMVEEGEPDPEFEAILDTVDPNRDGHVSLQEYMAFMISRETENVKSSEEIESAFRALSSEGKPYVTKEELYQNLTREQADYCVSHMKPYVDGKGRELPTAFDYVEFTRSLFVN

SEQ ID NO: 290894 - DNA, 7434 bp, Artificial Sequence
  derived and/or modified sequence
atggaccccagcggcgtgaaggtgctggagaccgccgaggacatccaggagagaagacagcaggtgctggacagataccacagattcaaggagctgagcaccctgagaagacagaagctggaggacagctacagattccagttcttccagagagacgccgaggagctggagaagtggatccaggagaagctgcagatcgccagcgacgagaactacaaggaccccaccaacctgcagggcaagctgcagaagcaccaggccttcgaggccgaggtgcaggccaacagcggcgccatcgtgaagctggacgagaccggcaacctgatgatcagcgagggccacttcgccagcgagaccatcagaaccagactgatggagctgcacagacagtgggagctgctgctggagaagatgagagagaagggcatcaagctgctgcaggcccagaagctggtgcagtacctgagagagtgcgaggacgtgatggactggatcaacgacaaggaggccatcgtgaccagcgaggagctgggccaggacctggagcacgtggaggtgctgcagaagaagttcgaggagttccagaccgacatggccgcccacgaggagagagtgaacgaggtgaaccagttcgccgccaagctgatccaggagcagcaccccgaggaggagctgatcaagaccaagcaggacgaggtgaacgccgcctggcagagactgaagggcctggccctgcagagacagggcaagctgttcggcgccgccgaggtgcagagattcaacagagacgtggacgagaccatcagctggatcaaggagaaggagcagctgatggccagcgacgacttcggcagagacctggccagcgtgcaggccctgctgagaaagcacgagggcctggagagagacctggccgccctggaggacaaggtgaaggccctgtgcgccgaggccgacagactgcagcagagccaccccctgagcgccacccagatccaggtgaagagagaggagctgatcaccaactgggagcagatcagaaccctggccgccgagagacacgccagactgaacgacagctacagactgcagagattcctggccgacttcagagacctgaccagctgggtgaccgagatgaaggccctgatcaacgccgacgagctggccagcgacgtggccggcgccgaggccctgctggacagacaccaggagcacaagggcgagatcgacgcccacgaggacagcttcaagagcgccgacgagagcggccaggccctgctggccgccggccactacgccagcgacgaggtgagagagaagctgaccgtgctgagcgaggagagagccgccctgctggagctgtgggagctgagaagacagcagtacgagcagtgcatggacctgcagctgttctacagagacaccgagcaggtggacaactggatgagcaagcaggaggccttcctgctgaacgaggacctgggcgacagcctggacagcgtggaggccctgctgaagaagcacgaggacttcgagaagagcctgagcgcccaggaggagaagatcaccgccctggacgagttcgccaccaagctgatccagaacaaccactacgccatggaggacgtggccaccagaagagacgccctgctgagcagaagaaacgccctgcacgagagagccatgagaagaagagcccagctggccgacagcttccacctgcagcagttcttcagagacagcgacgagctgaagagctgggtgaacgagaagatgaagaccgccaccgacgaggcctacaaggaccccagcaacctgcagggcaaggtgcagaagcaccaggccttcgaggccgagctgagcgccaaccagagcagaatcgacgccctggagaaggccggccagaagctgatcgacgtgaaccactacgccaaggacgaggtggccgccagaatgaacgaggtgatcagcctgtggaagaagctgctggaggccaccgagctgaagggcatcaagctgagagaggccaaccagcagcagcagttcaacagaaacgtggaggacatcgagctgtggctgtacgaggtggagggccacctggccagcgacgactacggcaaggacctgaccaacgtgcagaacctgcagaagaagcacgccctgctggaggccgacgtggccgcccaccaggacagaatcgacggcatcaccatccaggccagacagttccaggacgccggccacttcgacgccgagaacatcaagaagaagcaggaggccctggtggccagatacgaggccctgaaggagcccatggtggccagaaagcagaagctggccgacagcctgagactgcagcagctgttcagagacgtggaggacgaggagacctggatcagagagaaggagcccatcgccgccagcaccaacagaggcaaggacctgatcggcgtgcagaacctgctgaagaagcaccaggccctgcaggccgagatcgccggccacgagcccagaatcaaggccgtgacccagaagggcaacgccatggtggaggagggccacttcgccgccgaggacgtgaaggccaagctgcacgagctgaaccagaagtgggaggccctgaaggccaaggccagccagagaagacaggacctggaggacagcctgcaggcccagcagtacttcgccgacgccaacgaggccgagagctggatgagagagaaggagcccatcgtgggcagcaccgactacggcaaggacgaggacagcgccgaggccctgctgaagaagcacgaggccctgatgagcgacctgagcgcctacggcagcagcatccaggccctgagagagcaggcccagagctgcagacagcaggtggcccccaccgacgacgagaccggcaaggagctggtgctggccctgtacgactaccaggagaagagccccagagaggtgaccatgaagaagggcgacatcctgaccctgctgaacagcaccaacaaggactggtggaaggtggaggtgaacgacagacagggcttcgtgcccgccgcctacgtgaagaagctggaccccgcccagagcgccagcagagagaacctgctggaggagcagggcagcatcgccctgagacaggagcagatcgacaaccagaccagaatcaccaaggaggccggcagcgtgagcctgagaatgaagcaggtggaggagctgtaccacagcctgctggagctgggcgagaagagaaagggcatgctggagaagagctgcaagaagttcatgctgttcagagaggccaacgagctgcagcagtggatcaacgagaaggaggccgccctgaccagcgaggaggtgggcgccgacctggagcaggtggaggtgctgcagaagaagttcgacgacttccagaaggacctgaaggccaacgagagcagactgaaggacatcaacaaggtggccgaggacctggagagcgagggcctgatggccgaggaggtgcaggccgtgcagcagcaggaggtgtacggcatgatgcccagagacgagaccgacagcaagaccgccagcccctggaagagcgccagactgatggtgcacaccgtggccaccttcaacagcatcaaggagctgaacgagagatggagaagcctgcagcagctggccgaggagagaagccagctgctgggcagcgcccacgaggtgcagagattccacagagacgccgacgagaccaaggagtggatcgaggagaagaaccaggccctgaacaccgacaactacggccacgacctggccagcgtgcaggccctgcagagaaagcacgagggcttcgagagagacctggccgccctgggcgacaaggtgaacagcctgggcgagaccgccgagagactgatccagagccaccccgagagcgccgaggacctgcaggagaagtgcaccgagctgaaccaggcctggagcagcctgggcaagagagccgaccagagaaaggccaagctgggcgacagccacgacctgcagagattcctgagcgacttcagagacctgatgagctggatcaacggcatcagaggcctggtgagcagcgacgagctggccaaggacgtgaccggcgccgaggccctgctggagagacaccaggagcacagaaccgagatcgacgccagagccggcaccttccaggccttcgagcagttcggccagcagctgctggcccacggccactacgccagccccgagatcaagcagaagctggacatcctggaccaggagagagccgacctggagaaggcctgggtgcagagaagaatgatgctggaccagtgcctggagctgcagctgttccacagagactgcgagcaggccgagaactggatggccgccagagaggccttcctgaacaccgaggacaagggcgacagcctggacagcgtggaggccctgatcaagaagcacgaggacttcgacaaggccatcaacgtgcaggaggagaagatcgccgccctgcaggccttcgccgaccagctgatcgccgccggccactacgccaagggcgacatcagcagcagaagaaacgaggtgctggacagatggagaagactgaaggcccagatgatcgagaagagaagcaagctgggcgagagccagaccctgcagcagttcagcagagacgtggacgagatcgaggcctggatcagcgagaagctgcagaccgccagcgacgagagctacaaggaccccaccaacatccaggtgagcctgatgctgagcaagcaccagaagcaccaggccttcgaggccgagctgcacgccaacgccgacagaatcagaggcgtgatcgacatgggcaacagcctgatcgagagaggcgcctgcgccggcagcgaggacgccgtgaaggccagactggccgccctggccgaccagtggcagttcctggtgcagaagagcgccgagaagagccagaagctgaaggaggccaacaagcagcagaacttcaacaccggcatcaaggacttcgacttctggctgagcgaggtggaggccctgctggccagcgaggactacggcaaggacctggccagcgtgaacaacctgctgaagaagcaccagctgctggaggccgacatcagcgcccacgaggacagactgaaggacctgaacagccaggccgacagcctgatgaccagcagcgccttcgacaccagccaggtgaaggacaagagagacaccatcaacggcagattccagaagatcaagagcatggccgccagcagaagagccaagctgaacgagagccacagactgcaccagttcttcagagacatggacgacgaggagagctggatcaaggagaagaagctgctggtgggcagcgaggactacggcagagacctgaccggcgtgcagaacctgagaaagaagcacaagagactggaggccgagctggccgcccacgagcccgccatccagggcgtgctggacaccggcaagaagctgagcgacgacaacaccatcggcaaggaggagatccagcagagactggcccagttcgtggagcactggaaggagctgaagcagctggccgccgccagaggccagagactggaggagagcctggagtaccagcagttcgtggccaacgtggaggaggaggaggcctggatcaacgagaagatgaccctggtggccagcgaggactacggcgacaccctggccgccatccagggcctgctgaagaagcacgaggccttcgagaccgacttcaccgtgcacaaggacagagtgaacgacgtgtgcaccaacggccaggacctgatcaagaagaacaaccaccacgaggagaacatcagcagcaagatgaagggcctgaacggcaaggtgagcgacctggagaaggccgccgcccagagaaaggccaagctggacgagaacagcgccttcctgcagttcaactggaaggccgacgtggtggagagctggatcggcgagaaggagaacagcctgaagaccgacgactacggcagagacctgagcagcgtgcagaccctgctgaccaagcaggagaccttcgacgccggcctgcaggccttccagcaggagggcatcgccaacatcaccgccctgaaggaccagctgctggccgccaagcacgtgcagagcaaggccatcgaggccagacacgccagcctgatgaagagatggagccagctgctggccaacagcgccgccagaaagaagaagctgctggaggcccagagccacttcagaaaggtggaggacctgttcctgaccttcgccaagaaggccagcgccttcaacagctggttcgagaacgccgaggaggacctgaccgaccccgtgagatgcaacagcctggaggagatcaaggccctgagagaggcccacgacgccttcagaagcagcctgagcagcgcccaggccgacttcaaccagctggccgagctggacagacagatcaagagcttcagagtggccagcaacccctacacctggttcaccatggaggccctggaggagacctggagaaacctgcagaagatcatcaaggagagagagctggagctgcagaaggagcagagaagacaggaggagaacgacaagctgagacaggagttcgcccagcacgccaacgccttccaccagtggatccaggagaccagatgccagcccgccggcgccagctgcatggtggaggagagcggcaccctggagagccagctggaggccaccaagagaaagcaccaggagatcagagccatgagaagccagctgaagaagatcgaggacctgggcgccgccatggaggaggccctgatcctggacaacaagtacaccgagcacagcaccgtgggcctggcccagcagtgggaccagctggaccagctgggcatgagaatgcagcacaacctggagcagcagatccaggccagaaacaccaccggcgtgaccgaggaggccctgaaggagttcagcatgatgttcaagcacttcgacaaggacaagagcggcagactgaaccaccaggagttcaagagctgcctgagaagcctgggctacgacctgcccatggtggaggagggcgagcccgaccccgagttcgaggccatcctggacaccgtggaccccaacagagacggccacgtgagcctgcaggagtacatggccttcatgatcagcagagagaccgagaacgtgaagagcagcgaggagatcgagagcgccttcagagccctgagcagcgagggcaagccctacgtgaccaaggaggagctgtaccagaacctgaccagagagcaggccgactactgcgtgagccacatgaagccctacgtggacggcaagggcagagagctgcccaccgccttcgactacgtggagttcaccagaagcctgttcgtgaactag

SEQ ID NO: 290895 - DNA, 7434 bp, Artificial Sequence
  derived and/or modified sequence
atggaccccagcggcgtgaaggtgctggagaccgccgaggacatccaggagagaagacagcaggtgctggacagataccacagattcaaggagctgagcaccctgagaagacagaagctggaggacagctacagattccagttcttccagagagacgccgaggagctggagaagtggatccaggagaagctgcagatcgccagcgacgagaactacaaggaccccaccaacctgcagggcaagctgcagaagcaccaggccttcgaggccgaggtgcaggccaacagcggcgccatcgtgaagctggacgagaccggcaacctgatgatcagcgagggccacttcgccagcgagaccatcagaaccagactgatggagctgcacagacagtgggagctgctgctggagaagatgagagagaagggcatcaagctgctgcaggcccagaagctggtgcagtacctgagagagtgcgaggacgtgatggactggatcaacgacaaggaggccatcgtgaccagcgaggagctgggccaggacctggagcacgtggaggtgctgcagaagaagttcgaggagttccagaccgacatggccgcccacgaggagagagtgaacgaggtgaaccagttcgccgccaagctgatccaggagcagcaccccgaggaggagctgatcaagaccaagcaggacgaggtgaacgccgcctggcagagactgaagggcctggccctgcagagacagggcaagctgttcggcgccgccgaggtgcagagattcaacagagacgtggacgagaccatcagctggatcaaggagaaggagcagctgatggccagcgacgacttcggcagagacctggccagcgtgcaggccctgctgagaaagcacgagggcctggagagagacctggccgccctggaggacaaggtgaaggccctgtgcgccgaggccgacagactgcagcagagccaccccctgagcgccacccagatccaggtgaagagagaggagctgatcaccaactgggagcagatcagaaccctggccgccgagagacacgccagactgaacgacagctacagactgcagagattcctggccgacttcagagacctgaccagctgggtgaccgagatgaaggccctgatcaacgccgacgagctggccagcgacgtggccggcgccgaggccctgctggacagacaccaggagcacaagggcgagatcgacgcccacgaggacagcttcaagagcgccgacgagagcggccaggccctgctggccgccggccactacgccagcgacgaggtgagagagaagctgaccgtgctgagcgaggagagagccgccctgctggagctgtgggagctgagaagacagcagtacgagcagtgcatggacctgcagctgttctacagagacaccgagcaggtggacaactggatgagcaagcaggaggccttcctgctgaacgaggacctgggcgacagcctggacagcgtggaggccctgctgaagaagcacgaggacttcgagaagagcctgagcgcccaggaggagaagatcaccgccctggacgagttcgccaccaagctgatccagaacaaccactacgccatggaggacgtggccaccagaagagacgccctgctgagcagaagaaacgccctgcacgagagagccatgagaagaagagcccagctggccgacagcttccacctgcagcagttcttcagagacagcgacgagctgaagagctgggtgaacgagaagatgaagaccgccaccgacgaggcctacaaggaccccagcaacctgcagggcaaggtgcagaagcaccaggccttcgaggccgagctgagcgccaaccagagcagaatcgacgccctggagaaggccggccagaagctgatcgacgtgaaccactacgccaaggacgaggtggccgccagaatgaacgaggtgatcagcctgtggaagaagctgctggaggccaccgagctgaagggcatcaagctgagagaggccaaccagcagcagcagttcaacagaaacgtggaggacatcgagctgtggctgtacgaggtggagggccacctggccagcgacgactacggcaaggacctgaccaacgtgcagaacctgcagaagaagcacgccctgctggaggccgacgtggccgcccaccaggacagaatcgacggcatcaccatccaggccagacagttccaggacgccggccacttcgacgccgagaacatcaagaagaagcaggaggccctggtggccagatacgaggccctgaaggagcccatggtggccagaaagcagaagctggccgacagcctgagactgcagcagctgttcagagacgtggaggacgaggagacctggatcagagagaaggagcccatcgccgccagcaccaacagaggcaaggacctgatcggcgtgcagaacctgctgaagaagcaccaggccctgcaggccgagatcgccggccacgagcccagaatcaaggccgtgacccagaagggcaacgccatggtggaggagggccacttcgccgccgaggacgtgaaggccaagctgcacgagctgaaccagaagtgggaggccctgaaggccaaggccagccagagaagacaggacctggaggacagcctgcaggcccagcagtacttcgccgacgccaacgaggccgagagctggatgagagagaaggagcccatcgtgggcagcaccgactacggcaaggacgaggacagcgccgaggccctgctgaagaagcacgaggccctgatgagcgacctgagcgcctacggcagcagcatccaggccctgagagagcaggcccagagctgcagacagcaggtggcccccaccgacgacgagaccggcaaggagctggtgctggccctgtacgactaccaggagaagagccccagagaggtgaccatgaagaagggcgacatcctgaccctgctgaacagcaccaacaaggactggtggaaggtggaggtgaacgacagacagggcttcgtgcccgccgcctacgtgaagaagctggaccccgcccagagcgccagcagagagaacctgctggaggagcagggcagcatcgccctgagacaggagcagatcgacaaccagaccagaatcaccaaggaggccggcagcgtgagcctgagaatgaagcaggtggaggagctgtaccacagcctgctggagctgggcgagaagagaaagggcatgctggagaagagctgcaagaagttcatgctgttcagagaggccaacgagctgcagcagtggatcaacgagaaggaggccgccctgaccagcgaggaggtgggcgccgacctggagcaggtggaggtgctgcagaagaagttcgacgacttccagaaggacctgaaggccaacgagagcagactgaaggacatcaacaaggtggccgaggacctggagagcgagggcctgatggccgaggaggtgcaggccgtgcagcagcaggaggtgtacggcatgatgcccagagacgagaccgacagcaagaccgccagcccctggaagagcgccagactgatggtgcacaccgtggccaccttcaacagcatcaaggagctgaacgagagatggagaagcctgcagcagctggccgaggagagaagccagctgctgggcagcgcccacgaggtgcagagattccacagagacgccgacgagaccaaggagtggatcgaggagaagaaccaggccctgaacaccgacaactacggccacgacctggccagcgtgcaggccctgcagagaaagcacgagggcttcgagagagacctggccgccctgggcgacaaggtgaacagcctgggcgagaccgccgagagactgatccagagccaccccgagagcgccgaggacctgcaggagaagtgcaccgagctgaaccaggcctggagcagcctgggcaagagagccgaccagagaaaggccaagctgggcgacagccacgacctgcagagattcctgagcgacttcagagacctgatgagctggatcaacggcatcagaggcctggtgagcagcgacgagctggccaaggacgtgaccggcgccgaggccctgctggagagacaccaggagcacagaaccgagatcgacgccagagccggcaccttccaggccttcgagcagttcggccagcagctgctggcccacggccactacgccagccccgagatcaagcagaagctggacatcctggaccaggagagagccgacctggagaaggcctgggtgcagagaagaatgatgctggaccagtgcctggagctgcagctgttccacagagactgcgagcaggccgagaactggatggccgccagagaggccttcctgaacaccgaggacaagggcgacagcctggacagcgtggaggccctgatcaagaagcacgaggacttcgacaaggccatcaacgtgcaggaggagaagatcgccgccctgcaggccttcgccgaccagctgatcgccgccggccactacgccaagggcgacatcagcagcagaagaaacgaggtgctggacagatggagaagactgaaggcccagatgatcgagaagagaagcaagctgggcgagagccagaccctgcagcagttcagcagagacgtggacgagatcgaggcctggatcagcgagaagctgcagaccgccagcgacgagagctacaaggaccccaccaacatccagctgagcaagctgctgagcaagcaccagaagcaccaggccttcgaggccgagctgcacgccaacgccgacagaatcagaggcgtgatcgacatgggcaacagcctgatcgagagaggcgcctgcgccggcagcgaggacgccgtgaaggccagactggccgccctggccgaccagtggcagttcctggtgcagaagagcgccgagaagagccagaagctgaaggaggccaacaagcagcagaacttcaacaccggcatcaaggacttcgacttctggctgagcgaggtggaggccctgctggccagcgaggactacggcaaggacctggccagcgtgaacaacctgctgaagaagcaccagctgctggaggccgacatcagcgcccacgaggacagactgaaggacctgaacagccaggccgacagcctgatgaccagcagcgccttcgacaccagccaggtgaaggacaagagagacaccatcaacggcagattccagaagatcaagagcatggccgccagcagaagagccaagctgaacgagagccacagactgcaccagttcttcagagacatggacgacgaggagagctggatcaaggagaagaagctgctggtgggcagcgaggactacggcagagacctgaccggcgtgcagaacctgagaaagaagcacaagagactggaggccgagctggccgcccacgagcccgccatccagggcgtgctggacaccggcaagaagctgagcgacgacaacaccatcggcaaggaggagatccagcagagactggcccagttcgtggagcactggaaggagctgaagcagctggccgccgccagaggccagagactggaggagagcctggagtaccagcagttcgtggccaacgtggaggaggaggaggcctggatcaacgagaagatgaccctggtggccagcgaggactacggcgacaccctggccgccatccagggcctgctgaagaagcacgaggccttcgagaccgacttcaccgtgcacaaggacagagtgaacgacgtgtgcaccaacggccaggacctgatcaagaagaacaaccaccacgaggagaacatcagcagcaagatgaagggcctgaacggcaaggtgagcgacctggagaaggccgccgcccagagaaaggccaagctggacgagaacagcgccttcctgcagttcaactggaaggccgacgtggtggagagctggatcggcgagaaggagaacagcctgaagaccgacgactacggcagagacctgagcagcgtgcagaccctgctgaccaagcaggagaccttcgacgccggcctgcaggccttccagcaggagggcatcgccaacatcaccgccctgaaggaccagctgctggccgccaagcacgtgcagagcaaggccatcgaggccagacacgccagcctgatgaagagatggagccagctgctggccaacagcgccgccagaaagaagaagctgctggaggcccagagccacttcagaaaggtggaggacctgttcctgaccttcgccaagaaggccagcgccttcaacagctggttcgagaacgccgaggaggacctgaccgaccccgtgagatgcaacagcctggaggagatcaaggccctgagagaggcccacgacgccttcagaagcagcctgagcagcgcccaggccgacttcaaccagctggccgagctggacagacagatcaagagcttcagagtggccagcaacccctacacctggttcaccatggaggccctggaggagacctggagaaacctgcagaagatcatcaaggagagagagctggagctgcagaaggagcagagaagacaggaggagaacgacaagctgagacaggagttcgcccagcacgccaacgccttccaccagtggatccaggagaccagaacctacctgctggacggcagctgcatggtggaggagagcggcaccctggagagccagctggaggccaccaagagaaagcaccaggagatcagagccatgagaagccagctgaagaagatcgaggacctgggcgccgccatggaggaggccctgatcctggacaacaagtacaccgagcacagcaccgtgggcctggcccagcagtgggaccagctggaccagctgggcatgagaatgcagcacaacctggagcagcagatccaggccagaaacaccaccggcgtgaccgaggaggccctgaaggagttcagcatgatgttcaagcacttcgacaaggacaagagcggcagactgaaccaccaggagttcaagagctgcctgagaagcctgggctacgacctgcccatggtggaggagggcgagcccgaccccgagttcgaggccatcctggacaccgtggaccccaacagagacggccacgtgagcctgcaggagtacatggccttcatgatcagcagagagaccgagaacgtgaagagcagcgaggagatcgagagcgccttcagagccctgagcagcgagggcaagccctacgtgaccaaggaggagctgtaccagaacctgaccagagagcaggccgactactgcgtgagccacatgaagccctacgtggacggcaagggcagagagctgcccaccgccttcgactacgtggagttcaccagaagcctgttcgtgaactag

SEQ ID NO: 290896 - DNA, 7434 bp, Artificial Sequence
  derived and/or modified sequence
atggacccaagcggcgtcaaagtgctcgaaaccgctgaggatatccaagaaagacggcagcaggtgctggatcgttaccaccgctttaaggagttgtccaccttgcgcaggcagaagcttgaggattcctaccgattccagttctttcagcgagatgcagaggagctggagaaatggatccaggagaaactgcagatcgccagcgacgagaactacaaggacccgacaaaccttcaaggcaagctacaaaaacaccaggccttcgaagctgaagtccaagcgaattccggcgccattgtgaagctagacgagactgggaaccttatgattagcgaaggtcacttcgcatctgaaactatccgcaccagactcatggaactccatcgccaatgggagttactgttagagaaaatgcgggaaaaggggattaaactattgcaggcccagaagctggtgcagtacttgagagagtgcgaggatgtcatggactggatcaatgataaagaagccattgtgacatctgaagaacttggtcaggacctggaacatgtcgaggtgctgcagaagaagttcgaagagtttcagaccgacatggctgcgcacgaagaaagagtcaatgaagtcaaccaatttgctgcgaaactgattcaggagcaacaccccgaagaggaattaatcaagaccaaacaggacgaagtcaatgctgcctggcagcgtcttaaggggttagccttgcagcggcagggaaaactgttcggggcggcggaggtgcaaaggttcaatcgagacgtggatgagaccatttcctggattaaagagaaggagcaactcatggcatctgacgatttcggcagagatctcgctagcgttcaggctctgctccgtaagcacgaggggctggagagggatctggcggcgctggaggataaagtaaaagctttatgcgcagaagcagatcgactccagcaatcacacccactgagcgctactcaaattcaggttaagcgcgaagagttaattaccaattgggagcaaatccgcacgctggccgcggaaaggcacgccaggctcaatgatagctatagactccaacggtttctggcggattttcgggatttaaccagctgggtgaccgaaatgaaggctctcatcaatgcagatgagctcgcctcggatgtggctggcgctgaggcactgctggaccggcatcaggagcacaagggagaaatcgacgcccacgaagatagcttcaagagtgcagatgaatccggacaggcactcctggccgcaggccactatgccagcgacgaagtcagggagaaactcaccgtgcttagcgaggagagagctgctctccttgagctttgggaactgaggcggcaacaatacgagcaatgtatggacttgcagctgttctaccgcgacactgagcaggtcgataattggatgtccaagcaggaggcgttcctccttaacgaggaccttggagattccctggactccgtggaagccctacttaaaaagcacgaagattttgagaagtcccttagtgcccaggaagagaagatcactgccctggacgaatttgccaccaagctcattcaaaataatcactatgccatggaggacgtggccacccgccgggacgccctgttgtcacggaggaacgccctgcacgagcgagccatgagaaggcgagcgcagcttgcagattcttttcacctacagcagttttttcgggactcagatgaactgaaaagctgggttaacgagaaaatgaagaccgccaccgacgaagcttacaaggaccctagtaatttgcaaggaaaggtccagaaacatcaggcgttcgaggccgaactgagcgccaatcagagtcgaatcgacgccctggaaaaggcagggcaaaagctaatcgatgtcaatcattatgccaaggatgaggtcgcggcccgaatgaacgaggtcataagcctctggaagaagctcctcgaagccaccgagctaaaggggatcaagctaagggaagcgaaccagcagcagcagttcaatagaaatgtagaagacatagagttgtggctctacgaggtcgagggccatctggctagcgatgattacgggaaggaccttaccaacgtgcagaatctgcaaaaaaaacacgctttgctcgaagctgatgtggctgctcaccaggatcggatcgatggcattacaatacaggcgcggcagttccaggacgcaggtcactttgacgctgaaaacataaagaagaagcaggaggcattagtggcccggtacgaggccctcaaagagcccatggtggctagaaagcaaaagttagcagattccctgaggctacagcaactcttcagagatgtcgaggacgaagaaacttggataagagagaaggagcccatcgccgccagtacaaaccggggcaaagaccttatcggggtgcagaatcttctaaaaaagcatcaagccctgcaggcggagatagccggacacgagccccgtattaaggcagtgactcagaaaggaaacgccatggtggaggaaggtcatttcgcggcagaggatgttaaggcaaagcttcacgagctgaatcagaagtgggaggcccttaaagccaaggcctcccagcgccgacaggacctggaagatagtctgcaggcgcaacagtacttcgccgacgctaacgaggccgagagctggatgcgggagaaagagccaattgtggggagcaccgactatgggaaagatgaggactccgccgaagcactgctgaagaaacacgaagcattaatgtcagacctgagtgcttatggaagcagcattcaggcactgcgggaacaggcccaatcatgcagacagcaggtcgcgccaaccgacgacgagacaggcaaggaactggtgctggctctgtacgattatcaggaaaagtccccacgggaagtcaccatgaagaagggcgacatcttgacactgctgaattcgactaataaggattggtggaaagtcgaagttaatgatagacaggggtttgtccctgcggcctatgtgaaaaagctggaccctgctcaatccgccagtcgcgaaaacctgctggaggaacagggctccattgcgctgcggcaagagcagatagacaatcagacccgtattactaaagaagcagggagcgtcagcctccgcatgaaacaggtcgaagagctctatcattctctgttggaactcggcgagaagcggaagggaatgctggagaaatcttgtaaaaaattcatgttgttccgggaggcgaacgaactacagcaatggatcaatgaaaaggaggctgccttaaccagcgaggaggtgggcgcagatctcgagcaagttgaggtactgcagaagaaattcgatgactttcagaaggacctcaaggccaatgagtctcgattaaaagatatcaataaggtggccgaggacctcgagtcagaaggcttaatggctgaagaagtccaagcggtgcagcagcaagaggtatacgggatgatgccccgggatgaaacagacagcaaaacagcctcaccatggaaatctgcgcgcctcatggtacataccgtggccacctttaacagcatcaaggaattaaatgagagatggagaagtctccagcagctcgcggaggagcgctcgcagctcctgggcagtgcccatgaagtgcaaaggtttcacagggacgctgacgaaaccaaggaatggattgaggagaaaaaccaggcgttgaataccgacaattatggtcacgacctcgcgagcgtgcaggctctacagaggaagcacgagggttttgagcgggacctggcagccctgggcgacaaggtgaactcattgggagagaccgccgagcgacttatccagagtcacccagaaagtgccgaagatctccaggagaaatgcaccgaactcaaccaggcctggagtagcctggggaagagggcagatcagagaaaggcaaaattaggtgattcacacgatctccagaggttcctgtctgattttcgggacctgatgtcttggataaacggcatcagggggttggtgtcctctgacgaactagcaaaggacgtgacaggggctgaggcgctcctggaaagacaccaggagcataggaccgaaattgacgctcgagcaggcaccttccaggcctttgagcaatttggtcagcaattgctggcccacggacattacgcctcccccgagattaaacaaaaactggatatcctggatcaggaaagagccgacctggagaaagcctgggtgcaacgtaggatgatgctggatcagtgcttagagttacagctgtttcatagagactgtgagcaagcggagaactggatggccgccagggaggcatttttgaacacagaagacaagggcgattcgctggattccgtggaagctcttattaaaaaacatgaagactttgacaaagcgatcaatgtacaagaggaaaagattgccgcgctgcaggctttcgccgaccagctcattgctgcgggccactatgcaaagggggacatcagctcccgtcgcaacgaggtccttgatcgatggaggcgactgaaagctcaaatgatagagaaacgctctaaactcggggagagccaaacgcttcagcagttcagccgagacgtcgacgaaatcgaggcctggatcagtgaaaaactgcagactgcctctgatgagtcctataaagatcctacgaatattcaagtcagcctgatgttgtctaagcatcaaaagcaccaggcgttcgaggccgagcttcatgctaatgcagatcgcatccggggcgtaattgatatgggtaactccctcattgagaggggcgcctgcgctggctctgaggacgctgttaaggctagactggctgccttggcggatcagtggcagtttttagtgcagaagagcgccgaaaagagtcagaaactcaaggaagccaacaagcagcagaattttaataccggtattaaggacttcgacttctggctttctgaggtggaggctctcctcgcctcggaggactatggaaaggatctggccagcgtgaataacctgctcaagaagcaccaactgctggaggccgacatttctgctcatgaggatcgattaaaagacttgaattcccaggccgactcgctgatgaccagctcggcgttcgataccagccaagtgaaggataaacgggacaccatcaacgggaggttccagaaaatcaagtcaatggccgcgtctcggcgagccaagctcaacgagtcacacagactccatcagttttttagagacatggatgacgaagaaagctggatcaaggaaaagaaactcctcgtcggcagtgaggattacggacgggatctcacaggagtacaaaatcttcggaagaagcacaaaagactggaggccgaacttgccgctcacgagcccgcaattcagggagttctcgacaccggaaaaaagttgagcgacgataacacaattggaaaagaggagatccaacagaggctggctcagttcgttgaacattggaaagagctgaagcagctcgccgccgctcgcggacaacgcctcgaagaatcccttgagtatcagcagtttgttgccaatgtggaggaggaagaggcttggattaatgaaaaaatgacattagtcgcgagcgaagattacggcgacactctcgcagctatccagggtctcttgaaaaaacacgaggccttcgagacagattttacagtccataaggacagggtgaacgatgtgtgtactaacgggcaggacctgataaagaagaacaaccatcatgaggaaaacataagctcaaaaatgaaagggcttaatggaaaggtctctgatctcgaaaaagctgcagcccagcggaaggccaaactggatgagaatagcgctttcctgcaattcaactggaaggctgatgtagttgaaagctggattggcgagaaggagaacagtctgaagaccgacgattacgggcgcgatctgagctccgtccagaccttactgactaagcaggaaactttcgacgctggcctgcaggccttccagcaggagggaatcgcgaatattactgccctgaaggaccagctactggctgccaagcatgtgcaatccaaggccatcgaggcacgacatgccagtctgatgaagcgctggtcccagctccttgctaacagcgcggctcgaaagaagaagctcctagaggctcaatcccattttcgcaaggtggaggacctgttcctgaccttcgccaaaaaggccagcgccttcaatagttggtttgagaacgcggaagaggacctgacagaccctgtgaggtgcaatagccttgaagaaatcaaggctctgcgggaagcccacgacgcttttagaagcagcctgtcttcagcacaggcagattttaaccagctggctgaactggatcgccagatcaaaagttttcgggtggcctcgaacccatacacctggttcaccatggaggcacttgaggagacgtggaggaacctacagaaaatcatcaaggagcgggagctggaattgcaaaaggaacagcgcaggcaggaagagaatgacaagctccgccaggaattcgcccaacacgctaatgcctttcatcaatggattcaggagactcgctgtcaacccgcgggggcttcatgcatggtggaggagtctgggacactagagtcccaactagaagcaacaaaacgcaagcatcaggagatcagggctatgcgctcacagctgaagaaaatcgaggacctcggtgccgctatggaggaggccctgatcctggacaacaagtatacagagcactctaccgtaggattagcccagcagtgggaccaacttgatcagctgggaatgaggatgcaacacaacctagaacagcagatccaggccaggaacaccactggcgtcacagaggaggcacttaaggagtttagcatgatgttcaaacacttcgacaaggacaaaagcggcagactgaaccaccaggaatttaaatcctgcctgagatcgcttggttatgacctccctatggtggaggagggggaaccagatccagagttcgaagccatccttgacaccgttgaccccaatcgtgacggacatgtctctctgcaagagtatatggcattcatgattagccgtgagacggagaacgttaagagctccgaagaaatagaaagcgccttccgggccttgtcaagtgaaggaaaaccctatgtgactaaagaagaactgtatcagaatttgacccgcgaacaggctgactactgcgtctctcacatgaaaccttacgtggacggaaagggacgggaattaccaaccgcgttcgattacgttgaattcactcgctccctttttgtgaactag

SEQ ID NO: 290897 - DNA, 7434 bp, Artificial Sequence
  derived and/or modified sequence
atggacccctcaggggtgaaagtcctcgagaccgccgaggacattcaggaacgaagacagcaggttctcgacaggtaccaccgctttaaggaactgagcactctaagacgacagaaactggaggatagctaccggtttcagtttttccagagagatgccgaagagctagagaagtggatccaggaaaagctgcagatcgcatctgacgaaaattacaaggatcccacaaatctgcaaggcaaacttcagaagcatcaagccttcgaagcagaggtgcaagcaaactctggcgcaatcgtgaagttggatgaaaccggcaatcttatgatctctgagggtcacttcgcatcagagaccatccgaacccgtctcatggagctgcatcgccagtgggagctgctcctcgagaaaatgcgcgagaaggggatcaagctcctgcaggcccagaaactcgtgcagtaccttcgcgagtgcgaagatgtaatggactggatcaatgacaaggaggcgatagtgaccagcgaggagctcggacaggatctggaacatgtggaggtcttgcagaaaaagttcgaagagtttcagactgacatggcagctcatgaagaaagggtgaacgaggtgaaccagtttgccgccaagcttatccaggaacagcaccccgaagaggagctgataaagactaaacaggacgaagtcaacgctgcctggcagcggctgaaggggttggcccttcagaggcaggggaaactgtttggggcagctgaggttcagagatttaaccgggacgttgacgaaacaatctcctggataaaggaaaaagaacagctgatggcctccgacgattttggccgagatttggcgtccgtgcaagcccttcttaggaaacacgagggacttgaacgcgatctggccgctctggaggataaagtgaaagcactctgcgccgaggctgaccggctccaacagtcgcaccctctttccgcaacacaaattcaagtcaaacgtgaagagttaatcaccaattgggagcagatccggacactggcggccgaaaggcacgcccgcctgaacgattcttacaggctccagcgtttcctggctgattttcgggatctgactagctgggttactgaaatgaaggccctcattaacgcagacgagctggcgtcggacgtggcaggcgccgaagcactgctagatagacatcaggagcacaagggcgaaatcgatgcgcacgaagatagctttaaatccgcggacgagtctgggcaagctctccttgccgcaggccactatgcctccgatgaggtcagagagaagctgaccgtgttgagtgaggagcgggctgcactgctcgagctctgggaattgcggcggcagcagtacgagcagtgcatggacttacagctattttaccgtgacactgagcaggtggataactggatgagcaagcaggaagctttcctcctgaatgaggacctgggggattctctagactccgttgaggcacttctcaagaagcatgaggactttgagaagagtctgagcgctcaggaggaaaagatcaccgccctggacgagtttgcaaccaagctgattcagaataatcactatgccatggaggatgtggcaactcgaagagatgcactgctcagcaggcggaatgctttacacgaacgcgcgatgagacgtagagcgcaactggccgacagctttcatctgcagcagttttttcgggatagtgacgaattgaaaagctgggttaacgaaaagatgaagacagccactgatgaggcttataaagatcctagcaacttacagggaaaagtccagaaacatcaggccttcgaggctgagctctccgccaatcagagccgcatcgatgcactcgaaaaagcaggccagaaacttatcgatgttaatcactatgctaaggacgaagttgcagcacgcatgaatgaggtaattagtctatggaagaagttactcgaagcaacagaactgaaagggattaagctgagggaagcaaatcaacagcagcagtttaatcgcaatgttgaggatatcgagttgtggctttatgaagtcgagggccacttagccagcgacgactacggaaaggacttgactaacgtccagaatctgcaaaagaaacacgccctgctggaggctgatgtcgccgcccaccaggatagaatcgatggaatcacaatccaggcacggcagttccaagacgctggtcatttcgacgccgagaatattaaaaagaaacaggaggcccttgtggcccggtacgaagccctaaaggagcccatggttgcccgaaagcagaaattggccgatagcctgagattgcagcaattgttccgcgacgttgaagacgaagagacttggatacgagagaaggaacccatcgctgcctcaacaaatcggggcaaagatctgatcggtgtacagaatctgctgaaaaagcaccaggccctgcaagcggaaatcgcaggtcacgaaccacgtattaaagccgtaacacaaaagggaaatgccatggtagaggagggccactttgccgccgaggatgtgaaagcgaagctgcatgagctcaatcagaaatgggaggctttgaaagccaaggcgagccaacgcaggcaagacctggaggatagcttgcaggcccagcagtactttgccgatgctaatgaagcagagagctggatgagggagaaagaacctatagtaggaagcacagattacggcaaagacgaggactccgctgaggccctgctcaaaaaacacgaggcactcatgagcgatctgagtgcgtatggaagctcaatccaggctctgcgtgagcaggcccagtcttgccgacagcaggtcgcacctacagacgatgaaaccggcaaggaactcgtgctcgccctatatgactaccaggaaaagtcgccacgggaggtcacaatgaagaaaggcgatatcctgactctgctcaactcgacaaataaagactggtggaaggtagaagtgaatgatcgtcagggcttcgtgccagcagcttacgtcaaaaagctagaccctgcacagagtgctagtagggagaacctgctggaagagcagggaagtattgccttaaggcaggagcagattgacaatcaaaccaggatcaccaaagaggcgggatctgtctccttgcgaatgaagcaggtggaagaactctatcactcactgctggagttaggggagaaacgaaagggtatgctcgaaaaatcttgtaagaagttcatgctgtttcgagaggccaacgaattacaacagtggatcaacgaaaaagaagctgcgctcacgtccgaagaggtcggcgcggacctagagcaggtggaggtgctgcagaagaaattcgatgatttccaaaaagacttgaaagctaacgagagcagactgaaagacatcaataaggtagcagaagacctggaaagtgaaggtctgatggccgaggaagtgcaggcagtgcaacaacaggaggtctacggaatgatgcctagggacgagacggacagcaagactgctagcccatggaaatccgcccgccttatggtgcacactgtggctacattcaactcaatcaaagagttgaacgaacgctggcgatcactccagcaactggctgaagaaagaagccaattactgggttccgcccacgaggtgcaacgcttccatagggacgcagatgaaaccaaggaatggatcgaggagaagaaccaggcccttaacactgacaattacggacacgacttggcttcggtccaggcactacagcggaagcatgaaggctttgaaagggatctagccgctctcggggacaaggtgaattctctgggagaaactgcagagcggctgatccagagccaccctgagtcggctgaagatcttcaagaaaagtgtacggagctcaatcaggcctggtcctctcttggcaagcgcgcagatcagcgcaaggctaagttgggagatagtcatgacctgcagcgttttctaagcgacttcagagatttgatgtcctggattaacggaatacgtggcctggtttcatcagatgaattagccaaggacgtcaccggcgctgaggctctgttggagcggcatcaggaacacagaaccgaaattgacgccagggccggcacgtttcaggccttcgagcagttcggccagcagcttttggctcatggccattatgcctcccctgaaattaagcagaagctagacattcttgaccaggagcgagcagatttggaaaaggcatgggtgcaaaggagaatgatgcttgatcagtgtctggagctccagctcttccatagggattgtgaacaggcggagaattggatggctgctcgggaggcattcttgaatacggaggataaaggagactccttggactcggttgaagcactaataaagaaacatgaagactttgataaggcaattaatgttcaagaggaaaagatcgccgctctgcaggcttttgcagaccagctgatcgcagctggccattacgccaagggtgatataagttcccgcaggaatgaggtactggatcggtggagaaggctgaaggcacagatgatcgaaaaacggagtaagctgggcgagtcccaaaccctgcagcagttttctagggacgtcgacgagattgaggcctggatatctgaaaagctccaaacagcctctgacgagtcgtacaaggatccaacaaatatacagctgtccaaactcctcagcaagcatcaaaagcaccaggctttcgaagcggagctgcacgccaacgctgatcgaatcaggggagtgattgatatggggaattcactcatcgagaggggcgcatgtgccgggagcgaggatgcagtaaaagcccggttagccgcactcgctgaccaatggcaattcttagtccagaagagcgccgaaaaaagccaaaagctgaaggaggccaataaacagcagaacttcaacacaggcatcaaagatttcgatttctggctgagcgaggtggaagcccttctggccagtgaggactatggaaaagatctcgctagcgtgaacaatctgctaaaaaagcaccagctgctggaggccgatattagcgcccatgaggacagattgaaggaccttaattcgcaggcggatagcctcatgacgagctccgcatttgacactagccaggttaaagacaagagggatactataaacgggagattccagaaaatcaaaagcatggccgcatctcgtagggcaaaactaaacgaatcccaccggcttcaccagtttttccgcgacatggatgacgaggaatcctggatcaaagagaaaaagcttcttgtgggcagcgaggactacggccgggatcttacgggcgtgcaaaatctgaggaagaagcataagaggctagaggccgagctggccgctcacgaacctgccattcagggtgtgctggacactggcaaaaagctgtccgacgacaacaccattggcaaggaggaaattcaacaaaggctcgcccagtttgtggagcactggaaggaattgaagcagttggctgccgctcgggggcagagactggaggaatcactcgagtatcagcagtttgtcgccaacgtggaggaagaggaagcctggatcaatgagaagatgaccctggtggcaagtgaggattacggcgatactctggcagctattcagggccttctgaaaaaacacgaagccttcgaaaccgatttcacggtgcacaaagaccgggtgaacgacgtctgtacgaacgggcaggatctcatcaagaagaataaccaccatgaagaaaatatttctagcaagatgaagggcctcaacggaaaagtgagcgaccttgaaaaagctgctgctcagagaaaggcaaagctggatgagaactccgcatttctgcaatttaattggaaagcggacgtggttgaatcatggattggggagaaagagaattctctcaaaaccgacgattacggccgagacctgtcttctgtgcagaccctgctgactaagcaggagaccttcgacgcgggcctacaggcgttccaacaggagggaatagcaaatatcacagccctcaaagaccagttactggcggccaaacacgtccagtccaaggctattgaagcgcgtcacgcttcactgatgaaaagatggtcccagttgcttgccaactcggccgcccggaagaaaaagctcctggaagctcagtcccatttccgcaaggtggaggacctcttcctcacctttgcgaaaaaggcttccgcctttaattcttggttcgaaaatgccgaagaagacctgaccgatccagtgagatgcaactctcttgaggagattaaggccttacgcgaagctcatgatgctttccgatccagtctctctagcgctcaggctgacttcaaccagctggccgagcttgataggcaaataaagagcttccgagtagcttccaacccttacacctggttcacaatggaggccctagaagagacttggcgcaatctccagaagatcatcaaggaacgggaactcgagctgcaaaaagagcaacgcagacaggaggaaaacgataagctaagacaggaatttgctcagcatgccaacgcatttcaccagtggatacaggaaacgcgaacctacttgctcgacggcagctgtatggttgaagagagcgggacgctcgagagtcaacttgaggccacaaagcggaaacatcaggagatcagagccatgaggtcccagttaaaaaaaatcgaagacctcggcgcagccatggaagaggccctgatcctggacaataagtacactgagcattctactgtcggactcgcacagcagtgggaccagctggatcagctgggcatgagaatgcagcacaatctcgaacagcagattcaagcgcgcaacaccactggggtgaccgaagaagccttaaaagaattttctatgatgtttaagcatttcgacaaggacaaatccggtcggttaaatcaccaggagttcaagagttgcctaaggagccttggatatgatctgccaatggtagaagaaggtgaaccggacccagagtttgaggcgatcctcgacacggtggaccccaaccgcgacggccatgtgagtctgcaggagtatatggctttcatgatctccagggagaccgaaaatgtgaaaagctcagaggaaatcgaaagtgcttttcgtgctttatcttccgaaggtaaaccatacgtgactaaggaggagctctaccaaaacctgacacgggagcaggccgactattgcgtcagccacatgaagccttacgtggatggcaagggacgggaactccccacggcatttgattacgtcgagttcaccagaagtctgttcgtaaactag

SEQ ID NO: 290898 - DNA, 7434 bp, Artificial Sequence
  derived and/or modified sequence
atggaccccagcggcgtgaaggtgctggagacagctgaggacatccaggagcggcggcagcaggtgctggaccgctaccaccgcttcaaggagctgagcaccctgcggcggcagaagctggaggacagctaccgcttccagttcttccagagagatgctgaggagctggagaagtggatccaggagaagctgcagatcgccagtgatgagaactacaaggaccccaccaacctgcagggcaagctgcagaagcaccaggcctttgaggccgaggtgcaggccaacagcggggccatcgtgaagctggatgaaacaggcaacctgatgatcagcgagggccactttgccagcgagaccatccgcacccggctgatggagctgcaccggcagtgggagctgctgctggagaagatgagggagaagggcatcaagctgctgcaggcccagaagctggtgcagtacctgagagaatgtgaagatgtgatggactggatcaatgacaaggaggccatcgtgaccagcgaggagctgggccaggacctggagcacgtggaggtgctgcagaagaagtttgaggagttccagacagacatggccgcccacgaggagcgggtgaatgaggtgaaccagtttgctgccaagctgatccaggagcagcaccctgaggaggagctgatcaagaccaagcaggatgaggtgaatgctgcctggcagaggctgaagggcctggccctgcagaggcagggcaagctgtttggagctgctgaggtgcagcgcttcaacagagatgtggatgagaccatctcctggatcaaggagaaggagcagctgatggccagtgatgactttggccgggacctggcctctgtgcaggccctgctgaggaagcatgagggcctggagcgggacctggccgccctggaggacaaggtgaaggccctgtgtgccgaggccgaccggctgcagcagagccaccccctgagcgccacccagatccaggtgaagcgggaggagctgatcaccaactgggagcagatccgcaccctggccgctgagagacatgcccggctgaatgacagctaccgcctgcagcgcttcctggccgacttccgggacctgacctcctgggtgacagagatgaaggccctgatcaatgctgatgagctggccagtgatgtggccggggctgaggccctgctggacagacaccaggagcacaagggggagattgatgcccacgaggacagcttcaagtctgcagatgaaagtggccaggccctgctggccgccggccactacgccagtgatgaggtgcgggagaagctgactgtgctgtctgaggagcgggccgccctgctggagctgtgggagctgcggcggcagcagtatgagcagtgcatggacctgcagctgttctacagagacacagagcaggtggacaactggatgagcaagcaggaggccttcctgctgaatgaagacctgggggacagcctggacagcgtggaggccctgctgaagaagcatgaggactttgagaagagcctgagcgcccaggaggagaagatcacagccctggatgaatttgccaccaagctgatccagaacaaccactacgccatggaggatgtggccaccaggagagatgccctgctgagcagaagaaatgccctgcacgagcgggccatgagaagaagagcccagctggccgacagcttccacctgcagcagttcttccgggacagtgatgagctgaagtcctgggtgaatgagaagatgaagacagccacagatgaggcctacaaggaccccagcaacctgcagggcaaggtgcagaagcaccaggcctttgaagctgagctgagcgccaaccagagcagaattgatgccctggagaaggccggccagaagctgattgatgtgaaccactacgccaaggatgaggtggccgccaggatgaatgaggtgatcagcctgtggaagaagctgctggaggccacagagctgaagggcatcaagctgcgggaggccaaccagcagcagcagttcaacagaaatgtggaggacatcgagctgtggctgtatgaggtggagggccacctggccagtgatgattatggcaaggacctgaccaacgtgcagaacctgcagaagaagcacgccctgctggaggctgatgtggccgcccaccaggacagaattgatggcatcaccatccaggcccggcagttccaggatgctggccactttgatgctgagaacatcaagaagaagcaggaggccctggtggcccgctatgaggccctgaaggagcccatggtggccaggaagcagaagctggccgacagcctgcggctgcagcagctgttcagagatgtggaggatgaggagacctggatccgggagaaggagcccatcgccgccagcaccaacagaggcaaggacctgattggagtgcagaacctgctgaagaagcaccaggccctgcaggccgagattgctggccacgagccccgcatcaaggctgtgacccagaagggaaatgccatggtggaggagggccactttgctgctgaagatgtgaaggccaagctgcacgagctgaaccagaagtgggaggccctgaaggccaaggccagccagaggcggcaggacctggaggacagcctgcaggcccagcagtactttgctgatgccaatgaggccgagagctggatgagggagaaggagcccatcgtgggcagcacagattatggcaaggatgaggacagcgctgaggccctgctgaagaagcatgaggccctgatgtctgacctgagcgcctacggcagcagcatccaggccctgcgggagcaggcccagagctgccggcagcaggtggcccccacagatgatgaaacaggcaaggagctggtgctggccctgtatgactaccaggagaagagcccccgggaggtgaccatgaagaagggggacatcctgaccctgctgaacagcaccaacaaggactggtggaaggtggaggtgaatgaccggcagggctttgtgcctgctgcctacgtgaagaagctggaccctgcccagagcgccagccgggagaacctgctggaggagcagggcagcatcgccctgcggcaggagcagattgacaaccagacccgcatcaccaaggaggccggctctgtgtccctgaggatgaagcaggtggaggagctgtaccacagcctgctggagctgggggagaagaggaagggcatgctggagaagagctgcaagaagttcatgctgttccgggaggccaatgagctgcagcagtggatcaatgagaaggaggccgccctgaccagcgaggaggtgggcgctgacctggagcaggtggaggtgctgcagaagaagtttgatgacttccagaaggacctgaaggccaatgaaagccggctgaaggacatcaacaaggtggccgaggacctggagagcgagggcctgatggccgaggaggtgcaggccgtgcagcagcaggaggtgtatggcatgatgcccagagatgaaacagacagcaagacagccagcccctggaagagcgcccggctgatggtgcacacagtggccaccttcaacagcatcaaggagctgaatgaacgctggaggagcctgcagcagctggccgaggagaggagccagctgctgggcagcgcccacgaggtgcagcgcttccacagagatgctgatgagaccaaggagtggattgaggagaagaaccaggccctgaacacagacaactacggccatgacctggcctctgtgcaggccctgcagaggaagcatgagggctttgagcgggacctggccgccctgggggacaaggtgaacagcctgggggagacagctgagcggctcatccagagccaccctgagagcgctgaggacctgcaggagaagtgcacagagctgaaccaggcctggagcagcctgggcaagagagctgaccagaggaaggccaagctgggggacagccatgacctgcagcgcttcctgagtgacttccgggacctgatgtcctggatcaatggcatccggggcctggtgtccagtgatgagctggccaaggatgtgactggagctgaggccctgctggagcggcaccaggagcacaggacagaaattgatgcccgggccggcaccttccaggcctttgagcagtttggccagcagctgctggcccacggccactacgccagccctgagatcaagcagaagctggacatcctggaccaggagagagctgacctggagaaggcctgggtgcagaggaggatgatgctggaccagtgcctggagctgcagctgttccaccgggactgtgagcaggccgagaactggatggccgcccgggaggccttcctgaacacagaagataaaggagacagcctggacagcgtggaggccctgatcaagaagcatgaggactttgacaaggccatcaacgtgcaggaggagaagattgctgccctgcaggcctttgctgaccagctgattgctgctggccactacgccaagggggacatcagcagcagaagaaatgaggtgctggaccgctggaggcggctgaaggcccagatgattgagaagaggagcaagctgggggagagccagaccctgcagcagttcagcagagatgtggatgaaattgaggcctggatcagcgagaagctgcagacagccagtgatgagagctacaaggaccccaccaacatccaggtgtccctgatgctgagcaagcaccagaagcaccaggcctttgaggccgagctgcacgccaatgctgaccgcatccggggcgtgattgacatgggcaacagcctcatcgagcggggggcctgtgccggctctgaagatgctgtgaaggcccggctggccgccctggccgaccagtggcagttcctggtgcagaagtctgctgagaagagccagaagctgaaggaggccaacaagcagcagaacttcaacacaggcatcaaggactttgacttctggctgtctgaggtggaggccctgctggcctctgaagattatggcaaggacctggcctctgtgaacaacctgctgaagaagcaccagctgctggaggccgacatcagcgcccacgaggaccggctgaaggacctgaacagccaggccgacagcctgatgaccagcagcgcctttgacaccagccaggtgaaggacaagagggacaccatcaatggccgcttccagaagatcaagtccatggccgccagcagaagagccaagctgaatgaaagccaccggctgcaccagttcttccgggacatggatgatgaggagagctggatcaaggagaagaagctgctggtgggctctgaagattatggccgggacctgactggagtgcagaacctgaggaagaagcacaagaggctggaggccgagctggccgcccacgagcccgccatccagggcgtgctggacaccgggaagaagctgagtgatgacaacaccatcggcaaggaggagatccagcagaggctggcccagtttgtggagcactggaaggagctgaagcagctggccgccgcccggggccagaggctggaggagagcctggagtaccagcagtttgtggccaacgtggaggaggaggaggcctggatcaatgagaagatgaccctggtggcctctgaagattatggagacaccctggccgccatccagggcctgctgaagaagcatgaggcctttgaaacagacttcaccgtgcacaaggacagagtgaatgatgtgtgcaccaacggccaggacctgatcaagaagaacaaccaccacgaggagaacatcagcagcaagatgaagggcctgaatggcaaggtgtctgacctggagaaggccgccgcccagaggaaggccaagctggatgaaaattctgccttcctgcagttcaactggaaggcagatgtggtggagagctggattggagagaaggagaacagcctgaagacagatgattatggccgggacctgagctctgtgcagaccctgctgaccaagcaggagacctttgatgctggcctgcaggccttccagcaggagggcatcgccaacatcacagccctgaaggaccagctgctggccgccaagcacgtgcagagcaaggccatcgaggcccggcatgccagcctgatgaagcgctggagccagctgctggccaacagcgctgccaggaagaagaagctgctggaggcccagagccacttcaggaaggtggaggacctcttcctgacctttgccaagaaggccagcgccttcaacagctggtttgaaaatgctgaggaggacctgacagatcctgtgcgctgcaacagcctggaggagatcaaggccctgcgggaggcccatgatgccttccgcagcagcctgagcagcgcccaggccgacttcaaccagctggccgagctggaccggcagatcaagagcttccgggtggccagcaacccctacacctggttcaccatggaggccctggaggagacctggaggaacctgcagaagatcatcaaggagcgggagctggagctgcagaaggagcagaggcggcaggaggagaatgacaagctgcggcaggagtttgcccagcacgccaatgccttccaccagtggatccaggagacccgctgccagcctgctggggccagctgcatggtggaggagagcggcaccctggagagccagctggaggccaccaagaggaagcaccaggagatccgggccatgaggagccagctgaagaagattgaggacctgggcgccgccatggaggaggccctgatcctggacaacaagtacacagagcacagcacagtgggcctggcccagcagtgggaccagctggaccagctgggcatgaggatgcagcacaacctggagcagcagatccaggccaggaacaccactggagtgacagaggaggccctgaaggagttctccatgatgttcaagcactttgacaaggacaagagcggccgcctgaaccaccaggagttcaagagctgcctgcggagcctgggctatgacctgcccatggtggaggagggggagccagaccctgagtttgaggccatcctggacacagtggaccccaacagagatggccacgtgtccctgcaggagtacatggccttcatgatcagccgggagacagaaaatgtgaagagcagcgaggagattgagagcgccttccgggccctgagcagcgagggcaagccctacgtgaccaaggaggagctgtaccagaacctgacccgggagcaggccgactactgtgtgagccacatgaagccctacgtggatggcaagggccgggagctgcccacagcctttgattatgtggagttcaccaggagcctgtttgtgaactag

SEQ ID NO: 290899 - DNA, 7434 bp, Artificial Sequence
  derived and/or modified sequence
atggaccccagcggcgtgaaggtgctggagacagctgaggacatccaggagcggcggcagcaggtgctggaccgctaccaccgcttcaaggagctgagcaccctgcggcggcagaagctggaggacagctaccgcttccagttcttccagagagatgctgaggagctggagaagtggatccaggagaagctgcagatcgccagtgatgagaactacaaggaccccaccaacctgcagggcaagctgcagaagcaccaggcctttgaggccgaggtgcaggccaacagcggggccatcgtgaagctggatgaaacaggcaacctgatgatcagcgagggccactttgccagcgagaccatccgcacccggctgatggagctgcaccggcagtgggagctgctgctggagaagatgagggagaagggcatcaagctgctgcaggcccagaagctggtgcagtacctgagagaatgtgaagatgtgatggactggatcaatgacaaggaggccatcgtgaccagcgaggagctgggccaggacctggagcacgtggaggtgctgcagaagaagtttgaggagttccagacagacatggccgcccacgaggagcgggtgaatgaggtgaaccagtttgctgccaagctgatccaggagcagcaccctgaggaggagctgatcaagaccaagcaggatgaggtgaatgctgcctggcagaggctgaagggcctggccctgcagaggcagggcaagctgtttggagctgctgaggtgcagcgcttcaacagagatgtggatgagaccatctcctggatcaaggagaaggagcagctgatggccagtgatgactttggccgggacctggcctctgtgcaggccctgctgaggaagcatgagggcctggagcgggacctggccgccctggaggacaaggtgaaggccctgtgtgccgaggccgaccggctgcagcagagccaccccctgagcgccacccagatccaggtgaagcgggaggagctgatcaccaactgggagcagatccgcaccctggccgctgagagacatgcccggctgaatgacagctaccgcctgcagcgcttcctggccgacttccgggacctgacctcctgggtgacagagatgaaggccctgatcaatgctgatgagctggccagtgatgtggccggggctgaggccctgctggacagacaccaggagcacaagggggagattgatgcccacgaggacagcttcaagtctgcagatgaaagtggccaggccctgctggccgccggccactacgccagtgatgaggtgcgggagaagctgactgtgctgtctgaggagcgggccgccctgctggagctgtgggagctgcggcggcagcagtatgagcagtgcatggacctgcagctgttctacagagacacagagcaggtggacaactggatgagcaagcaggaggccttcctgctgaatgaagacctgggggacagcctggacagcgtggaggccctgctgaagaagcatgaggactttgagaagagcctgagcgcccaggaggagaagatcacagccctggatgaatttgccaccaagctgatccagaacaaccactacgccatggaggatgtggccaccaggagagatgccctgctgagcagaagaaatgccctgcacgagcgggccatgagaagaagagcccagctggccgacagcttccacctgcagcagttcttccgggacagtgatgagctgaagtcctgggtgaatgagaagatgaagacagccacagatgaggcctacaaggaccccagcaacctgcagggcaaggtgcagaagcaccaggcctttgaagctgagctgagcgccaaccagagcagaattgatgccctggagaaggccggccagaagctgattgatgtgaaccactacgccaaggatgaggtggccgccaggatgaatgaggtgatcagcctgtggaagaagctgctggaggccacagagctgaagggcatcaagctgcgggaggccaaccagcagcagcagttcaacagaaatgtggaggacatcgagctgtggctgtatgaggtggagggccacctggccagtgatgattatggcaaggacctgaccaacgtgcagaacctgcagaagaagcacgccctgctggaggctgatgtggccgcccaccaggacagaattgatggcatcaccatccaggcccggcagttccaggatgctggccactttgatgctgagaacatcaagaagaagcaggaggccctggtggcccgctatgaggccctgaaggagcccatggtggccaggaagcagaagctggccgacagcctgcggctgcagcagctgttcagagatgtggaggatgaggagacctggatccgggagaaggagcccatcgccgccagcaccaacagaggcaaggacctgattggagtgcagaacctgctgaagaagcaccaggccctgcaggccgagattgctggccacgagccccgcatcaaggctgtgacccagaagggaaatgccatggtggaggagggccactttgctgctgaagatgtgaaggccaagctgcacgagctgaaccagaagtgggaggccctgaaggccaaggccagccagaggcggcaggacctggaggacagcctgcaggcccagcagtactttgctgatgccaatgaggccgagagctggatgagggagaaggagcccatcgtgggcagcacagattatggcaaggatgaggacagcgctgaggccctgctgaagaagcatgaggccctgatgtctgacctgagcgcctacggcagcagcatccaggccctgcgggagcaggcccagagctgccggcagcaggtggcccccacagatgatgaaacaggcaaggagctggtgctggccctgtatgactaccaggagaagagcccccgggaggtgaccatgaagaagggggacatcctgaccctgctgaacagcaccaacaaggactggtggaaggtggaggtgaatgaccggcagggctttgtgcctgctgcctacgtgaagaagctggaccctgcccagagcgccagccgggagaacctgctggaggagcagggcagcatcgccctgcggcaggagcagattgacaaccagacccgcatcaccaaggaggccggctctgtgtccctgaggatgaagcaggtggaggagctgtaccacagcctgctggagctgggggagaagaggaagggcatgctggagaagagctgcaagaagttcatgctgttccgggaggccaatgagctgcagcagtggatcaatgagaaggaggccgccctgaccagcgaggaggtgggcgctgacctggagcaggtggaggtgctgcagaagaagtttgatgacttccagaaggacctgaaggccaatgaaagccggctgaaggacatcaacaaggtggccgaggacctggagagcgagggcctgatggccgaggaggtgcaggccgtgcagcagcaggaggtgtatggcatgatgcccagagatgaaacagacagcaagacagccagcccctggaagagcgcccggctgatggtgcacacagtggccaccttcaacagcatcaaggagctgaatgaacgctggaggagcctgcagcagctggccgaggagaggagccagctgctgggcagcgcccacgaggtgcagcgcttccacagagatgctgatgagaccaaggagtggattgaggagaagaaccaggccctgaacacagacaactacggccatgacctggcctctgtgcaggccctgcagaggaagcatgagggctttgagcgggacctggccgccctgggggacaaggtgaacagcctgggggagacagctgagcggctcatccagagccaccctgagagcgctgaggacctgcaggagaagtgcacagagctgaaccaggcctggagcagcctgggcaagagagctgaccagaggaaggccaagctgggggacagccatgacctgcagcgcttcctgagtgacttccgggacctgatgtcctggatcaatggcatccggggcctggtgtccagtgatgagctggccaaggatgtgactggagctgaggccctgctggagcggcaccaggagcacaggacagaaattgatgcccgggccggcaccttccaggcctttgagcagtttggccagcagctgctggcccacggccactacgccagccctgagatcaagcagaagctggacatcctggaccaggagagagctgacctggagaaggcctgggtgcagaggaggatgatgctggaccagtgcctggagctgcagctgttccaccgggactgtgagcaggccgagaactggatggccgcccgggaggccttcctgaacacagaagataaaggagacagcctggacagcgtggaggccctgatcaagaagcatgaggactttgacaaggccatcaacgtgcaggaggagaagattgctgccctgcaggcctttgctgaccagctgattgctgctggccactacgccaagggggacatcagcagcagaagaaatgaggtgctggaccgctggaggcggctgaaggcccagatgattgagaagaggagcaagctgggggagagccagaccctgcagcagttcagcagagatgtggatgaaattgaggcctggatcagcgagaagctgcagacagccagtgatgagagctacaaggaccccaccaacatccagctgagcaagctgctgagcaagcaccagaagcaccaggcctttgaggccgagctgcacgccaatgctgaccgcatccggggcgtgattgacatgggcaacagcctcatcgagcggggggcctgtgccggctctgaagatgctgtgaaggcccggctggccgccctggccgaccagtggcagttcctggtgcagaagtctgctgagaagagccagaagctgaaggaggccaacaagcagcagaacttcaacacaggcatcaaggactttgacttctggctgtctgaggtggaggccctgctggcctctgaagattatggcaaggacctggcctctgtgaacaacctgctgaagaagcaccagctgctggaggccgacatcagcgcccacgaggaccggctgaaggacctgaacagccaggccgacagcctgatgaccagcagcgcctttgacaccagccaggtgaaggacaagagggacaccatcaatggccgcttccagaagatcaagtccatggccgccagcagaagagccaagctgaatgaaagccaccggctgcaccagttcttccgggacatggatgatgaggagagctggatcaaggagaagaagctgctggtgggctctgaagattatggccgggacctgactggagtgcagaacctgaggaagaagcacaagaggctggaggccgagctggccgcccacgagcccgccatccagggcgtgctggacaccgggaagaagctgagtgatgacaacaccatcggcaaggaggagatccagcagaggctggcccagtttgtggagcactggaaggagctgaagcagctggccgccgcccggggccagaggctggaggagagcctggagtaccagcagtttgtggccaacgtggaggaggaggaggcctggatcaatgagaagatgaccctggtggcctctgaagattatggagacaccctggccgccatccagggcctgctgaagaagcatgaggcctttgaaacagacttcaccgtgcacaaggacagagtgaatgatgtgtgcaccaacggccaggacctgatcaagaagaacaaccaccacgaggagaacatcagcagcaagatgaagggcctgaatggcaaggtgtctgacctggagaaggccgccgcccagaggaaggccaagctggatgaaaattctgccttcctgcagttcaactggaaggcagatgtggtggagagctggattggagagaaggagaacagcctgaagacagatgattatggccgggacctgagctctgtgcagaccctgctgaccaagcaggagacctttgatgctggcctgcaggccttccagcaggagggcatcgccaacatcacagccctgaaggaccagctgctggccgccaagcacgtgcagagcaaggccatcgaggcccggcatgccagcctgatgaagcgctggagccagctgctggccaacagcgctgccaggaagaagaagctgctggaggcccagagccacttcaggaaggtggaggacctcttcctgacctttgccaagaaggccagcgccttcaacagctggtttgaaaatgctgaggaggacctgacagatcctgtgcgctgcaacagcctggaggagatcaaggccctgcgggaggcccatgatgccttccgcagcagcctgagcagcgcccaggccgacttcaaccagctggccgagctggaccggcagatcaagagcttccgggtggccagcaacccctacacctggttcaccatggaggccctggaggagacctggaggaacctgcagaagatcatcaaggagcgggagctggagctgcagaaggagcagaggcggcaggaggagaatgacaagctgcggcaggagtttgcccagcacgccaatgccttccaccagtggatccaggagaccaggacctacctgctggatggcagctgcatggtggaggagagcggcaccctggagagccagctggaggccaccaagaggaagcaccaggagatccgggccatgaggagccagctgaagaagattgaggacctgggcgccgccatggaggaggccctgatcctggacaacaagtacacagagcacagcacagtgggcctggcccagcagtgggaccagctggaccagctgggcatgaggatgcagcacaacctggagcagcagatccaggccaggaacaccactggagtgacagaggaggccctgaaggagttctccatgatgttcaagcactttgacaaggacaagagcggccgcctgaaccaccaggagttcaagagctgcctgcggagcctgggctatgacctgcccatggtggaggagggggagccagaccctgagtttgaggccatcctggacacagtggaccccaacagagatggccacgtgtccctgcaggagtacatggccttcatgatcagccgggagacagaaaatgtgaagagcagcgaggagattgagagcgccttccgggccctgagcagcgagggcaagccctacgtgaccaaggaggagctgtaccagaacctgacccgggagcaggccgactactgtgtgagccacatgaagccctacgtggatggcaagggccgggagctgcccacagcctttgattatgtggagttcaccaggagcctgtttgtgaactag

SEQ ID NO: 290900 - DNA, 7434 bp, Artificial Sequence
  derived and/or modified sequence
atggaccccagcggcgtgaaggtgctggagaccgccgaggacatccaggagagacgccagcaggtcttggatcggtaccatcgtttcaaagaattatcaacattgcgacggcagaagcttgaagactcttaccgttttcagttcttccagcgggatgccgaggagctcgaaaagtggatccaggagaagttgcaaatagcctcagatgagaattacaaggacccaaccaacttgcaggggaagctgcaaaaacaccaggccttcgaagcagaggttcaggcaaactccggtgccattgtgaaactggacgaaaccggcaacctcatgattagtgagggacatttcgcttccgagactatccgaactagacttatggagttacataggcagtgggaactgctactggaaaagatgcgcgaaaagggaattaaactgctgcaggctcagaagttagtgcagtacctacgagaatgtgaggatgtgatggactggatcaatgataaagaagctattgtgacctcagaggagctggggcaagacttagagcatgtggaagttctacagaaaaagtttgaagagttccagactgatatggccgctcacgaagagcgcgtgaacgaggtgaaccagtttgctgccaagctcattcaggagcagcatccagaagaggagctgataaagacaaagcaggacgaagtaaacgcagcttggcagcgcctaaagggtctcgctttacagagacagggcaaactcttcggcgccgcagaggtacaacggttcaaccgcgatgtcgacgagactatttcttggattaaagaaaaagagcaactgatggcttctgacgattttggccgggatttagcctctgtacaagcgctactcagaaagcacgaggggctcgagagagacctggccgcactggaggataaggtcaaggctctctgcgctgaggcagaccggttgcagcagagtcaccctctcagtgctacccagatccaagtcaagagggaggaactgattactaattgggagcagatccgaaccctggccgccgagaggcacgccaggttgaatgatagctacagactccagaggttcctggcggatttccgcgacttgacctcgtgggtcaccgagatgaaagcgctgattaatgccgacgaattagcttccgatgtagcaggcgcggaagcactgctggatagacaccaggagcataaaggcgagatcgacgcccatgaagattcatttaaaagcgcggacgaatcaggccaagcattgctcgccgcagggcattacgcaagtgacgaggtccgagagaagctcaccgtgcttagcgaggaacgggctgccctgttggagctgtgggagttgcgacgccagcaatatgaacagtgcatggacctccagctgttctatagagatacagagcaggtggataattggatgtctaagcaggaggcctttttgttgaatgaggacctgggcgatagtttagatagtgtggaggccttactgaagaagcatgaagattttgaaaaatccctctccgctcaagaggagaagatcacagcccttgacgaattcgccaccaaactgattcagaacaaccactatgctatggaggatgtagctaccagaagggacgccttactgagcaggaggaatgctcttcacgagagagctatgagaaggcgagcacagctggctgattcttttcacttacagcagttctttagagactctgacgagttgaaatcttgggtcaacgagaagatgaaaaccgccactgacgaggcgtacaaggatccaagtaatctgcaaggcaaggtgcagaaacatcaggcgttcgaagcggaattgagtgctaatcaatcgagaattgacgcattggagaaggccggacagaagctgatcgatgtcaaccattacgcaaaggacgaggttgctgcgcggatgaatgaagtgatcagcctttggaaaaaactactagaggctaccgagcttaaaggaataaaactaagggaagcaaatcagcaacagcagtttaaccgcaacgtggaagacatcgagctgtggctgtacgaagtggagggtcatcttgccagtgacgactatggcaaggatctgactaatgttcagaatttgcagaaaaagcatgctctgctggaagccgacgtggcagcccaccaggaccgcatcgatggaattaccattcaggcccggcagttccaggatgctggacattttgatgccgagaatataaagaaaaagcaggaggcactggtcgcgagatatgaagctctgaaagagcccatggtggctcgcaaacaaaagctggcggatagcctccggctgcaacagctcttccgagatgtggaggatgaggagacatggattcgagaaaaagaaccaatcgccgcttctacaaatcgtggcaaagatttaattggggtgcagaacctgctaaaaaagcaccaagctcttcaggccgaaattgcaggccatgagcccagaatcaaggcagtaactcagaaaggaaacgccatggtcgaggagggccactttgcggctgaggacgtcaaagctaaattgcacgagctcaatcagaagtgggaggcactgaaagctaaagcttctcagaggcgacaggatctcgaggactcactacaggctcagcagtacttcgcggacgctaacgaagccgaatcttggatgagggaaaaagaacctattgtgggctccacagattacggaaaggacgaagattccgccgaggccctgttaaagaaacacgaggccctcatgagtgacctgtctgcctacggatccagcatccaagcacttcgagaacaagctcaatcctgtaggcagcaagtggcacccaccgacgatgaaaccggaaaggaattggttcttgcactctacgactatcaggaaaagagccccagagaggtgactatgaagaagggcgatattctgactttgcttaacagtacaaacaaagactggtggaaggtggaagtgaacgatagacagggctttgtgccggcagcatatgtcaagaaactggatcccgcccagtccgctagcagagagaatttgctggaggaacaggggagcatagcacttaggcaggagcaaatcgacaatcagacgcgtatcactaaggaggctggcagcgtgtcactgagaatgaaacaagtggaggagctgtaccatagtttgcttgagctgggtgaaaagcgaaagggcatgctcgaaaagtcctgcaaaaagttcatgctgttccgagaggccaacgaactgcagcagtggattaatgagaaagaggccgccttgacttctgaggaggtgggtgcggacctcgagcaggtggaggtgctgcaaaaaaagttcgacgattttcaaaaggatctgaaagccaatgagtccaggcttaaagacattaataaagttgccgaggatctggagtccgaaggcttaatggcagaagaggtgcaggccgtgcagcagcaggaagtgtatggcatgatgccccgtgatgagactgattccaaaacagcctcgccatggaaatcggctcgtcttatggttcatactgtagcaactttcaactccataaaagaactcaatgaaaggtggagatccctgcagcagctggcggaggagaggagtcagctcttgggtagcgctcatgaagtccagaggtttcaccgggatgcagatgaaacaaaggagtggatagaggagaaaaaccaggcccttaatactgacaattatggacacgatttagctagtgtccaggccctacagcggaagcacgagggatttgagcgcgaccttgcagcgttaggcgataaggtaaatagtcttggagaaactgctgaacggcttattcaatctcaccccgaatctgcagaagatctgcaggagaagtgtacagaactgaatcaggcctggtcgtcacttggcaaacgcgcagaccagagaaaggctaaattaggcgactcacatgatcttcaaaggtttctgtctgacttccgtgacctgatgtcctggataaacggcatcagaggactcgtgagctcagatgagttagcaaaagacgtcacaggggccgaggcactcctagaacgccatcaagaacatcgcactgaaattgacgcacgcgcaggaaccttccaggctttcgagcagtttggtcagcagctgctcgcccacggacactatgcctcccccgaaataaagcagaaattggacattctggatcaggagcgcgccgatttggaaaaggcttgggttcagaggagaatgatgctggaccagtgtctggaactgcagctgttccatagagactgcgagcaagccgagaattggatggccgccagggaggccttcctcaacacagaagataaaggagactctttagacagcgtcgaggccctaattaagaagcacgaggattttgacaaagccatcaacgttcaggaagagaagatagccgctctgcaggccttcgccgatcagctgatagccgcaggacactatgccaaaggcgatataagtagtcgccgcaacgaagtcttggatagatggcggcgtctgaaggcccagatgattgagaaaaggagtaagctgggggagtcgcagacattacaacagttctcccgtgatgtcgacgaaattgaagcctggatcagcgagaaactacagactgccagcgacgagtcttacaaagatccgacaaatatccaggtaagcctaatgctgtcaaaacatcagaaacatcaagcattcgaggctgagctacacgctaatgccgatcgtatcaggggagttatcgatatgggcaactcactcatagagcggggtgcttgtgccgggagcgaggatgccgtcaaagcccggctcgccgctctagccgaccaatggcagtttcttgtgcagaagtctgccgaaaagagtcagaaactgaaagaggcaaataaacagcagaattttaatacaggcatcaaggacttcgatttttggctttctgaagtcgaggcactactggcgagtgaggactacgggaaagacctcgcctctgtgaataacctgcttaaaaagcaccagttgttggaggcagacatttcagctcatgaggaccgcctgaaggacttaaactctcaagccgattctctgatgacctcatcggccttcgatacaagtcaggtcaaggataaacgagataccatcaatgggcggttccagaaaattaagtcaatggcggcatccaggagagcaaagctgaatgagtcccatcgcctgcatcagtttttcagagatatggacgacgaggaatcctggattaaagagaaaaagctgctggtgggtagtgaagactacggaagggacctcaccggtgtgcagaacctgcgcaagaaacacaaacgactcgaggccgagctcgcagcccatgagcccgcaatccaaggggtgctggataccggcaagaagttaagcgacgataataccattgggaaagaagagatccagcagagattagcccagttcgtagaacattggaaagaactcaagcaactggcagctgcgcgggggcaaagattagaggaaagcctggagtatcagcagttcgtggccaacgtcgaggaggaggaggcctggataaatgagaaaatgacccttgtggcttctgaggattacggagatacactcgctgccatccaggggcttctcaaaaagcacgaagcattcgagaccgactttacagtgcacaaagatcgggtaaatgacgtatgcaccaacggccaggacctgattaaaaagaacaatcaccacgaagagaacatttcaagcaagatgaaaggcctgaacggaaaagtgagtgacctcgagaaggctgcagcacagagaaaggccaaactagatgaaaattccgcctttctgcaattcaattggaaagctgacgtggtcgaatcatggatcggggaaaaagaaaactccctgaagactgatgattacgggcgcgacctgagttctgtccagactttgttaactaagcaagagacgtttgatgccggcctgcaggcttttcaacaagaaggaattgccaacatcaccgccctgaaggatcagctgctagctgccaagcacgtgcagtccaaagctattgaggccagacacgccagcctgatgaaacgatggagccaactgctcgcaaatagcgccgccagaaaaaagaaacttcttgaagcccagtcccactttcgcaaagtggaggacctattccttacatttgccaagaaggcatcggcttttaattcctggttcgaaaatgcagaagaagacctgacagaccccgtcagatgcaactccctggaagagattaaagctctgcgggaggcccatgatgcctttcgttcttccctgtcttcagcccaggccgatttcaatcagctggcagagctcgaccggcaaatcaaatcttttagagttgcttctaatccttatacttggttcacgatggaggccctggaggagacttggcggaacctgcagaagatcattaaggaacgggagctggaactacaaaaagagcagcggcgccaggaggaaaacgacaagttgcggcaggaattcgcccagcacgccaatgcattccatcaatggatccaagaaacccgctgtcaacccgcaggagcaagttgtatggtcgaggaatcaggaacgctcgagtcccagctcgaggcaaccaagagaaaacaccaggagatccgagccatgcgtagtcaactaaagaaaatcgaggacctcggcgccgcaatggaggaagcactgatcctggataataaatacacggagcactctacagtcggcctcgcccagcagtgggaccaactcgatcagctcgggatgaggatgcaacataatctggaacagcagattcaggcccgcaacacaaccggcgtgactgaagaagcattgaaggagttttctatgatgtttaaacattttgataaggacaagtcaggtagactcaaccatcaagagttcaaatcttgtttgagaagcctcggctatgatctcccgatggtggaggagggtgaaccagacccggagttcgaggcgatcctggacaccgttgatcccaatcgtgatggtcatgtgagtctgcaggagtatatggcttttatgatctcccgagagactgagaatgtaaaaagctctgaagaaatcgagagtgcttttcgagcactgtcatctgagggcaaaccatatgtcaccaaagaggaactgtatcagaacctaacccgcgagcaggcagattactgtgtaagccacatgaagccatacgttgatggtaaaggaagggagctgcccacggctttcgattatgttgagttcacgcgctcattgttcgtcaactag

SEQ ID NO: 290901 - DNA, 7434 bp, Artificial Sequence
  derived and/or modified sequence
atggaccccagcggcgtgaaggtgctggagaccgccgaggacatccaggagcggcggcagcaggtgctagatagataccataggttcaaggaactctccactctaaggagacagaaactcgaggacagctatcgtttccaattctttcaacgcgatgctgaagagctggagaaatggatccaggagaaactgcaaatcgccagtgatgagaactacaaggaccccacgaatttacagggcaagctccagaagcatcaagcattcgaggctgaggtgcaagctaattcgggagccattgttaaactcgacgagacagggaatctcatgatatccgagggtcatttcgcctccgagaccatccgaactcgactcatggagctgcatcggcagtgggagctcttgctggaaaaaatgcgcgagaagggaatcaaactcctgcaggcacagaaattggtgcagtacctgagagagtgcgaagacgtgatggactggatcaacgacaaagaggcaatagtgacttcggaggaactcggccaggatctggagcatgtcgaagtactgcagaagaagttcgaagagtttcaaactgatatggcagcccatgaagagcgcgtgaatgaagtgaaccaattcgctgccaagctgattcaggagcagcacccagaggaagagctgatcaagactaaacaggacgaggttaatgcagcttggcaacgcctaaagggactggcactgcagaggcaagggaaactgttcggcgcagcggaggtgcagcgcttcaaccgtgatgtagatgaaacaatcagctggattaaagagaaagagcagctcatggcctctgatgattttggcagagatctggctagcgtgcaagccctgctgagaaaacacgaaggacttgaacgggaccttgctgcgcttgaggacaaggtaaaagctctctgcgcagaagctgaccgcttgcagcagagtcacccactgagtgcgacacagatccaagtaaagagggaagagctcatcactaattgggagcagatccgcaccctggccgccgagagacacgctagactgaacgattcatacaggttacagaggttcttggctgattttagagatcttacttcatgggtaacggaaatgaaagctctcattaacgctgacgagttggcctcagatgtagctggcgccgaggccctgctggacaggcaccaggagcacaagggagagattgatgctcacgaagacagcttcaaaagcgccgacgagtccgggcaggctctcctggccgccggccattacgccagcgacgaggtacgtgaaaagctgactgtgctttctgaggaacgcgccgcactcttggaactgtgggagctgcgccggcagcagtatgagcagtgcatggacctgcagttattctatagagataccgagcaagttgacaactggatgtctaaacaggaggccttcttgctgaacgaggatctaggagatagtcttgattcagtcgaggcactccttaagaagcacgaagactttgaaaagtcactatccgcacaggaggagaagataaccgccctcgacgagtttgccacaaagctgatccagaataatcactatgctatggaggatgtggctacacgccgcgacgccttactttccaggcgcaatgctctccacgagagggctatgcgaaggagggctcagcttgctgactcttttcacctgcagcagttttttagggacagcgatgagctgaagagctgggtgaacgaaaagatgaagacagctaccgacgaggcatataaagacccctccaacctccagggaaaggtgcaaaagcaccaggcgttcgaagctgagctgtctgcaaatcagtctcggattgacgctttggaaaaagccggtcaaaaactcatcgacgtgaaccactacgcaaaggacgaagttgcagcaagaatgaacgaggtgatctcactgtggaaaaagctcctggaggcaaccgagttgaaaggcatcaaactccgtgaagcgaaccagcagcaacagtttaaccgcaacgtggaggacattgaactctggttgtacgaagtggaaggtcatttagcaagcgacgattatggaaaggatctgacaaacgtgcagaatctccaaaagaaacacgctctactcgaagctgacgtcgctgcacaccaggatcgcatagatgggataactatacaggcccgacagtttcaagacgcaggccactttgatgccgagaacatcaaaaagaaacaggaagccctggtggccagatacgaggccttgaaggagcccatggtggctagaaaacagaagctggccgactctctgaggctacagcagctgttccgcgatgtggaagacgaggagacgtggatcagagaaaaggagcccatagccgcatcaaccaaccgtggtaaggatttgatcggagtccagaacctgctgaaaaagcaccaggcacttcaggccgaaatagccggtcacgagcctcgaataaaagccgtcacacagaaaggaaacgcgatggttgaagaagggcatttcgcagctgaagacgtgaaagccaagttacacgagctcaatcagaaatgggaggccctgaaggccaaagcctcacaacgacggcaggaccttgaggatagcctgcaagcacagcagtacttcgcggacgctaatgaagccgagagctggatgcgagagaaggagccaatcgtgggaagtactgactatgggaaggatgaggacagcgccgaggcccttctgaaaaagcatgaggcgctaatgagtgacctatctgcttacggcagcagtatccaggcccttcgggagcaggcccaatcatgtcgccagcaggtggcccccacagacgatgaaaccggtaaggagctcgtgctggccctgtacgattatcaggaaaagagccctagagaggtgacaatgaagaagggagatatactgactcttctgaatagcactaataaggattggtggaaggtggaagtcaacgaccggcaaggttttgtgccggccgcatatgtgaagaagttggaccccgctcagagcgccagccgggaaaacctcttggaggagcaggggagcattgcgctgcgacaggaacagattgataatcagactcgaattacaaaagaggcggggagcgtctcccttcgcatgaaacaggttgaagagttgtatcattcgttgctggaactgggcgagaagaggaagggcatgcttgaaaagtcttgtaaaaagtttatgctcttccgcgaagcaaacgagctccagcaatggatcaacgagaaggaggccgcacttacgagcgaagaggtgggagccgatctggagcaggtggaggtgctgcagaagaaatttgatgacttccagaaggatttaaaagccaacgagtcgcgcctaaaggacatcaacaaggtggctgaagacctcgagtccgaaggtttgatggccgaggaagttcaggctgttcagcagcaagaggtgtatggaatgatgccacgggatgaaaccgactctaagactgcatctccctggaagtcagcccgtctaatggtgcacaccgtcgccacattcaatagtattaaggagcttaacgagcgctggcggagcttacaacagctcgccgaggagagatcccagcttttaggaagcgcccacgaggtgcagcgcttccacagggacgccgacgagactaaagagtggattgaggaaaagaaccaagctctcaacacagacaactatggacacgatttagcctccgttcaggcattacagaggaaacacgaggggttcgaacgtgatcttgctgccctcggtgataaagtgaactcattgggggaaacagcagaacggctaatccagtctcacccagaatccgctgaagatctccaggagaagtgtacagaacttaatcaggcctggagttccttgggaaagcgtgctgaccagcgtaaggctaagctgggcgacagccacgacctccagcgcttcctctccgatttccgcgacctcatgtcgtggatcaacggcatccgcgggttggtatcaagcgacgaattggcaaaggatgtgacgggggcggaagctttgctagaacggcaccaagaacatcgcactgagattgatgcacgcgccgggacgtttcaggcgtttgagcagttcggacagcagcttctggctcacggccattatgcgagccctgagatcaagcagaagctggacattttggaccaggagcgggcagatctggagaaagcttgggtgcagagacgcatgatgttagatcagtgtttagagctgcagctcttccacagagactgtgagcaggctgagaattggatggcggcccgcgaggcctttctaaatactgaagacaaaggcgacagtttggacagtgtggaagcactaattaaaaaacacgaggacttcgataaagccatcaacgtccaggaggagaagattgcagctttgcaggccttcgccgatcagcttatcgctgccggtcactatgccaaaggggatatttctagccgtcgtaatgaagtgctagatagatggagaagactcaaggcacaaatgattgagaagcgctcgaagctaggagagtctcagactctgcagcaattttctcgggacgtggatgagatcgaggcttggatcagtgagaaactccagacagcaagcgatgagtcatataaagaccccactaacatccaacttagtaagctactgagtaagcatcagaaacaccaagcatttgaggcagagcttcacgccaacgctgatcgcattcgaggtgttatcgatatggggaatagcttaatagagcggggggcatgtgccggctctgaggatgctgtgaaagcccggttggcagcactggctgaccagtggcaatttctggtccaaaaatcagccgaaaagtcccaaaaactaaaagaagccaacaaacagcaaaatttcaatacagggatcaaggacttcgacttttggctcagtgaagtggaggctctgttggctagcgaggactatggcaaagatctggcctcagtgaacaatctgcttaagaaacaccagctcctcgaggcagacatctcggcccatgaggaccgcctgaaagacttgaacagtcaggctgactcactgatgacttcaagtgcttttgacacgtcacaggttaaagacaaaagagacacgattaatgggcgatttcaaaagattaagtctatggctgcttctagacgagccaagctgaacgagtctcataggctgcatcagtttttccgagatatggacgacgaggagtcttggattaaggaaaagaagctgctcgtcgggtcagaagattatggcagggatctgacgggtgtgcaaaacctacggaagaaacacaaaaggcttgaggcagaactggcagcacacgagccagccatccaaggtgttctggataccggcaaaaagctatcagatgacaatacaattggtaaagaggagatccagcagcgacttgcacagtttgtggaacattggaaagagcttaagcagctggccgcggcccgaggccagagactcgaggagagcttggagtaccagcagtttgtggcaaatgtggaagaagaggaggcgtggatcaatgagaagatgaccctggtggcctccgaagactacggagataccctcgccgccatacagggattgctaaagaagcacgaggccttcgagacagactttacggtgcacaaggatcgagttaatgatgtgtgcacaaatggtcaagatctgattaagaagaacaaccaccacgaagagaacattagtagcaaaatgaaaggcctgaatggaaaagtgagtgatctcgaaaaagcagccgcccagaggaaagccaagttagatgaaaattccgctttcctgcaatttaattggaaagcagacgtggtagagtcttggatcggtgaaaaggaaaattcccttaaaactgatgactatggcagagatctgagctcagtacaaactctgttgacaaaacaggagacgtttgacgcgggcctccaagcgtttcagcaagagggaatcgccaatataacagccctcaaggaccaactccttgctgcaaaacatgtgcagtctaaggccattgaagctagacatgcaagtctcatgaagagatggagccaacttctagcgaacagcgcagcaaggaaaaagaaactgctagaggcacagagccatttccgaaaagtagaggatctttttctgacttttgctaagaaggcatctgcattcaactcatggtttgaaaatgccgaggaggatctgacagatcctgtccgctgtaattctcttgaagaaattaaggcattgcgcgaagcacatgacgcgttccgttctagcctctcttcagcccaggccgactttaaccagctcgctgagctggaccgtcagattaagtcatttcgggtagctagcaatccttatacctggttcaccatggaggctttagaggaaacatggcgaaacctccagaagattatcaaggagcgggagctagagctacaaaaagagcagcgcaggcaagaggaaaatgataaacttagacaagaatttgctcagcatgccaacgcttttcaccagtggatccaggagacccgaacttaccttctcgacggatcttgcatggtcgaggaatccgggaccctagagagtcagctggaagcgacaaagcgaaaacatcaagaaatccgagcaatgcggagccaacttaagaagatcgaggatctcggcgctgccatggaagaggcgcttatcctggacaacaagtacacggagcacagcacggtaggactcgctcagcagtgggaccagctcgaccagttaggtatgaggatgcagcataatctggagcagcagatccaggcacggaatactacaggcgtgaccgaggaggcactgaaagagttttcgatgatgtttaagcacttcgataaagataagagcggcagactgaaccaccaggaattcaagagttgccttcgctccctgggttatgatctgcccatggtggaagaaggggagcccgatccagagttcgaggccattttggacaccgtcgaccctaaccgcgacggacacgtcagtttgcaggagtacatggcatttatgatttctcgagagaccgagaacgtaaagagttccgaggagatcgaatccgccttcagagccctgtctagtgaagggaaaccatatgtgacaaaagaagagctctaccagaatctcacgcgcgagcaggcggactactgcgtttctcatatgaagccctacgtggacgggaagggccgcgagttgcccacagcgttcgattacgttgagttcactaggtctctcttcgtaaattag

SEQ ID NO: 290902 - DNA, 7433 bp, Artificial Sequence
  derived and/or modified sequence
atggacccgtcaggagtgaaggtcctggagacagctgaagatattcaggagcgacgacaacaggtgctggaccgttaccatagatttaaagagttgtccaccctgaggcggcagaagctagaggactcttaccgttttcaatttttccaacgcgatgccgaggagttggagaaatggatccaagaaaagctccaaatcgcctcagacgagaactacaaggaccccaccaatctgcaagggaagctgcagaaacaccaggccttcgaggctgaagtgcaggccaattcaggcgctattgttaagctggatgagacaggaaacttgatgatctccgaaggccactttgcaagcgagaccattcgcacccggctgatggagctgcaccgacaatgggagctcctgctcgaaaagatgcgggagaaagggattaaactgctccaggcgcagaaactggtccagtacctgcgcgagtgtgaggacgtaatggattggattaacgataaggaagctattgttaccagcgaggagttggggcaggatctagagcacgtggaggtactccaaaagaaattcgaggagttccagaccgatatggcagcacatgaagaacgcgtcaacgaagtcaaccagtttgccgctaagctgatccaggagcagcaccccgaggaagagcttataaagactaaacaggatgaagtgaacgccgcttggcagcgacttaaaggattagctcttcaacggcaggggaaattgttcggtgccgctgaggtacagagatttaatcgggatgtagatgagaccatatcttggataaaggagaaggaacagctgatggccagcgatgatttcggacgggatctggcctctgtccaagctcttttaaggaagcacgagggactcgagagagacctggccgctttggaggataaggtcaaggcactgtgcgccgaagcagaccgcctccagcagtcccatcctctaagcgccacccaaattcaggtcaagcgagaagaactgataaccaattgggaacagatccgaacgctggccgcagagcgccatgcccgactcaacgactcttataggttgcaacggtttctggcggatttccgagacctcacaagttgggtgacagaaatgaaggccctgatcaacgccgatgagctagcctctgacgtggcaggcgcagaggccttgcttgaccgccatcaggaacataagggagagattgacgcccatgaagactctttcaaatcagctgacgagtctggccaggctctattagccgcaggtcactacgcaagtgacgaagtgcgtgaaaagttaacggtgctgtccgaggagcgggctgcgctactggagttgtgggagctccgcaggcagcaatatgagcagtgcatggacttgcagctattctaccgggacaccgaacaggttgacaattggatgtcgaagcaggaagccttcctgcttaatgaagatctcggcgactccctggattctgtggaagcccttctgaaaaaacatgaggattttgagaaaagtctcagcgcccaagaagagaagatcacagccctcgacgagttcgctacaaagctcatccaaaataatcactacgctatggaggatgtcgccacaagacgcgacgcccttctgtctcggaggaacgctctgcatgagagagccatgaggagaagagcccagctcgccgattctttccatctccagcaattttttagagacagcgatgaactgaaatcatgggtgaatgagaagatgaagactgccaccgacgaggcatacaaggacccatctaatctccagggaaaagttcagaagcatcaggccttcgaggccgagctgtcagccaaccagtcccgcatcgacgccttggagaaagcgggtcagaaactcattgacgtcaaccactacgccaaggatgaagtggccgctaggatgaacgaggtcatctccctctggaagaaactgctggaggctacggagttaaaaggaatcaaactcagagaggccaatcaacagcagcaattcaacagaaatgtcgaagacattgaattgtggttatacgaggtcgaaggccacctggctagcgatgactacggaaaagaccttacgaatgtccagaatctccagaaaaagcatgctttgctggaggccgatgttgccgctcatcaggaccggatcgacggcataaccatacaggccaggcaatttcaggatgctggacacttcgatgctgagaatatcaagaagaagcaggaggctcttgtagctagatatgaggcactcaaagagcctatggtggcaagaaagcaaaaactcgctgattctttgcgactgcaacagttgtttcgggacgtcgaagacgaggaaacatggatacgagagaaagaacccattgccgcttccacaaacagaggcaaggaccttattggtgtgcaaaacttactcaagaaacaccaagcactgcaggcagaaattgccggacacgagcccagaatcaaggctgtgacccagaagggcaacgctatggtcgaagaagggcacttcgctgccgaggatgtgaaggcaaaacttcacgaactgaaccagaagtgggaagctctcaaagctaaagctagtcagcgccgtcaggacctagaagacagcctccaagcacagcagtacttcgctgatgccaacgaagccgagtcctggatgagagaaaaggaaccgatcgtggggagcacggattacggcaaggacgaagactccgcggaggcgcttctcaaaaagcacgaggccctgatgtcagacctgtcagcatacgggagctcaatacaggccctgcgagagcaggctcaaagctgccgacagcaggtggcccctaccgatgatgagactggcaaagagctggtgctggcattatatgattaccaggagaagtccccacgagaggtaactatgaagaagggggacattttaacccttctcaactccaccaacaaggattggtggaaggtcgaagtgaacgaccgacagggcttcgtgccggctgcttatgtcaagaagctcgatcctgcccagagcgcaagtcgcgagaacctgcttgaggagcagggatcaatagcattaagacaggaacagattgacaatcagacgagaattaccaaagaggccggttctgtatccctcagaatgaagcaagtggaagagctttaccatagtctgctcgaacttggagagaagaggaagggcatgctggaaaaatcttgtaagaagtttatgcttttccgtgaggcaaatgagttacagcagtggattaacgaaaaggaggccgctctcactagcgaggaagtcggtgcagacctggaacaagtcgaagtcctgcagaaaaagtttgacgacttccagaaggacctcaaggctaacgagagccgcctgaaagatataaataaggtcgcagaggatctggagtctgagggtctaatggccgaggaggtccaggcagttcagcagcaagaggtctatgggatgatgcctagggatgaaactgatagtaaaacggcaagcccttggaagtcggccaggctgatggtgcatactgtcgccactttcaattctattaaggagctcaacgaacgctggagatcccttcaacagttggccgaggaacgcagtcagctactggggagtgcccatgaggtacaacgcttccaccgggatgctgacgaaacaaaggagtggatcgaagaaaaaaatcaggcactgaatactgataattatggacacgatctggcttctgtgcaagccttgcagcgaaagcacgagggattcgagagggacctggctgccctgggagacaaagttaattctctcggtgaaacagcggaaagactgattcagtcgcacccggagagcgcagaggacctgcaggagaagtgtaccgaactcaaccaggcttggtcatcactaggaaagcgagctgaccagaggaaggctaaattgggggactcccatgacctgcagcgctttctaagcgattttagggacctgatgagctggattaatggtatacgtgggttggtatcttcagacgaactggccaaagacgtcacgggagccgaagcccttctcgagcgccaccaggagcaccggacagagatcgatgctcgggctggcacttttcaggcatttgagcaattcggacaacagttgctagcccacggccattacgcatcacctgagatcaagcagaagctggacatactcgatcaagagcgagccgacctggaaaaggcgtgggtgcagaggagaatgatgctggaccagtgtcttgagttgcaattattccatcgcgattgcgagcaggccgagaactggatggctgccagagaagcttttttgaacacggaagacaaaggagattcattagacagcgtggaagcgctcattaagaagcatgaggatttcgacaaggcaattaatgttcaggaggagaaaatcgccgcactccaagccttcgcagatcaactgatagcggctggccattatgccaaaggagatattagcagtcgcaggaacgaggtgctggataggtggagaagactgaaggcccagatgattgagaaaagaagtaaactcggcgagtcacagacccttcagcaattctcgagagatgtcgacgaaattgaggcctggatctccgaaaagctgcagaccgcctctgacgaaagctacaaggaccccacgaatatccaggtttcccttatgctcagcaagcaccagaaacatcaagcatttgaagcagagctccacgcaaatgccgacaggatccgtggcgtgatcgacatgggcaattccctgattgagagaggtgcctgcgcaggctccgaggacgccgtcaaggcgcgtctggccgctcttgcagaccagtggcagtttttagttcagaagtctgcagagaagtcacagaagctcaaggaagctaacaaacaacagaacttcaacaccggaataaaggattttgatttttggctgtccgaagtggaagctttgcttgcaagtgaggactatggtaaagatctagccagcgtcaacaacctgttaaagaaacaccagctgctggaagccgacatctccgcccatgaagatagacttaaagacctgaactctcaggctgactctctgatgactagttctgcctttgacacctcccaggtgaaggacaagagagatacaatcaatggacggtttcagaaaataaaaagtatggctgcatcgagaagagctaagctaaatgagtcccacagacttcatcagttttttagagatatggacgatgaggagtcatggatcaaggagaagaagctgctggtggggtctgaagactacggccgtgatttgactggggtccagaatttgaggaaaaagcataagcgcctagaagcggaactcgccgctcacgaacctgctatccagggggtgctcgatactggcaagaagctgagcgacgacaatacgataggaaaggaagagattcagcagagactggcccagttcgtggagcactggaaagagctgaagcagctggccgctgcccgtggccaacggctcgaggaaagtcttgaataccagcagttcgtcgctaacgttgaggaggaggaggcttggattaacgagaagatgactctcgtggccagcgaggactatggggacaccctcgccgcaatacaaggactgctgaaaaagcacgaagcatttgagacggacttcacggtgcacaaggaccgggttaatgacgtttgcactaatgggcaggacctgattaaaaagaacaaccatcacgaggaaaacatcagctcaaagatgaagggcctgaatggcaaggtcagcgatctcgagaaagcagccgctcagagaaaggcgaaactcgatgaaaacagtgcatttctccaattcaactggaaagctgatgtcgtggagtcctggattggagaaaaggaaaattctctgaagactgacgattatggcagagaccttagtagtgtccagacactgctgacgaaacaggagaccttcgacgctggtctccaggcattccagcaggagggcatcgccaatattactgccctcaaggatcagcttcttgccgcaaaacatgtgcagagtaaggccatcgaggcgcgtcatgcttccttaatgaagagatggagccagttgctggcgaactcagctgctagaaagaaaaaattactagaagcacaaagtcatttccggaaagtagaggatctatttctgaccttcgcaaagaaagccagtgcctttaactcatggtttgagaatgcagaggaggatctgaccgacccggtacggtgcaattctctagaggagattaaagctcttagggaagcccacgacgcatttcgttcgtcactgagctccgctcaggccgacttcaaccagctcgccgagctcgacaggcagattaagagctttcgcgtcgcttcaaatccctacacttggttcaccatggaagctctcgaggagacctggaggaaccttcaaaagattattaaggaaagagagctggagctacagaaagaacagagacgccaggaagagaacgacaaactcagacaggaatttgcccaacatgctaatgccttccaccaatggattcaagagactaggtgccagccagcgggagcctcctgtatggttgaggagtccgggaccctggaaagccagttggaagcaacaaagcgcaaacatcaagaaattcgtgcaatgcgatcacaactgaagaagatcgaagacctcggggcagccatggaagaggccctaatattagacaataagtacacggagcatagcacagtgggcctggctcagcaatgggatcagttggaccagctgggcatgcgcatgcagcataacctggaacagcagatccaggccaggaatacaacaggcgtgaccgaagaagcgttgaaggaattcagcatgatgtttaaacatttcgacaaagataaatctggaaggctcaatcaccaagaattcaagagttgtctcagaagtctgggctacgacctgccaatggttgaggagggcgaacccgatcccgagttcgaggccattctcgataccgttgatccaaaccgcgacggacatgtgtccctacaggaatatatggcttttatgatctcccgtgagacggagaacgtgaagtcctcggaggaaattgaatcagcgtttagagccctcagctcagagggcaagccgtacgtcactaaagaagagctatatcagaatctgactcgcgagcaggcagattattgcgtgagccatatgaaaccatacgtcgacgggaaaggtcgggaactacctactgccttcgactacgtagagttcactagaagcctcttcgttaatta

SEQ ID NO: 290903 - DNA, 7433 bp, Artificial Sequence
  derived and/or modified sequence
atggatccctccggcgtgaaagtcttggagaccgcagaggacatccaggaaagaagacagcaagtacttgaccgctatcataggttcaaggagctcagtactcttaggcgccagaagctggaagacagttatcggtttcagttctttcagagggacgctgaagagctcgagaaatggatccaggaaaagctgcagatcgcttctgatgaaaactataaggatcccacaaatctccaaggaaagttgcagaagcaccaggcctttgaagctgaagtgcaggctaattcaggcgctattgtcaagctggacgaaaccgggaacttgatgatctccgaaggacatttcgcatctgagactatacgaacgagactgatggagttgcacaggcaatgggagctgctgctcgagaagatgcgagagaaaggtattaaattgcttcaggctcaaaagctggtccagtatctgagggaatgcgaagacgtgatggattggattaatgacaaagaagcgatagtgacctcagaagagctgggccaggacttggagcacgtagaggtactccaaaaaaaattcgaagaattccagacagatatggctgcccacgaagagagagtgaatgaagtgaatcaatttgccgcaaagcttatccaggagcagcaccccgaagaggagctgattaaaaccaagcaagacgaagtgaatgctgcctggcaaagactgaagggcctcgcccttcagcggcagggcaagctgttcggggctgccgaagtgcagcgctttaaccgggatgtggacgaaactatcagttggataaaagagaaggaacagctcatggctagcgatgattttggcagggatctggcctctgtgcaggctttgctgcgaaaacatgaaggattagaacgcgatctggctgcactcgaggataaggtaaaggcattgtgtgctgaagctgaccggcttcaacaatcacacccgcttagtgcgacacagatccaggtcaaaagagaggagctgattacaaattgggaacagatccgcacactagcggcagaacgccatgcacggctcaatgactcttaccgcctgcaacgcttcctggccgatttccgggacctgacctcatgggtcaccgagatgaaggcccttattaacgccgatgaactggcatccgacgtggcaggtgccgaagcattgctggatcgacatcaggaacacaagggggagatcgacgcacatgaggacagtttcaagagcgccgacgagagtgggcaggcgcttctcgccgcaggacactacgccagtgacgaggtccgagagaaactgaccgtcctctccgaagagcgggctgctctattggagttgtgggagctgcgacgccagcaatacgagcaatgcatggatctgcagcttttctaccgggatacagagcaggttgacaactggatgtccaagcaggaggccttccttctcaatgaggatctgggcgattctcttgattccgtggaagcactgctcaaaaaacacgaggattttgaaaaatcactgtcagctcaggaggagaagataaccgcgctggatgaattcgctaccaaattaatacagaacaatcattacgcaatggaggatgtagccacacgcagagacgcgctgttaagccggagaaatgctctccacgaacgcgcaatgcggaggcgagctcagctggctgactcttttcatctgcagcagttttttcgcgacagtgacgagctcaagagttgggtcaacgaaaagatgaaaaccgcaacagacgaagcgtacaaagaccctagcaacttacagggcaaggtgcagaaacaccaggccttcgaagctgagctgagtgctaaccagtcccgcatagacgcactggaaaaggccggacagaaactgattgacgtaaatcactacgctaaggatgaagtagccgctcgcatgaatgaagtaatctctctctggaagaagctgctggaggccaccgagctgaaaggcatcaagttgagggaagctaaccaacaacagcagtttaatcgtaatgtggaagatatcgagctgtggttgtacgaggtggaagggcaccttgcatctgatgactacggcaaggatctgactaatgtccagaacctgcagaagaagcacgccctgctggaagccgacgtcgccgctcaccaggatcgcattgacggcatcactattcaagccaggcagtttcaagatgccggtcacttcgatgccgagaatattaagaagaagcaggaggctctggtggccagatacgaggctctgaaggaaccaatggttgccagaaaacaaaagctggccgactctctccgcctacagcagcttttccgagatgtggaggacgaagagacatggattcgggagaaagagcctatcgcagcctccactaatagagggaaggaccttataggtgtgcagaacttgctgaaaaaacaccaggctctccaggctgaaatcgcaggtcatgaaccaaggataaaagcagtgacccagaagggcaacgccatggtggaggagggacactttgccgctgaagatgtgaaagcaaaactccacgagctcaatcagaaatgggaagctttgaaggccaaggcatcccagcgaaggcaggatttagaggactctctccaagcccagcagtatttcgctgacgcaaatgaggccgaaagttggatgagggagaaagaaccaatcgtagggtctaccgactatggcaaagacgaggatagtgccgaagctctactgaagaaacacgaagctctgatgtcagacttgtcagcctacggttccagcatccaggcgctgcgtgagcaggcccagtcgtgccgccagcaggtcgctcccacagatgatgagacaggaaaagaactggtccttgctttgtacgattaccaggaaaagagcccgcgtgaggtgacaatgaaaaagggtgatattctgacactgctgaactccactaataaagattggtggaaagtcgaagttaacgacaggcaaggcttcgtgcccgctgcctacgttaagaagctagatcctgcacaaagcgcctctcgagagaatctacttgaggagcagggtagtattgccctgcggcaggagcagatagacaatcagacaaggatcacaaaggaagccggttccgtgagtttacggatgaagcaggttgaggagctttaccactccctcctcgagttgggcgagaaaagaaagggaatgctcgagaagagttgtaagaaatttatgctatttcgtgaagcgaatgaactccaacagtggataaatgagaaggaagcggctctcacttctgaggaggtgggggctgacttggaacaggtggaggtgctgcagaagaagttcgatgatttccaaaaggacctgaaagccaatgagtcaagactcaaggacataaataaggtagccgaagacctggagagtgaagggctgatggctgaggaggtgcaagccgtgcagcagcaggaggtgtatggaatgatgcctcgagacgaaacagacagtaaaaccgctagcccctggaaaagtgccaggctcatggtccatacggttgccacgttcaactcaattaaggagcttaacgaacggtggaggtcattacagcagttggcggaggagcggtctcagctcctggggagtgcccacgaggtacagcgattccatcgggatgccgatgaaacgaaggagtggattgaggaaaaaaaccaggctctaaataccgacaattatggtcatgaccttgccagcgtccaggctttgcaaaggaaacacgaggggtttgagagagatctggcggcactgggcgacaaggtgaatagcctcggtgagacagcagagcgtttgattcagagccatccagagtccgcggaggatttgcaggagaaatgtaccgagctgaatcaggcctggtcttcactgggcaagcgcgctgatcaacgtaaggccaagttaggggacagtcacgatctgcaaaggtttctatccgacttcagggacctgatgtcctggatcaacggaataagagggctggtctcttccgatgagctggccaaagacgtcactggcgctgaagctctgctcgagcgccatcaagagcacaggactgagatcgacgcacgggcaggcactttccaggccttcgaacagttcggccaacagcttttggcccacgggcactacgccagtcccgagatcaagcagaaactcgacatactggaccaagaaagggctgatcttgagaaggcctgggtgcagcgcagaatgatgctggatcagtgtctggaacttcagctcttccaccgtgattgcgagcaggctgaaaactggatggctgcccgagaagccttcctgaacacggaagataagggagacagcctggacagcgttgaagcactgattaagaaacacgaagactttgataaggccatcaatgtacaggaggagaagattgctgctttacaggccttcgccgaccagttgatagctgccggacattacgccaagggcgacatctcaagtcggcgaaacgaagtcttggatcgatggcgcagacttaaggctcagatgattgagaagcgctcaaagctgggcgaaagtcagacactgcagcagttttccagagacgttgatgagatcgaggcctggatctccgaaaaactgcaaaccgctagcgatgagtcctataaggacccgactaatattcagctctctaagcttttaagtaaacatcagaagcaccaggcctttgaggccgaactgcacgctaacgccgatcggatccgtggcgttattgatatgggaaatagcctgatcgagaggggggcttgcgcgggatcagaggatgctgtgaaagcccgtctcgcggctctagctgaccaatggcagtttctggtccagaagtctgccgagaaatcacagaagctcaaagaggctaacaagcagcagaactttaacacgggtataaaagatttcgatttctggctgtccgaagtcgaggcattacttgcctctgaagattatgggaaagatctcgcctcagtcaacaaccttcttaagaagcaccaactcttggaggccgatatctctgcacacgaagatcgccttaaagacctaaattcacaagccgattccctgatgacctcctccgcctttgataccagccaagtgaaagataaacgggatacaataaatgggagatttcagaagatcaaatctatggcagcgagtaggcgcgctaaactgaatgaatctcaccggctgcaccaattcttccgcgacatggacgacgaagagtcctggatcaaagaaaagaaactccttgtggggtctgaggattacggcagagatctgacaggggttcaaaaccttaggaagaaacacaagcggctcgaagccgagctggccgcacacgaaccagctatacaaggtgtgctggacaccggcaagaagctgtctgatgataacacaataggaaaggaagaaattcagcaaaggttggctcagttcgttgaacattggaaggagctcaagcagctcgccgcagctagggggcagcggctggaggaaagtctggaatatcagcagtttgttgcaaacgtagaagaggaggaggcatggatcaacgaaaagatgacactggtggcctccgaggactatggggacacactggccgcaattcagggcctactgaaaaagcatgaggcctttgaaacagattttaccgttcacaaagaccgcgtgaatgatgtgtgtacaaacggccaagaccttattaagaaaaacaaccatcacgaggagaatatctcctctaaaatgaagggactcaacggaaaggtgtctgatctcgaaaaagccgcagcccaaaggaaggcaaagttagatgaaaactccgcatttctccagttcaactggaaggccgacgtggtggagtcatggatcggggaaaaggagaatagcctcaagaccgacgattatggcagggacttaagttccgtgcaaacactcctgactaagcaagagactttcgatgccggactgcaggcgttccagcaggaaggaatcgctaacattaccgctcttaaggaccagctgctcgcggctaaacatgtgcagagcaaggccatcgaagcacgacacgctagcttgatgaaacgatggagtcagctgctcgcaaacagtgccgcacgtaaaaagaaacttctcgaagcccagtcacatttccggaaggtggaagacctgttcctcacatttgccaaaaaagcctcggcatttaactcatggttcgagaacgcagaagaggacctaactgatccagtgcgatgtaatagcctggaggagatcaaggccctgcgcgaagcgcatgatgcctttcgctccagtctgtcgtccgcccaggccgatttcaatcagttagctgaactcgatcgacaaataaagagtttcagggtggcttcaaatccttacacatggttcactatggaagcacttgaggagacgtggaggaacctccagaaaattatcaaagagagggaattggagctacagaaggagcagagaagacaggaagaaaacgacaagctccggcaggagttcgcccaacacgccaacgccttccaccagtggatccaggaaaccaggacctacttactggatggcagttgcatggtagaggaaagcgggacactggaaagtcagttggaggcaaccaaaagaaagcatcaagaaatccgtgcaatgagatcacagttgaaaaagatcgaggatctgggagccgcaatggaggaagcgctcatccttgataacaaatatactgagcacagtacagttggccttgctcaacagtgggatcagctggaccagcttggcatgcgtatgcagcataatctggagcaacaaattcaagctcgcaatactactggagttaccgaggaggctttaaaagagttcagcatgatgttcaaacactttgataaggataagtcaggacgcctcaaccatcaagaattcaagtcctgccttcggagtctgggctacgatctacctatggttgaagaaggggagccggaccccgaatttgaggccatcttagatacagtcgacccaaatcgcgacgggcacgtgtctctccaggagtatatggcgtttatgatctcccgtgaaaccgagaacgtaaaatcatcagaggaaattgagagcgcatttcgcgctctgtcatccgagggaaaaccttacgtaacaaaggaggagctataccagaatctgacccgggagcaggccgactactgcgtgtcccatatgaagccatacgtggacggtaaggggagagaattaccaacagctttcgactatgtcgagtttacaaggtctctctttgtcaatta

SEQ ID NO: 290904 - DNA, 7872 bp, Artificial Sequence
  derived and/or modified sequence
gccactacccgctgcggagtgaacggtgtggagcggaggccgcggaggctcctcggtccttcagcacccctcggcccgacgcacccacgcccctcaccccccgagagccgaaaatggacccaagtggggtcaaagtgctggaaacagcagaggacatccaggagaggcggcagcaggtcctagaccgataccaccgcttcaaggaactctcaacccttaggcgtcagaagctggaagattcctatcgattccagttctttcaaagagatgctgaagagctggagaaatggatacaggaaaaacttcagattgcatctgatgagaattataaagacccaaccaacttgcagggaaagcttcagaagcatcaagcatttgaagctgaagtgcaggccaactcaggagccattgttaagctggatgaaactggaaacctgatgatctcagaagggcattttgcatctgaaaccatacggacccgtttgatggagctgcaccgccagtgggaattacttttggagaagatgcgagaaaaaggaatcaaactgctgcaggcccagaagttggtgcagtacttacgagaatgtgaggacgtgatggactggatcaatgacaaggaagcaattgttacttctgaagagctgggccaggatctggagcatgtagaggttttacagaagaaatttgaagagtttcaaacagatatggctgctcatgaagaaagagttaatgaagtgaaccagtttgctgccaaactcatacaggagcagcaccctgaggaggaactgatcaagactaagcaggatgaagtcaatgcagcctggcagcggctgaagggcctggctctgcagaggcaggggaagctctttggggcagcagaagttcagcgctttaacagggatgtggatgagactatcagttggattaaggaaaaggagcagttaatggcctctgatgattttggccgagacctggcaagtgttcaggctctgcttcggaagcacgagggtctggagagagatcttgctgctctagaagacaaggtcaaagccctgtgtgctgaggctgaccgcctgcaacagtcccaccctctgagtgcaacacagattcaagtgaagcgagaggaactgattacaaactgggagcagatccgcaccttggcggcagagagacatgcacggctcaatgattcatacaggcttcaacgcttccttgctgacttccgtgacctcaccagctgggtgactgagatgaaagccctcatcaatgcagatgagcttgccagtgatgtggctggggctgaagccctgctagatagacaccaagagcacaagggtgaaattgatgcccatgaagacagcttcaaatctgcagatgaatctggacaggcactgcttgctgctggtcactatgcctcagatgaagtgagggagaagctgaccgtcctttccgaggagagagcggcgctgctggagctgtgggagctgcgcaggcagcagtacgagcagtgcatggacctgcagctcttctaccgggacactgagcaggtggacaactggatgagcaagcaggaggcgttcctgttgaatgaagacttgggagattccttggatagtgtggaagcgcttcttaagaagcacgaagactttgagaaatcccttagtgcccaggaggaaaagattacagcattagatgaatttgcaaccaagctaattcagaacaaccactatgcaatggaagatgtggccactcgccgagatgctctgttgagccgccgcaatgcccttcacgagagagccatgcgtcgccgggcccagctagccgattctttccatctgcagcagtttttccgtgattctgatgagctcaagagttgggtcaatgagaagatgaaaactgccacagatgaagcttataaagatccatccaacctacaaggaaaagtacagaagcatcaggcttttgaggctgagctctcagcaaaccagagccgaattgatgccttggagaaagctggccaaaagctgattgatgtcaaccactatgccaaggatgaagtggcagctcgtatgaatgaggtgatcagtttgtggaagaaactgctagaggccactgaactgaaaggaataaagcttcgtgaagccaaccagcaacagcaatttaatcgcaatgttgaggatattgaattgtggctatatgaagtagaaggtcacttggcttcggatgattacggcaaagatcttaccaatgtgcagaacctccagaagaaacatgcactgctagaggcagatgtggctgctcaccaggaccgaattgatggcatcaccattcaggcccgccagttccaagatgctggccattttgatgcagaaaacatcaagaagaaacaggaagccctcgtggctcgctatgaggcactcaaggagcccatggttgcccggaagcagaagctggccgattctctgcggttgcagcagctcttccgggatgttgaggatgaggagacgtggattcgagagaaagagcccattgccgcatctaccaacagaggtaaggatttaattggggtccagaatctgctaaagaaacatcaagccttacaagcagaaattgctggacatgaaccacgcatcaaagcagttacacagaaggggaatgccatggtggaggaaggccattttgctgcagaggatgtgaaggccaagcttcacgagctgaaccaaaagtgggaggcactgaaagccaaagcttcccagcgtcggcaggacctggaggactctctgcaggcccagcagtactttgctgatgctaacgaggctgaatcctggatgcgggagaaggaacccattgtgggcagcactgactatggcaaggacgaagactctgctgaggctctactgaagaaacacgaagctttgatgtcagatctcagtgcctacggcagcagcatccaggctttgcgagaacaagcacagtcctgccggcaacaagtggcccccacggatgatgagactgggaaggagctggtcttggctctctacgactatcaggagaagagtccccgagaggtcaccatgaagaagggagatatccttaccttactcaacagcaccaacaaggattggtggaaagtggaagtgaacgatcgtcagggttttgtgccggctgcgtacgtgaagaaattggaccccgcccagtcagcctcccgggagaatctcctggaggagcaaggcagcatagcactgcggcaggagcagattgacaatcagacacgcataactaaggaggccggcagtgtatctctgcgtatgaagcaggtggaagaactatatcattctctgctggaactgggtgagaagcgtaaaggcatgttggagaagagttgcaagaagtttatgttgttccgtgaagcgaatgaactacagcaatggatcaatgagaaggaagccgctctgacaagtgaggaggtcggagcagacttggagcaggttgaggtgctccagaagaagtttgatgacttccagaaggacctgaaggccaatgagtcacggttgaaggacattaacaaggtagctgaagacctggagtctgaaggtctcatggcagaggaggtgcaggctgtgcaacaacaggaagtgtatggcatgatgcccagggatgaaactgattccaagacagcctccccgtggaagtctgctcgtctgatggttcacaccgtggccacctttaattccatcaaggagctgaatgagcgctggcggtccctacagcagctggccgaggaacggagccagctcttgggcagcgcccatgaagtacagaggttccacagagatgctgatgaaaccaaagaatggattgaagagaagaatcaagctctaaacacagacaattatggacatgatctcgccagtgtccaggccctgcaacgcaagcatgagggcttcgagagggaccttgcggctctcggtgacaaggtaaactcccttggtgaaacagcagagcgcctgatccagtcccatcccgagtcagcagaagacctgcaggaaaagtgcacagagttaaaccaggcctggagcagcctggggaaacgtgcagatcagcgcaaggcaaagttgggtgactcccacgacctgcagcgcttccttagcgatttccgggacctcatgtcttggatcaatggaatacgggggttggtgtcctcagatgagctagccaaggatgtcaccggagctgaggcattgctggagcgacaccaggaacaccggacagaaatcgatgccagggctggcactttccaggcatttgagcagtttggacagcagctgttggctcacggacactatgccagccctgagatcaagcagaaacttgatattcttgaccaggagcgtgcagacctggagaaggcctgggttcagcgcaggatgatgctggatcagtgccttgaactgcagctgttccatcgggactgtgagcaagctgagaactggatggctgcccgggaggccttcttgaataccgaagacaaaggagactcactggacagcgtagaggctctgatcaaaaaacatgaagactttgacaaagcgattaacgtccaggaagagaagattgctgctctgcaggcctttgccgaccagctcatcgctgccggccattatgccaagggagacatttctagccggcgcaatgaggtcttggacaggtggcgacgtctgaaagcccagatgattgagaaaaggtcaaagctaggagaatctcaaaccctccaacagttcagccgggatgtggatgagattgaggcttggatcagtgaaaaattgcaaacagcgagtgatgagtcgtacaaggatcccaccaacatccaggtaagccttatgttaagcaagcaccagaagcaccaggcttttgaagcagagctgcatgccaacgctgaccggatccgtggggttatcgacatgggcaactccctcattgaacgtggagcctgtgccggcagtgaggatgctgtcaaggcccgcctggctgccttagctgaccagtggcagttcttggtgcaaaagtcagcggaaaagagccagaaactgaaagaagccaacaagcagcagaacttcaacacagggatcaaggactttgacttctggctgtctgaggtggaggccctgctggcatccgaagattatggcaaagacctagcttctgtgaacaacctgctgaaaaagcatcaactgctggaagcagatatatctgcccatgaggatcgcctgaaggacctgaacagccaggcagacagcctgatgaccagcagtgccttcgacacctcccaagtaaaggacaagagggacaccatcaacgggcgcttccagaagatcaagagcatggcggcctcccggcgagccaagctgaatgaatcccatcgcctgcaccagttcttccgggacatggatgacgaggagtcctggatcaaggagaagaagctgctggtgggctcagaggactacggccgggacctaaccggcgtgcagaacctgaggaagaagcacaagcggctggaagcagaactggctgcgcatgagccggctattcagggtgtcctggacactggcaagaagctgtccgatgacaacaccatcgggaaagaggagatccagcagcggctggcgcagtttgtggagcactggaaagagctgaagcagctggcagctgcccggggtcagcggctggaagagtccttggaatatcagcagtttgtagccaatgtggaagaggaagaagcctggatcaatgagaaaatgaccctggtggccagcgaagattatggcgacactcttgccgccatccagggcttactgaagaaacatgaagcttttgagacagacttcaccgtccacaaggatcgcgtgaatgatgtctgcaccaatggacaagacctcattaagaagaacaatcaccatgaggagaacatctcttcaaagatgaagggcctgaacgggaaagtgtcagacctggagaaagctgcagcccagagaaaggcgaagctggatgagaactcggccttccttcagttcaactggaaggcggacgtggtggagtcctggatcggtgaaaaggagaacagcttgaagacagatgattatggccgagacctgtcttctgtgcagacgctcctcaccaaacaggaaacttttgacgctgggctgcaggccttccagcaggaaggcattgccaacatcactgccctcaaagatcagcttctcgccgccaaacacgttcagtccaaggccatcgaggcccggcacgcctccctcatgaagaggtggagccagcttctggccaactcagccgcccgcaagaagaagcttctggaggctcagagtcacttccgcaaggtggaggacctcttcctgaccttcgccaaaaaggcttctgccttcaacagctggtttgaaaatgcagaggaggacttaacagaccccgtgcgctgcaactccttggaagaaatcaaagctttgcgcgaggcccacgacgccttccgctcctccctcagctctgcccaggctgacttcaaccagctggccgagctggaccgccagatcaagagcttccgcgtagcctccaacccctacacctggtttaccatggaggccctggaggagacctggaggaacctacagaaaatcatcaaggagagggagctggagctgcagaaggaacagcggcggcaggaggagaacgacaagctgcgccaggagtttgcccagcacgccaacgccttccaccagtggatccaagagaccaggtgccagcccgctggggcgtcctgtatggtggaagagtcggggaccctcgaatcccagcttgaagctaccaaacgcaagcaccaggaaatccgagccatgagaagtcagctcaaaaagatcgaggacctgggggccgccatggaggaggccctcatcctggacaacaagtacacggagcacagcaccgtgggcctcgcccagcagtgggaccagctggaccagctgggcatgcgcatgcagcacaacctggagcagcagatccaggccaggaacacaacaggtgtgactgaggaggccctcaaagaattcagcatgatgtttaaacactttgacaaggacaagtctggcaggctgaaccatcaggagttcaaatcttgcctgcgctccctgggctatgacctgcccatggtggaggaaggggaacctgaccctgagttcgaggcaatcctggacacggtggatccgaacagagatggccatgtctccttgcaagaatacatggctttcatgatcagccgcgaaactgagaacgtcaagtccagcgaggagattgagagcgccttccgggccctcagctcagagggaaagccttacgtgaccaaggaggagctctaccagaacctgacccgggaacaagccgactactgcgtctcccacatgaagccctacgtggacggcaagggccgcgagctccccaccgcgttcgactacgtggagttcacccgctcgcttttcgtgaactgagccactccctgggtcacccacccctcgctgcttgccctgcgtcgccttgctgcatgtccgctcctctgtgtgctctcactttccactgtaaccttaagcctgcttagcttggaataagacttaggagaaaatggtgcttcactaacccgcttccggtccagtcacaatcatcatgtcactgtggggacccagatctgtgtcttgaagcagctgccctcattccgacttcagaaaatcgaagcagctggctcctccccttgttctctctcccaccctcccccaaatctgttttcatgtaaaagacaaataaatgatgacttccccc

SEQ ID NO: 290905 - DNA, 6863 bp, Artificial Sequence
  derived and/or modified sequence
actacccgctgcggagtgaacggtgtggagcggaggccgcggaggctcctcggtccttcagcacccctcggcccgacgcacccacgcccctcaccccccgagagccgaaaatggacccaagtggggtcaaagtgctggaaacagcagaggacatccaggagaggcggcagcaggtcctagaccgataccaccgcttcaaggaactctcaacccttaggcgtcagaagctggaagattcctatcgattccagttctttcaaagagatgctgaagagctggagaaatggatacaggaaaaacttcagattgcatctgatgagaattataaagacccaaccaacttgcagggaaagcttcagaagcatcaagcatttgaagctgaagtgcaggccaactcaggagccattgttaagctggatgaaactggaaacctgatgatctcagaagggcattttgcatctgaaaccatacggacccgtttgatggagctgcaccgccagtgggaattacttttggagaagatgcgagaaaaaggaatcaaactgctgcaggcccagaagttggtgcagtacttacgagaatgtgaggacgtgatggactggatcaatgacaaggaagcaattgttacttctgaagagctgggccaggatctggagcatgtagaggttttacagaagaaatttgaagagtttcaaacagatatggctgctcatgaagaaagagttaatgaagtgaaccagtttgctgccaaactcatacaggagcagcaccctgaggaggaactgatcaagactaagcaggatgaagtcaatgcagcctggcagcggctgaagggcctggctctgcagaggcaggggaagctctttggggcagcagaagttcagcgctttaacagggatgtggatgagactatcagttggattaaggaaaaggagcagttaatggcctctgatgattttggccgagacctggcaagtgttcaggctctgcttcggaagcacgagggtctggagagagatcttgctgctctagaagacaaggtcaaagccctgtgtgctgaggctgaccgcctgcaacagtcccaccctctgagtgcaacacagattcaagtgaagcgagaggaactgattacaaactgggagcagatccgcaccttggcggcagagagacatgcacggctcaatgattcatacaggcttcaacgcttccttgctgacttccgtgacctcaccagctgggtgactgagatgaaagccctcatcaatgcagatgagcttgccagtgatgtggctggggctgaagccctgctagatagacaccaagagcacaagggtgaaattgatgcccatgaagacagcttcaaatctgcagatgaatctggacaggcactgcttgctgctggtcactatgcctcagatgaagtgagggagaagctgaccgtcctttccgaggagagagcggcgctgctggagctgtgggagctgcgcaggcagcagtacgagcagtgcatggacctgcagctcttctaccgggacactgagcaggtggacaactggatgagcaagcaggaggcgttcctgttgaatgaagacttgggagattccttggatagtgtggaagcgcttcttaagaagcacgaagactttgagaaatcccttagtgcccaggaggaaaagattacagcattagatgaatttgcaaccaagctaattcagaacaaccactatgcaatggaagatgtggccactcgccgagatgctctgttgagccgccgcaatgcccttcacgagagagccatgcgtcgccgggcccagctagccgattctttccatctgcagcagtttttccgtgattctgatgagctcaagagttgggtcaatgagaagatgaaaactgccacagatgaagcttataaagatccatccaacctacaaggaaaagtacagaagcatcaggcttttgaggctgagctctcagcaaaccagagccgaattgatgccttggagaaagctggccaaaagctgattgatgtcaaccactatgccaaggatgaagtggcagctcgtatgaatgaggtgatcagtttgtggaagaaactgctagaggccactgaactgaaaggaataaagcttcgtgaagccaaccagcaacagcaatttaatcgcaatgttgaggatattgaattgtggctatatgaagtagaaggtcacttggcttcggatgattacggcaaagatcttaccaatgtgcagaacctccagaagaaacatgcactgctagaggcagatgtggctgctcaccaggaccgaattgatggcatcaccattcaggcccgccagttccaagatgctggccattttgatgcagaaaacatcaagaagaaacaggaagccctcgtggctcgctatgaggcactcaaggagcccatggttgcccggaagcagaagctggccgattctctgcggttgcagcagctcttccgggatgttgaggatgaggagacgtggattcgagagaaagagcccattgccgcatctaccaacagaggtaaggatttaattggggtccagaatctgctaaagaaacatcaagccttacaagcagaaattgctggacatgaaccacgcatcaaagcagttacacagaaggggaatgccatggtggaggaaggccattttgctgcagaggatgtgaaggccaagcttcacgagctgaaccaaaagtgggaggcactgaaagccaaagcttcccagcgtcggcaggacctggaggactctctgcaggcccagcagtactttgctgatgctaacgaggctgaatcctggatgcgggagaaggaacccattgtgggcagcactgactatggcaaggacgaagactctgctgaggctctactgaagaaacacgaagctttgatgtcagatctcagtgcctacggcagcagcatccaggctttgcgagaacaagcacagtcctgccggcaacaagtggcccccacggatgatgagactgggaaggagctggtcttggctctctacgactatcaggagaagagtccccgagaggtcaccatgaagaagggagatatccttaccttactcaacagcaccaacaaggattggtggaaagtggaagtgaacgatcgtcagggttttgtgccggctgcgtacgtgaagaaattggaccccgcccagtcagcctcccgggagaatctcctggaggagcaaggcagcatagcactgcggcaggagcagattgacaatcagacacgcataactaaggaggccggcagtgtatctctgcgtatgaagcaggtggaagaactatatcattctctgctggaactgggtgagaagcgtaaaggcatgttggagaagagttgcaagaagtttatgttgttccgtgaagcgaatgaactacagcaatggatcaatgagaaggaagccgctctgacaagtgaggaggtcggagcagacttggagcaggttgaggtgctccagaagaagtttgatgacttccagaaggacctgaaggccaatgagtcacggttgaaggacattaacaaggtagctgaagacctggagtctgaaggtctcatggcagaggaggtgcaggctgtgcaacaacaggaagtgtatggcatgatgcccagggatgaaactgattccaagacagcctccccgtggaagtctgctcgtctgatggttcacaccgtggccacctttaattccatcaaggagctgaatgagcgctggcggtccctacagcagctggccgaggaacggagccagctcttgggcagcgcccatgaagtacagaggttccacagagatgctgatgaaaccaaagaatggattgaagagaagaatcaagctctaaacacagacaattatggacatgatctcgccagtgtccaggccctgcaacgcaagcatgagggcttcgagagggaccttgcggctctcggtgacaaggtaaactcccttggtgaaacagcagagcgcctgatccagtcccatcccgagtcagcagaagacctgcaggaaaagtgcacagagttaaaccaggcctggagcagcctggggaaacgtgcagatcagcgcaaggcaaagttgggtgactcccacgacctgcagcgcttccttagcgatttccgggacctcatgtcttggatcaatggaatacgggggttggtgtcctcagatgagctagccaaggatgtcaccggagctgaggcattgctggagcgacaccaggaacaccggacagaaatcgatgccagggctggcactttccaggcatttgagcagtttggacagcagctgttggctcacggacactatgccagccctgagatcaagcagaaacttgatattcttgaccaggagcgtgcagacctggagaaggcctgggttcagcgcaggatgatgctggatcagtgccttgaactgcagctgttccatcgggactgtgagcaagctgagaactggatggctgcccgggaggccttcttgaataccgaagacaaaggagactcactggacagcgtagaggctctgatcaaaaaacatgaagactttgacaaagcgattaacgtccaggaagagaagattgctgctctgcaggcctttgccgaccagctcatcgctgccggccattatgccaagggagacatttctagccggcgcaatgaggtcttggacaggtggcgacgtctgaaagcccagatgattgagaaaaggtcaaagctaggagaatctcaaaccctccaacagttcagccgggatgtggatgagattgaggcttggatcagtgaaaaattgcaaacagcgagtgatgagtcgtacaaggatcccaccaacatccagctttccaagctgctgagcaagcaccagaagcaccaggcttttgaagcagagctgcatgccaacgctgaccggatccgtggggttatcgacatgggcaactccctcattgaacgtggagcctgtgccggcagtgaggatgctgtcaaggcccgcctggctgccttagctgaccagtggcagttcttggtgcaaaagtcagcggaaaagagccagaaactgaaagaagccaacaagcagcagaacttcaacacagggatcaaggactttgacttctggctgtctgaggtggaggccctgctggcatccgaagattatggcaaagacctagcttctgtgaacaacctgctgaaaaagcatcaactgctggaagcagatatatctgcccatgaggatcgcctgaaggacctgaacagccaggcagacagcctgatgaccagcagtgccttcgacacctcccaagtaaaggacaagagggacaccatcaacgggcgcttccagaagatcaagagcatggcggcctcccggcgagccaagctgaatgaatcccatcgcctgcaccagttcttccgggacatggatgacgaggagtcctggatcaaggagaagaagctgctggtgggctcagaggactacggccgggacctaaccggcgtgcagaacctgaggaagaagcacaagcggctggaagcagaactggctgcgcatgagccggctattcagggtgtcctggacactggcaagaagctgtccgatgacaacaccatcgggaaagaggagatccagcagcggctggcgcagtttgtggagcactggaaagagctgaagcagctggcagctgcccggggtcagcggctggaagagtccttggaatatcagcagtttgtagccaatgtggaagaggaagaagcctggatcaatgagaaaatgaccctggtggccagcgaagattatggcgacactcttgccgccatccagggcttactgaagaaacatgaagcttttgagacagacttcaccgtccacaaggatcgcgtgaatgatgtctgcaccaatggacaagacctcattaagaagaacaatcaccatgaggagaacatctcttcaaagatgaagggcctgaacgggaaagtgtcagacctggagaaagctgcagcccagagaaaggcgaagctggatgagaactcggccttccttcagttcaactggaaggcggacgtggtggagtcctggatcggtgaaaaggagaacagcttgaagacagatgattatggccgagacctgtcttctgtgcagacgctcctcaccaaacaggaaacttttgacgctgggctgcaggccttccagcaggaaggcattgccaacatcactgccctcaaagatcagcttctcgccgccaaacacgttcagtccaaggccatcgaggcccggcacgcctccctcatgaagaggtggagccagcttctggccaactcagccgcccgcaagaagaagcttctggaggctcagagtcacttccgcaaggtggaggacctcttcctgaccttcgccaaaaaggcttctgccttcaacagctggtttgaaaatgcagaggaggacttaacagaccccgtgcgctgcaactccttggaagaaatcaaagctttgcgcgaggcccacgacgccttccgctcctccctcagctctgcccaggctgacttcaaccagctggccgagctggaccgccagatcaagagcttccgcgtagcctccaacccctacacctggtttaccatggaggccctggaggagacctggaggaacctacagaaaatcatcaaggagagggagctggagctgcagaaggaacagcggcggcaggaggagaacgacaagctgcgccaggagtttgcccagcacgccaacgccttccaccagtggatccaagagaccaggtgccagcgtaaagatggccagttgcagggtggaagagtcggggaccctcgaatcccagcttga

SEQ ID NO: 290906 - DNA, 7872 bp, Artificial Sequence
  derived and/or modified sequence
actacccgctgcggagtgaacggtgtggagcggaggccgcggaggctcctcggtccttcagcacccctcggcccgacgcacccacgcccctcaccccccgagagccgaaaatggacccaagtggggtcaaagtgctggaaacagcagaggacatccaggagaggcggcagcaggtcctagaccgataccaccgcttcaaggaactctcaacccttaggcgtcagaagctggaagattcctatcgattccagttctttcaaagagatgctgaagagctggagaaatggatacaggaaaaacttcagattgcatctgatgagaattataaagacccaaccaacttgcagggaaagcttcagaagcatcaagcatttgaagctgaagtgcaggccaactcaggagccattgttaagctggatgaaactggaaacctgatgatctcagaagggcattttgcatctgaaaccatacggacccgtttgatggagctgcaccgccagtgggaattacttttggagaagatgcgagaaaaaggaatcaaactgctgcaggcccagaagttggtgcagtacttacgagaatgtgaggacgtgatggactggatcaatgacaaggaagcaattgttacttctgaagagctgggccaggatctggagcatgtagaggttttacagaagaaatttgaagagtttcaaacagatatggctgctcatgaagaaagagttaatgaagtgaaccagtttgctgccaaactcatacaggagcagcaccctgaggaggaactgatcaagactaagcaggatgaagtcaatgcagcctggcagcggctgaagggcctggctctgcagaggcaggggaagctctttggggcagcagaagttcagcgctttaacagggatgtggatgagactatcagttggattaaggaaaaggagcagttaatggcctctgatgattttggccgagacctggcaagtgttcaggctctgcttcggaagcacgagggtctggagagagatcttgctgctctagaagacaaggtcaaagccctgtgtgctgaggctgaccgcctgcaacagtcccaccctctgagtgcaacacagattcaagtgaagcgagaggaactgattacaaactgggagcagatccgcaccttggcggcagagagacatgcacggctcaatgattcatacaggcttcaacgcttccttgctgacttccgtgacctcaccagctgggtgactgagatgaaagccctcatcaatgcagatgagcttgccagtgatgtggctggggctgaagccctgctagatagacaccaagagcacaagggtgaaattgatgcccatgaagacagcttcaaatctgcagatgaatctggacaggcactgcttgctgctggtcactatgcctcagatgaagtgagggagaagctgaccgtcctttccgaggagagagcggcgctgctggagctgtgggagctgcgcaggcagcagtacgagcagtgcatggacctgcagctcttctaccgggacactgagcaggtggacaactggatgagcaagcaggaggcgttcctgttgaatgaagacttgggagattccttggatagtgtggaagcgcttcttaagaagcacgaagactttgagaaatcccttagtgcccaggaggaaaagattacagcattagatgaatttgcaaccaagctaattcagaacaaccactatgcaatggaagatgtggccactcgccgagatgctctgttgagccgccgcaatgcccttcacgagagagccatgcgtcgccgggcccagctagccgattctttccatctgcagcagtttttccgtgattctgatgagctcaagagttgggtcaatgagaagatgaaaactgccacagatgaagcttataaagatccatccaacctacaaggaaaagtacagaagcatcaggcttttgaggctgagctctcagcaaaccagagccgaattgatgccttggagaaagctggccaaaagctgattgatgtcaaccactatgccaaggatgaagtggcagctcgtatgaatgaggtgatcagtttgtggaagaaactgctagaggccactgaactgaaaggaataaagcttcgtgaagccaaccagcaacagcaatttaatcgcaatgttgaggatattgaattgtggctatatgaagtagaaggtcacttggcttcggatgattacggcaaagatcttaccaatgtgcagaacctccagaagaaacatgcactgctagaggcagatgtggctgctcaccaggaccgaattgatggcatcaccattcaggcccgccagttccaagatgctggccattttgatgcagaaaacatcaagaagaaacaggaagccctcgtggctcgctatgaggcactcaaggagcccatggttgcccggaagcagaagctggccgattctctgcggttgcagcagctcttccgggatgttgaggatgaggagacgtggattcgagagaaagagcccattgccgcatctaccaacagaggtaaggatttaattggggtccagaatctgctaaagaaacatcaagccttacaagcagaaattgctggacatgaaccacgcatcaaagcagttacacagaaggggaatgccatggtggaggaaggccattttgctgcagaggatgtgaaggccaagcttcacgagctgaaccaaaagtgggaggcactgaaagccaaagcttcccagcgtcggcaggacctggaggactctctgcaggcccagcagtactttgctgatgctaacgaggctgaatcctggatgcgggagaaggaacccattgtgggcagcactgactatggcaaggacgaagactctgctgaggctctactgaagaaacacgaagctttgatgtcagatctcagtgcctacggcagcagcatccaggctttgcgagaacaagcacagtcctgccggcaacaagtggcccccacggatgatgagactgggaaggagctggtcttggctctctacgactatcaggagaagagtccccgagaggtcaccatgaagaagggagatatccttaccttactcaacagcaccaacaaggattggtggaaagtggaagtgaacgatcgtcagggttttgtgccggctgcgtacgtgaagaaattggaccccgcccagtcagcctcccgggagaatctcctggaggagcaaggcagcatagcactgcggcaggagcagattgacaatcagacacgcataactaaggaggccggcagtgtatctctgcgtatgaagcaggtggaagaactatatcattctctgctggaactgggtgagaagcgtaaaggcatgttggagaagagttgcaagaagtttatgttgttccgtgaagcgaatgaactacagcaatggatcaatgagaaggaagccgctctgacaagtgaggaggtcggagcagacttggagcaggttgaggtgctccagaagaagtttgatgacttccagaaggacctgaaggccaatgagtcacggttgaaggacattaacaaggtagctgaagacctggagtctgaaggtctcatggcagaggaggtgcaggctgtgcaacaacaggaagtgtatggcatgatgcccagggatgaaactgattccaagacagcctccccgtggaagtctgctcgtctgatggttcacaccgtggccacctttaattccatcaaggagctgaatgagcgctggcggtccctacagcagctggccgaggaacggagccagctcttgggcagcgcccatgaagtacagaggttccacagagatgctgatgaaaccaaagaatggattgaagagaagaatcaagctctaaacacagacaattatggacatgatctcgccagtgtccaggccctgcaacgcaagcatgagggcttcgagagggaccttgcggctctcggtgacaaggtaaactcccttggtgaaacagcagagcgcctgatccagtcccatcccgagtcagcagaagacctgcaggaaaagtgcacagagttaaaccaggcctggagcagcctggggaaacgtgcagatcagcgcaaggcaaagttgggtgactcccacgacctgcagcgcttccttagcgatttccgggacctcatgtcttggatcaatggaatacgggggttggtgtcctcagatgagctagccaaggatgtcaccggagctgaggcattgctggagcgacaccaggaacaccggacagaaatcgatgccagggctggcactttccaggcatttgagcagtttggacagcagctgttggctcacggacactatgccagccctgagatcaagcagaaacttgatattcttgaccaggagcgtgcagacctggagaaggcctgggttcagcgcaggatgatgctggatcagtgccttgaactgcagctgttccatcgggactgtgagcaagctgagaactggatggctgcccgggaggccttcttgaataccgaagacaaaggagactcactggacagcgtagaggctctgatcaaaaaacatgaagactttgacaaagcgattaacgtccaggaagagaagattgctgctctgcaggcctttgccgaccagctcatcgctgccggccattatgccaagggagacatttctagccggcgcaatgaggtcttggacaggtggcgacgtctgaaagcccagatgattgagaaaaggtcaaagctaggagaatctcaaaccctccaacagttcagccgggatgtggatgagattgaggcttggatcagtgaaaaattgcaaacagcgagtgatgagtcgtacaaggatcccaccaacatccagctttccaagctgctgagcaagcaccagaagcaccaggcttttgaagcagagctgcatgccaacgctgaccggatccgtggggttatcgacatgggcaactccctcattgaacgtggagcctgtgccggcagtgaggatgctgtcaaggcccgcctggctgccttagctgaccagtggcagttcttggtgcaaaagtcagcggaaaagagccagaaactgaaagaagccaacaagcagcagaacttcaacacagggatcaaggactttgacttctggctgtctgaggtggaggccctgctggcatccgaagattatggcaaagacctagcttctgtgaacaacctgctgaaaaagcatcaactgctggaagcagatatatctgcccatgaggatcgcctgaaggacctgaacagccaggcagacagcctgatgaccagcagtgccttcgacacctcccaagtaaaggacaagagggacaccatcaacgggcgcttccagaagatcaagagcatggcggcctcccggcgagccaagctgaatgaatcccatcgcctgcaccagttcttccgggacatggatgacgaggagtcctggatcaaggagaagaagctgctggtgggctcagaggactacggccgggacctaaccggcgtgcagaacctgaggaagaagcacaagcggctggaagcagaactggctgcgcatgagccggctattcagggtgtcctggacactggcaagaagctgtccgatgacaacaccatcgggaaagaggagatccagcagcggctggcgcagtttgtggagcactggaaagagctgaagcagctggcagctgcccggggtcagcggctggaagagtccttggaatatcagcagtttgtagccaatgtggaagaggaagaagcctggatcaatgagaaaatgaccctggtggccagcgaagattatggcgacactcttgccgccatccagggcttactgaagaaacatgaagcttttgagacagacttcaccgtccacaaggatcgcgtgaatgatgtctgcaccaatggacaagacctcattaagaagaacaatcaccatgaggagaacatctcttcaaagatgaagggcctgaacgggaaagtgtcagacctggagaaagctgcagcccagagaaaggcgaagctggatgagaactcggccttccttcagttcaactggaaggcggacgtggtggagtcctggatcggtgaaaaggagaacagcttgaagacagatgattatggccgagacctgtcttctgtgcagacgctcctcaccaaacaggaaacttttgacgctgggctgcaggccttccagcaggaaggcattgccaacatcactgccctcaaagatcagcttctcgccgccaaacacgttcagtccaaggccatcgaggcccggcacgcctccctcatgaagaggtggagccagcttctggccaactcagccgcccgcaagaagaagcttctggaggctcagagtcacttccgcaaggtggaggacctcttcctgaccttcgccaaaaaggcttctgccttcaacagctggtttgaaaatgcagaggaggacttaacagaccccgtgcgctgcaactccttggaagaaatcaaagctttgcgcgaggcccacgacgccttccgctcctccctcagctctgcccaggctgacttcaaccagctggccgagctggaccgccagatcaagagcttccgcgtagcctccaacccctacacctggtttaccatggaggccctggaggagacctggaggaacctacagaaaatcatcaaggagagggagctggagctgcagaaggaacagcggcggcaggaggagaacgacaagctgcgccaggagtttgcccagcacgccaacgccttccaccagtggatccaagagaccaggacatacctcctcgatgggtcctgtatggtggaagagtcggggaccctcgaatcccagcttgaagctaccaaacgcaagcaccaggaaatccgagccatgagaagtcagctcaaaaagatcgaggacctgggggccgccatggaggaggccctcatcctggacaacaagtacacggagcacagcaccgtgggcctcgcccagcagtgggaccagctggaccagctgggcatgcgcatgcagcacaacctggagcagcagatccaggccaggaacacaacaggtgtgactgaggaggccctcaaagaattcagcatgatgtttaaacactttgacaaggacaagtctggcaggctgaaccatcaggagttcaaatcttgcctgcgctccctgggctatgacctgcccatggtggaggaaggggaacctgaccctgagttcgaggcaatcctggacacggtggatccgaacagagatggccatgtctccttgcaagaatacatggctttcatgatcagccgcgaaactgagaacgtcaagtccagcgaggagattgagagcgccttccgggccctcagctcagagggaaagccttacgtgaccaaggaggagctctaccagaacctgacccgggaacaagccgactactgcgtctcccacatgaagccctacgtggacggcaagggccgcgagctccccaccgcgttcgactacgtggagttcacccgctcgcttttcgtgaactgagccactccctgggtcacccacccctcgctgcttgccctgcgtcgccttgctgcatgtccgctcctctgtgtgctctcactttccactgtaaccttaagcctgcttagcttggaataagacttaggagaaaatggtgcttcactaacccgcttccggtccagtcacaatcatcatgtcactgtggggacccagatctgtgtcttgaagcagctgccctcattccgacttcagaaaatcgaagcagctggctcctccccttgttctctctcccaccctcccccaaatctgttttcatgtaaaagacaaataaatgatgacttcccccaaa

SEQ ID NO: 290907 - protein, 2472 aa, Artificial Sequence
  derived and/or modified sequence
MDPSGVKVLETAEDIQERRQQVLDRYHRFKELSTLRRQKLEDSYRFQFFQRDAEELEKWIQEKLQIASDENYKDPTNLQGKLQKHQAFEAEVQANSGAIVKLDETGNLMISEGHFASETIRTRLMELHRQWELLLEKMREKGIKLLQAQKLVQYLRECEDVMDWINDKEAIVTSEELGQDLEHVEVLQKKFEEFQTDMAAHEERVNEVNQFAAKLIQEQHPEEELIKTKQDEVNAAWQRLKGLALQRQGKLFGAAEVQRFNRDVDETISWIKEKEQLMASDDFGRDLASVQALLRKHEGLERDLAALEDKVKALCAEADRLQQSHPLSATQIQVKREELITNWEQIRTLAAERHARLNDSYRLQRFLADFRDLTSWVTEMKALINADELASDVAGAEALLDRHQEHKGEIDAHEDSFKSADESGQALLAAGHYASDEVREKLTVLSEERAALLELWELRRQQYEQCMDLQLFYRDTEQVDNWMSKQEAFLLNEDLGDSLDSVEALLKKHEDFEKSLSAQEEKITALDEFATKLIQNNHYAMEDVATRRDALLSRRNALHERAMRRRAQLADSFHLQQFFRDSDELKSWVNEKMKTATDEAYKDPSNLQGKVQKHQAFEAELSANQSRIDALEKAGQKLIDVNHYAKDEVAARMNEVISLWKKLLEATELKGIKLREANQQQQFNRNVEDIELWLYEVEGHLASDDYGKDLTNVQNLQKKHALLEADVAAHQDRIDGITIQARQFQDAGHFDAENIKKKQEALVARYEALKEPMVARKQKLADSLRLQQLFRDVEDEETWIREKEPIAASTNRGKDLIGVQNLLKKHQALQAEIAGHEPRIKAVTQKGNAMVEEGHFAAEDVKAKLHELNQKWEALKAKASQRRQDLEDSLQAQQYFADANEAESWMREKEPIVGSTDYGKDEDSAEALLKKHEALMSDLSAYGSSIQALREQAQSCRQQVAPTDDETGKELVLALYDYQEKSPREVTMKKGDILTLLNSTNKDWWKVEVNDRQGFVPAAYVKKLDPAQSASRENLLEEQGSIALRQEQIDNQTRITKEAGSVSLRMKQVEELYHSLLELGEKRKGMLEKSCKKFMLFREANELQQWINEKEAALTSEEVGADLEQVEVLQKKFDDFQKDLKANESRLKDINKVAEDLESEGLMAEEVQAVQQQEVYGMMPRDETDSKTASPWKSARLMVHTVATFNSIKELNERWRSLQQLAEERSQLLGSAHEVQRFHRDADETKEWIEEKNQALNTDNYGHDLASVQALQRKHEGFERDLAALGDKVNSLGETAERLIQSHPESAEDLQEKCTELNQAWSSLGKRADQRKAKLGDSHDLQRFLSDFRDLMSWINGIRGLVSSDELAKDVTGAEALLERHQEHRTEIDARAGTFQAFEQFGQQLLAHGHYASPEIKQKLDILDQERADLEKAWVQRRMMLDQCLELQLFHRDCEQAENWMAAREAFLNTEDKGDSLDSVEALIKKHEDFDKAINVQEEKIAALQAFADQLIAAGHYAKGDISSRRNEVLDRWRRLKAQMIEKRSKLGESQTLQQFSRDVDEIEAWISEKLQTASDESYKDPTNIQSKHQKHQAFEAELHANADRIRGVIDMGNSLIERGACAGSEDAVKARLAALADQWQFLVQKSAEKSQKLKEANKQQNFNTGIKDFDFWLSEVEALLASEDYGKDLASVNNLLKKHQLLEADISAHEDRLKDLNSQADSLMTSSAFDTSQVKDKRDTINGRFQKIKSMAASRRAKLNESHRLHQFFRDMDDEESWIKEKKLLVGSEDYGRDLTGVQNLRKKHKRLEAELAAHEPAIQGVLDTGKKLSDDNTIGKEEIQQRLAQFVEHWKELKQLAAARGQRLEESLEYQQFVANVEEEEAWINEKMTLVASEDYGDTLAAIQGLLKKHEAFETDFTVHKDRVNDVCTNGQDLIKKNNHHEENISSKMKGLNGKVSDLEKAAAQRKAKLDENSAFLQFNWKADVVESWIGEKENSLKTDDYGRDLSSVQTLLTKQETFDAGLQAFQQEGIANITALKDQLLAAKHVQSKAIEARHASLMKRWSQLLANSAARKKKLLEAQSHFRKVEDLFLTFAKKASAFNSWFENAEEDLTDPVRCNSLEEIKALREAHDAFRSSLSSAQADFNQLAELDRQIKSFRVASNPYTWFTMEALEETWRNLQKIIKERELELQKEQRRQEENDKLRQEFAQHANAFHQWIQETRTYLLDGSCMVEESGTLESQLEATKRKHQEIRAMRSQLKKIEDLGAAMEEALILDNKYTEHSTVGLAQQWDQLDQLGMRMQHNLEQQIQARNTTGVTEEALKEFSMMFKHFDKDKSGRLNHQEFKSCLRSLGYDLPMVEEGEPDPEFEAILDTVDPNRDGHVSLQEYMAFMISRETENVKSSEEIESAFRALSSEGKPYVTKEELYQNLTREQADYCVSHMKPYVDGKGRELPTAFDYVEFTRSLFVN

SEQ ID NO: 290908 - DNA, 7419 bp, Artificial Sequence
  derived and/or modified sequence
atggaccccagcggcgtgaaggtgctggagaccgccgaggacatccaggagagaagacagcaggtgctggacagataccacagattcaaggagctgagcaccctgagaagacagaagctggaggacagctacagattccagttcttccagagagacgccgaggagctggagaagtggatccaggagaagctgcagatcgccagcgacgagaactacaaggaccccaccaacctgcagggcaagctgcagaagcaccaggccttcgaggccgaggtgcaggccaacagcggcgccatcgtgaagctggacgagaccggcaacctgatgatcagcgagggccacttcgccagcgagaccatcagaaccagactgatggagctgcacagacagtgggagctgctgctggagaagatgagagagaagggcatcaagctgctgcaggcccagaagctggtgcagtacctgagagagtgcgaggacgtgatggactggatcaacgacaaggaggccatcgtgaccagcgaggagctgggccaggacctggagcacgtggaggtgctgcagaagaagttcgaggagttccagaccgacatggccgcccacgaggagagagtgaacgaggtgaaccagttcgccgccaagctgatccaggagcagcaccccgaggaggagctgatcaagaccaagcaggacgaggtgaacgccgcctggcagagactgaagggcctggccctgcagagacagggcaagctgttcggcgccgccgaggtgcagagattcaacagagacgtggacgagaccatcagctggatcaaggagaaggagcagctgatggccagcgacgacttcggcagagacctggccagcgtgcaggccctgctgagaaagcacgagggcctggagagagacctggccgccctggaggacaaggtgaaggccctgtgcgccgaggccgacagactgcagcagagccaccccctgagcgccacccagatccaggtgaagagagaggagctgatcaccaactgggagcagatcagaaccctggccgccgagagacacgccagactgaacgacagctacagactgcagagattcctggccgacttcagagacctgaccagctgggtgaccgagatgaaggccctgatcaacgccgacgagctggccagcgacgtggccggcgccgaggccctgctggacagacaccaggagcacaagggcgagatcgacgcccacgaggacagcttcaagagcgccgacgagagcggccaggccctgctggccgccggccactacgccagcgacgaggtgagagagaagctgaccgtgctgagcgaggagagagccgccctgctggagctgtgggagctgagaagacagcagtacgagcagtgcatggacctgcagctgttctacagagacaccgagcaggtggacaactggatgagcaagcaggaggccttcctgctgaacgaggacctgggcgacagcctggacagcgtggaggccctgctgaagaagcacgaggacttcgagaagagcctgagcgcccaggaggagaagatcaccgccctggacgagttcgccaccaagctgatccagaacaaccactacgccatggaggacgtggccaccagaagagacgccctgctgagcagaagaaacgccctgcacgagagagccatgagaagaagagcccagctggccgacagcttccacctgcagcagttcttcagagacagcgacgagctgaagagctgggtgaacgagaagatgaagaccgccaccgacgaggcctacaaggaccccagcaacctgcagggcaaggtgcagaagcaccaggccttcgaggccgagctgagcgccaaccagagcagaatcgacgccctggagaaggccggccagaagctgatcgacgtgaaccactacgccaaggacgaggtggccgccagaatgaacgaggtgatcagcctgtggaagaagctgctggaggccaccgagctgaagggcatcaagctgagagaggccaaccagcagcagcagttcaacagaaacgtggaggacatcgagctgtggctgtacgaggtggagggccacctggccagcgacgactacggcaaggacctgaccaacgtgcagaacctgcagaagaagcacgccctgctggaggccgacgtggccgcccaccaggacagaatcgacggcatcaccatccaggccagacagttccaggacgccggccacttcgacgccgagaacatcaagaagaagcaggaggccctggtggccagatacgaggccctgaaggagcccatggtggccagaaagcagaagctggccgacagcctgagactgcagcagctgttcagagacgtggaggacgaggagacctggatcagagagaaggagcccatcgccgccagcaccaacagaggcaaggacctgatcggcgtgcagaacctgctgaagaagcaccaggccctgcaggccgagatcgccggccacgagcccagaatcaaggccgtgacccagaagggcaacgccatggtggaggagggccacttcgccgccgaggacgtgaaggccaagctgcacgagctgaaccagaagtgggaggccctgaaggccaaggccagccagagaagacaggacctggaggacagcctgcaggcccagcagtacttcgccgacgccaacgaggccgagagctggatgagagagaaggagcccatcgtgggcagcaccgactacggcaaggacgaggacagcgccgaggccctgctgaagaagcacgaggccctgatgagcgacctgagcgcctacggcagcagcatccaggccctgagagagcaggcccagagctgcagacagcaggtggcccccaccgacgacgagaccggcaaggagctggtgctggccctgtacgactaccaggagaagagccccagagaggtgaccatgaagaagggcgacatcctgaccctgctgaacagcaccaacaaggactggtggaaggtggaggtgaacgacagacagggcttcgtgcccgccgcctacgtgaagaagctggaccccgcccagagcgccagcagagagaacctgctggaggagcagggcagcatcgccctgagacaggagcagatcgacaaccagaccagaatcaccaaggaggccggcagcgtgagcctgagaatgaagcaggtggaggagctgtaccacagcctgctggagctgggcgagaagagaaagggcatgctggagaagagctgcaagaagttcatgctgttcagagaggccaacgagctgcagcagtggatcaacgagaaggaggccgccctgaccagcgaggaggtgggcgccgacctggagcaggtggaggtgctgcagaagaagttcgacgacttccagaaggacctgaaggccaacgagagcagactgaaggacatcaacaaggtggccgaggacctggagagcgagggcctgatggccgaggaggtgcaggccgtgcagcagcaggaggtgtacggcatgatgcccagagacgagaccgacagcaagaccgccagcccctggaagagcgccagactgatggtgcacaccgtggccaccttcaacagcatcaaggagctgaacgagagatggagaagcctgcagcagctggccgaggagagaagccagctgctgggcagcgcccacgaggtgcagagattccacagagacgccgacgagaccaaggagtggatcgaggagaagaaccaggccctgaacaccgacaactacggccacgacctggccagcgtgcaggccctgcagagaaagcacgagggcttcgagagagacctggccgccctgggcgacaaggtgaacagcctgggcgagaccgccgagagactgatccagagccaccccgagagcgccgaggacctgcaggagaagtgcaccgagctgaaccaggcctggagcagcctgggcaagagagccgaccagagaaaggccaagctgggcgacagccacgacctgcagagattcctgagcgacttcagagacctgatgagctggatcaacggcatcagaggcctggtgagcagcgacgagctggccaaggacgtgaccggcgccgaggccctgctggagagacaccaggagcacagaaccgagatcgacgccagagccggcaccttccaggccttcgagcagttcggccagcagctgctggcccacggccactacgccagccccgagatcaagcagaagctggacatcctggaccaggagagagccgacctggagaaggcctgggtgcagagaagaatgatgctggaccagtgcctggagctgcagctgttccacagagactgcgagcaggccgagaactggatggccgccagagaggccttcctgaacaccgaggacaagggcgacagcctggacagcgtggaggccctgatcaagaagcacgaggacttcgacaaggccatcaacgtgcaggaggagaagatcgccgccctgcaggccttcgccgaccagctgatcgccgccggccactacgccaagggcgacatcagcagcagaagaaacgaggtgctggacagatggagaagactgaaggcccagatgatcgagaagagaagcaagctgggcgagagccagaccctgcagcagttcagcagagacgtggacgagatcgaggcctggatcagcgagaagctgcagaccgccagcgacgagagctacaaggaccccaccaacatccagagcaagcaccagaagcaccaggccttcgaggccgagctgcacgccaacgccgacagaatcagaggcgtgatcgacatgggcaacagcctgatcgagagaggcgcctgcgccggcagcgaggacgccgtgaaggccagactggccgccctggccgaccagtggcagttcctggtgcagaagagcgccgagaagagccagaagctgaaggaggccaacaagcagcagaacttcaacaccggcatcaaggacttcgacttctggctgagcgaggtggaggccctgctggccagcgaggactacggcaaggacctggccagcgtgaacaacctgctgaagaagcaccagctgctggaggccgacatcagcgcccacgaggacagactgaaggacctgaacagccaggccgacagcctgatgaccagcagcgccttcgacaccagccaggtgaaggacaagagagacaccatcaacggcagattccagaagatcaagagcatggccgccagcagaagagccaagctgaacgagagccacagactgcaccagttcttcagagacatggacgacgaggagagctggatcaaggagaagaagctgctggtgggcagcgaggactacggcagagacctgaccggcgtgcagaacctgagaaagaagcacaagagactggaggccgagctggccgcccacgagcccgccatccagggcgtgctggacaccggcaagaagctgagcgacgacaacaccatcggcaaggaggagatccagcagagactggcccagttcgtggagcactggaaggagctgaagcagctggccgccgccagaggccagagactggaggagagcctggagtaccagcagttcgtggccaacgtggaggaggaggaggcctggatcaacgagaagatgaccctggtggccagcgaggactacggcgacaccctggccgccatccagggcctgctgaagaagcacgaggccttcgagaccgacttcaccgtgcacaaggacagagtgaacgacgtgtgcaccaacggccaggacctgatcaagaagaacaaccaccacgaggagaacatcagcagcaagatgaagggcctgaacggcaaggtgagcgacctggagaaggccgccgcccagagaaaggccaagctggacgagaacagcgccttcctgcagttcaactggaaggccgacgtggtggagagctggatcggcgagaaggagaacagcctgaagaccgacgactacggcagagacctgagcagcgtgcagaccctgctgaccaagcaggagaccttcgacgccggcctgcaggccttccagcaggagggcatcgccaacatcaccgccctgaaggaccagctgctggccgccaagcacgtgcagagcaaggccatcgaggccagacacgccagcctgatgaagagatggagccagctgctggccaacagcgccgccagaaagaagaagctgctggaggcccagagccacttcagaaaggtggaggacctgttcctgaccttcgccaagaaggccagcgccttcaacagctggttcgagaacgccgaggaggacctgaccgaccccgtgagatgcaacagcctggaggagatcaaggccctgagagaggcccacgacgccttcagaagcagcctgagcagcgcccaggccgacttcaaccagctggccgagctggacagacagatcaagagcttcagagtggccagcaacccctacacctggttcaccatggaggccctggaggagacctggagaaacctgcagaagatcatcaaggagagagagctggagctgcagaaggagcagagaagacaggaggagaacgacaagctgagacaggagttcgcccagcacgccaacgccttccaccagtggatccaggagaccagaacctacctgctggacggcagctgcatggtggaggagagcggcaccctggagagccagctggaggccaccaagagaaagcaccaggagatcagagccatgagaagccagctgaagaagatcgaggacctgggcgccgccatggaggaggccctgatcctggacaacaagtacaccgagcacagcaccgtgggcctggcccagcagtgggaccagctggaccagctgggcatgagaatgcagcacaacctggagcagcagatccaggccagaaacaccaccggcgtgaccgaggaggccctgaaggagttcagcatgatgttcaagcacttcgacaaggacaagagcggcagactgaaccaccaggagttcaagagctgcctgagaagcctgggctacgacctgcccatggtggaggagggcgagcccgaccccgagttcgaggccatcctggacaccgtggaccccaacagagacggccacgtgagcctgcaggagtacatggccttcatgatcagcagagagaccgagaacgtgaagagcagcgaggagatcgagagcgccttcagagccctgagcagcgagggcaagccctacgtgaccaaggaggagctgtaccagaacctgaccagagagcaggccgactactgcgtgagccacatgaagccctacgtggacggcaagggcagagagctgcccaccgccttcgactacgtggagttcaccagaagcctgttcgtgaactag

SEQ ID NO: 290909 - DNA, 7419 bp, Artificial Sequence
  derived and/or modified sequence
atggaccccagtggtgtcaaggtgcttgaaaccgccgaggatatccaggaacgtagacagcaggttctggataggtatcaccggttcaaagagctgtccaccctaaggcggcagaagctggaggattcctatcgcttccaattcttccagcgggacgcagaagagctggaaaagtggatccaggagaagctccagatcgcctccgatgagaactataaagatcctaccaacctgcaaggcaagctgcaaaagcatcaggctttcgaggccgaggtacaggccaacagcggcgcaatcgtgaaactcgacgaaacggggaacttgatgatctccgaagggcattttgcttcggaaaccattcgaacgcgactgatggagctacatagacaatgggaactgctcctggaaaagatgcgcgaaaagggaatcaagctcttgcaggcccagaaactggtccagtatttgagagaatgcgaagatgtgatggattggattaatgacaaggaagctattgtcaccagcgaagaattaggtcaggacctggaacacgtcgaggtactgcagaagaaatttgaggagttccagaccgatatggctgcacatgaagagcgtgtgaacgaggtcaatcagttcgctgccaagctgattcaagagcagcacccggaagaggagcttatcaagaccaaacaggatgaagtaaacgcggcgtggcaacgtttgaaggggctggctctgcagaggcaggggaagctcttcggcgccgctgaagtgcagaggttcaacagagatgtcgatgagactatctcttggatcaaggagaaagagcagctgatggcatcagacgattttggcagagacttggctagcgtgcaggcgctcttgaggaaacacgaaggtctggagcgcgatctcgccgctcttgaggataaggtgaaggctctatgcgcggaggccgatcgtcttcagcagtcccaccccctgtctgctacccagattcaagttaagcgcgaagaactcatcactaattgggagcagattcggacactggccgccgagagacatgcacgcctgaatgacagctaccgcttgcaaaggttcctggcagacttcagggaccttacatcatgggtgaccgagatgaaagcacttattaacgcagacgaattggcatccgacgttgctggagccgaagccctgttggacaggcaccaggagcataagggggagatcgatgcgcacgaggactctttcaagtccgcagatgagagcggacaggccctacttgccgctgggcattacgcatctgacgaggtgagggagaaactcacagtgctgtccgaggagcgggctgcattgctcgagttgtgggagttacggagacagcaatacgagcaatgtatggacttgcagcttttttaccgagacacagagcaagtagataattggatgagtaaacaggaagcgtttttgctgaacgaggatctcggcgattcactagattccgtcgaggccctcctgaagaagcatgaagatttcgaaaaatcacttagcgctcaggaggagaagatcacagcgctggatgagttcgccacaaagttaatccaaaataaccactatgccatggaagacgtggccactaggcgtgatgcactattatctaggcggaacgctctgcacgaacgggccatgcgacgccgcgcccagctggccgactcctttcacctgcagcagttttttcgggattctgacgagctgaaaagctgggtcaacgaaaaaatgaagacagctacagacgaagcctataaagatccaagcaatctccaggggaaggtacagaaacaccaggcctttgaagctgaactttccgccaaccaatccagaattgacgcactggagaaggcaggccagaaattgatcgatgtgaatcactacgctaaagacgaggttgctgctagaatgaacgaggtcataagcctgtggaaaaaactgctggaagccacagaactgaaaggaatcaaactaagggaggccaaccagcagcagcagttcaatcggaatgtagaagacattgaactgtggttgtatgaggttgaaggacacctggctagtgatgattacggaaaggacctcacaaacgtgcagaatttacagaaaaagcacgcactgctggaggccgacgtcgcagcccaccaggataggatcgacggaatcactattcaagccagacagttccaggatgcggggcacttcgatgccgaaaacataaaaaaaaaacaggaggcacttgtcgcccgatacgaggcactcaaagagcctatggttgctcggaagcagaagctggcagactctttgcgtttgcagcagctgtttagggatgtggaggatgaagaaacatggattcgagaaaaggagcctatcgccgctagcactaatagaggcaaggacctgatcggcgtgcaaaatcttctgaagaaacatcaggccctgcaggccgagatcgccggacatgagccacgaatcaaagcagtgacccagaaaggcaatgccatggttgaagagggccatttcgctgctgaggatgtgaaggccaaacttcacgaactgaaccaaaagtgggaagccctaaaggctaaggcaagccagagacggcaggatcttgaagacagtttgcaagcccagcaatattttgctgatgccaacgaggcggaatcctggatgcgagagaaggagccgattgtggggtctactgattacgggaaagatgaggattccgcggaagcactgctcaagaagcacgaggcgttgatgagcgatttatcagcctatggcagttctatccaggcgctccgcgagcaagcccaatcttgccggcagcaggttgcacccactgatgacgagactgggaaagaattggttttggcactgtatgactatcaggagaaatcacctcgtgaagtaacaatgaaaaagggagacatcctcactttactgaacagcaccaataaggattggtggaaagtggaggtgaatgaccggcagggcttcgttccggctgcttatgttaagaaactggacccggctcagagtgcttcacgagaaaacctgctggaggagcaagggtccattgcactccggcaagaacagatagataaccaaactcggatcaccaaagaagctggttcagtgtcactaagaatgaagcaggtggaggagctttatcacagcctgctggagctgggggagaagaggaaagggatgctcgagaaatcatgcaagaagttcatgctttttcgtgaggccaacgaactgcagcagtggattaacgaaaaagaagcagcactgactagtgaggaggtgggggccgatctggagcaggtagaagtgctgcagaagaagttcgatgattttcagaaggacttaaaggcaaatgaatctaggctgaaggatatcaataaagttgcagaggacctggagtcggaaggcctgatggcagaagaagtgcaagccgtccagcaacaagaggtatacggaatgatgccacgggacgagactgattcaaagaccgcctctccgtggaagtccgcacggctgatggtgcacaccgttgctactttcaacagcattaaggagctgaacgagcggtggcggtctctgcagcagcttgcagaggaacgctcacagctcctgggttccgctcacgaagtgcagcggtttcatcgggacgctgacgagactaaggagtggatagaggagaaaaatcaggctcttaatactgataattatggccacgacctggcttctgtccaagcactgcagcggaagcacgaaggctttgaacgcgacctggcggccctcggtgataaggtcaactccttgggagagaccgcagagcgactcattcagagtcaccccgagtcggctgaggatctgcaggagaagtgcacagaactgaatcaggcatggtcttcacttgggaagagagccgaccagagaaaagctaaactcggcgactctcacgacctgcaacggtttttgagcgattttagagatctcatgagttggattaatggtatcagaggactagtcagctccgacgagttggctaaagacgttaccggtgctgaagctctgctggaaaggcatcaggagcatagaaccgagattgatgcgcgggccggaacgttccaggctttcgaacagttcggtcagcagctgctggctcacggtcactacgcatcacccgaaataaaacaaaagctcgacatcctcgaccaggaaagagcagacctggagaaagcatgggtgcagcgtagaatgatgcttgaccagtgcttggagctgcagctatttcatagagattgtgaacaagcagagaactggatggcagcccgagaggcatttctaaacacggaggataagggggattcgctcgacagtgttgaggctctgatcaaaaaacatgaggacttcgataaagcaataaatgtccaagaggagaaaatagcagctctccaggcctttgcagaccagttgatagccgcaggccactacgcaaaaggcgatattagctcaagaaggaacgaagtcctggacaggtggaggcgtttgaaggcacaaatgattgagaagcggagtaagctgggtgaatcccagacactgcagcagttcagcagggatgtcgatgaaatcgaagcctggatctctgaaaagctgcagacagcctcggatgagtcttacaaagacccaacgaacatccaatcgaaacatcagaagcaccaggctttcgaagcggagctgcacgccaacgcagacaggatcagaggggtgatcgatatgggcaacagcctcattgagcgaggggcctgtgccggctcggaggacgcagtgaaggcgcggttggctgcactggcggatcaatggcagtttctggtgcagaagtccgccgagaaaagccagaagcttaaagaggccaacaaacagcaaaattttaatacaggcatcaaggacttcgatttttggctctccgaagtggaagcactccttgcgagcgaggactatggaaaagatttagccagtgtgaacaaccttcttaagaaacatcagttacttgaggccgacatttctgcccacgaggataggcttaaggacttaaactcccaggcagattccctgatgacctcgagcgccttcgacacatcacaggtgaaggataagcgggacaccattaacggacggtttcagaagatcaagtcaatggctgcaagtcgccgagcaaagttgaacgaaagtcacagactgcatcagtttttccgagatatggacgatgaggaatcttggatcaaagaaaagaaactgctagtggggagcgaagattacgggagagatttgactggggttcagaaccttcgaaagaaacataagcgcctcgaagcggagctggccgctcacgaacccgcgatccagggggtactggacaccgggaagaagctgagcgacgacaacaccattggcaaggaagagatccagcagcggcttgcccaattcgtggaacactggaaggagctcaaacaactggccgcagcacgtggtcaaaggctcgaagagagtctggaatatcaacagttcgtggccaatgtcgaggaggaagaagcctggatcaatgagaaaatgaccttggtggcttccgaagactatggcgacacgttggcagcgatccaaggattacttaaaaagcatgaggcatttgagacagactttactgtgcataaggacagggtgaatgatgtgtgcacaaacggccaagacctgatcaagaagaacaaccaccatgaagagaatatttcaagcaaaatgaagggactcaacggcaaggtgagtgacttggaaaaagctgccgcccagaggaaagctaaacttgacgaaaactctgcttttctgcaattcaactggaaagccgacgtagtcgagagctggattggggaaaaggagaactccttaaagaccgacgactacggacgcgacctcagctctgttcagacactcctcacaaagcaggagacctttgacgcagggttgcaggccttccagcaggaaggaatagctaacatcaccgctcttaaagatcagctgcttgccgctaagcacgttcagtcgaaagcgatcgaggcccggcatgcctccctcatgaaacggtggtctcaattactggcgaactccgcggcccgaaagaagaaactgcttgaggcccagtcacattttaggaaagtcgaggatctgttccttacattcgcaaagaaagccagtgccttcaacagttggttcgagaatgcagaggaggacctgaccgaccccgttagatgtaactccctagaggaaattaaagctcttagagaagcacatgatgcatttcgttctagcctgtctagtgctcaggctgattttaatcagctggccgagctggacaggcagataaagtcctttagagttgcttcaaacccatacacctggtttacaatggaagccctggaagagacttggagaaatctgcagaagatcatcaaagagcgcgaactcgaattgcagaaggagcaaaggaggcaagaagagaacgataaactgcggcaggagttcgctcagcatgccaatgccttccaccagtggatccaggagacaaggacataccttttggacggctcctgcatggtcgaggagagtggcacccttgaatctcaactcgaagccaccaaacggaaacaccaggagatcagagcaatgagatcccagttgaaaaagattgaagatttgggggcggctatggaagaggcactgattctggataataaatacactgagcacagcaccgtcggattggcacagcagtgggatcagctggaccaattaggcatgcggatgcagcacaaccttgaacagcagatccaggcacggaacacgacaggtgtcacagaagaggccctcaaagagttttctatgatgttcaaacacttcgacaaagacaaatccggtagacttaatcatcaagaattcaaatcttgtctgcggtccctgggctacgatcttcctatggttgaggaaggcgagccagatcctgaattcgaagctatactcgatacagtggacccgaatcgcgacggccatgtgtccctgcaagaatatatggcattcatgatcagccgcgaaacagagaatgtgaagagttcagaggagatcgaaagcgcctttagggctttgtcatctgagggtaagccttacgtcaccaaagaggaactgtaccaaaacctgacgcgggagcaggccgattactgcgtgtcacacatgaagccatacgtggacgggaagggacgtgaactgccaaccgctttcgactatgtggaatttacccggagcctgttcgtaaactag

SEQ ID NO: 290910 - DNA, 7419 bp, Artificial Sequence
  derived and/or modified sequence
atggaccccagcggcgtgaaggtgctggagacagctgaggacatccaggagcggcggcagcaggtgctggaccgctaccaccgcttcaaggagctgagcaccctgcggcggcagaagctggaggacagctaccgcttccagttcttccagagagatgctgaggagctggagaagtggatccaggagaagctgcagatcgccagtgatgagaactacaaggaccccaccaacctgcagggcaagctgcagaagcaccaggcctttgaggccgaggtgcaggccaacagcggggccatcgtgaagctggatgaaacaggcaacctgatgatcagcgagggccactttgccagcgagaccatccgcacccggctgatggagctgcaccggcagtgggagctgctgctggagaagatgagggagaagggcatcaagctgctgcaggcccagaagctggtgcagtacctgagagaatgtgaagatgtgatggactggatcaatgacaaggaggccatcgtgaccagcgaggagctgggccaggacctggagcacgtggaggtgctgcagaagaagtttgaggagttccagacagacatggccgcccacgaggagcgggtgaatgaggtgaaccagtttgctgccaagctgatccaggagcagcaccctgaggaggagctgatcaagaccaagcaggatgaggtgaatgctgcctggcagaggctgaagggcctggccctgcagaggcagggcaagctgtttggagctgctgaggtgcagcgcttcaacagagatgtggatgagaccatctcctggatcaaggagaaggagcagctgatggccagtgatgactttggccgggacctggcctctgtgcaggccctgctgaggaagcatgagggcctggagcgggacctggccgccctggaggacaaggtgaaggccctgtgtgccgaggccgaccggctgcagcagagccaccccctgagcgccacccagatccaggtgaagcgggaggagctgatcaccaactgggagcagatccgcaccctggccgctgagagacatgcccggctgaatgacagctaccgcctgcagcgcttcctggccgacttccgggacctgacctcctgggtgacagagatgaaggccctgatcaatgctgatgagctggccagtgatgtggccggggctgaggccctgctggacagacaccaggagcacaagggggagattgatgcccacgaggacagcttcaagtctgcagatgaaagtggccaggccctgctggccgccggccactacgccagtgatgaggtgcgggagaagctgactgtgctgtctgaggagcgggccgccctgctggagctgtgggagctgcggcggcagcagtatgagcagtgcatggacctgcagctgttctacagagacacagagcaggtggacaactggatgagcaagcaggaggccttcctgctgaatgaagacctgggggacagcctggacagcgtggaggccctgctgaagaagcatgaggactttgagaagagcctgagcgcccaggaggagaagatcacagccctggatgaatttgccaccaagctgatccagaacaaccactacgccatggaggatgtggccaccaggagagatgccctgctgagcagaagaaatgccctgcacgagcgggccatgagaagaagagcccagctggccgacagcttccacctgcagcagttcttccgggacagtgatgagctgaagtcctgggtgaatgagaagatgaagacagccacagatgaggcctacaaggaccccagcaacctgcagggcaaggtgcagaagcaccaggcctttgaagctgagctgagcgccaaccagagcagaattgatgccctggagaaggccggccagaagctgattgatgtgaaccactacgccaaggatgaggtggccgccaggatgaatgaggtgatcagcctgtggaagaagctgctggaggccacagagctgaagggcatcaagctgcgggaggccaaccagcagcagcagttcaacagaaatgtggaggacatcgagctgtggctgtatgaggtggagggccacctggccagtgatgattatggcaaggacctgaccaacgtgcagaacctgcagaagaagcacgccctgctggaggctgatgtggccgcccaccaggacagaattgatggcatcaccatccaggcccggcagttccaggatgctggccactttgatgctgagaacatcaagaagaagcaggaggccctggtggcccgctatgaggccctgaaggagcccatggtggccaggaagcagaagctggccgacagcctgcggctgcagcagctgttcagagatgtggaggatgaggagacctggatccgggagaaggagcccatcgccgccagcaccaacagaggcaaggacctgattggagtgcagaacctgctgaagaagcaccaggccctgcaggccgagattgctggccacgagccccgcatcaaggctgtgacccagaagggaaatgccatggtggaggagggccactttgctgctgaagatgtgaaggccaagctgcacgagctgaaccagaagtgggaggccctgaaggccaaggccagccagaggcggcaggacctggaggacagcctgcaggcccagcagtactttgctgatgccaatgaggccgagagctggatgagggagaaggagcccatcgtgggcagcacagattatggcaaggatgaggacagcgctgaggccctgctgaagaagcatgaggccctgatgtctgacctgagcgcctacggcagcagcatccaggccctgcgggagcaggcccagagctgccggcagcaggtggcccccacagatgatgaaacaggcaaggagctggtgctggccctgtatgactaccaggagaagagcccccgggaggtgaccatgaagaagggggacatcctgaccctgctgaacagcaccaacaaggactggtggaaggtggaggtgaatgaccggcagggctttgtgcctgctgcctacgtgaagaagctggaccctgcccagagcgccagccgggagaacctgctggaggagcagggcagcatcgccctgcggcaggagcagattgacaaccagacccgcatcaccaaggaggccggctctgtgtccctgaggatgaagcaggtggaggagctgtaccacagcctgctggagctgggggagaagaggaagggcatgctggagaagagctgcaagaagttcatgctgttccgggaggccaatgagctgcagcagtggatcaatgagaaggaggccgccctgaccagcgaggaggtgggcgctgacctggagcaggtggaggtgctgcagaagaagtttgatgacttccagaaggacctgaaggccaatgaaagccggctgaaggacatcaacaaggtggccgaggacctggagagcgagggcctgatggccgaggaggtgcaggccgtgcagcagcaggaggtgtatggcatgatgcccagagatgaaacagacagcaagacagccagcccctggaagagcgcccggctgatggtgcacacagtggccaccttcaacagcatcaaggagctgaatgaacgctggaggagcctgcagcagctggccgaggagaggagccagctgctgggcagcgcccacgaggtgcagcgcttccacagagatgctgatgagaccaaggagtggattgaggagaagaaccaggccctgaacacagacaactacggccatgacctggcctctgtgcaggccctgcagaggaagcatgagggctttgagcgggacctggccgccctgggggacaaggtgaacagcctgggggagacagctgagcggctcatccagagccaccctgagagcgctgaggacctgcaggagaagtgcacagagctgaaccaggcctggagcagcctgggcaagagagctgaccagaggaaggccaagctgggggacagccatgacctgcagcgcttcctgagtgacttccgggacctgatgtcctggatcaatggcatccggggcctggtgtccagtgatgagctggccaaggatgtgactggagctgaggccctgctggagcggcaccaggagcacaggacagaaattgatgcccgggccggcaccttccaggcctttgagcagtttggccagcagctgctggcccacggccactacgccagccctgagatcaagcagaagctggacatcctggaccaggagagagctgacctggagaaggcctgggtgcagaggaggatgatgctggaccagtgcctggagctgcagctgttccaccgggactgtgagcaggccgagaactggatggccgcccgggaggccttcctgaacacagaagataaaggagacagcctggacagcgtggaggccctgatcaagaagcatgaggactttgacaaggccatcaacgtgcaggaggagaagattgctgccctgcaggcctttgctgaccagctgattgctgctggccactacgccaagggggacatcagcagcagaagaaatgaggtgctggaccgctggaggcggctgaaggcccagatgattgagaagaggagcaagctgggggagagccagaccctgcagcagttcagcagagatgtggatgaaattgaggcctggatcagcgagaagctgcagacagccagtgatgagagctacaaggaccccaccaacatccagagcaagcaccagaagcaccaggcctttgaagctgagctgcacgccaatgctgaccgcatccggggcgtcatcgacatgggcaacagcctgattgagcggggggcctgtgccggctctgaagatgctgtgaaggcccggctggccgccctggccgaccagtggcagttcctggtgcagaagtctgctgagaagagccagaagctgaaggaggccaacaagcagcagaacttcaacacaggcatcaaggactttgacttctggctgtctgaggtggaggccctgctggccagcgaggactatggcaaggacctggcctctgtgaacaacctgctgaagaagcaccagctgctggaggccgacatcagcgcccatgaagatcggctgaaggacctgaacagccaggccgacagcctgatgaccagcagcgcctttgacaccagccaggtgaaggacaagagggacaccatcaatggccgcttccagaagatcaagtccatggccgccagccggcgggccaagctgaatgaaagccaccggctgcaccagttcttccgggacatggatgatgaggagagctggatcaaggagaagaagctgctggtgggcagcgaggactatggccgggacctgactggagtgcagaacctgaggaagaagcacaagaggctggaggccgagctggccgcccacgagcccgccatccagggcgtgctggacaccgggaagaagctgagtgatgacaacaccatcggcaaggaggagatccagcagaggctggcccagtttgtggagcactggaaggagctgaagcagctggccgccgcccggggccagaggctggaggagagcctggagtaccagcagtttgtggccaacgtggaggaggaggaggcctggatcaatgagaagatgaccctggtggccagcgaggactatggagacaccctggccgccatccagggcctgctgaagaagcatgaggcctttgaaacagacttcaccgtgcacaaggacagagtgaatgatgtgtgcaccaacggccaggacctgatcaagaagaacaaccaccacgaggagaacatcagcagcaagatgaagggcctgaatggcaaggtgtctgacctggagaaggctgctgcccagaggaaggccaagctggatgagaacagcgccttcctgcagttcaactggaaggcagatgtggtggagagctggattggagagaaggagaacagcctgaagacagatgattatggccgggacctgagctctgtgcagaccctgctgaccaagcaggagacctttgatgctggcctgcaggccttccagcaggagggcatcgccaacatcacagccctgaaggaccagctgctggccgccaagcacgtgcagagcaaggccatcgaggcccggcatgccagcctgatgaagcgctggagccagctgctggccaacagcgctgccaggaagaagaagctgctggaggcccagagccacttcaggaaggtggaggacctcttcctgacctttgccaagaaggccagcgccttcaacagctggtttgaaaatgctgaggaggacctgacagatcctgtgcgctgcaacagcctggaggagatcaaggccctgcgggaggcccatgatgccttccgcagcagcctgagcagcgcccaggccgacttcaaccagctggccgagctggaccggcagatcaagagcttccgggtggccagcaacccctacacctggttcaccatggaggccctggaggagacctggaggaacctgcagaagatcatcaaggagcgggagctggagctgcagaaggagcagaggcggcaggaggagaatgacaagctgcggcaggagtttgcccagcacgccaatgccttccaccagtggatccaggagaccaggacctacctgctggatggcagctgcatggtggaggagagcggcaccctggagagccagctggaggccaccaagaggaagcaccaggagatccgggccatgaggagccagctgaagaagattgaggacctgggcgccgccatggaggaggccctgatcctggacaacaagtacacagagcacagcacagtgggcctggcccagcagtgggaccagctggaccagctgggcatgaggatgcagcacaacctggagcagcagatccaggccaggaacaccaccggggtgacagaggaggccctgaaggagttctccatgatgttcaagcactttgacaaggacaagagcggccgcctgaaccaccaggagttcaagagctgcctgcggagcctgggctatgacctgcccatggtggaggagggggagccagaccctgagtttgaggccatcctggacacagtggaccccaacagagatggccacgtgtccctgcaggagtacatggccttcatgatcagccgggagacagaaaatgtgaagagcagcgaggagattgaaagtgccttccgggccctgagcagcgagggcaagccctacgtgaccaaggaggagctgtaccagaacctgacccgggagcaggccgactactgtgtgagccacatgaagccctacgtggatggcaagggccgggagctgcccacagcctttgattatgtggagttcaccaggagcctgtttgtgaactag

SEQ ID NO: 290911 - DNA, 7419 bp, Artificial Sequence
  derived and/or modified sequence
atggaccccagcggcgtgaaggtgctggagaccgccgaggacatccaggaacgccgtcagcaggtactggataggtaccaccgctttaaggaactgagtaccctgaggagacagaagctggaagattcatatcgcttccagttttttcagcgagatgctgaggagctcgaaaaatggatacaggagaagctgcagatcgcgtccgatgagaattacaaagatcctaccaacctgcaaggcaaacttcaaaaacaccaggcattcgaggccgaagtgcaggccaattccggcgccatcgttaagctggatgagacgggcaaccttatgataagtgaaggccatttcgcttccgagacgatcagaacgagacttatggagctacaccggcagtgggaactgctgcttgagaagatgagggagaaaggcatcaaactactgcaggcacagaagctagtgcagtatttgagagagtgtgaggacgtgatggactggattaatgataaagaagcgattgttacaagtgaagagttggggcaggacctggaacatgtcgaagtcctgcaaaagaaattcgaggagttccagacagatatggccgctcacgaggagcgggtgaacgaggtgaatcagttcgcggccaagcttattcaagaacaacaccccgaagaagagctaatcaagactaaacaggacgaagtgaatgccgcttggcaacgcttgaaaggactggctctccaacgccaagggaagctgttcggagccgccgaagtccagcgttttaatcgagacgtggacgagactatttcttggatcaaagaaaaggagcagctaatggccagtgacgatttcggccgcgatttggcttctgttcaggcactcctccgcaagcacgagggcctcgagcgtgatctggccgccttggaggataaggtgaaggctctttgtgcagaggcagatagacttcagcaatcccacccgttatccgcgacccagatccaggtgaaaagagaggaactgataaccaactgggagcagataagaactctggctgccgagaggcatgccagactaaacgatagctaccggctgcaaaggtttctggctgacttcagagacttgacaagttgggtgaccgaaatgaaagcgctgattaatgcagacgaactggccagcgacgtcgctggtgctgaggcgcttctggaccgccatcaagagcacaaaggcgaaatcgatgctcacgaagacagtttcaaatccgcggacgaaagtggccaagcgctgcttgctgctggccactacgcatccgacgaggttcgggagaaactcacagttctcagcgaagagagggccgctctcctggaactttgggagctgagaagacagcagtacgaacagtgcatggatctgcagcttttttaccgggacaccgagcaggtcgataattggatgagcaaacaggaggcatttctgctgaacgaggatttaggcgacagtctggatagcgtggaagctctcctgaaaaaacacgaagactttgagaaatccctatccgcgcaggaagagaaaattacggctctcgatgaatttgctactaagcttattcagaataaccattatgccatggaggatgtcgccacaagaagagatgccctgttgtcacgcagaaacgccctccacgagcgtgccatgcggcggcgagcccaattggccgactcatttcacctccagcaattcttcagagactccgatgagttgaaaagctgggtaaacgaaaaaatgaagaccgcaactgacgaagcatacaaagatccctctaacctgcagggaaaagttcagaaacaccaggctttcgaggccgaactctccgcaaatcaatctagaatcgacgctctggaaaaggccggtcaaaagttaatcgatgtgaaccactatgccaaagatgaggttgctgctagaatgaacgaagtaatttctctgtggaaaaagctgctcgaagcgaccgaactgaagggtattaaactcagagaggccaaccaacagcaacagttcaaccgcaatgtggaggacatcgagctctggttatatgaggtcgaaggtcacctggcttctgatgattacggcaaagatctgacaaacgttcaaaacttacagaagaagcacgccctgctcgaagctgacgtcgccgcacatcaggaccggatcgatggcataaccattcaggcacgccaatttcaggacgcagggcattttgacgctgaaaatatcaaaaaaaagcaggaagccttagtcgcccgctatgaggctctgaaggaacccatggtagccagaaagcagaaactcgcggacagtctgcgtctccaacaactatttcgagacgtggaggatgaggaaacttggatccgtgaaaaggaaccgattgccgcaagtactaataggggtaaggatctaatcggcgtacagaaccttcttaagaaacatcaggcactccaggctgaaatagccggacacgagcctcggataaaagctgtaacgcaaaaggggaatgccatggtagaagaagggcacttcgccgccgaggacgtgaaggccaagctacacgagttgaaccagaagtgggaggcattgaaagctaaggccagtcagaggcgtcaggatcttgaagattccctacaggcccagcagtattttgccgatgcgaatgaggccgagagctggatgagagaaaaagagcccatcgtcggcagcaccgactacgggaaagacgaggacagcgcggaagccctgctgaagaagcacgaggcgctcatgagcgacctgtccgcttatggttcatccatccaggctctgagggaacaagctcaaagctgtcggcagcaggtggccccaactgatgacgagacagggaaagagctggttctagctttatacgactaccaggagaagagcccacgggaagtcactatgaaaaagggcgatatccttaccctactcaatagcaccaataaggattggtggaaagttgaggtaaatgaccggcagggattcgtgcctgccgcatacgttaaaaagctcgacccagcacagtctgcatccagggagaacctactggaagaacagggatctattgctctgcgccaggagcagatcgataaccaaactcggattacgaaagaagccggttcagtgagtcttagaatgaagcaagtcgaggagctgtatcactctctgcttgagctcggagaaaagcgaaagggcatgcttgagaagagctgtaaaaagttcatgctttttagagaggccaacgaactgcaacaatggattaacgagaaggaggcggccctgaccagcgaagaagtcggagctgatttggaacaggtcgaggtgctgcagaaaaagtttgacgactttcaaaaggacctaaaagctaatgagtcaagacttaaggacattaacaaagtcgctgaggacctggagtcagaagggctgatggctgaagaggtgcaagctgtgcagcaacaggaagtgtacggcatgatgcccagagacgaaactgactctaagacggcatctccatggaaatccgctcgcctcatggtccatacagtagctaccttcaacagcatcaaggaactcaacgagcgatggcgcagcttgcagcagttggctgaagaaaggtctcagctcctcggcagtgctcacgaagtacagcgcttccaccgagacgccgacgagaccaaggagtggatcgaggaaaagaatcaagccctgaacaccgataattacggacatgacctagcttccgtgcaggctctgcagcgcaagcatgagggctttgaacgagacctggccgccttgggcgataaggtcaattcactgggcgagaccgccgagcgacttatccagagtcatcccgagtcggccgaagacctgcaggagaagtgcacagagctgaatcaagcctggtccagcctaggcaagcgcgcagatcaaagaaaagctaagctcggggattctcacgacttacaaagatttctgtcggatttcagggacctgatgagttggatcaatgggatacggggactcgtgtctagcgatgagttggccaaggacgtaaccggcgctgaagcgctgctcgagaggcatcaagagcataggaccgagatcgatgccagggcgggcacctttcaggcttttgagcaattcggacagcagttgctcgcccacgggcactacgcgagtcctgagatcaagcaaaagttagacatactggaccaggagcgcgcagatctagagaaggcttgggtccagaggcgcatgatgctggaccagtgcctcgagctgcagttatttcaccgcgattgtgagcaggctgagaactggatggctgccagagaggcattcctaaacaccgaggacaagggtgattccctggacagtgtagaggccctgattaagaaacatgaggatttcgacaaggcaattaacgtccaggaggagaaaatcgcagccttgcaggcgtttgccgatcagcttatagccgccgggcattatgcgaagggcgatattagcagcaggcgcaatgaggtgcttgatcggtggcgacgactcaaggcccagatgattgagaaacgctctaagttaggtgagagccaaacactccagcagtttagtagggatgtggatgagatcgaggcttggatctctgagaaactgcagaccgcgtctgacgaaagttacaaggatcccaccaacatccagtctaaacatcagaaacaccaagccttcgaagcagaactgcatgccaatgctgatagaattcgcggagtcattgatatggggaactccttgatcgaacgaggggcatgcgctgggagtgaagatgccgtgaaggccaggctggccgcactcgctgaccagtggcagtttctcgtgcagaagagcgcagagaagagtcagaagttaaaggaagccaacaaacagcagaatttcaatacaggcataaaagactttgacttctggctgtctgaggtcgaggccctcctggcaagtgaggattatggaaaagacctggccagtgtgaataatttgctgaagaaacatcagttgctggaagcagacatctcggcccatgaggaccggcttaaagacctgaatagccaggcggacagcttgatgacttcttcagctttcgacacgtcgcaggtcaaggacaagcgggacacaattaacgggagattccaaaagattaagagcatggcagcgtcccgccgcgcgaagctcaacgagtcacaccgattacatcagttcttcagggacatggacgatgaggaaagctggatcaaggaaaagaaacttctggtgggatcagaagactatggccgcgaccttacgggagtccagaacctccgcaaaaagcataagcggctggaagccgagctcgctgcccatgaacctgccatccagggtgtgttggacaccgggaaaaagctcagtgatgataatactatcggtaaagaggagatccagcagcggcttgctcaattcgtagagcactggaaagaactgaagcaacttgcagccgctagaggccagcggctggaggagtctctggagtaccagcagtttgtggcaaacgtggaggaggaggaggcttggattaacgagaagatgacgttagtggccagcgaggactatggcgatactctggcagccatccagggcctgttgaagaagcacgaggccttcgagaccgattttaccgttcacaaggatcgagtgaatgatgtgtgcaccaatggacaggacttgatcaagaagaacaatcaccacgaggagaatatttcctctaagatgaagggcctcaacggcaaggtgtctgacttagagaaggcagcagcccagcgtaaagcaaaactggacgagaactctgcatttcttcagttcaactggaaggcggatgtagtggagagttggattggcgaaaaagagaatagtctcaagacagatgattacggcagagatctgagtagcgtgcagacactgttgacaaagcaggaaaccttcgacgccggtttgcaggcttttcagcaagagggcattgctaacatcactgcgttgaaagaccagctgttggcagcaaagcacgtccagtcaaaggccatcgaggctcgtcacgcgtccttgatgaaacgatggtcccagttactagccaattccgctgccagaaagaagaagctactcgaggcgcagagccactttcggaaagtagaagacctttttcttaccttcgccaaaaaggcgtccgcttttaatagttggtttgaaaacgcagaagaagacctgaccgatcccgtcagatgtaattcattagaagaaatcaaggccttgcgtgaggctcatgacgcatttaggtcgagcctgagcagcgcccaggccgattttaatcagctcgcagagctggatcgccagatcaagtccttccgggtcgctagtaacccttacacttggttcactatggaggcccttgaggagacctggcgtaacttgcagaagatcattaaggagagggaactggaattgcagaaggaacagcgcaggcaagaagagaatgacaagctccgtcaagagttcgcacagcatgctaacgcgtttcaccaatggatacaggagaccagaacctacctgcttgacggcagctgtatggtggaagaaagcggcacgctggaaagtcagttggaggctaccaaaagaaagcaccaggagatccgggccatgaggtcacagctgaaaaagatagaagacctgggtgcagccatggaggaagcgttgattctggataataaatatacggaacactcaacagtcggactggcacagcagtgggaccagctcgaccagctcgggatgcgaatgcagcacaacttggagcagcaaattcaggcaaggaatacaacaggggtaacagaggaagcactcaaggagttctctatgatgtttaaacactttgataaagataagtctggccgcctcaatcatcaggagttcaagtcctgtctacgctcattgggctatgatctgccaatggtggaggagggtgaacccgacccagagtttgaagccattttagataccgtggatccaaacagggacggtcatgtgtccctgcaggaatatatggcttttatgatctccagagaaacagagaatgttaagtcaagtgaggagattgaaagcgcttttagagctttgagtagcgaggggaagccatatgtgaccaaagaagagctttaccaaaatctcacccgcgaacaggccgattattgtgtgtcccatatgaaaccttacgttgatgggaaggggagggaactacccactgctttcgattacgtggaattcacgcgttcactctttgttaattag

SEQ ID NO: 290912 - DNA, 7418 bp, Artificial Sequence
  derived and/or modified sequence
atggacccatccggcgtaaaggtgttggagaccgccgaggatatacaggagcgcaggcagcaggtgctggataggtatcataggttcaaggaactatctaccctgaggcgtcagaaactggaggactcctatcgatttcagttcttccagagggatgccgaagagcttgaaaagtggattcaggagaagttgcagatcgcctccgatgaaaactacaaggaccccaccaatctgcagggaaagctgcaaaaacaccaagctttcgaggcagaagtccaggctaactccggagctatcgtgaaactggacgagaccggcaatttaatgattagtgagggccactttgctagcgaaactatccgcacgaggctcatggagctccatagacagtgggagctgcttctggagaaaatgcgagagaaggggataaagttgctgcaagctcagaagcttgtccaatacctgagggaatgtgaagacgtcatggattggattaacgataaggaagccatagtaaccagcgaggaactaggtcaggatctggagcacgtggaggtcctgcaaaagaagtttgaggagtttcagaccgacatggctgcccacgaagagcgcgtgaatgaagttaatcaattcgccgcaaagctgatccaggagcagcacccagaggaggagctcataaagacaaaacaggacgaggtcaacgcggcatggcagcggctgaaaggcctggccctccagcggcaggggaagctgtttggagcggcagaagtgcaacgtttcaatcgggatgtggatgaaacgatttcttggatcaaggagaaggagcaactcatggctagcgatgatttcggtcgcgatctggcctccgtccaggctctattaaggaaacacgagggtctggaaagagacctggccgctttggaggataaagtgaaagcactctgcgccgaggcagatagactgcagcagtcacatcccctgtctgccacccagattcaggttaaaagggaggaactgattactaattgggagcagatcaggacactggctgcagaaagacacgcaagattgaatgattcataccgcctgcagcgcttcctggctgatttccgcgatctgaccagttgggtgaccgaaatgaaagcgctgatcaatgccgacgagctcgcttccgacgtagccggagcggaggcccttctggataggcaccaggagcacaaaggagaaatcgacgctcacgaggattctttcaagagcgccgacgaaagtgggcaggctcttctcgccgctggacattacgcaagcgatgaggtgagagagaaactgaccgtgcttagcgaagagagggctgcgctcctggagttgtgggagttgaggcgacagcagtacgagcagtgcatggacctccagcttttctaccgggataccgagcaggtagacaactggatgagcaaacaggaggcctttttgctcaatgaagacctcggagatagccttgacagcgtcgaggctttgttgaagaaacacgaggacttcgagaagagcctgagcgctcaggaagaaaaaataactgccctagacgagtttgcaaccaaattgatacagaataaccactatgctatggaagacgttgccaccagacgggatgctctgctcagccggagaaacgctttgcacgagcgggctatgcggagacgcgcacaactcgctgatagcttccacctgcagcaattcttcagagacagtgatgagctgaaaagctgggtcaatgagaagatgaagactgctacagacgaagcctacaaggaccctagtaaccttcaggggaaagtccagaagcaccaggctttcgaagcagagttaagcgctaaccaatcgaggatagatgcacttgagaaggcaggacaaaagctgatcgacgttaaccactacgccaaggacgaggtcgcagccagaatgaatgaggtgatctcactctggaagaaactcctcgaggctaccgaattgaaaggtatcaaactgcgagaagctaaccagcaacagcagttcaataggaatgtcgaggatatcgaactctggctgtacgaagtggaagggcatttggcctctgacgactacggaaaagacttaaccaatgtgcaaaacctgcaaaagaagcatgccctcctggaagctgatgttgcggctcaccaggacagaatcgacggaataacaattcaagccagacaattccaggacgccggacactttgacgccgagaatataaagaagaaacaggaggccctggtggccaggtacgaagcactgaaagagccaatggttgccaggaagcagaagctagcagacagcttgcgattacagcagctgttccgcgacgtcgaggatgaggagacttggataagagagaaggaacctattgctgcaagcacaaacagggggaaggacctgattggagtccagaatctgctcaagaaacatcaagccctgcaagctgagatcgcgggtcacgagccccgaatcaaggccgtgactcagaaggggaatgctatggttgaggaaggccactttgctgcagaggatgtgaaagccaagttgcatgagcttaatcaaaagtgggaagcactcaaggccaaagccagccagcgcaggcaagacctggaggacagcttgcaggcacaacagtactttgccgacgccaacgaagctgaaagctggatgagagagaaggaacctattgtaggttcgactgattatggaaaagacgaggattccgcagaggccctgctaaagaaacacgaagcgctgatgagtgacctgagcgcctacgggagctcgatccaggctctccgagagcaggcccagtcttgtcgtcagcaggtggccccaaccgatgacgagaccggcaaagagctggtgttagccctttacgactaccaagaaaagagtccccgtgaagtgactatgaaaaaaggagacattctgaccctcttgaacagcacaaacaaagactggtggaaggtggaagtgaatgataggcaagggtttgtgcctgctgcatatgtgaagaagctcgaccccgctcaatccgcatctcgggaaaacctgttagaggagcagggttcgatcgcgctccggcaggagcagatcgacaaccagacccggattaccaaggaagccggttcagtaagtctgagaatgaaacaggtcgaagagctttaccatagcttgctcgaactcggcgaaaagagaaaaggcatgcttgagaagagctgtaagaaattcatgctcttccgagaggccaatgaattacaacagtggatcaacgagaaagaagccgctctgacatccgaggaggtgggggctgacttggaacaagtggaggtgcttcagaagaaatttgacgacttccagaaggatctcaaagctaacgagtctcggctgaaggacataaataaggtcgccgaagatcttgagtcggaggggttaatggccgaggaagtgcaagcagtgcagcagcaggaggtgtatggaatgatgcccagggatgaaactgatagtaaaacggctagtccatggaagtctgccaggttgatggtgcatactgtggccacatttaactccatcaaggagctgaacgagcggtggagaagcttgcaacagctcgccgaggagaggagtcagctgctgggcagtgcccacgaggtccaacgcttccaccgcgacgccgatgagaccaaggagtggatagaggaaaagaatcaagcgcttaacaccgataactacgggcacgacctggcgtcagttcaggccctgcaacgaaagcacgagggatttgaacgggaccttgctgccctgggcgacaaggtgaactccctgggagagactgctgagaggctgatccagtcccatccagaaagtgcagaggatctgcaggagaaatgcaccgagctgaaccaggcatggtcatctctagggaaacgggctgatcagaggaaggcaaaactgggagattcgcacgatctgcagagatttctttccgatttcagagacttgatgagttggataaacggaatacgtggactggtgtcatccgacgaactggctaaagatgtaaccggcgcagaggccctgttggaaaggcaccaggagcatcggaccgagattgatgcacgggcagggacttttcaggcgtttgaacagttcggacagcagctgctcgcacacggacattacgcaagtccagagatcaaacagaagctcgacatcctggatcaggagcgggctgacctggagaaagcctgggtgcagcggcgtatgatgctggaccaatgcttggaactgcagcttttccaccgagattgtgaacaggccgaaaattggatggccgcacgtgaagcctttctcaacacagaggacaagggagattctctcgatagcgttgaagccctaatcaagaagcacgaggatttcgataaggctattaatgtacaggaagaaaagatcgccgcacttcaggccttcgcggaccagctgatcgcggctgggcactacgccaagggcgacattagctcccgaagaaacgaggtgttggatcgttggaggcggctaaaggcccaaatgatagagaagaggtccaagctgggagagagccagacattgcaacagttttcccgcgacgtggacgagattgaggcgtggatctccgagaaactgcagacggcctccgatgagagttacaaggatcccaccaatattcaaagcaagcaccagaaacatcaggcatttgaagccgaactccacgccaacgcagaccggatccgcggagttatcgatatgggtaactccctgatcgagcgcggtgcatgcgccggtagcgaggacgccgtaaaggccagacttgccgctctagccgaccagtggcaattcctggtccagaaaagtgcggagaagagccagaaactgaaggaggccaacaaacagcagaattttaataccggcattaaagacttcgacttctggctgtccgaagtggaggcgcttctggccagcgaagactatgggaaagacctagcttcagttaataatttgctgaaaaagcaccaactgcttgaggctgacatttcagcacatgaggaccgtcttaaagaccttaactcccaagccgacagccttatgacatctagtgccttcgacacttctcaagtgaaagacaaaagggacaccattaatggtcgcttccagaagattaagtctatggcagcaagccgccgagccaagctgaatgaatctcaccgcctccatcagttctttcgggacatggacgatgaagagtcatggatcaaggagaaaaagctcctagttggaagtgaggactacggaagggacctgacaggggtgcagaatctcaggaaaaaacataagaggctcgaagcagaactcgccgcacacgaacctgcgattcagggtgtgctcgacactggcaagaagttgagcgacgataacacaatcgggaaagaagaaatccaacagagactagcacagtttgtcgagcactggaaagaactgaagcagctcgccgcagcccgaggccagaggctcgaggaatcactagaataccaacaattcgtggccaatgtcgaggaggaggaagcatggattaacgaaaaaatgacgttggtggcatccgaggactatggtgataccctggccgctatacagggcttgcttaagaagcatgaggccttcgagaccgacttcactgtccataaagacagggttaatgacgtgtgtaccaacgggcaggaccttatcaaaaaaaacaatcaccatgaggaaaatatcagcagcaagatgaaaggtctcaatggcaaagtgagtgacttagagaaagccgctgcgcagcggaaggccaaattggatgaaaacagcgcatttcttcagtttaattggaaagccgatgtggtggaatcctggatcggcgagaaggaaaatagccttaaaacggatgattatggtcgggatttgtcctcagtccagacactccttaccaaacaagagacatttgatgcgggtcttcaggctttccagcaggaaggcattgctaatattacggccctgaaagatcaattactggctgcgaagcacgtgcagtcaaaggctatcgaggcacgccacgctagcctcatgaaacgctggtcacagttactcgcgaactcagctgcacgaaagaaaaaattacttgaagcgcagtcccattttcgcaaggtggaagaccttttcctgacatttgcgaaaaaggccagcgcttttaattcctggtttgagaacgcggaggaagatctgaccgatcccgttcggtgcaacagcctggaagagattaaggctctcagagaggcccacgacgcctttagatccagcctgagtagcgcacaagccgactttaaccagctggccgaacttgatagacaaattaagagcttcagagtagcttctaacccatacacttggttcaccatggaagccctggaggagacgtggcggaacctgcagaaaatcatcaaagagcgggaacttgaactgcagaaggaacagcgcagacaggaagagaatgataagttaaggcaggagtttgcgcagcatgcaaatgcattccaccagtggatacaggaaacgagaacctaccttcttgacggatcctgtatggtggaagaaagtggaaccctggaatcccaacttgaggcaacgaaaagaaagcaccaggaaattcgggctatgagatcacagctgaaaaagatcgaagatcttggcgctgccatggaggaggccctcatcttggacaataagtacacagagcactccacagtcggacttgcgcagcaatgggaccagctggatcagctggggatgaggatgcagcacaacctggagcagcagatccaggcccgaaatactacaggagtgacagaggaagctctcaaagaattctcaatgatgttcaaacactttgacaaggataagagcggaagactgaatcaccaggaattcaaatcatgcctgcggtccctgggctacgatctcccgatggtggaggaaggtgaaccagatcctgagttcgaagctatcctggatactgttgatcccaacagggatgggcatgtctcactgcaggagtacatggcatttatgatatcccgggagaccgaaaacgtaaagagtagcgaggagattgagtcggcgtttagagccctgtcttcggagggtaaaccctacgtgacaaaggaggaattgtaccaaaacctcacccgggagcaagcagactattgtgtgtcacacatgaaaccgtacgttgacggcaaaggacgtgaacttccaacagctttcgactatgtcgagtttacccgctcactgttcgtgaacta

SEQ ID NO: 290913 - DNA, 7857 bp, Artificial Sequence
  derived and/or modified sequence
actacccgctgcggagtgaacggtgtggagcggaggccgcggaggctcctcggtccttcagcacccctcggcccgacgcacccacgcccctcaccccccgagagccgaaaatggacccaagtggggtcaaagtgctggaaacagcagaggacatccaggagaggcggcagcaggtcctagaccgataccaccgcttcaaggaactctcaacccttaggcgtcagaagctggaagattcctatcgattccagttctttcaaagagatgctgaagagctggagaaatggatacaggaaaaacttcagattgcatctgatgagaattataaagacccaaccaacttgcagggaaagcttcagaagcatcaagcatttgaagctgaagtgcaggccaactcaggagccattgttaagctggatgaaactggaaacctgatgatctcagaagggcattttgcatctgaaaccatacggacccgtttgatggagctgcaccgccagtgggaattacttttggagaagatgcgagaaaaaggaatcaaactgctgcaggcccagaagttggtgcagtacttacgagaatgtgaggacgtgatggactggatcaatgacaaggaagcaattgttacttctgaagagctgggccaggatctggagcatgtagaggttttacagaagaaatttgaagagtttcaaacagatatggctgctcatgaagaaagagttaatgaagtgaaccagtttgctgccaaactcatacaggagcagcaccctgaggaggaactgatcaagactaagcaggatgaagtcaatgcagcctggcagcggctgaagggcctggctctgcagaggcaggggaagctctttggggcagcagaagttcagcgctttaacagggatgtggatgagactatcagttggattaaggaaaaggagcagttaatggcctctgatgattttggccgagacctggcaagtgttcaggctctgcttcggaagcacgagggtctggagagagatcttgctgctctagaagacaaggtcaaagccctgtgtgctgaggctgaccgcctgcaacagtcccaccctctgagtgcaacacagattcaagtgaagcgagaggaactgattacaaactgggagcagatccgcaccttggcggcagagagacatgcacggctcaatgattcatacaggcttcaacgcttccttgctgacttccgtgacctcaccagctgggtgactgagatgaaagccctcatcaatgcagatgagcttgccagtgatgtggctggggctgaagccctgctagatagacaccaagagcacaagggtgaaattgatgcccatgaagacagcttcaaatctgcagatgaatctggacaggcactgcttgctgctggtcactatgcctcagatgaagtgagggagaagctgaccgtcctttccgaggagagagcggcgctgctggagctgtgggagctgcgcaggcagcagtacgagcagtgcatggacctgcagctcttctaccgggacactgagcaggtggacaactggatgagcaagcaggaggcgttcctgttgaatgaagacttgggagattccttggatagtgtggaagcgcttcttaagaagcacgaagactttgagaaatcccttagtgcccaggaggaaaagattacagcattagatgaatttgcaaccaagctaattcagaacaaccactatgcaatggaagatgtggccactcgccgagatgctctgttgagccgccgcaatgcccttcacgagagagccatgcgtcgccgggcccagctagccgattctttccatctgcagcagtttttccgtgattctgatgagctcaagagttgggtcaatgagaagatgaaaactgccacagatgaagcttataaagatccatccaacctacaaggaaaagtacagaagcatcaggcttttgaggctgagctctcagcaaaccagagccgaattgatgccttggagaaagctggccaaaagctgattgatgtcaaccactatgccaaggatgaagtggcagctcgtatgaatgaggtgatcagtttgtggaagaaactgctagaggccactgaactgaaaggaataaagcttcgtgaagccaaccagcaacagcaatttaatcgcaatgttgaggatattgaattgtggctatatgaagtagaaggtcacttggcttcggatgattacggcaaagatcttaccaatgtgcagaacctccagaagaaacatgcactgctagaggcagatgtggctgctcaccaggaccgaattgatggcatcaccattcaggcccgccagttccaagatgctggccattttgatgcagaaaacatcaagaagaaacaggaagccctcgtggctcgctatgaggcactcaaggagcccatggttgcccggaagcagaagctggccgattctctgcggttgcagcagctcttccgggatgttgaggatgaggagacgtggattcgagagaaagagcccattgccgcatctaccaacagaggtaaggatttaattggggtccagaatctgctaaagaaacatcaagccttacaagcagaaattgctggacatgaaccacgcatcaaagcagttacacagaaggggaatgccatggtggaggaaggccattttgctgcagaggatgtgaaggccaagcttcacgagctgaaccaaaagtgggaggcactgaaagccaaagcttcccagcgtcggcaggacctggaggactctctgcaggcccagcagtactttgctgatgctaacgaggctgaatcctggatgcgggagaaggaacccattgtgggcagcactgactatggcaaggacgaagactctgctgaggctctactgaagaaacacgaagctttgatgtcagatctcagtgcctacggcagcagcatccaggctttgcgagaacaagcacagtcctgccggcaacaagtggcccccacggatgatgagactgggaaggagctggtcttggctctctacgactatcaggagaagagtccccgagaggtcaccatgaagaagggagatatccttaccttactcaacagcaccaacaaggattggtggaaagtggaagtgaacgatcgtcagggttttgtgccggctgcgtacgtgaagaaattggaccccgcccagtcagcctcccgggagaatctcctggaggagcaaggcagcatagcactgcggcaggagcagattgacaatcagacacgcataactaaggaggccggcagtgtatctctgcgtatgaagcaggtggaagaactatatcattctctgctggaactgggtgagaagcgtaaaggcatgttggagaagagttgcaagaagtttatgttgttccgtgaagcgaatgaactacagcaatggatcaatgagaaggaagccgctctgacaagtgaggaggtcggagcagacttggagcaggttgaggtgctccagaagaagtttgatgacttccagaaggacctgaaggccaatgagtcacggttgaaggacattaacaaggtagctgaagacctggagtctgaaggtctcatggcagaggaggtgcaggctgtgcaacaacaggaagtgtatggcatgatgcccagggatgaaactgattccaagacagcctccccgtggaagtctgctcgtctgatggttcacaccgtggccacctttaattccatcaaggagctgaatgagcgctggcggtccctacagcagctggccgaggaacggagccagctcttgggcagcgcccatgaagtacagaggttccacagagatgctgatgaaaccaaagaatggattgaagagaagaatcaagctctaaacacagacaattatggacatgatctcgccagtgtccaggccctgcaacgcaagcatgagggcttcgagagggaccttgcggctctcggtgacaaggtaaactcccttggtgaaacagcagagcgcctgatccagtcccatcccgagtcagcagaagacctgcaggaaaagtgcacagagttaaaccaggcctggagcagcctggggaaacgtgcagatcagcgcaaggcaaagttgggtgactcccacgacctgcagcgcttccttagcgatttccgggacctcatgtcttggatcaatggaatacgggggttggtgtcctcagatgagctagccaaggatgtcaccggagctgaggcattgctggagcgacaccaggaacaccggacagaaatcgatgccagggctggcactttccaggcatttgagcagtttggacagcagctgttggctcacggacactatgccagccctgagatcaagcagaaacttgatattcttgaccaggagcgtgcagacctggagaaggcctgggttcagcgcaggatgatgctggatcagtgccttgaactgcagctgttccatcgggactgtgagcaagctgagaactggatggctgcccgggaggccttcttgaataccgaagacaaaggagactcactggacagcgtagaggctctgatcaaaaaacatgaagactttgacaaagcgattaacgtccaggaagagaagattgctgctctgcaggcctttgccgaccagctcatcgctgccggccattatgccaagggagacatttctagccggcgcaatgaggtcttggacaggtggcgacgtctgaaagcccagatgattgagaaaaggtcaaagctaggagaatctcaaaccctccaacagttcagccgggatgtggatgagattgaggcttggatcagtgaaaaattgcaaacagcgagtgatgagtcgtacaaggatcccaccaacatccagagcaagcaccagaagcaccaggcttttgaagcagagctgcatgccaacgctgaccggatccgtggggttatcgacatgggcaactccctcattgaacgtggagcctgtgccggcagtgaggatgctgtcaaggcccgcctggctgccttagctgaccagtggcagttcttggtgcaaaagtcagcggaaaagagccagaaactgaaagaagccaacaagcagcagaacttcaacacagggatcaaggactttgacttctggctgtctgaggtggaggccctgctggcatccgaagattatggcaaagacctagcttctgtgaacaacctgctgaaaaagcatcaactgctggaagcagatatatctgcccatgaggatcgcctgaaggacctgaacagccaggcagacagcctgatgaccagcagtgccttcgacacctcccaagtaaaggacaagagggacaccatcaacgggcgcttccagaagatcaagagcatggcggcctcccggcgagccaagctgaatgaatcccatcgcctgcaccagttcttccgggacatggatgacgaggagtcctggatcaaggagaagaagctgctggtgggctcagaggactacggccgggacctaaccggcgtgcagaacctgaggaagaagcacaagcggctggaagcagaactggctgcgcatgagccggctattcagggtgtcctggacactggcaagaagctgtccgatgacaacaccatcgggaaagaggagatccagcagcggctggcgcagtttgtggagcactggaaagagctgaagcagctggcagctgcccggggtcagcggctggaagagtccttggaatatcagcagtttgtagccaatgtggaagaggaagaagcctggatcaatgagaaaatgaccctggtggccagcgaagattatggcgacactcttgccgccatccagggcttactgaagaaacatgaagcttttgagacagacttcaccgtccacaaggatcgcgtgaatgatgtctgcaccaatggacaagacctcattaagaagaacaatcaccatgaggagaacatctcttcaaagatgaagggcctgaacgggaaagtgtcagacctggagaaagctgcagcccagagaaaggcgaagctggatgagaactcggccttccttcagttcaactggaaggcggacgtggtggagtcctggatcggtgaaaaggagaacagcttgaagacagatgattatggccgagacctgtcttctgtgcagacgctcctcaccaaacaggaaacttttgacgctgggctgcaggccttccagcaggaaggcattgccaacatcactgccctcaaagatcagcttctcgccgccaaacacgttcagtccaaggccatcgaggcccggcacgcctccctcatgaagaggtggagccagcttctggccaactcagccgcccgcaagaagaagcttctggaggctcagagtcacttccgcaaggtggaggacctcttcctgaccttcgccaaaaaggcttctgccttcaacagctggtttgaaaatgcagaggaggacttaacagaccccgtgcgctgcaactccttggaagaaatcaaagctttgcgcgaggcccacgacgccttccgctcctccctcagctctgcccaggctgacttcaaccagctggccgagctggaccgccagatcaagagcttccgcgtagcctccaacccctacacctggtttaccatggaggccctggaggagacctggaggaacctacagaaaatcatcaaggagagggagctggagctgcagaaggaacagcggcggcaggaggagaacgacaagctgcgccaggagtttgcccagcacgccaacgccttccaccagtggatccaagagaccaggacatacctcctcgatgggtcctgtatggtggaagagtcggggaccctcgaatcccagcttgaagctaccaaacgcaagcaccaggaaatccgagccatgagaagtcagctcaaaaagatcgaggacctgggggccgccatggaggaggccctcatcctggacaacaagtacacggagcacagcaccgtgggcctcgcccagcagtgggaccagctggaccagctgggcatgcgcatgcagcacaacctggagcagcagatccaggccaggaacacaacaggtgtgactgaggaggccctcaaagaattcagcatgatgtttaaacactttgacaaggacaagtctggcaggctgaaccatcaggagttcaaatcttgcctgcgctccctgggctatgacctgcccatggtggaggaaggggaacctgaccctgagttcgaggcaatcctggacacggtggatccgaacagagatggccatgtctccttgcaagaatacatggctttcatgatcagccgcgaaactgagaacgtcaagtccagcgaggagattgagagcgccttccgggccctcagctcagagggaaagccttacgtgaccaaggaggagctctaccagaacctgacccgggaacaagccgactactgcgtctcccacatgaagccctacgtggacggcaagggccgcgagctccccaccgcgttcgactacgtggagttcacccgctcgcttttcgtgaactgagccactccctgggtcacccacccctcgctgcttgccctgcgtcgccttgctgcatgtccgctcctctgtgtgctctcactttccactgtaaccttaagcctgcttagcttggaataagacttaggagaaaatggtgcttcactaacccgcttccggtccagtcacaatcatcatgtcactgtggggacccagatctgtgtcttgaagcagctgccctcattccgacttcagaaaatcgaagcagctggctcctccccttgttctctctcccaccctcccccaaatctgttttcatgtaaaagacaaataaatgatgacttcccccaaa

SEQ ID NO: 290914 - DNA, 7359 bp, Artificial Sequence
  derived and/or modified sequence
atggaccccagcggcgtgaaggtgctggagaccgccgaggacatccaggagagaagacagcaggtgctggacagataccacagattcaaggagctgagcaccctgagaagacagaagctggaggacagctacagattccagttcttccagagagacgccgaggagctggagaagtggatccaggagaagctgcagatcgccagcgacgagaactacaaggaccccaccaacctgcagggcaagctgcagaagcaccaggccttcgaggccgaggtgcaggccaacagcggcgccatcgtgaagctggacgagaccggcaacctgatgatcagcgagggccacttcgccagcgagaccatcagaaccagactgatggagctgcacagacagtgggagctgctgctggagaagatgagagagaagggcatcaagctgctgcaggcccagaagctggtgcagtacctgagagagtgcgaggacgtgatggactggatcaacgacaaggaggccatcgtgaccagcgaggagctgggccaggacctggagcacgtggaggtgctgcagaagaagttcgaggagttccagaccgacatggccgcccacgaggagagagtgaacgaggtgaaccagttcgccgccaagctgatccaggagcagcaccccgaggaggagctgatcaagaccaagcaggacgaggtgaacgccgcctggcagagactgaagggcctggccctgcagagacagggcaagctgttcggcgccgccgaggtgcagagattcaacagagacgtggacgagaccatcagctggatcaaggagaaggagcagctgatggccagcgacgacttcggcagagacctggccagcgtgcaggccctgctgagaaagcacgagggcctggagagagacctggccgccctggaggacaaggtgaaggccctgtgcgccgaggccgacagactgcagcagagccaccccctgagcgccacccagatccaggtgaagagagaggagctgatcaccaactgggagcagatcagaaccctggccgccgagagacacgccagactgaacgacagctacagactgcagagattcctggccgacttcagagacctgaccagctgggtgaccgagatgaaggccctgatcaacgccgacgagctggccagcgacgtggccggcgccgaggccctgctggacagacaccaggagcacaagggcgagatcgacgcccacgaggacagcttcaagagcgccgacgagagcggccaggccctgctggccgccggccactacgccagcgacgaggtgagagagaagctgaccgtgctgagcgaggagagagccgccctgctggagctgtgggagctgagaagacagcagtacgagcagtgcatggacctgcagctgttctacagagacaccgagcaggtggacaactggatgagcaagcaggaggccttcctgctgaacgaggacctgggcgacagcctggacagcgtggaggccctgctgaagaagcacgaggacttcgagaagagcctgagcgcccaggaggagaagatcaccgccctggacgagttcgccaccaagctgatccagaacaaccactacgccatggaggacgtggccaccagaagagacgccctgctgagcagaagaaacgccctgcacgagagagccatgagaagaagagcccagctggccgacagcttccacctgcagcagttcttcagagacagcgacgagctgaagagctgggtgaacgagaagatgaagaccgccaccgacgaggcctacaaggaccccagcaacctgcagggcaaggtgcagaagcaccaggccttcgaggccgagctgagcgccaaccagagcagaatcgacgccctggagaaggccggccagaagctgatcgacgtgaaccactacgccaaggacgaggtggccgccagaatgaacgaggtgatcagcctgtggaagaagctgctggaggccaccgagctgaagggcatcaagctgagagaggccaaccagcagcagcagttcaacagaaacgtggaggacatcgagctgtggctgtacgaggtggagggccacctggccagcgacgactacggcaaggacctgaccaacgtgcagaacctgcagaagaagcacgccctgctggaggccgacgtggccgcccaccaggacagaatcgacggcatcaccatccaggccagacagttccaggacgccggccacttcgacgccgagaacatcaagaagaagcaggaggccctggtggccagatacgaggccctgaaggagcccatggtggccagaaagcagaagctggccgacagcctgagactgcagcagctgttcagagacgtggaggacgaggagacctggatcagagagaaggagcccatcgccgccagcaccaacagaggcaaggacctgatcggcgtgcagaacctgctgaagaagcaccaggccctgcaggccgagatcgccggccacgagcccagaatcaaggccgtgacccagaagggcaacgccatggtggaggagggccacttcgccgccgaggacgtgaaggccaagctgcacgagctgaaccagaagtgggaggccctgaaggccaaggccagccagagaagacaggacctggaggacagcctgcaggcccagcagtacttcgccgacgccaacgaggccgagagctggatgagagagaaggagcccatcgtgggcagcaccgactacggcaaggacgaggacagcgccgaggccctgctgaagaagcacgaggccctgatgagcgacctgagcgcctacggcagcagcatccaggccctgagagagcaggcccagagctgcagacagcaggtggcccccaccgacgacgagaccggcaaggagctggtgctggccctgtacgactaccaggagaagagccccagagaggtgaccatgaagaagggcgacatcctgaccctgctgaacagcaccaacaaggactggtggaaggtggaggtgaacgacagacagggcttcgtgcccgccgcctacgtgaagaagctggaccccgcccagagcgccagcagagagaacctgctggaggagcagggcagcatcgccctgagacaggagcagatcgacaaccagtaccacagcctgctggagctgggcgagaagagaaagggcatgctggagaagagctgcaagaagttcatgctgttcagagaggccaacgagctgcagcagtggatcaacgagaaggaggccgccctgaccagcgaggaggtgggcgccgacctggagcaggtggaggtgctgcagaagaagttcgacgacttccagaaggacctgaaggccaacgagagcagactgaaggacatcaacaaggtggccgaggacctggagagcgagggcctgatggccgaggaggtgcaggccgtgcagcagcaggaggtgtacggcatgatgcccagagacgagaccgacagcaagaccgccagcccctggaagagcgccagactgatggtgcacaccgtggccaccttcaacagcatcaaggagctgaacgagagatggagaagcctgcagcagctggccgaggagagaagccagctgctgggcagcgcccacgaggtgcagagattccacagagacgccgacgagaccaaggagtggatcgaggagaagaaccaggccctgaacaccgacaactacggccacgacctggccagcgtgcaggccctgcagagaaagcacgagggcttcgagagagacctggccgccctgggcgacaaggtgaacagcctgggcgagaccgccgagagactgatccagagccaccccgagagcgccgaggacctgcaggagaagtgcaccgagctgaaccaggcctggagcagcctgggcaagagagccgaccagagaaaggccaagctgggcgacagccacgacctgcagagattcctgagcgacttcagagacctgatgagctggatcaacggcatcagaggcctggtgagcagcgacgagctggccaaggacgtgaccggcgccgaggccctgctggagagacaccaggagcacagaaccgagatcgacgccagagccggcaccttccaggccttcgagcagttcggccagcagctgctggcccacggccactacgccagccccgagatcaagcagaagctggacatcctggaccaggagagagccgacctggagaaggcctgggtgcagagaagaatgatgctggaccagtgcctggagctgcagctgttccacagagactgcgagcaggccgagaactggatggccgccagagaggccttcctgaacaccgaggacaagggcgacagcctggacagcgtggaggccctgatcaagaagcacgaggacttcgacaaggccatcaacgtgcaggaggagaagatcgccgccctgcaggccttcgccgaccagctgatcgccgccggccactacgccaagggcgacatcagcagcagaagaaacgaggtgctggacagatggagaagactgaaggcccagatgatcgagaagagaagcaagctgggcgagagccagaccctgcagcagttcagcagagacgtggacgagatcgaggcctggatcagcgagaagctgcagaccgccagcgacgagagctacaaggaccccaccaacatccagagcaagcaccagaagcaccaggccttcgaggccgagctgcacgccaacgccgacagaatcagaggcgtgatcgacatgggcaacagcctgatcgagagaggcgcctgcgccggcagcgaggacgccgtgaaggccagactggccgccctggccgaccagtggcagttcctggtgcagaagagcgccgagaagagccagaagctgaaggaggccaacaagcagcagaacttcaacaccggcatcaaggacttcgacttctggctgagcgaggtggaggccctgctggccagcgaggactacggcaaggacctggccagcgtgaacaacctgctgaagaagcaccagctgctggaggccgacatcagcgcccacgaggacagactgaaggacctgaacagccaggccgacagcctgatgaccagcagcgccttcgacaccagccaggtgaaggacaagagagacaccatcaacggcagattccagaagatcaagagcatggccgccagcagaagagccaagctgaacgagagccacagactgcaccagttcttcagagacatggacgacgaggagagctggatcaaggagaagaagctgctggtgggcagcgaggactacggcagagacctgaccggcgtgcagaacctgagaaagaagcacaagagactggaggccgagctggccgcccacgagcccgccatccagggcgtgctggacaccggcaagaagctgagcgacgacaacaccatcggcaaggaggagatccagcagagactggcccagttcgtggagcactggaaggagctgaagcagctggccgccgccagaggccagagactggaggagagcctggagtaccagcagttcgtggccaacgtggaggaggaggaggcctggatcaacgagaagatgaccctggtggccagcgaggactacggcgacaccctggccgccatccagggcctgctgaagaagcacgaggccttcgagaccgacttcaccgtgcacaaggacagagtgaacgacgtgtgcaccaacggccaggacctgatcaagaagaacaaccaccacgaggagaacatcagcagcaagatgaagggcctgaacggcaaggtgagcgacctggagaaggccgccgcccagagaaaggccaagctggacgagaacagcgccttcctgcagttcaactggaaggccgacgtggtggagagctggatcggcgagaaggagaacagcctgaagaccgacgactacggcagagacctgagcagcgtgcagaccctgctgaccaagcaggagaccttcgacgccggcctgcaggccttccagcaggagggcatcgccaacatcaccgccctgaaggaccagctgctggccgccaagcacgtgcagagcaaggccatcgaggccagacacgccagcctgatgaagagatggagccagctgctggccaacagcgccgccagaaagaagaagctgctggaggcccagagccacttcagaaaggtggaggacctgttcctgaccttcgccaagaaggccagcgccttcaacagctggttcgagaacgccgaggaggacctgaccgaccccgtgagatgcaacagcctggaggagatcaaggccctgagagaggcccacgacgccttcagaagcagcctgagcagcgcccaggccgacttcaaccagctggccgagctggacagacagatcaagagcttcagagtggccagcaacccctacacctggttcaccatggaggccctggaggagacctggagaaacctgcagaagatcatcaaggagagagagctggagctgcagaaggagcagagaagacaggaggagaacgacaagctgagacaggagttcgcccagcacgccaacgccttccaccagtggatccaggagaccagatgccagcccgccggcgccagctgcatggtggaggagagcggcaccctggagagccagctggaggccaccaagagaaagcaccaggagatcagagccatgagaagccagctgaagaagatcgaggacctgggcgccgccatggaggaggccctgatcctggacaacaagtacaccgagcacagcaccgtgggcctggcccagcagtgggaccagctggaccagctgggcatgagaatgcagcacaacctggagcagcagatccaggccagaaacaccaccggcgtgaccgaggaggccctgaaggagttcagcatgatgttcaagcacttcgacaaggacaagagcggcagactgaaccaccaggagttcaagagctgcctgagaagcctgggctacgacctgcccatggtggaggagggcgagcccgaccccgagttcgaggccatcctggacaccgtggaccccaacagagacggccacgtgagcctgcaggagtacatggccttcatgatcagcagagagaccgagaacgtgaagagcagcgaggagatcgagagcgccttcagagccctgagcagcgagggcaagccctacgtgaccaaggaggagctgtaccagaacctgaccagagagcaggccgactactgcgtgagccacatgaagccctacgtggacggcaagggcagagagctgcccaccgccttcgactacgtggagttcaccagaagcctgttcgtgaactag

SEQ ID NO: 290915 - DNA, 7359 bp, Artificial Sequence
  derived and/or modified sequence
atggatccaagtggggttaaagtactggagacggcggaagacatccaggagaggaggcagcaggtactggaccgctatcatcgattcaaggaactgtcaacactacggaggcagaaacttgaagacagttatcgctttcagtttttccagagagacgccgaggagcttgagaaatggatccaggaaaagcttcagatagcctccgatgagaattataaggatccgactaacctccaagggaagttgcagaaacaccaggcctttgaggcagaggtccaggcaaacagcggtgcaatcgtgaagcttgatgagactggtaatcttatgatctcagaaggccattttgcatctgagactatccgtactcgcctcatggagctccaccggcagtgggaactgcttctagagaaaatgcgagaaaagggaattaaactgttgcaggcccagaaactggttcaataccttcgggaatgtgaagatgtgatggactggatcaacgacaaggaggccattgtgacctccgaggagctcggccaggacttagaacacgtagaagtgctgcaaaaaaagtttgaagagttccagacagacatggccgcacacgaagagcgagtgaacgaggtcaaccagttcgccgcaaaactgatccaggaacagcaccctgaagaagagctgatcaagacaaagcaggacgaggtgaatgctgcatggcaacgcctgaagggcctcgcgttgcagcggcagggcaaactgttcggcgccgcagaagtgcagcgcttcaatagggacgtggacgagacaatttcttggatcaaggaaaaagaacagctgatggcgtccgacgacttcgggcgcgaccttgcctcagtgcaggctctgctgagaaaacacgagggactcgagcgagatttagcagcattggaagacaaggtgaaggccctgtgcgcagaggccgacaggctgcagcagtcacacccactctcagccacccagattcaggtgaagcgggaggaactcattaccaactgggaacagatccggacacttgcggcagaaaggcacgctcgtcttaacgatagctacaggctacagaggtttttggctgatttccgagacctgacttcatgggttaccgaaatgaaggctctgatcaacgccgacgagctggcctctgatgtcgccggagcagaggccctcctagatcgacatcaggagcataaaggagagattgatgcccatgaagacagcttcaaaagcgcagatgagtccgggcaggctctgttggccgccggccactatgccagtgacgaagtgagagaaaaattgactgttctaagtgaagaacgggccgctttgctggagctgtgggagctgcgccgtcagcagtatgaacagtgtatggatctgcagctcttctatcgcgacacggaacaggttgacaattggatgtccaaacaagaggccttcctacttaacgaggatctgggggacagtctggattctgtggaagcattgctaaaaaaacatgaggactttgaaaaatctctgagcgcccaagaggaaaagattacagcgttggatgaatttgctacaaaactgattcagaataaccactacgccatggaggacgttgctacacgaagagacgccctactgtctcggagaaatgcactccacgagagagcgatgcgcaggagagctcaactggccgatagtttccatcttcagcagttcttccgcgactcagatgaactcaaatcttgggtgaacgagaaaatgaagaccgcgaccgatgaggcttataaggatccaagcaacctgcagggcaaggtgcaaaagcaccaagcttttgaggccgagctgtcagccaaccagagccgcattgatgccctggaaaaggcaggccagaagctgatcgatgtgaatcattacgctaaagacgaggtggccgctcggatgaacgaagtaataagtttgtggaagaagctgcttgaagctactgagcttaaaggtataaaactaagagaagcgaaccaacagcaacaatttaatcgaaacgtcgaggatattgagctctggctgtacgaagtggagggccatctagcatcagatgattacggcaaagatctgaccaacgtccagaacctgcaaaaaaaacacgctctgttggaggcagacgtggccgcccaccaggacagaattgatggaattacaatccaggccaggcaatttcaagacgccggacacttcgacgctgagaacattaaaaagaaacaagaggcactggtggcacgctatgaggctctgaaagaaccgatggtcgcccggaagcagaaacttgccgatagcctaagactacaacagctgttcagggatgttgaggatgaggagacatggatacgggaaaaggagcccattgccgcatcaaccaaccgaggtaaggacttaattggcgtccagaatctgctgaagaagcatcaggcattacaggctgaaatagcaggacacgaaccacggattaaagccgtgacccagaaaggcaatgcgatggtcgaggaaggacatttcgctgccgaggatgttaaagccaagctgcacgaactgaaccagaagtgggaggccctaaaggcgaaagctagccagagaaggcaggaccttgaggactctctacaagctcagcaatactttgcagatgctaacgaggcagagagctggatgagagaaaaggaacccattgtggggtccacggattacgggaaggatgaagactcggcggaggctctcctgaagaaacatgaagctctgatgagcgacctatcggcgtatggctcatccattcaggctcttagagagcaggctcaaagttgcagacagcaagtggctcccactgacgacgaaaccggcaaggaactggtcctcgcgctgtatgattaccaagaaaagtccccacgagaagtgacgatgaaaaagggggacatactgacattgcttaactctaccaataaggactggtggaaagttgaagtgaatgaccggcagggtttcgtgccggccgcatatgtaaagaaattagatcccgctcaatccgcatcaagggagaatcttctggaggaacagggcagtattgcactgcgccaggagcagattgataaccagtatcactcactgcttgaactgggagaaaaacgcaagggtatgctggagaagagctgcaagaagtttatgctttttagagaagcaaatgagctgcagcagtggattaacgagaaggaggcagctctgacaagcgaggaggttggagcagatctggagcaggtggaagtcctgcagaagaagttcgacgacttccaaaaagatttaaaagccaacgagtcacgactcaaagacatcaataaggtggctgaggacctggagtccgagggactgatggctgaagaggtgcaggcggtgcagcaacaggaggtgtacggaatgatgccccgggatgagacagactccaaaaccgcctctccgtggaagagcgcccgcctaatggtacacaccgttgcaactttcaattcaatcaaggaattgaacgagaggtggcgctctctccagcagttggcagaagagaggtcccagcttttgggttccgcacacgaggttcagcggttccaccgggacgctgacgaaacaaaggaatggatcgaggaaaaaaaccaggcgctcaacactgataactacggtcatgacctagcatctgtccaggccctgcaacggaaacacgaaggctttgagcgggacctcgcggcactgggggacaaggtgaactctctcggtgaaactgctgagagattgatccagtctcaccctgagagtgctgaggacctgcaagaaaagtgtaccgagttgaatcaggcgtggagcagcctaggcaagcgcgccgaccaacgtaaagcaaagctcggagacagccatgatctgcagagatttttgtccgattttcgggacctgatgtcttggattaatggcattcgcggactcgtgtcctctgatgaattggctaaagatgtcacaggggctgaagctctcctggagcggcaccaagaacaccgcacggagatcgacgcgagagcagggacctttcaggcgtttgaacagttcggccagcagcttctggcccatggccactacgcatccccggagattaagcagaaactggacattctcgaccaggagcgggccgacttggagaaggcgtgggtccagcgccggatgatgctggatcagtgcctggaactgcagctttttcaccgggattgcgaacaagccgagaattggatggccgccagagaagcttttctaaacactgaagacaaaggagactcacttgatagtgtagaggcactgatcaagaaacacgaagactttgataaggccatcaacgtccaggaggaaaaaatcgctgcactgcaggcatttgccgatcagctcatcgctgcaggtcattatgcaaaaggggacatatctagccgtagaaacgaggtgcttgaccggtggaggcggctgaaggctcaaatgatcgagaagaggagtaaactgggcgagagccaaacactccagcagtttagcagagacgtggacgagatcgaagcgtggatctccgaaaaacttcagacagcatctgacgagagttacaaggacccaacaaacatccagtccaaacatcagaaacaccaggccttcgaagccgagctgcacgcaaacgcggataggatcagaggtgttatagacatgggcaattccctcatagaacgtggggcttgcgcggggagcgaggatgccgtcaaggctagactggcagcactggctgatcagtggcaatttctcgtacaaaagagcgcggaaaaaagtcagaaactgaaagaggccaataaacagcaaaactttaatactggcatcaaggatttcgatttttggctgtctgaggtggaagctctgctggccagtgaggactatggtaaggatttggcctctgtcaacaatctcctgaagaagcatcagttactggaggcggacatatccgcccacgaggatagattgaaggacttaaattcccaggcagattcattaatgacctcttctgcctttgacacctctcaagttaaggataaaagggataccatcaatggcaggttccagaagattaagtctatggccgcatccaggagggctaaactgaatgaatcccaccgattgcaccagttttttagagatatggatgacgaagaaagttggatcaaggagaaaaagctgctggtgggctcagaggactacggccgcgacctgaccggggtccagaatcttcgaaaaaaacacaagagactggaagctgagcttgccgcccacgagccggcgatccagggagtattggataccggcaaaaagctgtctgatgataataccatcggtaaggaagagattcagcagcgccttgcacagttcgtcgaacactggaaggagttgaagcagctggcagctgcacggggtcagaggctggaggaatctctcgagtatcagcaattcgtggcaaacgttgaggaagaggaagcttggattaacgaaaagatgacactggtcgcaagcgaagattacggcgacacccttgccgcaattcaaggactcctgaagaagcacgaggcattcgagaccgactttaccgtccataaagaccgcgtgaacgacgtctgtaccaacggacaggatctgattaagaagaataatcaccatgaagaaaacatctcctccaaaatgaagggactgaacggcaaggtgtcagatctggagaaggcagcagcgcagcgcaaagcaaaacttgacgaaaactcagcgtttctccaatttaactggaaggccgacgtggtggaatcctggattggcgaaaaagagaactctctgaagactgacgactatgggcgcgacctgtcatctgttcagactctgttgacaaagcaggaaactttcgatgccggtctgcaggccttccagcaggaaggcatcgcaaacatcactgctttgaaggatcagctccttgcagcaaagcacgtgcagtcaaaagcaattgaagcccgtcacgccagcctcatgaaaagatggagccagctgctggcaaacagtgccgctcggaagaagaagctgctagaagcccaatcccactttagaaaagttgaggatctgttcctgacttttgccaaaaaggctagcgcctttaactcctggttcgagaacgcagaggaggacctgacagatcccgtgcggtgcaactcactggaggagattaaggccttgcgggaagcccatgatgcctttcgaagcagtctgagctccgcccaggccgatttcaaccagttggctgagctggatcgtcagatcaagagcttcagagtagcttctaacccctacacctggttcaccatggaagctctggaagaaacttggagaaacctgcagaagattatcaaagaaagggaactggaactgcagaaggaacagcgacggcaagaggagaatgataagctaaggcaagagttcgcccagcacgctaacgctttccaccagtggattcaggagactcggtgtcagcccgcgggcgcctcttgtatggtagaagagtccggcacactagagtcccaacttgaagccaccaaaagaaaacatcaggagatacgggccatgagatctcagctgaaaaaaattgaagacctgggggctgccatggaggaggccttgattttagacaataagtatacggaacactcaactgtaggactggcccagcagtgggatcagttggaccagctggggatgaggatgcagcacaacttggagcaacagattcaggccaggaacacaaccggggtcacagaggaggccctgaaggagttctccatgatgttcaaacacttcgacaaggacaagtccggaaggttgaatcaccaggagttcaaaagttgtctgcgatctctggggtacgatctgcctatggtcgaagagggggaacctgacccagagtttgaggctatcctggataccgtcgaccctaatagggatggacacgtctcccttcaagagtatatggcctttatgatcagtagggagactgagaatgtgaaaagttcagaggaaatcgaatctgcctttagggctctgagttcggagggaaaaccgtatgtgaccaaagaagaactttaccagaaccttacccgagagcaggctgactactgcgtctcccacatgaaaccttatgtggatggcaagggccgcgagctccccacagcctttgattatgtagagttcactagatccctgttcgtgaattag

SEQ ID NO: 290916 - DNA, 7359 bp, Artificial Sequence
  derived and/or modified sequence
atggaccccagcggcgtgaaggtgctggagacagctgaggacatccaggagcggcggcagcaggtgctggaccgctaccaccgcttcaaggagctgagcaccctgcggcggcagaagctggaggacagctaccgcttccagttcttccagagagatgctgaggagctggagaagtggatccaggagaagctgcagatcgccagtgatgagaactacaaggaccccaccaacctgcagggcaagctgcagaagcaccaggcctttgaggccgaggtgcaggccaacagcggggccatcgtgaagctggatgaaacaggcaacctgatgatcagcgagggccactttgccagcgagaccatccgcacccggctgatggagctgcaccggcagtgggagctgctgctggagaagatgagggagaagggcatcaagctgctgcaggcccagaagctggtgcagtacctgagagaatgtgaagatgtgatggactggatcaatgacaaggaggccatcgtgaccagcgaggagctgggccaggacctggagcacgtggaggtgctgcagaagaagtttgaggagttccagacagacatggccgcccacgaggagcgggtgaatgaggtgaaccagtttgctgccaagctgatccaggagcagcaccctgaggaggagctgatcaagaccaagcaggatgaggtgaatgctgcctggcagaggctgaagggcctggccctgcagaggcagggcaagctgtttggagctgctgaggtgcagcgcttcaacagagatgtggatgagaccatctcctggatcaaggagaaggagcagctgatggccagtgatgactttggccgggacctggcctctgtgcaggccctgctgaggaagcatgagggcctggagcgggacctggccgccctggaggacaaggtgaaggccctgtgtgccgaggccgaccggctgcagcagagccaccccctgagcgccacccagatccaggtgaagcgggaggagctgatcaccaactgggagcagatccgcaccctggccgctgagagacatgcccggctgaatgacagctaccgcctgcagcgcttcctggccgacttccgggacctgacctcctgggtgacagagatgaaggccctgatcaatgctgatgagctggccagtgatgtggccggggctgaggccctgctggacagacaccaggagcacaagggggagattgatgcccacgaggacagcttcaagtctgcagatgaaagtggccaggccctgctggccgccggccactacgccagtgatgaggtgcgggagaagctgactgtgctgtctgaggagcgggccgccctgctggagctgtgggagctgcggcggcagcagtatgagcagtgcatggacctgcagctgttctacagagacacagagcaggtggacaactggatgagcaagcaggaggccttcctgctgaatgaagacctgggggacagcctggacagcgtggaggccctgctgaagaagcatgaggactttgagaagagcctgagcgcccaggaggagaagatcacagccctggatgaatttgccaccaagctgatccagaacaaccactacgccatggaggatgtggccaccaggagagatgccctgctgagcagaagaaatgccctgcacgagcgggccatgagaagaagagcccagctggccgacagcttccacctgcagcagttcttccgggacagtgatgagctgaagtcctgggtgaatgagaagatgaagacagccacagatgaggcctacaaggaccccagcaacctgcagggcaaggtgcagaagcaccaggcctttgaagctgagctgagcgccaaccagagcagaattgatgccctggagaaggccggccagaagctgattgatgtgaaccactacgccaaggatgaggtggccgccaggatgaatgaggtgatcagcctgtggaagaagctgctggaggccacagagctgaagggcatcaagctgcgggaggccaaccagcagcagcagttcaacagaaatgtggaggacatcgagctgtggctgtatgaggtggagggccacctggccagtgatgattatggcaaggacctgaccaacgtgcagaacctgcagaagaagcacgccctgctggaggctgatgtggccgcccaccaggacagaattgatggcatcaccatccaggcccggcagttccaggatgctggccactttgatgctgagaacatcaagaagaagcaggaggccctggtggcccgctatgaggccctgaaggagcccatggtggccaggaagcagaagctggccgacagcctgcggctgcagcagctgttcagagatgtggaggatgaggagacctggatccgggagaaggagcccatcgccgccagcaccaacagaggcaaggacctgattggagtgcagaacctgctgaagaagcaccaggccctgcaggccgagattgctggccacgagccccgcatcaaggctgtgacccagaagggaaatgccatggtggaggagggccactttgctgctgaagatgtgaaggccaagctgcacgagctgaaccagaagtgggaggccctgaaggccaaggccagccagaggcggcaggacctggaggacagcctgcaggcccagcagtactttgctgatgccaatgaggccgagagctggatgagggagaaggagcccatcgtgggcagcacagattatggcaaggatgaggacagcgctgaggccctgctgaagaagcatgaggccctgatgtctgacctgagcgcctacggcagcagcatccaggccctgcgggagcaggcccagagctgccggcagcaggtggcccccacagatgatgaaacaggcaaggagctggtgctggccctgtatgactaccaggagaagagcccccgggaggtgaccatgaagaagggggacatcctgaccctgctgaacagcaccaacaaggactggtggaaggtggaggtgaatgaccggcagggctttgtgcctgctgcctacgtgaagaagctggaccctgcccagagcgccagccgggagaacctgctggaggagcagggcagcatcgccctgcggcaggagcagattgacaaccagtaccacagcctgctggagctgggggagaagaggaagggcatgctggagaagagctgcaagaagttcatgctgttccgggaggccaatgagctgcagcagtggatcaatgagaaggaggccgccctgaccagcgaggaggtgggcgctgacctggagcaggtggaggtgctgcagaagaagtttgatgacttccagaaggacctgaaggccaatgaaagccggctgaaggacatcaacaaggtggccgaggacctggagagcgagggcctgatggccgaggaggtgcaggccgtgcagcagcaggaggtgtatggcatgatgcccagagatgaaacagacagcaagacagccagcccctggaagagcgcccggctgatggtgcacacagtggccaccttcaacagcatcaaggagctgaatgaacgctggaggagcctgcagcagctggccgaggagaggagccagctgctgggcagcgcccacgaggtgcagcgcttccacagagatgctgatgagaccaaggagtggattgaggagaagaaccaggccctgaacacagacaactacggccatgacctggcctctgtgcaggccctgcagaggaagcatgagggctttgagcgggacctggccgccctgggggacaaggtgaacagcctgggggagacagctgagcggctcatccagagccaccctgagagcgctgaggacctgcaggagaagtgcacagagctgaaccaggcctggagcagcctgggcaagagagctgaccagaggaaggccaagctgggggacagccatgacctgcagcgcttcctgagtgacttccgggacctgatgtcctggatcaatggcatccggggcctggtgtccagtgatgagctggccaaggatgtgactggagctgaggccctgctggagcggcaccaggagcacaggacagaaattgatgcccgggccggcaccttccaggcctttgagcagtttggccagcagctgctggcccacggccactacgccagccctgagatcaagcagaagctggacatcctggaccaggagagagctgacctggagaaggcctgggtgcagaggaggatgatgctggaccagtgcctggagctgcagctgttccaccgggactgtgagcaggccgagaactggatggccgcccgggaggccttcctgaacacagaagataaaggagacagcctggacagcgtggaggccctgatcaagaagcatgaggactttgacaaggccatcaacgtgcaggaggagaagattgctgccctgcaggcctttgctgaccagctgattgctgctggccactacgccaagggggacatcagcagcagaagaaatgaggtgctggaccgctggaggcggctgaaggcccagatgattgagaagaggagcaagctgggggagagccagaccctgcagcagttcagcagagatgtggatgaaattgaggcctggatcagcgagaagctgcagacagccagtgatgagagctacaaggaccccaccaacatccagagcaagcaccagaagcaccaggcctttgaagctgagctgcacgccaatgctgaccgcatccggggcgtcatcgacatgggcaacagcctgattgagcggggggcctgtgccggctctgaagatgctgtgaaggcccggctggccgccctggccgaccagtggcagttcctggtgcagaagtctgctgagaagagccagaagctgaaggaggccaacaagcagcagaacttcaacacaggcatcaaggactttgacttctggctgtctgaggtggaggccctgctggccagcgaggactatggcaaggacctggcctctgtgaacaacctgctgaagaagcaccagctgctggaggccgacatcagcgcccatgaagatcggctgaaggacctgaacagccaggccgacagcctgatgaccagcagcgcctttgacaccagccaggtgaaggacaagagggacaccatcaatggccgcttccagaagatcaagtccatggccgccagccggcgggccaagctgaatgaaagccaccggctgcaccagttcttccgggacatggatgatgaggagagctggatcaaggagaagaagctgctggtgggcagcgaggactatggccgggacctgactggagtgcagaacctgaggaagaagcacaagaggctggaggccgagctggccgcccacgagcccgccatccagggcgtgctggacaccgggaagaagctgagtgatgacaacaccatcggcaaggaggagatccagcagaggctggcccagtttgtggagcactggaaggagctgaagcagctggccgccgcccggggccagaggctggaggagagcctggagtaccagcagtttgtggccaacgtggaggaggaggaggcctggatcaatgagaagatgaccctggtggccagcgaggactatggagacaccctggccgccatccagggcctgctgaagaagcatgaggcctttgaaacagacttcaccgtgcacaaggacagagtgaatgatgtgtgcaccaacggccaggacctgatcaagaagaacaaccaccacgaggagaacatcagcagcaagatgaagggcctgaatggcaaggtgtctgacctggagaaggctgctgcccagaggaaggccaagctggatgagaacagcgccttcctgcagttcaactggaaggcagatgtggtggagagctggattggagagaaggagaacagcctgaagacagatgattatggccgggacctgagctctgtgcagaccctgctgaccaagcaggagacctttgatgctggcctgcaggccttccagcaggagggcatcgccaacatcacagccctgaaggaccagctgctggccgccaagcacgtgcagagcaaggccatcgaggcccggcatgccagcctgatgaagcgctggagccagctgctggccaacagcgctgccaggaagaagaagctgctggaggcccagagccacttcaggaaggtggaggacctcttcctgacctttgccaagaaggccagcgccttcaacagctggtttgaaaatgctgaggaggacctgacagatcctgtgcgctgcaacagcctggaggagatcaaggccctgcgggaggcccatgatgccttccgcagcagcctgagcagcgcccaggccgacttcaaccagctggccgagctggaccggcagatcaagagcttccgggtggccagcaacccctacacctggttcaccatggaggccctggaggagacctggaggaacctgcagaagatcatcaaggagcgggagctggagctgcagaaggagcagaggcggcaggaggagaatgacaagctgcggcaggagtttgcccagcacgccaatgccttccaccagtggatccaggagacccgctgccagcctgctggggccagctgcatggtggaggagagcggcaccctggagagccagctggaggccaccaagaggaagcaccaggagatccgggccatgaggagccagctgaagaagattgaggacctgggcgccgccatggaggaggccctgatcctggacaacaagtacacagagcacagcacagtgggcctggcccagcagtgggaccagctggaccagctgggcatgaggatgcagcacaacctggagcagcagatccaggccaggaacaccaccggggtgacagaggaggccctgaaggagttctccatgatgttcaagcactttgacaaggacaagagcggccgcctgaaccaccaggagttcaagagctgcctgcggagcctgggctatgacctgcccatggtggaggagggggagccagaccctgagtttgaggccatcctggacacagtggaccccaacagagatggccacgtgtccctgcaggagtacatggccttcatgatcagccgggagacagaaaatgtgaagagcagcgaggagattgaaagtgccttccgggccctgagcagcgagggcaagccctacgtgaccaaggaggagctgtaccagaacctgacccgggagcaggccgactactgtgtgagccacatgaagccctacgtggatggcaagggccgggagctgcccacagcctttgattatgtggagttcaccaggagcctgtttgtgaactag

SEQ ID NO: 290917 - DNA, 7359 bp, Artificial Sequence
  derived and/or modified sequence
atggaccccagcggcgtgaaggtgctggagaccgccgaggacatccaggaaagacgccaacaggtactggatagatatcacagattcaaggaactctcaacactgcgacggcagaaactggaggactcctatagattccagttcttccaaagagacgcagaagagttggaaaagtggatccaagagaaactccagatcgcaagcgacgaaaactataaggatccaacgaatctgcagggcaagctgcagaaacaccaagcgtttgaggcagaggtgcaggctaattcaggagccattgtgaaactggatgagacagggaatttgatgatctcagaggggcatttcgctagcgagaccatccgaactcgcttgatggagctgcaccgtcagtgggagctcctgttagaaaagatgcgcgagaagggcatcaagctgctacaggcccagaagctggtgcagtacctccgagagtgtgaggatgtgatggactggatcaatgacaaagaagctatcgttactagcgaggagctcgggcaggatctcgaacacgtggaagtcctgcaaaaaaagttcgaggagttccagaccgatatggccgctcatgaggagcgagtgaatgaggtgaatcagtttgcggccaaacttattcaagagcagcaccccgaggaggagctgattaagacaaaacaggacgaggtgaacgccgcctggcagcgcttgaagggattggccctgcagagacaaggaaaactgttcggagctgcagaagtccagagattcaaccgggacgttgacgaaaccatctcgtggatcaaggagaaggagcagttaatggccagtgatgactttggtagggatctcgcttctgtgcaggcgctcctccggaagcacgagggtctcgaacgggacctggccgcgctggaagacaaggtgaaagccttgtgcgccgaagctgaccgcctgcagcagtcccacccactgagcgcgactcagattcaagtgaaaagggaggagctgattaccaactgggagcagattcgcactctcgcagctgaacgtcacgcccgtctcaacgattcctaccgactacagcggttcctggccgactttcgtgatttgacgtcctgggtcaccgaaatgaaagccctgatcaatgcggacgagttagcctctgatgttgccggcgctgaggccctgctcgaccgacaccaggagcacaagggcgaaatcgacgctcacgaggattcattcaagtccgcagacgaaagtggtcaggctttattagccgcaggtcattatgcgtccgacgaggtaagagagaagctgactgtgttatcggaagagcgtgccgcactgctggaactgtgggagctgaggaggcaacagtatgagcagtgcatggaccttcagctcttctaccgtgatactgaacaagttgataactggatgtccaagcaggaagccttccttcttaacgaggatcttggcgactcactggattccgtggaagccctgttgaagaaacacgaggatttcgagaagtccttatctgctcaggaggagaaaattacagctttggacgaattcgccacaaagctaattcagaataaccactacgccatggaggacgttgccacacgtagggatgcactgctctcgagaaggaatgccctgcacgagcgagcaatgaggcgccgggcccagctcgctgatagctttcacctgcaacagttcttccgcgacagcgacgagttaaaatcctgggtgaacgaaaagatgaagactgctaccgatgaggcctacaaggacccaagcaatctccaagggaaggtgcagaaacatcaggccttcgaagcagaactgtcagcgaaccagagccgcatcgatgcgctggagaaggctggacagaaattgatcgacgtgaatcattacgccaaagacgaagttgctgcaaggatgaatgaagtcatatcactctggaaaaaacttctggaagctacggaactaaagggaatcaagcttcgtgaggctaatcagcagcaacagttcaacaggaacgtcgaagatatagagctatggctatacgaggtagagggtcacttggccagcgatgattatggtaaagaccttaccaatgtccaaaatctgcaaaaaaaacacgccttattggaggctgatgtcgctgcccatcaggatagaatcgatggtataactatccaggcacggcagtttcaagacgccggccactttgatgcagaaaacattaagaagaagcaggaagccctggtcgctaggtatgaggcactcaaggaaccgatggtggcccgtaagcagaaactggctgacagcctgagacttcagcagctgtttcgtgatgtggaagatgaggaaacatggatcagggaaaaagagcctatcgccgcttcaacaaaccgagggaaggacctgattggcgtgcagaatctgttaaagaagcatcaagctcttcaagccgagattgctggacacgaacccagaattaaggctgtaactcagaagggcaatgcaatggtggaagagggccactttgcagccgaagatgtaaaagctaaactgcatgaacttaaccaaaagtgggaggccctcaaggcaaaggccagccagcgaaggcaggacctcgaggattctttacaggctcagcagtatttcgctgacgcaaacgaggccgaaagctggatgcgggaaaaggagcccatcgttgggtccacagactacggcaaagatgaggacagtgcagaagccctgttgaagaagcatgaggcccttatgagtgatctaagcgcctacggatcgtcaatccaggccctgcgcgagcaggcccagtcttgtcggcagcaggtggcgcccaccgatgacgaaactggcaaagaactggttcttgctttatacgactaccaggagaagtctcctcgcgaagtgactatgaaaaaaggcgatatcctcacactgcttaattccaccaacaaagattggtggaaggtcgaggtgaacgacagacagggatttgtgcccgctgcctacgtgaagaaactggaccctgcacagtccgcctcacgggagaacctgctggaggagcagggtagcattgcactcaggcaggaacagattgataatcagtaccattctctgttggaactcggagagaagcgcaaagggatgctcgaaaagtcttgcaaaaaatttatgctctttagggaggcgaacgagctgcagcagtggataaatgagaaagaagcagcactgacatcagaggaagtgggcgcagacttggagcaggttgaagtcctgcagaagaaattcgacgacttccaaaaagatcttaaggcaaatgagagtcgactgaaggacatcaataaggtagctgaggaccttgaatcagaaggcttgatggcggaggaagtccaagctgtgcagcagcaggaggtttatgggatgatgccgagagacgagacagatagcaaaaccgcctcaccatggaagtccgcgcgcttgatggtccacaccgtggcgacttttaatagcatcaaggagcttaacgaaaggtggcggtccctgcagcagcttgctgaggagaggagccagctattggggagcgcgcatgaagttcagcggtttcaccgcgacgccgatgagaccaaggagtggattgaagaaaagaatcaggccctaaatacggacaactatggacatgacctggcttccgtgcaggcgctgcagcgtaaacatgagggatttgagcgtgatctcgccgctcttggagataaagtgaattccctgggggaaaccgctgaaagactcattcaatcccaccccgagtccgccgaggacctgcaggagaagtgtacagagctaaaccaggcttggagtagcctagggaagagagctgaccagcgcaaggccaagttgggtgactctcacgatctacaacggttcctgagcgatttccgggatctgatgtcttggatcaacggaatcagaggcttggtttcatctgatgagttggccaaggatgtaaccggggcagaggcactgcttgaacgccatcaagaacatagaaccgagatcgacgcccgcgctggcactttccaagcttttgaacagttcgggcagcaactcttagctcacggacactacgcatcaccggagatcaagcagaaactggacatcttggaccaagagagagcggacctcgagaaggcctgggtccagagacgtatgatgctggatcagtgccttgaactccaactgtttcatcgtgattgcgagcaggctgaaaactggatggccgctcgggaggccttcctgaacaccgaggacaagggcgacagcttggattcagtggaggccctaattaagaagcacgaagatttcgataaggcaatcaacgtgcaggaagagaaaatcgctgctctgcaggcatttgctgaccagcttattgcagcaggacattacgccaagggggatatcagctctcgtcggaatgaggttcttgaccggtggagaagactaaaagctcagatgatcgaaaagcgctccaagctcggagagtcacagacgctgcaacaattctctcgcgatgtcgacgaaattgaagcatggattagcgagaagctgcaaaccgcatcggacgaaagctataaagatcctactaatattcagagcaagcaccagaagcaccaggcgttcgaggcggagctgcacgctaatgccgataggatccggggcgtcatcgacatgggtaacagccttattgaacggggtgcctgcgcaggatccgaggacgccgtgaaagctcgcctggcggctttggctgaccagtggcagtttctggtgcagaaaagcgcagaaaagagccaaaagttaaaagaagctaataagcagcagaattttaacactggaataaaggatttcgacttctggctgtctgaagtggaagccttgctcgcctcggaggactacgggaaggacctggcctcagttaacaaccttctaaagaaacatcagctgctagaagcagacattagcgcccacgaggataggttgaaagatctaaatagccaagcagatagcttgatgacgagctcggcgttcgacacatctcaagtcaaggacaagcgagacacaataaacggaagattccagaagataaaaagtatggcagccagccgccgcgccaaattgaacgagtctcacagattgcatcagttcttcagagatatggatgatgaggaaagctggataaaagagaagaagttactggtaggatccgaagattacggacgtgatttgactggggtccagaatctgaggaagaagcacaaaagactggaagcggaactcgccgcccacgaacccgcaatacagggcgtgctcgataccggaaagaagctctctgatgataacactattggaaaggaggagatccagcagcgcttggcacagttcgtggaacactggaaggagcttaagcagctggccgctgctcggggccagagactggaggagagcctcgagtaccagcagttcgtggcaaatgttgaggaggaggaggcttggatcaatgagaagatgacattggttgcctctgaagactatggtgacaccctcgccgccatccagggattgctcaaaaagcatgaggctttcgaaacggactttacagtccataaagatagagtgaacgatgtgtgcactaatggtcaggatctcatcaagaagaataaccatcacgaggaaaatataagttcaaaaatgaagggtctcaatgggaaggttagcgacctcgagaaagctgctgcccaaaggaaggccaaactggacgagaacagcgctttcttacagttcaattggaaagctgatgtcgtggaaagttggatcggcgagaaggagaactccctgaagacggacgattatggacgggatctaagcagcgtgcaaacccttcttactaagcaggagactttcgatgcaggcctgcaagcgttccagcaagaggggattgctaacattacagccctgaaggaccagctcctagctgcgaagcacgtgcagagtaaggctatcgaagcccgacacgctagtctgatgaaaagatggtcccagctgctggctaattctgctgcaagaaagaagaagctcctggaggctcagtcacacttccggaaggtggaagacttgttcctaacttttgccaaaaaggcttctgcctttaacagttggtttgagaatgccgaagaggatctgactgatccggtacggtgtaattctctggaagaaatcaaggccttgcgagaggcgcacgatgcctttcgcagtagcctcagttctgcacaagctgacttcaatcagctggcagagctcgatagacagatcaaaagttttagggtggcatctaacccttatacctggtttaccatggaggcgcttgaagaaacctggcgcaatttacagaaaattatcaaggagcgggaactcgaactgcagaaggagcaacggcggcaggaggagaacgataagctgcgtcaggagtttgctcagcatgcaaacgccttccaccagtggatccaggaaaccagatgccagcccgccggtgcgtcctgcatggttgaggaatcagggacccttgaaagtcagctggaagctactaaacggaagcaccaggagattcgggccatgcgttcccagcttaaaaaaatcgaagacttgggggccgctatggaagaggccctgatcctggacaacaagtataccgaacacagtaccgttggtctagcgcagcagtgggaccagctcgatcagttgggaatgcggatgcagcacaaccttgagcagcagatccaggccagaaatacaactggggtcacagaggaggctctaaaggagttctccatgatgtttaaacattttgacaaagacaaatcgggaagactgaaccaccaggaattcaagtcctgcctccgctcactcgggtacgatctgcccatggtggaagaaggagagcccgatcccgagttcgaagccatccttgatacagttgatccgaaccgtgacggtcatgttagcctgcaagagtatatggcgtttatgatttcacgcgagacagagaatgtaaaatcatccgaggagatcgaatccgccttccgggcactttcttcagaaggcaagccatacgtgaccaaggaggagttataccaaaatttaacgcgagaacaggccgactactgcgtctcacacatgaagccttacgtggatggcaaaggccgcgagcttccaacagcatttgattacgtggagtttactaggtctctatttgtgaactag

SEQ ID NO: 290918 - DNA, 7358 bp, Artificial Sequence
  derived and/or modified sequence
atggatcctagcggggtgaaggtcctggaaacagcagaggatatccaggaaagacgccagcaggtgctggatcgctatcacagatttaaagaacttagcaccctgaggaggcagaagctggaagattcatacagattccaatttttccaaagagacgcagaggagttggagaagtggatccaggaaaagttgcaaattgccagcgatgaaaactataaggaccccaccaatcttcagggaaagttacagaaacaccaagccttcgaggcagaggtgcaggcgaactccggcgctatcgtgaagctggacgagaccggaaacttgatgatatcagaggggcactttgcctcggaaactatccgaacaagactgatggaactgcatcgccagtgggagctactgctggaaaaaatgcgtgaaaaaggcatcaagctcctgcaggctcaaaaattggtccagtacttgagagagtgcgaggacgtcatggactggataaatgataaagaggcaatagtgacctccgaagagctgggacaggaccttgaacacgttgaggtgttgcagaagaaatttgaggaatttcagacggacatggctgcacatgaagaaagagtgaatgaggtgaaccaattcgccgctaagctgatacaggagcaacacccagaggaagagttaatcaagaccaagcaagacgaggtcaacgccgcttggcagcggctgaaggggctagccctgcagcgccaggggaagctgttcggcgctgccgaagtgcaacgtttcaatcgtgacgtggatgagacaatttcctggatcaaggaaaaggagcagctgatggctagcgatgattttggtagagatttagctagcgtgcaggccctcctgagaaagcacgaaggactggagcgtgatctggccgctctggaggataaggtaaaagccctctgcgccgaagcagatcgtctacagcagtctcaccctctgtctgccacccagatccaggtgaaacgggaggagctcatcaccaattgggaacagatccgtactctggctgccgaacgccacgcaaggctgaacgactcttacagactgcagcggttcctggctgattttcgcgacctgactagctgggtcacagagatgaaggcactgatcaacgccgatgaactcgcaagcgacgtagccggagctgaagccctgcttgaccggcaccaagaacacaagggtgagatagacgcccacgaggattccttcaagtccgccgacgaatcagggcaggcgttactggcagcgggacactatgcatctgacgaagtacgtgaaaagctgacagttttaagtgaagagagggccgcattgctggagttgtgggaactgcggcgtcagcaatatgagcaatgcatggatctgcagctgttttatcgggacacggaacaggtcgataactggatgtctaagcaggaggcatttcttctgaacgaggacctcggggattccctagattctgttgaagccctgctcaagaaacatgaggactttgagaaatccttgtctgctcaggaggagaagatcacggctttggacgagtttgccacaaagctgattcagaacaaccactatgcgatggaggacgtggccacccgtcgagacgccctcctatctcgaagaaacgcactccacgaacgcgcaatgcggaggagggctcagctcgctgactcattccacttgcagcagtttttccgggatagcgacgagttgaagtcttgggtcaacgagaagatgaaaacggctacggacgaagcctataaagaccctagcaaccttcagggcaaggttcagaagcaccaggcctttgaggccgaactgtctgccaatcaaagtagaattgacgcacttgaaaaggccggacaaaagttgattgatgtgaaccactacgcaaaagacgaggtggccgcacgtatgaacgaggtgatttcactttggaagaagctccttgaggcaacggagctgaagggaattaaactgagggaagctaaccagcagcagcagtttaatcgcaatgtggaggatatagaactgtggctctatgaagtggaggggcacctagccagtgacgattatggaaaggacttaacgaacgttcagaatctccagaaaaaacatgccctcctggaggcagatgtggctgcccaccaggacagaattgacgggattactatccaagccagacagttccaagacgccggacactttgacgctgaaaatattaaaaagaagcaggaggctctagtagcgagatacgaagcccttaaggaacctatggtagcgaggaagcagaagctggccgatagtcttcgcctacagcagttatttagagatgtggaagatgaggaaacctggattcgggaaaaagaacccatcgccgcaagcactaacaggggcaaagacctcatcggagttcagaacctgctgaagaagcaccaggccttgcaggccgagatcgcgggacatgagccaagaattaaagccgttacccagaaaggcaatgcgatggtagaagaagggcactttgccgctgaggacgtcaaggcgaagctccatgagctaaaccagaagtgggaggctctgaaagccaaagcaagccagaggaggcaggatttggaagatagcctgcaggcccagcagtattttgcagacgcgaacgaagcagaaagctggatgagagagaaggaaccaatagtgggctcgacggactatggtaaggacgaagactcagccgaagcgctgctgaaaaaacacgaagccctgatgtccgacctgtcagcttacggctccagcatccaggcactgcgggaacaggcgcagagttgtcgccaacaagtggcaccaaccgacgacgaaacgggtaaggagctcgtactcgctttgtacgactaccaagaaaaaagtcccagggaagtgaccatgaaaaaaggggatattctcacccttctgaatagcaccaacaaagattggtggaaggtggaggtcaacgatcgccagggtttcgtaccggctgcctatgtcaaaaaactggatccagcccagagcgcatcccgagaaaacctccttgaggaacagggctctatcgctctgcgccaggagcagattgacaatcagtaccatagtcttttggaactgggggagaagcggaaggggatgctggaaaagtcctgtaagaaattcatgctgtttcgagaggctaatgaactacaacagtggattaatgaaaaagaggcagcactgacgagcgaggaggtgggggcagatctcgagcaggtggaagttcttcaaaagaaattcgacgacttccagaaagacctaaaggcgaacgagagccgcctgaaggacattaacaaggtcgccgaagatctagagtctgaaggcctgatggctgaggaagttcaagccgtgcaacaacaagaggtgtacggaatgatgccacgcgacgagacagatagcaaaactgccagcccttggaagtctgcgaggctcatggtgcatactgtcgccactttcaattctattaaagaactgaatgaaaggtggaggtctcttcagcagctggccgaggagagaagtcagctcttggggtccgcacatgaggtgcagagatttcatcgcgacgccgatgaaaccaaagaatggatcgaagagaagaaccaggccttaaacacagacaattatgggcatgacctggcaagtgtacaggccttgcagcggaagcacgaaggattcgaacgggatctggcagccttaggcgataaggtgaacagcctaggcgagacggccgaacgattaatccagagtcaccccgagtccgctgaagacctccaggaaaaatgcaccgagttaaatcaggcatggtcatccctcggcaaacgcgctgatcagaggaaagctaagttaggcgatagtcacgacctgcagaggttcctctcagattttcgggacctgatgtcttggataaacggtatcagaggtctcgtctcttccgatgagttggctaaggatgtaaccggtgccgaggcactgctcgaaaggcaccaggagcacaggactgagatcgacgctcgagctgggaccttccaggctttcgagcaattcggacagcagctcctcgcgcacggccactacgcgtctcccgagattaagcagaaactggacatcctggaccaggagcgggctgatttggagaaagcctgggttcagagacgaatgatgcttgatcagtgccttgaactgcagctctttcatcgagactgcgagcaggctgaaaactggatggctgcgcgagaggcattcttgaacacagaggataaaggcgattctcttgatagcgtggaggcactcatcaaaaaacacgaggacttcgacaaggcgatcaatgttcaggaggaaaagatcgcagcactgcaggctttcgctgatcagcttatcgccgctggacattacgccaagggcgacatctcctcccgcagaaacgaggtgctggacaggtggagaagactgaaggctcagatgatcgagaaaagaagtaagcttggagagagccagactcttcagcagttcagtcgagatgtagatgagatcgaggcttggatctccgaaaagctccagaccgctagcgatgagagctataaggaccctaccaacatccagtccaaacaccagaagcaccaggcctttgaagctgagctgcacgctaatgctgatcggatccgtggagtaatagacatggggaattcgcttatagaaagaggagcttgtgctggctctgaagatgccgtgaaagctcgtctcgccgcactggcggaccagtggcagtttttggtgcaaaagagcgcagaaaaaagtcaaaagctgaaggaggctaacaagcagcagaacttcaacaccggcatcaaggactttgatttctggttgagcgaagttgaagccctgctggcttctgaggattacggtaaggacctcgcaagtgtgaataatctccttaagaaacaccagcttcttgaagctgatatctccgctcacgaggaccgactcaaagacctgaactcccaagccgactctctgatgacatcatcagccttcgacaccagtcaggtgaaggataagagggataccataaacggaagattccagaagattaagagcatggccgcatctagaagagctaagctcaacgaatcacaccgccttcatcagttttttcgggatatggatgacgaggagagctggattaaagaaaagaagctgctggtcgggtcagaagattatgggcgtgatcttaccggagtgcagaatctcagaaagaagcacaaacgactcgaggctgagcttgctgctcatgagcctgccattcaaggcgtgctggacacgggtaagaagttaagcgacgataacacaatcggaaaagaagaaatacagcagcgcctggcgcagtttgtggagcattggaaagagctgaaacagctcgctgccgcacgcggacagaggctggaggaaagccttgaataccagcagttcgtggccaacgttgaagaagaagaggcctggataaacgagaaaatgacactggttgcaagcgaagattatggcgatacgctggccgcaatccaaggcctcttaaagaagcatgaggccttcgaaaccgatttcacggtccacaaagatagagtcaatgatgtttgtaccaatggtcaagacctcattaaaaaaaacaaccaccacgaagaaaatatttcttctaagatgaagggcctaaatggtaaagttagtgatctcgaaaaggcagcagctcaacgcaaagcaaagctggacgagaatagcgcctttctgcagtttaactggaaagctgatgtcgtcgaaagctggatcggggagaaggagaatagtcttaaaaccgatgattatgggagggatctgagctctgtccaaaccctgctaacaaagcaagagacattcgacgcgggactgcaggccttccaacaggaaggcattgcaaatataacagccctgaaagaccagttactggcagccaaacacgtacagagcaaggcgatcgaagctcggcacgctagcctgatgaagcgctggagtcaactgctggccaactctgcggctcgcaagaagaaattattggaggcccagtctcactttaggaaagtggaagatttattcctcacctttgcaaaaaaggctagcgcattcaatagctggttcgaaaacgctgaggaggacctaaccgatccggtgagatgcaacagccttgaggagatcaaagctctcagggaagcccacgacgcattccgcagctctctgagtagtgcacaggcagatttcaatcagttagccgagctggacagacaaatcaagagttttagagttgcatctaacccctatacttggtttactatggaagctctagaggagacatggcgcaatcttcagaagattattaaagaaagagagctcgagctgcagaaggaacagcgaaggcaggaggaaaatgacaaactccgtcaggagttcgcccaacacgctaatgcatttcatcagtggattcaggaaacccgatgccaacccgcaggcgcatcttgcatggtggaagagtcaggaaccctagagtctcagcttgaggccactaagcgaaaacaccaagaaatccgagcaatgcggagtcagttaaagaaaattgaggaccttggggcagccatggaggaagccctgattttggataacaaatacaccgaacactctacagtcgggctcgctcaacagtgggatcagttggaccagctaggaatgcgtatgcagcataatctcgaacagcagattcaggctcggaataccactggcgtgaccgaggaagctttgaaggagttcagcatgatgtttaaacattttgacaaagacaagagcggtagactgaatcatcaggagtttaaaagttgtctacgctctttggggtacgaccttcccatggtggaggaaggcgaacccgacccagagttcgaggctatcctcgatacggtcgatcctaacagagacggccacgtgtccttacaggaatacatggcctttatgatttccagagagactgaaaatgtcaagtcatctgaggagatcgagagtgcttttagggcactctccagcgaaggtaagccatatgtcacgaaggaggagctgtatcagaatttaactagggaacaagcagattattgtgtgtcccatatgaagccatacgtggatggtaaaggtcgtgagctgcccaccgcatttgattacgtggaattcacccggagcttgtttgtgaatta

SEQ ID NO: 290919 - DNA, 7793 bp, Artificial Sequence
  derived and/or modified sequence
actacccgctgcggagtgaacggtgtggagcggaggccgcggaggctcctcggtccttcagcacccctcggcccgacgcacccacgcccctcaccccccgagagccgaaaatggacccaagtggggtcaaagtgctggaaacagcagaggacatccaggagaggcggcagcaggtcctagaccgataccaccgcttcaaggaactctcaacccttaggcgtcagaagctggaagattcctatcgattccagttctttcaaagagatgctgaagagctggagaaatggatacaggaaaaacttcagattgcatctgatgagaattataaagacccaaccaacttgcagggaaagcttcagaagcatcaagcatttgaagctgaagtgcaggccaactcaggagccattgttaagctggatgaaactggaaacctgatgatctcagaagggcattttgcatctgaaaccatacggacccgtttgatggagctgcaccgccagtgggaattacttttggagaagatgcgagaaaaaggaatcaaactgctgcaggcccagaagttggtgcagtacttacgagaatgtgaggacgtgatggactggatcaatgacaaggaagcaattgttacttctgaagagctgggccaggatctggagcatgtagaggttttacagaagaaatttgaagagtttcaaacagatatggctgctcatgaagaaagagttaatgaagtgaaccagtttgctgccaaactcatacaggagcagcaccctgaggaggaactgatcaagactaagcaggatgaagtcaatgcagcctggcagcggctgaagggcctggctctgcagaggcaggggaagctctttggggcagcagaagttcagcgctttaacagggatgtggatgagactatcagttggattaaggaaaaggagcagttaatggcctctgatgattttggccgagacctggcaagtgttcaggctctgcttcggaagcacgagggtctggagagagatcttgctgctctagaagacaaggtcaaagccctgtgtgctgaggctgaccgcctgcaacagtcccaccctctgagtgcaacacagattcaagtgaagcgagaggaactgattacaaactgggagcagatccgcaccttggcggcagagagacatgcacggctcaatgattcatacaggcttcaacgcttccttgctgacttccgtgacctcaccagctgggtgactgagatgaaagccctcatcaatgcagatgagcttgccagtgatgtggctggggctgaagccctgctagatagacaccaagagcacaagggtgaaattgatgcccatgaagacagcttcaaatctgcagatgaatctggacaggcactgcttgctgctggtcactatgcctcagatgaagtgagggagaagctgaccgtcctttccgaggagagagcggcgctgctggagctgtgggagctgcgcaggcagcagtacgagcagtgcatggacctgcagctcttctaccgggacactgagcaggtggacaactggatgagcaagcaggaggcgttcctgttgaatgaagacttgggagattccttggatagtgtggaagcgcttcttaagaagcacgaagactttgagaaatcccttagtgcccaggaggaaaagattacagcattagatgaatttgcaaccaagctaattcagaacaaccactatgcaatggaagatgtggccactcgccgagatgctctgttgagccgccgcaatgcccttcacgagagagccatgcgtcgccgggcccagctagccgattctttccatctgcagcagtttttccgtgattctgatgagctcaagagttgggtcaatgagaagatgaaaactgccacagatgaagcttataaagatccatccaacctacaaggaaaagtacagaagcatcaggcttttgaggctgagctctcagcaaaccagagccgaattgatgccttggagaaagctggccaaaagctgattgatgtcaaccactatgccaaggatgaagtggcagctcgtatgaatgaggtgatcagtttgtggaagaaactgctagaggccactgaactgaaaggaataaagcttcgtgaagccaaccagcaacagcaatttaatcgcaatgttgaggatattgaattgtggctatatgaagtagaaggtcacttggcttcggatgattacggcaaagatcttaccaatgtgcagaacctccagaagaaacatgcactgctagaggcagatgtggctgctcaccaggaccgaattgatggcatcaccattcaggcccgccagttccaagatgctggccattttgatgcagaaaacatcaagaagaaacaggaagccctcgtggctcgctatgaggcactcaaggagcccatggttgcccggaagcagaagctggccgattctctgcggttgcagcagctcttccgggatgttgaggatgaggagacgtggattcgagagaaagagcccattgccgcatctaccaacagaggtaaggatttaattggggtccagaatctgctaaagaaacatcaagccttacaagcagaaattgctggacatgaaccacgcatcaaagcagttacacagaaggggaatgccatggtggaggaaggccattttgctgcagaggatgtgaaggccaagcttcacgagctgaaccaaaagtgggaggcactgaaagccaaagcttcccagcgtcggcaggacctggaggactctctgcaggcccagcagtactttgctgatgctaacgaggctgaatcctggatgcgggagaaggaacccattgtgggcagcactgactatggcaaggacgaagactctgctgaggctctactgaagaaacacgaagctttgatgtcagatctcagtgcctacggcagcagcatccaggctttgcgagaacaagcacagtcctgccggcaacaagtggcccccacggatgatgagactgggaaggagctggtcttggctctctacgactatcaggagaagagtccccgagaggtcaccatgaagaagggagatatccttaccttactcaacagcaccaacaaggattggtggaaagtggaagtgaacgatcgtcagggttttgtgccggctgcgtacgtgaagaaattggaccccgcccagtcagcctcccgggagaatctcctggaggagcaaggcagcatagcactgcggcaggagcagattgacaatcaatatcattctctgctggaactgggtgagaagcgtaaaggcatgttggagaagagttgcaagaagtttatgttgttccgtgaagcgaatgaactacagcaatggatcaatgagaaggaagccgctctgacaagtgaggaggtcggagcagacttggagcaggttgaggtgctccagaagaagtttgatgacttccagaaggacctgaaggccaatgagtcacggttgaaggacattaacaaggtagctgaagacctggagtctgaaggtctcatggcagaggaggtgcaggctgtgcaacaacaggaagtgtatggcatgatgcccagggatgaaactgattccaagacagcctccccgtggaagtctgctcgtctgatggttcacaccgtggccacctttaattccatcaaggagctgaatgagcgctggcggtccctacagcagctggccgaggaacggagccagctcttgggcagcgcccatgaagtacagaggttccacagagatgctgatgaaaccaaagaatggattgaagagaagaatcaagctctaaacacagacaattatggacatgatctcgccagtgtccaggccctgcaacgcaagcatgagggcttcgagagggaccttgcggctctcggtgacaaggtaaactcccttggtgaaacagcagagcgcctgatccagtcccatcccgagtcagcagaagacctgcaggaaaagtgcacagagttaaaccaggcctggagcagcctggggaaacgtgcagatcagcgcaaggcaaagttgggtgactcccacgacctgcagcgcttccttagcgatttccgggacctcatgtcttggatcaatggaatacgggggttggtgtcctcagatgagctagccaaggatgtcaccggagctgaggcattgctggagcgacaccaggaacaccggacagaaatcgatgccagggctggcactttccaggcatttgagcagtttggacagcagctgttggctcacggacactatgccagccctgagatcaagcagaaacttgatattcttgaccaggagcgtgcagacctggagaaggcctgggttcagcgcaggatgatgctggatcagtgccttgaactgcagctgttccatcgggactgtgagcaagctgagaactggatggctgcccgggaggccttcttgaataccgaagacaaaggagactcactggacagcgtagaggctctgatcaaaaaacatgaagactttgacaaagcgattaacgtccaggaagagaagattgctgctctgcaggcctttgccgaccagctcatcgctgccggccattatgccaagggagacatttctagccggcgcaatgaggtcttggacaggtggcgacgtctgaaagcccagatgattgagaaaaggtcaaagctaggagaatctcaaaccctccaacagttcagccgggatgtggatgagattgaggcttggatcagtgaaaaattgcaaacagcgagtgatgagtcgtacaaggatcccaccaacatccagagcaagcaccagaagcaccaggcttttgaagcagagctgcatgccaacgctgaccggatccgtggggttatcgacatgggcaactccctcattgaacgtggagcctgtgccggcagtgaggatgctgtcaaggcccgcctggctgccttagctgaccagtggcagttcttggtgcaaaagtcagcggaaaagagccagaaactgaaagaagccaacaagcagcagaacttcaacacagggatcaaggactttgacttctggctgtctgaggtggaggccctgctggcatccgaagattatggcaaagacctagcttctgtgaacaacctgctgaaaaagcatcaactgctggaagcagatatatctgcccatgaggatcgcctgaaggacctgaacagccaggcagacagcctgatgaccagcagtgccttcgacacctcccaagtaaaggacaagagggacaccatcaacgggcgcttccagaagatcaagagcatggcggcctcccggcgagccaagctgaatgaatcccatcgcctgcaccagttcttccgggacatggatgacgaggagtcctggatcaaggagaagaagctgctggtgggctcagaggactacggccgggacctaaccggcgtgcagaacctgaggaagaagcacaagcggctggaagcagaactggctgcgcatgagccggctattcagggtgtcctggacactggcaagaagctgtccgatgacaacaccatcgggaaagaggagatccagcagcggctggcgcagtttgtggagcactggaaagagctgaagcagctggcagctgcccggggtcagcggctggaagagtccttggaatatcagcagtttgtagccaatgtggaagaggaagaagcctggatcaatgagaaaatgaccctggtggccagcgaagattatggcgacactcttgccgccatccagggcttactgaagaaacatgaagcttttgagacagacttcaccgtccacaaggatcgcgtgaatgatgtctgcaccaatggacaagacctcattaagaagaacaatcaccatgaggagaacatctcttcaaagatgaagggcctgaacgggaaagtgtcagacctggagaaagctgcagcccagagaaaggcgaagctggatgagaactcggccttccttcagttcaactggaaggcggacgtggtggagtcctggatcggtgaaaaggagaacagcttgaagacagatgattatggccgagacctgtcttctgtgcagacgctcctcaccaaacaggaaacttttgacgctgggctgcaggccttccagcaggaaggcattgccaacatcactgccctcaaagatcagcttctcgccgccaaacacgttcagtccaaggccatcgaggcccggcacgcctccctcatgaagaggtggagccagcttctggccaactcagccgcccgcaagaagaagcttctggaggctcagagtcacttccgcaaggtggaggacctcttcctgaccttcgccaaaaaggcttctgccttcaacagctggtttgaaaatgcagaggaggacttaacagaccccgtgcgctgcaactccttggaagaaatcaaagctttgcgcgaggcccacgacgccttccgctcctccctcagctctgcccaggctgacttcaaccagctggccgagctggaccgccagatcaagagcttccgcgtagcctccaacccctacacctggtttaccatggaggccctggaggagacctggaggaacctacagaaaatcatcaaggagagggagctggagctgcagaaggaacagcggcggcaggaggagaacgacaagctgcgccaggagtttgcccagcacgccaacgccttccaccagtggatccaagagaccaggtgccagcccgctggggcgtcctgtatggtggaagagtcggggaccctcgaatcccagcttgaagctaccaaacgcaagcaccaggaaatccgagccatgagaagtcagctcaaaaagatcgaggacctgggggccgccatggaggaggccctcatcctggacaacaagtacacggagcacagcaccgtgggcctcgcccagcagtgggaccagctggaccagctgggcatgcgcatgcagcacaacctggagcagcagatccaggccaggaacacaacaggtgtgactgaggaggccctcaaagaattcagcatgatgtttaaacactttgacaaggacaagtctggcaggctgaaccatcaggagttcaaatcttgcctgcgctccctgggctatgacctgcccatggtggaggaaggggaacctgaccctgagttcgaggcaatcctggacacggtggatccgaacagagatggccatgtctccttgcaagaatacatggctttcatgatcagccgcgaaactgagaacgtcaagtccagcgaggagattgagagcgccttccgggccctcagctcagagggaaagccttacgtgaccaaggaggagctctaccagaacctgacccgggaacaagccgactactgcgtctcccacatgaagccctacgtggacggcaagggccgcgagctccccaccgcgttcgactacgtggagttcacccgctcgcttttcgtgaactgagccactccctgggtcacccacccctcgctgcttgccctgcgtcgccttgctgcatgtccgctcctctgtgtgctctcactttccactgtaaccttaagcctgcttagcttggaataagacttaggagaaaatggtgcttcactaacccgcttccggtccagtcacaatcatcatgtcactgtggggacccagatctgtgtcttgaagcagctgccctcattccgacttcagaaaatcgaagcagctggctcctccccttgttctctctcccaccctcccccaaatctgttttcatgtaaaagacaaataaatgatgacttcccc

SEQ ID NO: 290920 - protein, 410 aa, Artificial Sequence
  derived and/or modified sequence
MAVPCPYPTPFGIVPHAGMNGELTSPGAAYAGLHNISPQMSAAAAAAAAAAAYGRSPVVGFDPHHHMRVPAIPPNLTGIPGGKPAYSFHVSADGQMQPVPFPPDALIGPGIPRHARQINTLNHGEVVCAVTISNPTRHVYTGGKGCVKVWDISHPGNKSPVSQLDCLNRDNYIRSCRLLPDGRTLIVGGEASTLSIWDLAAPTPRIKAELTSSAPACYALAISPDSKVCFSCCSDGNIAVWDLHNQTLVRQFQGHTDGASCIDISNDGTKLWTGGLDNTVRSWDLREGRQLQQHDFTSQIFSLGYCPTGEWLAVGMENSNVEVLHVTKPDKYQLHLHESCVLSLKFAHCGKWFVSTGKDNLLNAWRTPYGASIFQSKESSSVLSCDISVDDKYIVTGSGDKKATVYEVIY

SEQ ID NO: 290921 - DNA, 1101 bp, Artificial Sequence
  derived and/or modified sequence
atggcccagcaggccaacgtgggcgagctgctggccatgctggacagccccatgctgggcgtgagagacgacgtgaccgccgtgttcaaggagaacctgaacagcgacagaggccccatgctggtgaacaccctggtggactactacctggagaccagcagccagcccgccctgcacatcctgaccaccctgcaggagccccacgacaagcacctgctggacagaatcaacgagtacgtgggcaaggccgccaccagactgagcatcctgagcctgctgggccacgtgatcagactgcagcccagctggaagcacaagctgagccaggcccccctgctgcccagcctgctgaagtgcctgaagatggacaccgacgtggtggtgctgaccaccggcgtgctggtgctgatcaccatgctgcccatgatcccccagagcggcaagcagcacctgctggacttcttcgacatcttcggcagactgagcagctggtgcctgaagaagcccggccacgtggccgaggtgtacctggtgcacctgcacgccagcgtgtacgccctgttccacagactgtacggcatgtacccctgcaacttcgtgagcttcctgagaagccactacagcatgaaggagaacctggagaccttcgaggaggtggtgaagcccatgatggagcacgtgagaatccaccccgagctggtgaccggcagcaaggaccacgagctggaccccagaagatggaagagactggagacccacgacgtggtgatcgagtgcgccaagatcagcctggaccccaccgaggccagctacgaggacggctacagcgtgagccaccagatcagcgccagattcccccacagaagcgccgacgtgaccaccagcccctacgccgacacccagaacagctacggctgcgccaccagcaccccctacagcaccagcagactgatgctgctgaacatgcccggccagctgccccagaccctgagcagccccagcaccagactgatcaccgagcccccccaggtgtggtgccagctggtgtgcctgctgagccccctgctgagcggcgaggccgaccccctgggccagatctag

SEQ ID NO: 290922 - DNA, 954 bp, Artificial Sequence
  derived and/or modified sequence
atggacaccgacgtggtggtgctgaccaccggcgtgctggtgctgatcaccatgctgcccatgatcccccagagcggcaagcagcacctgctggacttcttcgacatcttcggcagactgagcagctggtgcctgaagaagcccggccacgtggccgaggtgtacctggtgcacctgcacgccagcgtgtacgccctgttccacagactgtacggcatgtacccctgcaacttcgtgagcttcctgagaagccactacagcatgaaggagaacctggagaccttcgaggaggtggtgaagcccatgatggagcacgtgagaatccaccccgagctggtgaccggcagcaaggaccacgagctggaccccagaagatggaagagactggagacccacgacgtggtgatcgagtgcgccaagatcagcctggaccccaccgaggccagctacgaggacggctacagcgtgagccaccagatcagcgccagattcccccacagaagcgccgacgtgaccaccagcccctacgccgacacccagaacagctacggctgcgccaccagcaccccctacagcaccagcagactgatgctgctgaacatgcccggccagctgccccagaccctgagcagccccagcaccagactgatcaccgagcccccccaggccaccctgtggagccccagcatggtgtgcggcatgaccaccccccccaccagccccggcaacgtgccccccgacctgagccacccctacagcaaggtgttcggcaccaccgccggcggcaagggcacccccctgggcacccccgccaccagccccccccccgcccccagcgtgatcagaatgaccacctgcaccttccacagccccagaccccagagccacccccccggcagaaagagagagtggatcctgcaggaccacgtgtacaccgacaacaccatcttctag

SEQ ID NO: 290923 - DNA, 849 bp, Artificial Sequence
  derived and/or modified sequence
atggacaccgacgtggtggtgctgaccaccggcgtgctggtgctgatcaccatgctgcccatgatcccccagagcggcaagcagcacctgctggacttcttcgacatcttcggcagactgagcagctggtgcctgaagaagcccggccacgtggccgaggtgtacctggtgcacctgcacgccagcgtgtacgccctgttccacagactgtacggcatgtacccctgcaacttcgtgagcttcctgagaagccactacagcatgaaggagaacctggagaccttcgaggaggtggtgaagcccatgatggagcacgtgagaatccaccccgagctggtgaccggcagcaaggaccacgagctggaccccagaagatggaagagactggagacccacgacgtggtgatcgagtgcgccaagatcagcctggaccccaccgaggccagctacgaggacggctacagcgtgagccaccagatcagcgccagattcccccacagaagcgccgacgtgaccaccagcccctacgccgacacccagaacagctacggctgcgccaccagcaccccctacagcaccagcagactgatgctgctgaacatgcccggccacctggccaccaccgtgagacccagaccccccggccccgccgcccccggcgccgtggtggaggccgaggtggtggaggccgccgccgccgccgccgccagcttcctgccccagagaaacccccacaccagaggccaggcccacagcgccgtgggcggcagaagactgtgggagaagagactgcccgccagcccccccctgtgggcccacttccccgtgcagaaggccagctgggtgtag

SEQ ID NO: 290924 - DNA, 1101 bp, Artificial Sequence
  derived and/or modified sequence
atggcacagcaggccaatgtcggggaactgctggcgatgttggactcgccaatgttaggtgttagggatgacgttacggccgtgtttaaggaaaacctcaactctgacagagggccgatgctggtcaatactctggtggactactatttggagactagtagccagcccgctcttcacatcttgactaccctccaggaaccacatgataagcatctgcttgaccgaatcaatgagtacgtgggcaaggcggcaaccagactgtcaatcctgtccttgctggggcatgtcattcggctgcaacctagctggaagcataagctttctcaggctcctttgcttccctcactcctaaagtgcctcaagatggacacagacgtcgtggtactgaccacgggggtgctggtgttgatcaccatgttgcccatgatccctcagagcggcaaacaacacctactggacttcttcgatattttcggcagactgagctcatggtgcctcaaaaaaccaggtcatgtggctgaggtgtatctcgtgcatctccacgccagtgtgtacgccctatttcacagactctatggcatgtacccctgcaactttgtatcatttctgaggtctcattactcaatgaaggagaatcttgaaactttcgaagaagtggtgaagccgatgatggagcatgtcaggattcaccccgagctggtgaccggcagtaaggaccatgaactcgatccccgtcggtggaagcggctggagacccatgatgtggtcatcgagtgtgccaaaatctcccttgatccaactgaagcatcctatgaggacggatattccgtgagccaccagatctccgcccggtttccgcacaggtcggctgatgtgacgacatctccttacgccgatacacagaactcatacggatgcgcaacctccactccttactctacgtccagactgatgcttctgaacatgcccggtcagttaccccaaacgctttctagtcccagtacacgtttgattaccgaacccccacaggtctggtgccaactggtctgcctgctgtcccctttgttgagtggagaagctgacccccttgggcaaatttag

SEQ ID NO: 290925 - DNA, 954 bp, Artificial Sequence
  derived and/or modified sequence
atggataccgacgtcgtcgtgcttactactggtgtcctggtcctaattaccatgctgcccatgattccacagtcggggaaacagcacttgctggacttcttcgacatctttgggcgcctctcgagctggtgcttaaagaaaccaggccacgttgccgaggtctacctcgtccatcttcacgctagcgtgtacgcactcttccatcgtctgtacggcatgtacccttgcaatttcgtttcattcttgagaagccattactccatgaaggaaaatctcgaaacgtttgaggaagtggtcaagcccatgatggaacacgtgagaattcatcctgaactcgttaccggtagcaaagatcacgaactggatcccagacgctggaagaggctcgagactcacgatgtagtgattgaatgtgctaagatcagtctggaccctaccgaagccagctatgaagatggctactctgtatcccatcagatttcagctaggttccctcatagaagtgcagatgttaccacaagcccctacgccgatacacaaaattcctacgggtgtgccacatcaaccccatactcaacgtcacgcttaatgctccttaacatgccaggacaattaccccagaccctctcctcaccaagcactcgactgatcaccgagcccccacaggccacgctctggtctccttccatggtgtgcggtatgacaactcctcccacctctcccggaaacgtgccgcccgacttgagtcatccttattctaaggtgttcggaaccacagcagggggaaagggaactcccctgggcacccctgcaacatctccaccaccagccccttccgtgattcgaatgaccacatgcactttccactctccgcggccgcagtcacacccacctgggcgcaagcgggagtggattctccaagatcatgtgtatacagataatacgatcttctag

SEQ ID NO: 290926 - DNA, 849 bp, Artificial Sequence
  derived and/or modified sequence
atggatactgatgtggtggtgttgaccacgggcgtcctggtcttgatcacaatgttgccaatgattccgcagtcaggcaagcagcacctgctggactttttcgacattttcgggaggctaagctcttggtgcctgaaaaaaccgggccacgtcgccgaggtctacctagttcacctacatgcgtccgtgtatgccctgtttcataggttatacggcatgtacccatgtaactttgtgtcattcctgagatctcattactctatgaaagagaatctggagacatttgaggaggtggtcaagccaatgatggaacacgtgagaatacatcccgagctggtcacagggtcaaaagaccacgagcttgacccaagaagatggaaacggctggaaacacacgacgtagtgattgaatgcgctaagatctcactagaccctactgaggccagctacgaggatggatattcagtcagccaccagatatctgctcgcttccctcacagatcggccgatgtgaccacaagtccttacgccgatacccagaatagctatggctgcgccacctccacaccctacagcacctcaagattaatgttgttgaatatgcccggtcacttggcaacaaccgtgcgccctaggccccccgggcctgcagcccccggcgctgtggtggaggctgaggttgtggaggctgcagccgcagcagctgcatccttccttcctcagaggaatccccacactcggggtcaggctcacagcgccgttggggggcggagactgtgggagaagcgccttcccgccagccctccattatgggctcacttccccgtccagaaagcctcatgggtctag

SEQ ID NO: 290927 - DNA, 1101 bp, Artificial Sequence
  derived and/or modified sequence
atggcccagcaggccaacgtgggggagctgctggccatgctggacagccccatgctgggcgtgagagatgatgtgacagctgtgttcaaggagaacctgaacagcgaccggggccccatgctggtgaacaccctggtggactactacctggagaccagcagccagcctgccctgcacatcctgaccaccctgcaggagccccatgacaagcacctgctggaccgcatcaatgaatatgtgggcaaggccgccacccggctgagcatcctgagcctgctgggccacgtgatccggctgcagcccagctggaagcacaagctgagccaggcccccctgctgcccagcctgctgaagtgcctgaagatggacacagatgtggtggtgctgaccactggagtgctggtgctgatcaccatgctgcccatgatcccccagagcggcaagcagcacctgctggacttctttgacatcttcggccgcctgagctcctggtgcctgaagaagccaggccacgtggccgaggtgtacctggtgcacctgcacgcctctgtgtatgccctcttccaccggctgtatggcatgtacccctgcaactttgtgtccttcctgcggagccactacagcatgaaggagaacctggagacctttgaggaggtggtgaagcccatgatggagcacgtgcgcatccaccctgagctggtgacaggcagcaaggaccacgagctggacccccggcgctggaagaggctggagacccatgatgtggtgattgaatgtgccaagatcagcctggaccccacagaggccagctatgaagatggctacagcgtgagccaccagatcagcgcccgcttcccccacaggtctgcagatgtgaccaccagcccctatgctgacacccagaacagctatggctgtgccaccagcaccccctacagcaccagccggctgatgctgctgaacatgcctggccagctgccccagaccctgagcagccccagcaccaggctcatcacagagcccccccaggtgtggtgccagctggtgtgcctgctgagccccctgctgtctggagaggccgaccccctgggccagatctag

SEQ ID NO: 290928 - DNA, 954 bp, Artificial Sequence
  derived and/or modified sequence
atggacacagatgtggtggtgctgaccaccggggtgctggtgctgatcaccatgctgcccatgatcccccagagcggcaagcagcacctgctggacttctttgacatcttcggccgcctgagctcctggtgcctgaagaagccaggccacgtggccgaggtgtacctggtgcacctgcacgcctctgtgtatgccctcttccaccggctgtatggcatgtacccctgcaactttgtgtccttcctgcggagccactacagcatgaaggagaacctggagacctttgaggaggtggtgaagcccatgatggagcacgtgcgcatccaccctgagctggtgacaggcagcaaggaccacgagctggacccccggcgctggaagaggctggagacccatgatgtggtgattgaatgtgccaagatcagcctggaccccacagaggccagctatgaagatggctacagcgtgagccaccagatcagcgcccgcttcccccacaggtctgcagatgtgaccaccagcccctatgctgacacccagaacagctatggctgtgccaccagcaccccctacagcaccagccggctgatgctgctgaacatgcctggccagctgccccagaccctgagcagccccagcaccaggctcatcacagagcccccccaggccaccctgtggagccccagcatggtgtgtggcatgaccaccccacccaccagccctggaaatgtgcccccagacctgagccacccctacagcaaggtgtttggcaccacagctgggggcaagggcacccccctgggcaccccagccaccagccccccaccagcccccagcgtcatccgcatgaccacctgcaccttccacagcccccggccccagagccaccccccaggcaggaagcgggagtggatcctgcaggaccacgtgtacacagacaacaccatcttctag

SEQ ID NO: 290929 - DNA, 849 bp, Artificial Sequence
  derived and/or modified sequence
atggacacagatgtggtggtgctgaccaccggggtgctggtgctgatcaccatgctgcccatgatcccccagagcggcaagcagcacctgctggacttctttgacatcttcggccgcctgagctcctggtgcctgaagaagccaggccacgtggccgaggtgtacctggtgcacctgcacgcctctgtgtatgccctcttccaccggctgtatggcatgtacccctgcaactttgtgtccttcctgcggagccactacagcatgaaggagaacctggagacctttgaggaggtggtgaagcccatgatggagcacgtgcgcatccaccctgagctggtgacaggcagcaaggaccacgagctggacccccggcgctggaagaggctggagacccatgatgtggtgattgaatgtgccaagatcagcctggaccccacagaggccagctatgaagatggctacagcgtgagccaccagatcagcgcccgcttcccccacaggtctgcagatgtgaccaccagcccctatgctgacacccagaacagctatggctgtgccaccagcaccccctacagcaccagccggctgatgctgctgaacatgcctggccacctggccaccaccgtgcggcccaggcctcctggccctgctgcccctggagctgtggtggaggccgaggtggtggaggccgctgctgctgctgctgccagcttcctgccccagaggaacccccacacccggggccaggcccacagcgctgtgggcggccgccgcctgtgggagaagaggctgcctgccagcccccccctgtgggcccacttccctgtgcagaaggcctcctgggtgtag

SEQ ID NO: 290930 - DNA, 1101 bp, Artificial Sequence
  derived and/or modified sequence
atggcccagcaggccaacgtgggcgagctgctggccatgctggactctccaatgctgggcgtgcgcgatgatgttacagctgtgtttaaggaaaacctcaacagtgacagaggtcccatgctggtaaacactcttgtcgactactatctggaaacaagcagccagcctgctctgcacatcctgacgacgctgcaggaaccccacgataaacatctcctcgatcgaattaacgagtatgtagggaaagctgccacccggttgtctatattgtctttgttgggccatgtgattagacttcagccatcttggaagcacaaactctctcaagcccccttgctcccctcattgcttaaatgcttgaagatggatacagatgtcgtggtgctaacaactggtgttcttgtgctgattaccatgctgcctatgatcccccagtccggcaaacagcatctgttggactttttcgatattttcggacgcctcagctcttggtgtctcaaaaagccagggcacgtggctgaggtatacttagtgcacctgcacgcctctgtgtacgcgttgttccatcgtttatacgggatgtacccgtgcaacttcgtgagtttcctccgatctcattacagtatgaaggagaatctggagacctttgaggaagtggtaaaaccaatgatggagcatgtgaggattcatcccgagctcgtgaccgggtctaaggaccatgagctggatcctcgccggtggaaacgccttgaaacccacgatgtggttatcgagtgcgcaaaaatctctctggaccctacagaggcttcctacgaagatggttacagcgtcagccatcaaatctccgcccgattcccccacaggtcagcagacgtcacaacaagcccttatgccgacacgcaaaactcttatgggtgcgctacctccaccccctacagcacaagccggttaatgcttctgaacatgccggggcagctgccgcagacactgtcctcccctagtactaggttaattacggaaccaccccaggtatggtgccagcttgtgtgtctgttatcaccactgctgagtggcgaggccgatcctctcggacagatttag

SEQ ID NO: 290931 - DNA, 954 bp, Artificial Sequence
  derived and/or modified sequence
atggacaccgacgtggtggtgctgaccaccggcgtgctggtgctgattacaatgctgcctatgatcccacagtccggcaagcaacacctgctggactttttcgatatcttcggacggctaagcagctggtgcctcaaaaaacccggacacgttgccgaggtctacctcgtgcacttgcacgcctctgtgtacgccctcttccacaggctgtatggcatgtatccatgtaatttcgtctcctttctgcgctcccactattctatgaaggaaaacctggaaacttttgaggaggtggtcaagccgatgatggagcatgtgcgcatccaccccgaattagtaaccgggtccaaagaccacgaactggacccccgaagatggaagcggttggagacacatgatgtcgtgatcgaatgtgcaaaaatttcactggaccctaccgaggcgtcttatgaggatgggtacagcgtctcacaccagatatcggcccgctttccacaccgctccgctgatgtgaccacctctccctatgcagatactcagaattcgtacggctgtgccaccagtactccctacagcactagcagattgatgctgctgaatatgccaggacagctgcctcaaacactgtctagcccatcaacacggttgatcaccgaacccccgcaagcgacgttatggagcccatccatggtttgtgggatgaccacaccaccgacatcacctggcaatgtaccgcctgatctgtcccacccttactctaaggtcttcggtacaacggccggcggaaagggtacccctctgggtacgccggctacgtcgccccctcctgcccccagcgtaattcggatgacaacatgtaccttccactcaccccgccctcagtcccaccctccaggtcgtaagagggagtggattttacaggatcacgtgtatacggataacactattttctag

SEQ ID NO: 290932 - DNA, 849 bp, Artificial Sequence
  derived and/or modified sequence
atggacaccgacgtggtggtgctgaccaccggcgtgctggtgctgatcacaatgttaccgatgattcctcaaagcggaaagcaacatctcctcgacttttttgatatattcggtcgattgtccagttggtgcctgaagaaaccgggccatgtggctgaggtgtacctcgtacatctgcacgctagcgtgtacgcactcttccatagattgtatggcatgtatccctgtaacttcgtgtcattcctccgctcccactatagcatgaaagaaaacttggagacattcgaagaggtggtcaaacctatgatggagcacgtacggatacacccagagctcgttactgggtcaaaggaccatgaattagaccctcgcagatggaagcggctggagacccacgatgtggtgattgaatgcgcaaagattagcttggatcccacggaggccagttacgaggatgggtacagcgtgtcccatcagatctccgcaaggtttcctcaccgttctgccgacgtgactacctctccctatgctgacactcaaaactcgtacgggtgcgctaccagcactccctatagcaccagcaggctgatgctcctgaatatgccaggtcatctggctaccacagtcagacctagacccccaggccccgccgcccccggcgcggtagttgaggccgaagtggtggaggctgctgcagctgccgctgcctcctttctgcctcaacgaaatcctcacacaagaggccaggcccattccgccgtcggtgggcgccggctgtgggaaaagagattgccagcttccccgcctctgtgggcacactttccggttcaaaaggccagctgggtgtag

SEQ ID NO: 290933 - DNA, 1101 bp, Artificial Sequence
  derived and/or modified sequence
atggctcagcaagcaaatgtcggagagttattagccatgctcgacagccccatgctgggagtgcgagacgatgtgacggccgtattcaaagagaacctgaacagcgacagaggtcccatgctagtgaacactctcgtggattattacctggaaacgagttcccaacccgctctgcatatcctgacaactctccaagagcctcacgacaagcatctgcttgacaggatcaacgaatacgtggggaaggctgccacccgcctgagcattctgagccttctgggtcacgttataagactccaaccttcctggaaacataagctgtctcaggctccccttctgcccagtctcctcaagtgtctcaagatggatacggatgtggtggttctgacaaccggagtgctcgtgctcattacaatgctccccatgatcccacagagtggcaaacagcacctgctggacttcttcgatatcttcgggcgattatcctcctggtgcctcaaaaagcccggacacgtggctgaagtgtacctggttcacctgcatgcttccgtgtatgccctctttcacagactctacggtatgtatccctgcaacttcgtctcattcttgagatcacattactccatgaaggagaacctggagacttttgaagaagtggtcaagccaatgatggaacatgtgcggattcatccggagttagttaccggctctaaggaccacgagctggaccctaggagatggaagcggttagaaacccacgacgttgtgattgaatgtgccaagattagccttgatcccacagaggcgtcttatgaggacggctacagcgtaagccatcagattagtgcgagatttccacatcggagcgctgatgtgactactagcccttatgccgatacacagaactcctacgggtgtgcgacgtctactccatatagcacaagcaggctaatgctcctgaacatgcccggacagttaccccagactctgtctagcccctcaacccggctgattactgagccccctcaggtgtggtgccagttagtgtgtctactttcccccctgttgtctggcgaagctgaccccctaggccaaatttag

SEQ ID NO: 290934 - DNA, 954 bp, Artificial Sequence
  derived and/or modified sequence
atggatacagatgtagttgttttaacaacgggggtgctggtgttgatcaccatgctgccaatgattccgcaatccgggaaacagcatctgctagacttttttgacatctttgggagattgtcctcgtggtgtcttaaaaaacctggccatgttgcggaagtctatctggttcatctgcatgcttccgtatacgctctgttccatcgattatacggcatgtacccatgtaattttgtgagtttccttcgctcgcactacagtatgaaggagaatctagagacatttgaggaggtggtgaagcccatgatggagcacgtgcgaatacatccagaactggttaccggcagcaaagaccacgaactggaccctaggaggtggaaaagactggagacacacgacgtggtgattgagtgcgccaagatctccctggaccccaccgaagcctcctacgaagatgggtatagcgtctctcaccagatatctgctcgcttcccacatcgatcagcagacgttacgacatctccttacgctgacacccaaaatagctatggatgtgctacttccaccccttactctacttcccgactcatgctcctgaatatgcctggtcagcttccccagacactatcctctccgagcactcggctaataacagaacctccccaagcaaccctgtggtccccaagcatggtgtgtggcatgactaccccaccaacaagcccgggaaatgtgccgcctgatctgtcgcacccctattccaaggtgtttgggaccacagctggagggaaaggcacgccattgggcacccccgctacatctcctcccccagccccaagcgtgatacgcatgacaacttgcaccttccactcaccgcgaccccagtcccaccctccaggccgaaaacgcgaatggatattgcaagaccatgtgtataccgacaatacaatattttag

SEQ ID NO: 290935 - DNA, 849 bp, Artificial Sequence
  derived and/or modified sequence
atggacaccgacgtcgtggtcctcacaacaggtgttcttgtattaattactatgctgcctatgattcctcagagcggcaaacagcatctcctggacttttttgatatctttgggcgtctgagcagctggtgtctgaaaaagccagggcacgtagccgaggtctacctggttcatttacatgctagcgtgtacgccttattccatcgcctgtacgggatgtatccatgcaatttcgtgtccttcctccgcagtcattacagtatgaaagaaaacctggaaacattcgaggaagtggttaagcctatgatggaacacgtccggatacatccagagctcgtgacaggctctaaagatcacgagcttgacccacggcgttggaagaggctggagacacacgatgtcgtcatagagtgcgctaagatctctttagatcccacggaggcgtcctatgaggacggctattccgtgagccaccagatctctgcgagattcccccaccggtcagcagatgtgacaacgtctccatacgctgacacgcagaactcctacggttgtgccacctcaacaccgtactcaacgagtcgactgatgctgttaaatatgcccggtcacctcgcgacgaccgtccgaccacgcccaccagggcctgccgctcctggtgccgtggttgaagcggaagtggtggaggcggcagctgccgctgcagcgagctttctgccacaaaggaatccccacaccagggggcaggcacactcagccgtgggcggtaggcgactctgggagaagcgtctgcctgctagcccgccactgtgggcccattttcccgtccaaaaggctagctgggtgtag

SEQ ID NO: 290936 - DNA, 1507 bp, Artificial Sequence
  derived and/or modified sequence
acgacgggggaggtgctgtacgtccaagatggcggcgccctgtaggctggagggactgtgaggtaaacagctgagggggaggagacggtggtgaccatgaaagacaccaggttgacagcactggaaactgaagtaccagttgtcgctagaacagtttggtagtggccccaatgaagaaccttcagaacctgtagcacacgtcctggagccagcacagcgccttcgagcgagagaatggcccaacaagcaaatgtcggggagcttcttgccatgctggactcccccatgctgggtgtgcgggacgacgtgacagctgtctttaaagagaacctcaattctgaccgtggccctatgcttgtaaacaccttggtggattattacctggaaaccagctctcagccggcattgcacatcctgaccaccttgcaagagccacatgacaagcacctcttggacaggattaacgaatatgtgggcaaagccgccactcgtttatccatcctctcgttactgggtcatgtcataagactgcagccatcttggaagcataagctctctcaagcacctcttttgccttctttactaaaatgtctcaagatggacactgacgtcgttgtcctcacaacaggcgtcttggtgttgataaccatgctaccaatgattccacagtctgggaaacagcatcttcttgatttctttgacatttttggccgtctgtcatcatggtgcctgaagaaaccaggccacgtggcggaagtctatctcgtccatctccatgccagtgtgtacgcactctttcatcgcctttatggaatgtacccttgcaacttcgtctcctttttgcgttctcattacagtatgaaagaaaacctggagacttttgaagaagtggtcaagccaatgatggagcatgtgcgaattcatccggaattagtgactggatccaaggaccatgaactggaccctcgaaggtggaagagattagaaactcatgatgttgtgatcgagtgtgccaaaatctctctggatcccacagaagcctcatatgaagatggctattctgtgtctcaccaaatctcagcccgctttcctcatcgttcagccgatgtcaccaccagcccttatgctgacacacagaatagctatgggtgtgctacttctaccccttactccacgtctcggctgatgttgttaaatatgccagggcagctacctcagactctgagttccccatcgacacggctgataactgaaccaccacaagtatggtgtcaactagtgtgcctgctctctcctctgctttctggtgaagctgaccctttgggtcagatttagtatgtggttgggaaaatttcacactgctcatttcaggagtcacttttaaggatccatgatattagcaaagaaagttactgttgcctcttagattcatcttgaagtcttgatttacaaaatgcaacttgtttcttgatacgcttttaataagatgcctttttctagatgaaaa

SEQ ID NO: 290937 - DNA, 1333 bp, Artificial Sequence
  derived and/or modified sequence
cagtttggtagtggccccaatgaagaaccttcagaacctgtagcacacgtcctggagccagcacagcgccttcgagcgagagaatggcccaacaagcaaatgtcggggagcttcttgccatgctggactcccccatgctgggtgtgcgggacgacgtgacagctgtctttaaagagaacctcaattctgcacctcttggacaggattaacgaatatgtgggcaaagccgccactcgtttatccatcctctcgttactgggtcatgtcataagactgcagccatcttggaagcataagctctctcaagcacctcttttgccttctttactaaaatgtctcaagatggacactgacgtcgttgtcctcacaacaggcgtcttggtgttgataaccatgctaccaatgattccacagtctgggaaacagcatcttcttgatttctttgacatttttggccgtctgtcatcatggtgcctgaagaaaccaggccacgtggcggaagtctatctcgtccatctccatgccagtgtgtacgcactctttcatcgcctttatggaatgtacccttgcaacttcgtctcctttttgcgttctcattacagtatgaaagaaaacctggagacttttgaagaagtggtcaagccaatgatggagcatgtgcgaattcatccggaattagtgactggatccaaggaccatgaactggaccctcgaaggtggaagagattagaaactcatgatgttgtgatcgagtgtgccaaaatctctctggatcccacagaagcctcatatgaagatggctattctgtgtctcaccaaatctcagcccgctttcctcatcgttcagccgatgtcaccaccagcccttatgctgacacacagaatagctatgggtgtgctacttctaccccttactccacgtctcggctgatgttgttaaatatgccagggcagctacctcagactctgagttccccatcgacacggctgataactgaaccaccacaagctactctttggagcccatctatggtttgtggtatgaccactcctccaacttctcctggaaatgtcccacctgatctgtcacacccttacagtaaagtctttggtacaactgcaggtggaaaaggaactcctctgggaaccccagcaacctctcctcctccagccccatctgtcattcggatgactacgtgcacatttcactcccccaggccacagtcacaccccccaggaaggaagagagaatggattctgcaagaccatgtctacacagacaacaccatcttctgaatgacagaggatcagaagagccacctggcagcaaagg

SEQ ID NO: 290938 - DNA, 1383 bp, Artificial Sequence
  derived and/or modified sequence
cagcacctcttggacaggattaacgaatatgtgggcaaagccgccactcgtttatccatcctctcgttactgggtcatgtcataagactgcagccatcttggaagcataagctctctcaagcacctcttttgccttctttactaaaatgtctcaagatggacactgacgtcgttgtcctcacaacaggcgtcttggtgttgataaccatgctaccaatgattccacagtctgggaaacagcatcttcttgatttctttgacatttttggccgtctgtcatcatggtgcctgaagaaaccaggccacgtggcggaagtctatctcgtccatctccatgccagtgtgtacgcactctttcatcgcctttatggaatgtacccttgcaacttcgtctcctttttgcgttctcattacagtatgaaagaaaacctggagacttttgaagaagtggtcaagccaatgatggagcatgtgcgaattcatccggaattagtgactggatccaaggaccatgaactggaccctcgaaggtggaagagattagaaactcatgatgttgtgatcgagtgtgccaaaatctctctggatcccacagaagcctcatatgaagatggctattctgtgtctcaccaaatctcagcccgctttcctcatcgttcagccgatgtcaccaccagcccttatgctgacacacagaatagctatgggtgtgctacttctaccccttactccacgtctcggctgatgttgttaaatatgccagggcatctggccacaacggtgagaccaagacccccaggcccagcagcgcccggggcagtagtggaagcagaggtggtggaggcagcagcagcagcagcagcgagctttctaccccagagaaacccccacaccagagggcaggcccattcagcagtcggtgggagacgactatgggagaagcgtctgccagcatccccaccactgtgggctcacttcccagttcaaaaagcttcctgggtatgaaggctcgagagttatttcgtaataagagcgagagccagtgtgatgaggacggcatgaccagtagcctttctgagagcctaaagacagaactgggcaaagacttgggtgtggaagccaagattcccctgaacctagatggccctcacccgtctcccccgaccccggacagtgttggacagctacatatcatggactacaatgagactcatcatgaacacagctaaggaatgatggtcaatcagtgttaacttgcatattgttggcacagaacaggaggtgtgaatgcacgtttcaaagctttcctgtttccagggtctgagtgcaagttcatgtgtggaaatgggacggaggtcctttggacagctgactgaatgcaga

SEQ ID NO: 290939 - protein, 882 aa, Artificial Sequence
  derived and/or modified sequence
MEGESSRFEIHTPVSDKKKKKCSIHKERPQKHSHEIFRDSSLVNEQSQITRRKKRKKDFQHLISSPLKKSRICDETANATSTLKKRKKRRYSALEVDEEAGVTVVLVDKENINNTPKHFRKDVDVVCVDMSIEQKLPRKPKTDKFQVLAKSHAHKSEALHSKVREKKNKKHQRKAASWESQRARDTLPQSESHQEESWLSVGPGGEITELPASAHKNKSKKKKKKSSNREYETLAMPEGSQAGREAGTDMQESQPTVGLDDETPQLLGPTHKKKSKKKKKKKSNHQEFEALAMPEGSQVGSEVGADMQESRPAVGLHGETAGIPAPAYKNKSKKKKKKSNHQEFEAVAMPESLESAYPEGSQVGSEVGTVEGSTALKGFKESNSTKKKSKKRKLTSVKRARVSGDDFSVPSKNSESTLFDSVEGDGAMMEEGVKSRPRQKKTQACLASKHVQEAPRLEPANEEHNVETAEDSEIRYLSADSGDADDSDADLGSAVKQLQEFIPNIKDRATSTIKRMYRDDLERFKEFKAQGVAIKFGKFSVKENKQLEKNVEDFLALTGIESADKLLYTDRYPEEKSVITNLKRRYSFRLHIGRNIARPWKLIYYRAKKMFDVNNYKGRYSEGDTEKLKMYHSLLGNDWKTIGEMVARSSLSVALKFSQISSQRNRGAWSKSETRKLIKAVEEVILKKMSPQELKEVDSKLQENPESCLSIVREKLYKGISWVEVEAKVQTRNWMQCKSKWTEILTKRMTNGRRIYYGMNALRAKVSLIERLYEINVEDTNEIDWEDLASAIGDVPPSYVQTKFSRLKAVYVPFWQKKTFPEIIDYLYETTLPLLKEKLEKMMEKKGTKIQTPAAPKQVFPFRDIFYYEDDSEGGHRKRKRR

SEQ ID NO: 290940 - protein, 905 aa, Artificial Sequence
  derived and/or modified sequence
MEGESSRFEIHTPVSDKKKKKCSIHKERPQKHSHEIFRDSSLVNEQSQITRRKKRKKDFQHLISSPLKKSRICDETANATSTLKKRKKRRYSALEVDEEAGVTVVLVDKENINNTPKHFRKDVDVVCVDMSIEQKLPRKPKTDKFQVLAKSHAHKSEALHSKVREKKNKKHQRKAASWESQRARDTLPQSESHQEESWLSVGPGGEITELPASAHKNKSKKKKKKSSNREYETLAMPEGSQAGREAGTDMQESQPTVGLDDETPQLLGPTHKKKSKKKKKKKSNHQEFEALAMPEGSQVGSEVGADMQESRPAVGLHGETAGIPAPAYKNKSKKKKKKSNHQEFEAVAMPESLESAYPEGSQVGSEVGTVEGSTALKGFKESNSTKKKSKKRKLTSVKRARVSGDDFSVPSKNSESTLFDSVEGDGAMMEEGVKSRPRQKKTQACLASKHVQEAPRLEPANEEHNVETAEDSEIRYLSADSGDADDSDADLGSAVKQLQEFIPNIKDRATSTIKRMYRDDLERFKEFKAQGVAIKFGKFSVKENKQLEKNVEDFLALTGIESADKLLYTDRYPEEKSVITNLKRRYSFRLHIGRNIARPWKLIYYRAKKMFDVNNYKGRYSEGDTEKLKMYHSLLGNDWKTIGEMVARSSLSVALKFSQISSQRNRGAWSKSETRKLIKAVEEVILKKMSPQELKEVDSKLQENPESCLSIVREKLYKGISWVEVEAKVQTRNWMQCKSKWTEILTKRMTNGRRIYYGMNALRAKVSLIERLYEINVEDTNEIDWEDLASAIGDVPPSYVQTKFSRLKAVYVPFWQKKTFPEIIDYLYETTLPLLKEKLEKMMEKKGTKIQTPAAPKQVFPFRDIFYYEDDSEGEDIEKESEGQAPCMAHACNSSTLGGQGRWII

SEQ ID NO: 290941 - DNA, 2649 bp, Artificial Sequence
  derived and/or modified sequence
atggagggcgagagcagcagattcgagatccacacccccgtgagcgacaagaagaagaagaagtgcagcatccacaaggagagaccccagaagcacagccacgagatcttcagagacagcagcctggtgaacgagcagagccagatcaccagaagaaagaagagaaagaaggacttccagcacctgatcagcagccccctgaagaagagcagaatctgcgacgagaccgccaacgccaccagcaccctgaagaagagaaagaagagaagatacagcgccctggaggtggacgaggaggccggcgtgaccgtggtgctggtggacaaggagaacatcaacaacacccccaagcacttcagaaaggacgtggacgtggtgtgcgtggacatgagcatcgagcagaagctgcccagaaagcccaagaccgacaagttccaggtgctggccaagagccacgcccacaagagcgaggccctgcacagcaaggtgagagagaagaagaacaagaagcaccagagaaaggccgccagctgggagagccagagagccagagacaccctgccccagagcgagagccaccaggaggagagctggctgagcgtgggccccggcggcgagatcaccgagctgcccgccagcgcccacaagaacaagagcaagaagaagaagaagaagagcagcaacagagagtacgagaccctggccatgcccgagggcagccaggccggcagagaggccggcaccgacatgcaggagagccagcccaccgtgggcctggacgacgagaccccccagctgctgggccccacccacaagaagaagagcaagaagaagaagaagaagaagagcaaccaccaggagttcgaggccctggccatgcccgagggcagccaggtgggcagcgaggtgggcgccgacatgcaggagagcagacccgccgtgggcctgcacggcgagaccgccggcatccccgcccccgcctacaagaacaagagcaagaagaagaagaagaagagcaaccaccaggagttcgaggccgtggccatgcccgagagcctggagagcgcctaccccgagggcagccaggtgggcagcgaggtgggcaccgtggagggcagcaccgccctgaagggcttcaaggagagcaacagcaccaagaagaagagcaagaagagaaagctgaccagcgtgaagagagccagagtgagcggcgacgacttcagcgtgcccagcaagaacagcgagagcaccctgttcgacagcgtggagggcgacggcgccatgatggaggagggcgtgaagagcagacccagacagaagaagacccaggcctgcctggccagcaagcacgtgcaggaggcccccagactggagcccgccaacgaggagcacaacgtggagaccgccgaggacagcgagatcagatacctgagcgccgacagcggcgacgccgacgacagcgacgccgacctgggcagcgccgtgaagcagctgcaggagttcatccccaacatcaaggacagagccaccagcaccatcaagagaatgtacagagacgacctggagagattcaaggagttcaaggcccagggcgtggccatcaagttcggcaagttcagcgtgaaggagaacaagcagctggagaagaacgtggaggacttcctggccctgaccggcatcgagagcgccgacaagctgctgtacaccgacagataccccgaggagaagagcgtgatcaccaacctgaagagaagatacagcttcagactgcacatcggcagaaacatcgccagaccctggaagctgatctactacagagccaagaagatgttcgacgtgaacaactacaagggcagatacagcgagggcgacaccgagaagctgaagatgtaccacagcctgctgggcaacgactggaagaccatcggcgagatggtggccagaagcagcctgagcgtggccctgaagttcagccagatcagcagccagagaaacagaggcgcctggagcaagagcgagaccagaaagctgatcaaggccgtggaggaggtgatcctgaagaagatgagcccccaggagctgaaggaggtggacagcaagctgcaggagaaccccgagagctgcctgagcatcgtgagagagaagctgtacaagggcatcagctgggtggaggtggaggccaaggtgcagaccagaaactggatgcagtgcaagagcaagtggaccgagatcctgaccaagagaatgaccaacggcagaagaatctactacggcatgaacgccctgagagccaaggtgagcctgatcgagagactgtacgagatcaacgtggaggacaccaacgagatcgactgggaggacctggccagcgccatcggcgacgtgccccccagctacgtgcagaccaagttcagcagactgaaggccgtgtacgtgcccttctggcagaagaagaccttccccgagatcatcgactacctgtacgagaccaccctgcccctgctgaaggagaagctggagaagatgatggagaagaagggcaccaagatccagacccccgccgcccccaagcaggtgttccccttcagagacatcttctactacgaggacgacagcgagggcggccacagaaagagaaagagaagatag

SEQ ID NO: 290942 - DNA, 2718 bp, Artificial Sequence
  derived and/or modified sequence
atggagggcgagagcagcagattcgagatccacacccccgtgagcgacaagaagaagaagaagtgcagcatccacaaggagagaccccagaagcacagccacgagatcttcagagacagcagcctggtgaacgagcagagccagatcaccagaagaaagaagagaaagaaggacttccagcacctgatcagcagccccctgaagaagagcagaatctgcgacgagaccgccaacgccaccagcaccctgaagaagagaaagaagagaagatacagcgccctggaggtggacgaggaggccggcgtgaccgtggtgctggtggacaaggagaacatcaacaacacccccaagcacttcagaaaggacgtggacgtggtgtgcgtggacatgagcatcgagcagaagctgcccagaaagcccaagaccgacaagttccaggtgctggccaagagccacgcccacaagagcgaggccctgcacagcaaggtgagagagaagaagaacaagaagcaccagagaaaggccgccagctgggagagccagagagccagagacaccctgccccagagcgagagccaccaggaggagagctggctgagcgtgggccccggcggcgagatcaccgagctgcccgccagcgcccacaagaacaagagcaagaagaagaagaagaagagcagcaacagagagtacgagaccctggccatgcccgagggcagccaggccggcagagaggccggcaccgacatgcaggagagccagcccaccgtgggcctggacgacgagaccccccagctgctgggccccacccacaagaagaagagcaagaagaagaagaagaagaagagcaaccaccaggagttcgaggccctggccatgcccgagggcagccaggtgggcagcgaggtgggcgccgacatgcaggagagcagacccgccgtgggcctgcacggcgagaccgccggcatccccgcccccgcctacaagaacaagagcaagaagaagaagaagaagagcaaccaccaggagttcgaggccgtggccatgcccgagagcctggagagcgcctaccccgagggcagccaggtgggcagcgaggtgggcaccgtggagggcagcaccgccctgaagggcttcaaggagagcaacagcaccaagaagaagagcaagaagagaaagctgaccagcgtgaagagagccagagtgagcggcgacgacttcagcgtgcccagcaagaacagcgagagcaccctgttcgacagcgtggagggcgacggcgccatgatggaggagggcgtgaagagcagacccagacagaagaagacccaggcctgcctggccagcaagcacgtgcaggaggcccccagactggagcccgccaacgaggagcacaacgtggagaccgccgaggacagcgagatcagatacctgagcgccgacagcggcgacgccgacgacagcgacgccgacctgggcagcgccgtgaagcagctgcaggagttcatccccaacatcaaggacagagccaccagcaccatcaagagaatgtacagagacgacctggagagattcaaggagttcaaggcccagggcgtggccatcaagttcggcaagttcagcgtgaaggagaacaagcagctggagaagaacgtggaggacttcctggccctgaccggcatcgagagcgccgacaagctgctgtacaccgacagataccccgaggagaagagcgtgatcaccaacctgaagagaagatacagcttcagactgcacatcggcagaaacatcgccagaccctggaagctgatctactacagagccaagaagatgttcgacgtgaacaactacaagggcagatacagcgagggcgacaccgagaagctgaagatgtaccacagcctgctgggcaacgactggaagaccatcggcgagatggtggccagaagcagcctgagcgtggccctgaagttcagccagatcagcagccagagaaacagaggcgcctggagcaagagcgagaccagaaagctgatcaaggccgtggaggaggtgatcctgaagaagatgagcccccaggagctgaaggaggtggacagcaagctgcaggagaaccccgagagctgcctgagcatcgtgagagagaagctgtacaagggcatcagctgggtggaggtggaggccaaggtgcagaccagaaactggatgcagtgcaagagcaagtggaccgagatcctgaccaagagaatgaccaacggcagaagaatctactacggcatgaacgccctgagagccaaggtgagcctgatcgagagactgtacgagatcaacgtggaggacaccaacgagatcgactgggaggacctggccagcgccatcggcgacgtgccccccagctacgtgcagaccaagttcagcagactgaaggccgtgtacgtgcccttctggcagaagaagaccttccccgagatcatcgactacctgtacgagaccaccctgcccctgctgaaggagaagctggagaagatgatggagaagaagggcaccaagatccagacccccgccgcccccaagcaggtgttccccttcagagacatcttctactacgaggacgacagcgagggcgaggacatcgagaaggagagcgagggccaggccccctgcatggcccacgcctgcaacagcagcaccctgggcggccagggcagatggatcatctag

SEQ ID NO: 290943 - DNA, 2649 bp, Artificial Sequence
  derived and/or modified sequence
atggaaggcgagagctctagatttgagatccataccccagtcagcgataagaagaaaaaaaagtgtagcatacataaagagcgcccccagaagcactcccatgaaatctttagggatagttcgctggttaacgaacagtcccagatcaccagacgcaaaaagaggaagaaggattttcagcacctcatatcaagcccccttaaaaagagcagaatttgcgatgaaactgctaatgcaactagcacccttaaaaagcgtaaaaagcggcggtattccgccttggaggttgacgaggaggcgggagtaacagtcgtactcgtggacaaagagaacataaataatacaccaaaacactttagaaaggacgttgacgttgtgtgcgtggatatgagcatagaacaaaagctgccacggaagcctaaaacagataagttccaagtgctggctaaaagccatgcccacaaaagtgaagccctccacagcaaggtgcgagagaaaaaaaataagaagcatcagcggaaggctgcctcttgggagtcccaaagggccagagacacattgccgcagtctgagtcccatcaggaagagagttggctttccgtgggacccgggggtgaaattacagaactgcccgccagcgctcataagaacaaatcgaagaagaaaaagaaaaagtcttccaacagagagtatgagacactggccatgcctgagggttcccaagcggggcgggaggccggtacagatatgcaggagagccaacctaccgtaggactcgacgacgagactcctcagctgctgggccctacccacaagaagaaatccaaaaagaaaaagaagaagaaaagcaatcaccaagaattcgaagcgctcgccatgcccgagggttcacaggtcggcagtgaagtaggcgccgacatgcaagaaagcagaccagctgtgggcttgcatggcgagactgcaggaatccctgcccctgcttataaaaataagtctaaaaagaaaaaaaaaaagtctaatcaccaagagttcgaggccgttgccatgcctgagtccctcgaatccgcctaccctgaagggtctcaagtcggaagtgaggtcgggacagtcgaggggtccacagctctgaagggcttcaaagaatctaactctactaagaagaagtccaagaaacggaagcttaccagcgtcaaaagagctcgggtctccggggatgacttttcagtgcccagtaagaattcagaatcgacactttttgattcagtggaaggcgacggcgctatgatggaggagggagtgaaatcccgccccagacagaaaaagacccaggcatgcctggcatccaagcacgtacaagaggctccccgtctggaacctgcaaacgaggaacataacgtagaaaccgctgaggattctgaaattcgatatttatcagcggattctggcgacgctgatgatagtgatgcagacctcggctcagccgtgaagcaactgcaggagttcatccctaatatcaaagatcgagccacgagtacaataaagcgtatgtaccgcgacgatcttgaaaggttcaaagaattcaaggcgcaaggggtggctattaagtttggtaagttcagcgttaaggagaataagcagctcgaaaaaaacgtggaggattttcttgcactgacaggaatcgaatcagctgacaagttgctgtatactgaccgctaccccgaggaaaaatctgttatcactaacctgaaacgaagatatagctttcggttgcacattggacggaatattgccaggccatggaagctgatctactaccgcgcaaaaaaaatgtttgacgttaataactacaaggggagatattccgaaggcgacactgagaagcttaagatgtaccactccctgttagggaacgattggaaaaccatcggtgagatggtggcccgaagcagcctgagcgttgccctcaagttctcccagatcagctcccaacggaacagaggagcatggagcaagagtgagacaaggaagcttataaaagccgttgaagaggtgattttgaaaaaaatgagtccccaagagcttaaagaggtggactcaaagttacaggaaaatcctgagtcctgtctgtccattgtacgtgagaagctctataaaggcatctcctgggtcgaagtagaagccaaggtgcagactcgcaactggatgcagtgtaagtcgaaatggactgaaattttaaccaaaagaatgacgaacggtcggcggatctactacggcatgaatgccctgcgggcaaaagtgtctctgatcgagcgcttgtacgaaatcaatgtggaggacacaaacgaaatcgactgggaagacttagcttcagccatcggggacgttcccccatcttatgttcagacaaagtttagcagactcaaagccgtttacgtgcccttctggcagaaaaagacatttcccgagatcatcgactatctgtatgaaaccacactgccccttctgaaagaaaagttggaaaagatgatggagaagaaaggcaccaagattcagaccccagccgccccaaaacaggtcttccctttcagggatattttctactatgaggacgactccgaaggaggacatcgaaaacggaaacggagatag

SEQ ID NO: 290944 - DNA, 2718 bp, Artificial Sequence
  derived and/or modified sequence
atggaaggtgaaagctctcggtttgagatccacaccccagttagcgataagaaaaaaaagaaatgtagcatccacaaagaacgcccacagaagcactcccacgagatattcagagacagctctctggtgaatgagcaatcacagatcacccgcaggaaaaagcgcaaaaaagattttcagcacctgatctcatctcccctgaagaaatcccgcatatgtgacgagacagctaacgccacctccacgctgaagaaacgaaaaaagcgccggtactctgccctcgaagtcgatgaggaggctggggtcaccgtggtgctggtagacaaggagaatatcaacaacacacccaagcatttccgtaaagacgtggacgtggtgtgcgtggatatgtcgatcgaacagaaactgcctcgcaagcctaagaccgacaagtttcaggtccttgctaaatctcatgctcacaagagtgaggcactgcactcaaaggtccgggagaagaagaacaagaagcatcagcgcaaggctgcgtcttgggagagtcagagggcaagagacaccctccctcaatctgaatcccatcaggaggaatcctggctcagtgttggcccgggtggggagatcacggagttacccgctagtgctcataaaaataagagtaagaagaagaagaagaagtcctccaaccgggagtacgagaccctggcaatgcccgagggatctcaggcaggaagggaagcgggaacagatatgcaggaatctcagcctactgtgggcctggacgatgaaacaccgcagttgttggggcctactcataagaagaagagcaagaaaaagaagaagaagaaaagcaaccaccaggagtttgaagccctcgcaatgccggaggggagtcaggtcggctctgaagtcggcgccgatatgcaggaatcgcggccagccgtgggtctgcacggtgagactgcaggaattccagcaccagcttacaaaaataaatccaaaaagaagaaaaaaaaatcaaatcatcaggaattcgaagctgtggccatgccagagtcgctggagtctgcctacccagagggctcccaggtcggctccgaagttggaaccgtggagggctctaccgcccttaaaggtttcaaggaatctaattctacgaagaagaaatcgaaaaagcggaaactgacgtccgtgaaaagggctcgcgtgagcggcgatgatttttccgtcccgagcaaaaactcagaatcgacgctttttgatagtgtggaaggcgatggtgccatgatggaggaaggtgtcaaatctagaccgaggcaaaaaaaaacacaggcctgcctggcatctaagcacgtccaggaagcgccgcgtctggaacccgcaaatgaggagcacaatgtggaaacggctgaggatagcgaaatccggtacttgtcagccgacagcggagacgcagatgacagcgacgcggatcttggcagtgctgtcaagcagctgcaggagttcattccgaacataaaggacagagccacctcgactattaaacgcatgtatagggatgacctcgagcgctttaaggagtttaaggctcagggtgtggccattaagttcggcaaatttagcgtgaaggaaaataagcagctggaaaagaatgtggaggattttttggccttaactggcatagagtccgctgacaaacttctctacaccgataggtacccagaggagaagagtgtcatcactaaccttaagagacgttattctttccgcttacatatcggcagaaatatcgcgcgtccatggaagttgatctattacagagcaaagaagatgtttgatgtgaataactacaaagggaggtactctgaaggcgacactgaaaaactcaagatgtaccattccctgctggggaacgattggaagacaatcggggaaatggtagcccgctcttcattgagtgtagcccttaaattctcccagatctcttctcagagaaacagaggagcctggtctaaaagtgaaacccgtaaactcatcaaggctgtcgaagaggtaatattgaagaagatgagcccgcaggagctgaaggaagtggacagcaagcttcaagagaacccagagtcttgcctgagtattgtccgggagaaattgtataagggcatatcctgggttgaagtggaggcgaaagtgcagacacggaactggatgcagtgcaaaagcaagtggacagaaatcctgaccaagagaatgaccaatgggcgccgcatctattatggcatgaacgccttgcgcgctaaggtgagcctcatcgaacgtctgtatgagatcaatgtggaagatacgaacgaaatcgactgggaagacttagcgtccgctattggtgacgtcccccctagctatgtgcagacaaaattcagccgcctgaaggcagtgtatgttcctttttggcagaagaaaacctttcccgaaattatagattacctgtatgaaacaactttgcctttactgaaggagaaactcgagaaaatgatggagaagaagggaacaaaaatacagacacccgcagcccctaaacaagtcttccctttcagggatatcttctattacgaggacgatagcgaaggagaggatattgaaaaggaatctgagggacaggccccctgtatggctcatgcctgtaacagcagcactctgggcggacagggccgctggattatatag

SEQ ID NO: 290945 - DNA, 2649 bp, Artificial Sequence
  derived and/or modified sequence
atggagggggagagcagcagatttgagatccacacccctgtgtctgacaagaagaagaagaagtgcagcatccacaaggagcggccccagaagcacagccatgagatcttccgggacagcagcctggtgaatgagcagagccagatcaccaggaggaagaagaggaagaaggacttccagcacctgatcagcagccccctgaagaagagccgcatctgtgatgaaacagccaatgccaccagcaccctgaagaagaggaagaagaggcgctacagcgccctggaggtggatgaggaggccggcgtgacagtggtgctggtggacaaggagaacatcaacaacacccccaagcacttcaggaaggatgtggatgtggtgtgtgtggacatgagcattgagcagaagctgcccaggaagcccaagacagacaagttccaggtgctggccaagagccacgcccacaagtctgaggccctgcacagcaaggtgcgggagaagaagaacaagaagcaccagaggaaggccgcctcctgggagagccagagggcccgggacaccctgccccagagcgagagccaccaggaggagagctggctgtctgtgggccctggaggagagatcacagagctgcctgccagcgcccacaagaacaagagcaagaagaagaagaagaagagcagcaaccgggagtatgagaccctggccatgcctgagggcagccaggccggccgggaggccggcacagacatgcaggagagccagcccaccgtgggcctggatgatgagaccccccagctgctgggccccacccacaagaagaagagcaagaagaagaagaagaagaagagcaaccaccaggagtttgaggccctggccatgcctgagggcagccaggtgggcagcgaggtgggcgctgacatgcaggagagcaggcctgctgtgggcctgcatggagaaacagctggcatcccagccccagcctacaagaacaagagcaagaagaagaagaagaagagcaaccaccaggagtttgaggccgtggccatgcctgagagcctggagagcgcctacccagagggcagccaggtgggcagcgaggtgggcaccgtggagggcagcacagccctgaagggcttcaaggagagcaacagcaccaagaagaagagcaagaagaggaagctgacctctgtgaagagggcccgggtgtctggagatgacttctctgtgcccagcaagaacagcgagagcaccctgtttgattctgtggagggagatggagccatgatggaggagggcgtgaagagccggccccggcagaagaagacccaggcctgcctggccagcaagcacgtgcaggaggccccccggctggagcccgccaatgaggagcacaacgtggagacagctgaggacagcgagatccgctacctgtctgctgacagcggagatgctgatgacagtgatgctgacctgggcagcgctgtgaagcagctgcaggagttcatccccaacatcaaggaccgggccaccagcaccatcaagaggatgtacagagatgacctggagcgcttcaaggagttcaaggcccagggcgtggccatcaagtttgggaagttctctgtgaaggagaacaagcagctggagaagaatgtggaggacttcctggccctgaccggcatcgagagcgctgacaagctgctgtacacagaccgctacccagaggagaagagcgtcatcaccaacctgaagaggcgctacagcttccggctgcacatcggcaggaacatcgcccggccctggaagctgatctactaccgggccaagaagatgtttgatgtgaacaactacaagggccgctacagcgagggggacacagagaagctgaagatgtaccacagcctgctgggcaatgactggaagaccatcggggagatggtggcccggagcagcctgtctgtggccctgaagttcagccagatcagcagccagaggaacagaggagcctggagcaagtctgagaccaggaagctgatcaaggctgtggaggaggtgatcctgaagaagatgagcccccaggagctgaaggaggtggacagcaagctgcaggagaaccctgagagctgcctgagcatcgtgcgggagaagctgtacaagggcatctcctgggtggaggtggaggccaaggtgcagaccaggaactggatgcagtgcaagagcaagtggacagagatcctgaccaagaggatgaccaatggaagacgcatctactacggcatgaatgccctgcgggccaaggtgtccctgattgagcggctgtatgagatcaacgtggaggacaccaatgaaattgactgggaggacctggccagcgccatcggagatgtgccccccagctatgtgcagaccaagttcagccggctgaaggctgtgtatgtgcccttctggcagaagaagaccttccctgagatcatcgactacctgtatgagaccaccctgcccctgctgaaggagaagctggagaagatgatggagaagaagggcaccaagatccagaccccagctgcccccaagcaggtgttccccttccgggacatcttctactatgaagatgacagcgagggcggccacaggaagaggaagagaagatag

SEQ ID NO: 290946 - DNA, 2718 bp, Artificial Sequence
  derived and/or modified sequence
atggagggggagagcagcagatttgagatccacacccctgtgtctgacaagaagaagaagaagtgcagcatccacaaggagcggccccagaagcacagccatgagatcttccgggacagcagcctggtgaatgagcagagccagatcaccaggaggaagaagaggaagaaggacttccagcacctgatcagcagccccctgaagaagagccgcatctgtgatgaaacagccaatgccaccagcaccctgaagaagaggaagaagaggcgctacagcgccctggaggtggatgaggaggccggcgtgacagtggtgctggtggacaaggagaacatcaacaacacccccaagcacttcaggaaggatgtggatgtggtgtgtgtggacatgagcattgagcagaagctgcccaggaagcccaagacagacaagttccaggtgctggccaagagccacgcccacaagtctgaggccctgcacagcaaggtgcgggagaagaagaacaagaagcaccagaggaaggccgcctcctgggagagccagagggcccgggacaccctgccccagagcgagagccaccaggaggagagctggctgtctgtgggccctggaggagagatcacagagctgcctgccagcgcccacaagaacaagagcaagaagaagaagaagaagagcagcaaccgggagtatgagaccctggccatgcctgagggcagccaggccggccgggaggccggcacagacatgcaggagagccagcccaccgtgggcctggatgatgagaccccccagctgctgggccccacccacaagaagaagagcaagaagaagaagaagaagaagagcaaccaccaggagtttgaggccctggccatgcctgagggcagccaggtgggcagcgaggtgggcgctgacatgcaggagagcaggcctgctgtgggcctgcatggagaaacagctggcatcccagccccagcctacaagaacaagagcaagaagaagaagaagaagagcaaccaccaggagtttgaggccgtggccatgcctgagagcctggagagcgcctacccagagggcagccaggtgggcagcgaggtgggcaccgtggagggcagcacagccctgaagggcttcaaggagagcaacagcaccaagaagaagagcaagaagaggaagctgacctctgtgaagagggcccgggtgtctggagatgacttctctgtgcccagcaagaacagcgagagcaccctgtttgattctgtggagggagatggagccatgatggaggagggcgtgaagagccggccccggcagaagaagacccaggcctgcctggccagcaagcacgtgcaggaggccccccggctggagcccgccaatgaggagcacaacgtggagacagctgaggacagcgagatccgctacctgtctgctgacagcggagatgctgatgacagtgatgctgacctgggcagcgctgtgaagcagctgcaggagttcatccccaacatcaaggaccgggccaccagcaccatcaagaggatgtacagagatgacctggagcgcttcaaggagttcaaggcccagggcgtggccatcaagtttgggaagttctctgtgaaggagaacaagcagctggagaagaatgtggaggacttcctggccctgaccggcatcgagagcgctgacaagctgctgtacacagaccgctacccagaggagaagagcgtcatcaccaacctgaagaggcgctacagcttccggctgcacatcggcaggaacatcgcccggccctggaagctgatctactaccgggccaagaagatgtttgatgtgaacaactacaagggccgctacagcgagggggacacagagaagctgaagatgtaccacagcctgctgggcaatgactggaagaccatcggggagatggtggcccggagcagcctgtctgtggccctgaagttcagccagatcagcagccagaggaacagaggagcctggagcaagtctgagaccaggaagctgatcaaggctgtggaggaggtgatcctgaagaagatgagcccccaggagctgaaggaggtggacagcaagctgcaggagaaccctgagagctgcctgagcatcgtgcgggagaagctgtacaagggcatctcctgggtggaggtggaggccaaggtgcagaccaggaactggatgcagtgcaagagcaagtggacagagatcctgaccaagaggatgaccaatggaagacgcatctactacggcatgaatgccctgcgggccaaggtgtccctgattgagcggctgtatgagatcaacgtggaggacaccaatgaaattgactgggaggacctggccagcgccatcggagatgtgccccccagctatgtgcagaccaagttcagccggctgaaggctgtgtatgtgcccttctggcagaagaagaccttccctgagatcatcgactacctgtatgagaccaccctgcccctgctgaaggagaagctggagaagatgatggagaagaagggcaccaagatccagaccccagctgcccccaagcaggtgttccccttccgggacatcttctactatgaagatgacagtgaaggagaagatattgagaaggagagcgagggccaggccccctgcatggcccacgcctgcaacagcagcaccctgggcggccagggccgctggatcatctag

SEQ ID NO: 290947 - DNA, 2649 bp, Artificial Sequence
  derived and/or modified sequence
atggagggcgagagcagccggttcgagatccacacccccgtgagcgataagaaaaaaaaaaaatgtagtatacacaaggaacgtccccagaagcactcacatgagatttttagagattcctcgctggtgaacgagcaatctcagattaccaggaggaaaaaacggaaaaaagactttcaacacttgatctcttccccgctaaagaaaagccggatctgcgatgaaacagctaatgcaacaagcacacttaagaaacgtaagaagcgcagatattccgccctggaggtggatgaggaggcaggcgtcaccgttgtactagtggataaagagaacatcaataacacacctaaacatttccgtaaggacgttgacgttgtctgtgttgacatgtctattgaacagaaactgcctcggaagcccaaaacagacaaattccaggtgttagcgaagagccacgcacacaaatccgaagctttgcactctaaggtcagagaaaaaaaaaataaaaagcatcagagaaaagcagcttcttgggagagccagcgcgccagggacactctcccacaatccgaatcccaccaagaagagagctggctctctgttggaccggggggtgagataacagagctgccagcctctgcccacaagaataaatccaagaagaaaaagaagaagagtagcaacagggagtatgagaccttagccatgcctgagggatcccaggctggacgggaggctggtaccgatatgcaggagtcccagccaaccgtgggactggacgacgaaacgccgcagctcctaggccccacacataagaaaaagtccaaaaaaaagaagaaaaaaaagtctaaccaccaagagttcgaagccctcgcgatgcccgaaggctcccaggtgggtagcgaggtgggagccgacatgcaggagtctcgccctgcggtgggactccatggtgagactgccggaatcccagcgcccgcttacaagaacaagagcaagaagaaaaaaaaaaaatcaaatcatcaggaatttgaggcggttgcaatgcctgaatctctggagtcggcctatcctgagggttcacaggtgggcagcgaggtgggcacagtagagggatccacggcactcaagggttttaaggagagtaatagcacaaagaagaaatctaagaagagaaagttaaccagcgtgaagagggctagagtgagcggagatgatttttctgtgccttccaagaatagcgaatctaccctcttcgactccgtggagggagacggtgctatgatggaggaaggagttaaatctagaccccggcagaaaaaaacccaggcgtgcctcgcttcgaagcacgtccaggaagccccacgactggaaccagccaacgaggagcacaacgtcgaaaccgctgaagactccgaaataagatatttgtctgccgattcaggcgacgctgatgactccgacgccgatttgggatcagcggtgaaacagctgcaggaattcatccccaacataaaagaccgggccacgtctaccatcaaaagaatgtatcgagatgacctcgaacggtttaaagagtttaaggctcaaggggtcgcaatcaaattcgggaaatttagcgttaaagagaataagcagctggagaagaacgtcgaggatttcctggccctaaccggaatcgagtctgcagataaactgttgtatacagataggtaccccgaggagaagagtgttatcacgaacctcaagcggcgctattcctttcggctgcatattggacggaatattgccaggccctggaagctgatttattacagggcaaaaaaaatgtttgacgtcaacaactacaagggacggtatagcgagggtgacacagaaaaactgaagatgtatcactccctgctaggcaatgactggaagaccatcggagaaatggttgccaggtcatcactctctgttgccctgaagttcagccagatatccagccagaggaataggggggcctggtcaaagagcgaaacaaggaagctcatcaaagctgtagaggaggtgatccttaaaaagatgtctccccaggagcttaaggaggtagactctaaattacaggagaatcctgaatcttgccttagtatagtgcgggaaaagttatacaaaggcattagctgggtcgaagtagaggcaaaggtgcagacccggaattggatgcagtgcaagtcaaaatggacagaaattctcacaaagcgcatgaccaatggccgaaggatttactatgggatgaatgcccttagagcgaaggtgagtctgatagaacgcctgtatgaaattaatgtcgaggacacaaatgaaattgattgggaagacctggctagcgctattggcgacgtcccgccatcatatgttcagactaaatttagcaggctcaaggcagtctatgtgcccttctggcagaagaaaacttttcccgaaatcattgactacttgtatgagacgacactgccactactgaaggaaaagcttgaaaagatgatggagaagaagggtactaagatccaaactcctgcggcccctaaacaagtttttccattccgagacatattttattatgaggacgactcggagggcggtcacaggaaacggaagcggcgctag

SEQ ID NO: 290948 - DNA, 2718 bp, Artificial Sequence
  derived and/or modified sequence
atggagggcgagagcagccggttcgagatccacacccccgtgagcgacaaaaagaagaagaagtgttcaatacataaggaacgtccccagaagcacagccacgaaatttttagagattcttcactcgttaatgagcagtctcagatcactcgcaggaagaaacgtaaaaaggactttcagcatttaatttcttcgcccctgaaaaagagccggatttgcgatgaaaccgccaacgcgaccagcactcttaagaagcgtaagaagagaaggtacagcgctcttgaggtcgacgaggaggccggagtgacagtggttctggtggacaaagagaacatcaataacactcctaagcactttcgaaaggatgtggacgttgtgtgcgtggacatgtctatcgagcaaaagctcccgagaaagccaaaaacagacaagttccaggtcctcgcaaagtcacatgcacataagtctgaggccctgcatagtaaggtacgagagaagaaaaacaagaagcatcagcggaaagcggcctcatgggagtctcagagagccagggatactttgccacagtctgagtcccatcaggaggaatcgtggctgtcggtgggacctggcggcgagattactgaactccctgccagcgctcacaagaacaaaagcaaaaaaaagaagaagaaatccagtaacagggaatacgagactctggccatgcctgaaggaagccaagctggccgtgaggccggcacagatatgcaggagagtcagcctacagtggggttagatgacgagacaccccagctcctcggccccacccacaagaagaaaagcaagaagaaaaagaagaagaagagcaaccatcaagagttcgaagctctcgctatgcctgagggctctcaagtgggatccgaagtgggcgcggatatgcaagaaagccgacccgcagtggggctccatggcgagacggcaggcatccccgcacctgcttacaaaaataaaagcaagaagaagaagaaaaagagcaatcaccaggaatttgaggccgtggctatgcctgaatcacttgagagtgcataccctgaaggcagccaggtaggcagcgaggtcggaacagtggaaggcagcaccgcccttaaaggctttaaggagtctaattccactaagaaaaaatctaaaaagcgcaaactgacctctgtaaaaagagcccgtgtcagtggtgacgatttttccgtgccgtcaaagaattcagagtccacactcttcgatagtgtggagggggatggagcaatgatggaggagggcgtgaaatccaggcctcgccaaaaaaagacacaggcttgtctagccagcaaacatgtgcaggaggccccacggcttgagccggctaacgaagaacataatgtggagactgccgaggacagcgaaatcaggtatctaagtgcggatagcggcgatgctgatgactctgatgcagaccttggaagcgcagtcaaacaacttcaggagttcataccaaatattaaggatagggcaacctccactattaagagaatgtatagggacgatctggagcgtttcaaggagtttaaggcacaaggggttgccattaagtttgggaaattctcagtcaaagaaaataagcagctcgaaaaaaacgtggaggatttcttggcgctaacaggaattgaaagcgccgacaaactgctctatactgataggtacccagaagagaaatcagtaatcaccaatcttaagagacggtactcttttcgactacatatcgggagaaatatcgcaaggccatggaaattaatttattaccgggccaagaagatgtttgacgtgaataactataagggtaggtactccgagggcgacacagagaaactcaagatgtaccactctttgctgggcaacgactggaagactatcggcgaaatggtggctagaagcagtctgtccgtagctctcaagttcagccaaatcagttctcaaagaaatcggggtgcctggtcaaaaagcgagactcgcaaattgattaaggccgtagaggaggttatattgaagaagatgtctccccaagagcttaaggaggtcgactcaaaactgcaggagaaccccgaatcatgcctttccatcgtgcgggagaagctgtataagggtatatcttgggtagaggtggaagctaaggtgcagacacgtaactggatgcagtgtaaatctaaatggacagaaattctcaccaaaaggatgaccaatggcagaagaatctattatggtatgaatgcactgcgcgcgaaggtaagcctgatcgagcgactgtacgagatcaatgtcgaagataccaatgagatcgattgggaagacctggcttcggctattggtgacgttccccctagttacgttcaaaccaaattcagcaggcttaaggcagtatatgtgccattctggcagaagaaaacgttccctgagatcatcgactatctatatgagactacgctaccattattaaaggagaaactggagaaaatgatggagaagaagggtactaaaatacaaactcccgcagctcccaagcaggtgtttccgttcagagacatcttttattacgaagacgatagcgagggtgaggacatcgagaaggaaagtgaaggccaagccccttgtatggcccacgcttgtaactcatcaactttggggggacaggggcgatggataatttag

SEQ ID NO: 290949 - DNA, 2649 bp, Artificial Sequence
  derived and/or modified sequence
atggagggtgagagcagtcgcttcgaaattcatactccggtgagcgacaagaagaaaaaaaaatgctcaatccacaaggagcggccacaaaaacacagtcacgagatcttcagggacagcagtctggttaacgagcagtcccagatcaccaggcgaaagaagcgtaagaaagactttcagcacctgatcagtagtcctctaaaaaagagcagaatatgtgatgaaaccgcaaacgccaccagcaccctgaaaaaacggaagaagagacgctactcagccctcgaagttgatgaagaggccggagtgacggtggtattagtggacaaggagaacattaacaatacaccgaagcactttcgcaaggatgtggatgtcgtctgtgtcgacatgagcattgagcagaagctccccaggaaaccgaagacagataagttccaggtgctggctaaaagccatgcccataagagcgaggcattacactcgaaagtccgcgagaaaaaaaacaagaaacatcagcgtaaggcagcctcctgggaaagccaacgcgcaagagacacgctacctcaatctgaatctcatcaagaagagagctggctgtctgtcggccctggaggcgaaatcaccgaattgcccgcaagcgctcacaagaacaaatctaaaaagaagaaaaagaagtcttccaatcgggaatacgaaactttggcgatgcctgaaggatcacaagcaggaagagaggcaggcacagacatgcaagagagccagcctaccgtaggcttggacgacgagaccccccagctcctgggacctacgcataagaagaaaagtaaaaaaaagaagaagaaaaagtccaatcaccaggagtttgaagcactggccatgcccgaaggatcacaagtcggctctgaagtaggagccgatatgcaggagagcaggcccgctgtggggctgcatggtgagaccgcaggcatccccgcacccgcatacaaaaataaatctaagaaaaagaagaaaaagtcaaaccatcaggagttcgaagcagttgccatgcccgagtcactggaaagcgcttatccagaggggtcgcaggttggctcggaggtcggcactgtggagggtagcactgccttgaagggattcaaggagtctaacagtactaaaaagaaatcaaagaaacggaaactgacctcagtgaaaagggctcgtgtttcaggggatgacttctcagtgccctccaagaactccgagagtactttgtttgactccgtggagggagatggggcaatgatggaggaaggcgttaagagtagacccagacagaagaagacgcaggcttgtctggcctcaaagcatgttcaggaagctcctcggctagaacctgcaaatgaggagcataatgtggagaccgctgaggactctgagatcaggtacctttccgccgactctggagatgctgatgatagcgacgccgatctgggatcagccgtgaagcagctgcaggaatttatccctaacatcaaagaccgagccacctctaccatcaagagaatgtaccgggacgacttggagcgctttaaagagttcaaggcacaaggggtggccatcaagttcggcaagttctccgtcaaagaaaataaacagctggagaagaatgtcgaagacttcctggctctgactggtatagagtcagccgataagctgctgtacacagatcgctatccagaggagaagagcgtgataacgaacctgaaaagacgctacagcttccgtttacacatcggccgaaacatcgcacgcccatggaagctgatctactaccgggctaagaagatgttcgacgtgaataattataaaggcagatatagtgaaggggacactgaaaaactcaaaatgtaccactcgctcctgggtaacgattggaagaccattggggaaatggtggcgagaagcagcctgtccgtcgcgttgaaattttctcaaatatccagccagaggaacagaggagcctggtcgaagagtgagacaagaaagttgataaaggcggtagaggaagtgatcctgaagaagatgtcaccccaggaacttaaggaggttgactctaagcttcaggagaacccagaatcatgtctttccattgtgcgggagaaactctacaaagggatctcttgggttgaagtggaggcaaaagtacagactcgcaattggatgcagtgcaaatccaagtggacagagatcctcacgaaaagaatgacaaatggtaggcgaatctattatggaatgaacgcacttagagcaaaggtgagtctgatcgaacgtctgtacgagattaacgtcgaagataccaacgaaatagattgggaggacctcgctagcgctatcggagatgtgcctccgtcttacgtccagacgaaattctcacgactgaaggctgtttatgtgcctttttggcagaagaaaacattccctgagattatcgactatctgtatgagacgaccctccctctgctcaaagagaagctggaaaaaatgatggagaagaaaggaactaaaatccagacaccagccgcaccaaagcaggtgtttccttttcgcgatattttttactacgaagatgactcagagggcggtcatcggaaacgtaaacgacggtag

SEQ ID NO: 290950 - DNA, 2718 bp, Artificial Sequence
  derived and/or modified sequence
atggagggagaaagcagccggttcgagatacacactccagtgagtgacaagaaaaagaagaagtgctcgatacacaaagaaagaccgcagaagcacagccacgaaatttttagggattcatctttggttaatgaacaatctcaaattacccgcaggaaaaagaggaagaaggacttccaacacctgatctcttctccactgaagaaatcccgcatttgtgatgaaactgcgaatgccacatccactctgaagaaaagaaagaaaaggagatactccgccttggaagtagatgaagaagccggagtgactgtcgtgctcgtcgacaaggaaaacattaacaacacgcccaagcactttaggaaggatgtcgatgtagtgtgtgtggatatgagtattgagcaaaagctccctcggaagccaaaaacggacaagtttcaggtgctggcgaagagccatgcccacaagtcagaggcacttcactcaaaagtcagagaaaagaaaaacaagaagcaccagagaaaggcggcatcttgggaatcccagagagctagagacaccctcccacagagtgagagccaccaagaggagagctggctctcagtggggccaggcggagagattacggagctcccagccagtgcccacaagaataaaagtaagaagaagaagaaaaagtcttccaatcgggagtacgagaccctagccatgcctgaaggcagtcaggcgggacgcgaagctggaaccgatatgcaggaatctcagccgacagtgggattggacgacgagacgccacagctgcttggtcctactcacaagaaaaaatctaagaagaaaaaaaaaaagaagtcaaatcatcaggagttcgaagccctggcaatgccagagggctcccaagtaggctctgaagttggagctgacatgcaggagagtaggcccgctgttggtttgcatggcgaaacagctgggatacccgctcctgcatacaagaacaagtctaagaagaaaaagaagaagtcgaaccaccaggagtttgaggctgtagcgatgcctgaaagtctggagtccgcctatcccgaaggcagtcaggttgggtcagaagtggggacggtcgagggctcgacagccctgaagggcttcaaggagtcaaattccaccaaaaaaaagagcaaaaaacgcaagttaacttcagtgaagcgagcaagagtgtcaggcgacgattttagcgtgccatccaagaattccgaatccacactgtttgattcggtagaaggcgatggggcaatgatggaggagggcgtcaaaagcagacctcggcagaaaaagacccaggcctgcctggcttccaagcatgtgcaggaagctccacggttggagcctgccaacgaagaacacaatgtcgaaacagctgaggattcagagatcagatatctctcagccgatagcggagatgctgatgattcagacgcagacctcggctccgccgtgaaacagttgcaggagttcatcccaaatataaaggatagagccacttccacaatcaaaaggatgtacagagatgaccttgagaggtttaaggagttcaaagctcaaggtgtagcaattaaattcgggaagttctccgtaaaagagaataagcaactggagaagaatgtggaggatttcttggcactcaccgggatagagtccgctgataagttgttgtacaccgaccggtatcccgaggagaagtcggtgattactaacctgaaacggcgatactcctttaggctgcatattgggaggaacattgccaggccctggaagctcatttattaccgcgcaaaaaaaatgtttgatgtcaataactataaggggagatacagtgaaggggacactgaaaaactgaagatgtatcacagcctgctgggtaatgactggaaaaccattggagaaatggtcgcaagaagctctctgagtgttgctctgaaattttcacagatcagcagtcagagaaaccgtggggcttggtctaaaagcgagacacggaagctcattaaagccgtcgaggaagtcattcttaaaaaaatgtccccccaggaattaaaggaggtggactccaaacttcaggagaacccggagtcatgtctcagcatcgtgcgggagaagctgtataagggaattagttgggtcgaagtggaggctaaagtccagactagaaattggatgcagtgtaagtcaaagtggaccgagatacttaccaagcggatgacaaatggcagacgtatctactatggcatgaacgctcttcgcgctaaagtttcactcatcgaaaggctgtatgagatcaacgttgaagacacgaacgagattgattgggaagatctcgcttccgccatcggcgatgtgcccccttcttatgtccagaccaagttttccaggctgaaggcagtttacgtcccattttggcagaagaagacatttcctgagattatcgactacctgtatgagaccacacttcctctactaaaggaaaagctcgagaagatgatggagaagaaagggacaaaaattcagacaccagctgcccctaaacaggtatttccatttcgtgacatcttctactacgaggacgatagcgagggagaagatattgagaaggaaagcgagggccaagctccgtgcatggcacatgcttgtaattccagcaccctcggcggacaggggagatggattatttag

SEQ ID NO: 290951 - DNA, 2690 bp, Artificial Sequence
  derived and/or modified sequence
ttccgggttgggagaaaggtggcggcgctttcggagggaataaaatggaaggagaatcaagcagatttgaaatccacactccagtttctgacaagaaaaagaaaaagtgttctatacataaggaaagacctcagaaacattcccacgaaattttcagagactcctccctggtgaatgaacagtctcaaataactaggaggaaaaagaggaaaaaagatttccagcatctcatttcttctcctttgaaaaaatccagaatctgtgatgagactgcaaatgccacttccacactcaaaaagagaaaaaagagaagatatagtgctttggaggtggacgaggaagcaggtgttacagttgtccttgtggataaagaaaatattaacaacacaccaaagcattttagaaaggatgttgatgttgtttgtgttgatatgagcatagaacagaagttaccaagaaagcctaaaacagacaaatttcaggtacttgctaagtcacatgcacataaatcagaagccctgcacagtaaagttagggagaaaaagaataaaaagcatcagaggaaagctgcatcctgggagagccagcgggcaagggacaccctgcctcagtcagaatcccaccaggaggagtcctggctttctgtgggtccagggggtgaaattacagaactaccagcatctgctcataaaaacaagtctaagaaaaaaaagaaaaagtccagtaaccgggaatatgagacactggccatgcctgaaggatcgcaagcaggcagagaggccgggactgatatgcaggaatcccagcctactgtgggcttggatgatgaaactccacaactactaggacctactcacaaaaaaaagtctaagaaaaaaaagaagaaaaagtccaatcaccaggaatttgaggcattggccatgcctgaaggatcacaagtgggcagtgaggttggggctgatatgcaggaatcccggcctgctgtgggcctgcatggtgaaactgcaggaataccagcacctgcttataaaaacaagtctaagaaaaaaaagaaaaagtccaatcaccaggaatttgaggcagtggccatgcctgagagcctcgagagtgcataccctgaaggatcacaggtgggcagtgaggttgggactgtggaaggcagtacagctcttaaagggttcaaggaatccaacagtacaaagaagaagtctaagaaaaggaagcttacgtctgtcaaaagggcacgagtgtctggtgatgatttttcagtgcccagtaagaactctgagagcacactctttgattcagtagaaggtgatggcgccatgatggaagaaggtgtgaaatctaggccccgacaaaagaaaacccaggcctgtttggcaagcaagcacgtgcaagaggcgccaaggttagaacctgcaaatgaagaacacaatgtggaaacagctgaagattccgaaataagatacttatctgcagattcaggagatgccgatgattcagatgcggatttgggttctgccgtgaaacagcttcaggagttcattcctaacatcaaggacagggccaccagcacaatcaagcggatgtaccgggacgacttggaacggtttaaggaatttaaagcacaaggtgtcgctattaaatttggcaagttttctgtaaaggaaaataagcagttagagaaaaatgtggaagactttctagccctgacaggcattgagagtgcagacaagctgctgtacacggacagatatcctgaggaaaaatctgtgatcaccaacttaaaaaggagatactcgtttagattacacattggtaggaacattgcccggccctggaaacttatatactatcgagcaaagaagatgttcgatgtcaacaattacaaaggcaggtatagcgaaggagatactgagaagttaaagatgtaccattctctccttgggaatgactggaagacgattggtgagatggtggcccgaagtagcctctccgtggccctcaagttctcacagatcagcagtcaaagaaatcgtggtgcttggagtaagtctgaaacccggaaactaatcaaggctgtcgaagaagtgattctgaagaagatgtctccccaggagttaaaagaggtggattccaaactccaagaaaatcctgaaagttgcctatcaattgttcgggaaaaactctacaagggcatatcttgggtagaagtagaagctaaagtgcaaaccagaaattggatgcagtgtaaaagtaagtggacagaaattctaaccaagaggatgactaatggtcggcgtatctactatggcatgaatgccctgcgggccaaggtcagccttattgaaaggttgtatgaaataaatgtggaagatactaatgaaatagactgggaagatcttgctagtgccataggtgatgttcctccatcttacgttcaaactaaattttctaggctgaaagctgtctatgttccattttggcagaaaaagacttttccagagatcatcgactacctttatgagacgactctacctttgctgaaggaaaagttagaaaaaatgatggagaaaaaaggcactaaaatccagactcctgcagcacccaagcaagttttcccatttcgagacatcttttattatgaagacgatagtgaaggaggacatagaaaaagaaagcgaagg

SEQ ID NO: 290952 - DNA, 3052 bp, Artificial Sequence
  derived and/or modified sequence
gggttgggagaaaggtggcggcgctttcggagggaataaaatggaaggagaatcaagcagatttgaaatccacactccagtttctgacaagaaaaagaaaaagtgttctatacataaggaaagacctcagaaacattcccacgaaattttcagagactcctccctggtgaatgaacagtctcaaataactaggaggaaaaagaggaaaaaagatttccagcatctcatttcttctcctttgaaaaaatccagaatctgtgatgagactgcaaatgccacttccacactcaaaaagagaaaaaagagaagatatagtgctttggaggtggacgaggaagcaggtgttacagttgtccttgtggataaagaaaatattaacaacacaccaaagcattttagaaaggatgttgatgttgtttgtgttgatatgagcatagaacagaagttaccaagaaagcctaaaacagacaaatttcaggtacttgctaagtcacatgcacataaatcagaagccctgcacagtaaagttagggagaaaaagaataaaaagcatcagaggaaagctgcatcctgggagagccagcgggcaagggacaccctgcctcagtcagaatcccaccaggaggagtcctggctttctgtgggtccagggggtgaaattacagaactaccagcatctgctcataaaaacaagtctaagaaaaaaaagaaaaagtccagtaaccgggaatatgagacactggccatgcctgaaggatcgcaagcaggcagagaggccgggactgatatgcaggaatcccagcctactgtgggcttggatgatgaaactccacaactactaggacctactcacaaaaaaaagtctaagaaaaaaaagaagaaaaagtccaatcaccaggaatttgaggcattggccatgcctgaaggatcacaagtgggcagtgaggttggggctgatatgcaggaatcccggcctgctgtgggcctgcatggtgaaactgcaggaataccagcacctgcttataaaaacaagtctaagaaaaaaaagaaaaagtccaatcaccaggaatttgaggcagtggccatgcctgagagcctcgagagtgcataccctgaaggatcacaggtgggcagtgaggttgggactgtggaaggcagtacagctcttaaagggttcaaggaatccaacagtacaaagaagaagtctaagaaaaggaagcttacgtctgtcaaaagggcacgagtgtctggtgatgatttttcagtgcccagtaagaactctgagagcacactctttgattcagtagaaggtgatggcgccatgatggaagaaggtgtgaaatctaggccccgacaaaagaaaacccaggcctgtttggcaagcaagcacgtgcaagaggcgccaaggttagaacctgcaaatgaagaacacaatgtggaaacagctgaagattccgaaataagatacttatctgcagattcaggagatgccgatgattcagatgcggatttgggttctgccgtgaaacagcttcaggagttcattcctaacatcaaggacagggccaccagcacaatcaagcggatgtaccgggacgacttggaacggtttaaggaatttaaagcacaaggtgtcgctattaaatttggcaagttttctgtaaaggaaaataagcagttagagaaaaatgtggaagactttctagccctgacaggcattgagagtgcagacaagctgctgtacacggacagatatcctgaggaaaaatctgtgatcaccaacttaaaaaggagatactcgtttagattacacattggtaggaacattgcccggccctggaaacttatatactatcgagcaaagaagatgttcgatgtcaacaattacaaaggcaggtatagcgaaggagatactgagaagttaaagatgtaccattctctccttgggaatgactggaagacgattggtgagatggtggcccgaagtagcctctccgtggccctcaagttctcacagatcagcagtcaaagaaatcgtggtgcttggagtaagtctgaaacccggaaactaatcaaggctgtcgaagaagtgattctgaagaagatgtctccccaggagttaaaagaggtggattccaaactccaagaaaatcctgaaagttgcctatcaattgttcgggaaaaactctacaagggcatatcttgggtagaagtagaagctaaagtgcaaaccagaaattggatgcagtgtaaaagtaagtggacagaaattctaaccaagaggatgactaatggtcggcgtatctactatggcatgaatgccctgcgggccaaggtcagccttattgaaaggttgtatgaaataaatgtggaagatactaatgaaatagactgggaagatcttgctagtgccataggtgatgttcctccatcttacgttcaaactaaattttctaggctgaaagctgtctatgttccattttggcagaaaaagacttttccagagatcatcgactacctttatgagacgactctacctttgctgaaggaaaagttagaaaaaatgatggagaaaaaaggcactaaaatccagactcctgcagcacccaagcaagttttcccatttcgagacatcttttattatgaagacgatagtgaaggagaggacatagaaaaagaaagcgaaggccaggcgccatgcatggctcacgcctgtaattccagtactttgggaggccaaggccggtggatcatctgaggtcaggagttcgagaccggcctgaccaacatggtgaagacctgtcactattaaaaatgcaaaaattagccgggtgtggtagtgcacacctgtaatttcaactacttgggaggctgaggcaggagaattgcttgaacccaggaggtggaggttgcagtgagccaagatcgcaccaccgcatgagagagagagattactatttcttgtccctttttctcagtttgattatatttatatacatatgtcagtaaatctgttttcagtattgatgtttaataaagaatgtacaatggc

SEQ ID NO: 290953 - protein, 781 aa, Artificial Sequence
  derived and/or modified sequence
MVRVLRSMCLPQLCSHILSVCSGTTSDRNVYSVPGSQYLYNQPSCYRGFQTVKHRNENTCPLPQEMKALFKKKTYDEKKTYDQQKFDSERADGTISSEIKSARGSHHLSIYAENSLKSDGYHKRTDRKSRIIAKNVSTSKPEFEFTTLDFPELQGAENNMSEIQKQPKWGPVHSVSTDISLLREVVKPAAVLSKGEIVVKNNPNESVTANAATNSPSCTRELSWTPMGYVVRQTLSTELSAAPKNVTSMINLKTIASSADPKNVSIPSSEALSSDPSYNKEKHIIHPTQKSKASQGSDLEQNEASRKNKKKKEKSTSKYEVLTVQEPPRIEDAEEFPNLAVASERRDRIETPKFQSKQQPQDNFKNNVKKSQLPVQLDLGGMLTALEKKQHSQHAKQSSKPVVVSVGAVPVLSKECASGERGRRMSQMKTPHNPLDSSAPLMKKGKQREIPKAKKPTSLKKIILKERQERKQRLQENAVSPAFTSDDTQDGESGGDDQFPEQAELSGPEGMDELISTPSVEDKSEEPPGTELQRDTEASHLAPNHTTFPKIHSRRFRDYCSQMLSKEVDACVTDLLKELVRFQDRMYQKDPVKAKTKRRLVLGLREVLKHLKLKKLKCVIISPNCEKIQSKGGLDDTLHTIIDYACEQNIPFVFALNRKALGRSLNKAVPVSVVGIFSYDGAQDQFHKMVELTVAARQAYKTMLENVQQELVGEPRPQAPPSLPTQGPSCPAEDGPPALKEKEEPHYIEIWKKHLEAYSGCTLELEESLEASTSQMMNLNL

SEQ ID NO: 290954 - DNA, 2346 bp, Artificial Sequence
  derived and/or modified sequence
atggttcgagtgcttaggtccatgtgtctaccgcagctctgctctcacatcctgtcagtctgcagcggcactacttccgatcgaaacgtttattcagtgccaggatcacagtacctgtacaaccaaccttcgtgttaccgcgggttccagactgtgaaacacaggaacgagaatacatgccccttgcctcaggaaatgaaggctttattcaagaaaaagacttatgatgaaaagaagacctacgatcaacagaagttcgattccgagcgggcggacgggacaataagctccgagattaaaagcgctcgcgggtctcaccacctttctatttacgcagagaattccctaaagtctgacggataccacaaacgcaccgataggaaatcaagaataatagcgaaaaacgttagtacatctaaacctgaattcgaattcacaacacttgacttccctgagcttcagggggctgaaaacaacatgagtgagattcagaaacaacccaagtggggacctgtgcattctgtgagcaccgacatttctctccttagggaggtggtcaagccagccgccgtactctcaaagggggagatcgtcgtgaagaacaacccaaacgaatccgtaaccgccaatgctgctactaactccccatcatgtactcgtgagctctcctggacacccatgggctatgttgttagacagacactaagcacagaattaagtgccgcccctaagaatgtcacatcaatgattaacctcaagaccatcgccagttctgccgatcctaagaatgtttctatacctagttccgaggcactaagtagcgacccttcctacaacaaagaaaaacatatcatccacccgactcagaagtcaaaggcgtcccagggtagcgatctggaacagaacgaagcgagccggaaaaacaagaagaagaaggaaaaatctacatcaaaatacgaggttctaacagtgcaggagcccccacgcatcgaagacgcagaagaatttcccaacttggccgtggccagcgagagacgcgatcgtatcgagactccaaagttccagagcaaacaacagccacaagataatttcaaaaataatgtgaagaagtcccagcttccagtccaactggatttaggtgggatgctgacggctctagagaagaagcaacatagccagcatgcaaagcagagttccaaacccgtcgtcgtgtctgttggtgcggttccagtcctgtcaaaagagtgcgccagcggcgaacgcggccggcgcatgtcacagatgaagaccccacataacccgctggacagctcagcaccattaatgaagaagggaaaacagcgtgagatacccaaggcgaagaaacctactagtctcaagaaaattatacttaaagagagacaagagagaaagcaacgactgcaggaaaacgccgtttcacctgcttttaccagtgatgatacacaagatggcgaatccgggggagacgatcagttcccggagcaagccgaactgtctgggccagaaggcatggacgagctcatctccaccccttcggtcgaggacaaatctgaagagccacctggcacagaactgcagcgcgatactgaggcgagccatctcgcaccgaaccacactactttccccaagatccattctagaagatttcgggactattgcagccaaatgttgagtaaggaagtcgatgcctgcgttactgacctcctgaaggaactggtgagattccaggaccgcatgtatcagaaagacccggtgaaggccaagaccaaacggagattggtcttgggtttgagagaagtgctcaaacacttaaaactgaagaagctgaagtgcgtcatcatcagtcctaattgtgaaaaaatccaatccaaaggaggcttagatgataccctccataccatcattgattacgcctgcgagcaaaatattccatttgtgttcgctctcaatcgcaaggcgctagggcgttcactcaacaaagccgtgccggtgtcggtggtgggcatcttttcctatgacggtgcccaggaccagtttcacaaaatggtggaactcaccgtagcagctcgccaggcttataaaacaatgcttgagaacgtgcagcaggagctggtcggcgagccacggccccaggcgcctccatccctccctacccaaggcccgagctgtcccgcggaagacggtccacccgcactgaaggaaaaggaggaacctcactatatagaaatctggaagaagcacctggaggcatattccgggtgtacacttgaactggaagaatccctggaggcctctacaagtcagatgatgaacctcaacctgtag

SEQ ID NO: 290955 - DNA, 2346 bp, Artificial Sequence
  derived and/or modified sequence
atggtgcgggtgctgcgctccatgtgcctgccccagctgtgcagccacatcctgtctgtgtgcagcggcaccaccagtgacagaaatgtgtacagcgtgcccggcagccagtacctgtacaaccagcccagctgctaccggggcttccagacagtgaagcacagaaatgaaaacacctgccccctgccccaggagatgaaggccctcttcaagaagaagacctatgatgagaagaagacctatgaccagcagaagtttgacagcgagcgggcagatggcaccatcagcagcgagatcaagagcgcccggggcagccaccacctgagcatctatgcagagaacagcctgaagagtgatggctaccacaagaggacagacaggaagagccgcatcatcgccaagaatgtgtccaccagcaagccagagtttgagttcaccaccctggacttccctgagctgcagggcgctgagaacaacatgtctgagatccagaagcagcccaagtggggccctgtgcacagcgtgtccacagacatcagcctgctgcgggaggtggtgaagccagctgctgtgctgagcaagggggagatcgtggtgaagaacaaccccaatgaatctgtgacagccaatgctgccaccaacagccccagctgcacccgggagctgtcctggacccccatgggctacgtggtgcggcagaccctgagcacagagctgtctgctgcccccaagaatgtgacctccatgatcaacctgaagaccatcgccagcagcgctgaccccaagaatgtgtccatccccagcagcgaggccctgagcagtgaccccagctacaacaaggagaagcacatcatccaccccacccagaagagcaaggccagccagggcagtgacctggagcagaatgaggccagcaggaagaacaagaagaagaaggagaagagcaccagcaaatatgaggtgctgactgtgcaggagcccccaagaattgaagatgctgaggagttccccaacctggccgtggccagcgagcggcgggacagaattgagacccccaagttccagagcaagcagcagccccaggacaacttcaagaacaacgtgaagaagagccagctgcctgtgcagctggacctgggcggcatgctgacagccctggagaagaagcagcacagccagcacgccaagcagagcagcaagcctgtggtggtgtctgtgggcgctgtgcctgtgctgagcaaagaatgtgccagcggggagcggggccgcaggatgagccagatgaagaccccccacaaccccctggacagcagcgcccccctgatgaagaagggcaagcagcgggagatccccaaggccaagaagcccaccagcctgaagaagatcatcctgaaggagcggcaggagaggaagcagaggctgcaggagaatgctgtgtccccagccttcaccagtgatgacacccaggatggagagagcggaggagatgaccagtttcctgagcaggccgagctgagcggccctgagggcatggatgagctgatcagcaccccatctgtggaggacaagtctgaggagcccccaggcacagagctgcagagggacacagaggccagccacctggcccccaaccacaccaccttccccaagatccacagccgccgcttccgggactactgcagccagatgctgagcaaggaggtggatgcctgtgtgacagacctgctgaaggagctggtgcgcttccaggacaggatgtaccagaaggaccctgtgaaggccaagaccaagaggcggctggtgctgggcctgcgggaggtgctgaagcacctgaagctgaagaagctgaagtgtgtgatcatcagccccaactgtgagaagatccagagcaaaggaggcctggatgacaccctgcacaccatcatcgactatgcctgtgagcagaacatcccctttgtgtttgccctgaacaggaaggccctgggccgcagcctgaacaaggctgtgcctgtgtctgtggtgggcatcttctcctatgatggagcccaggaccagttccacaagatggtggagctgactgtggccgcccggcaggcctacaagaccatgctggagaatgtgcagcaggagctggtgggggagccccggccccaggccccacccagcctgcccacccagggccccagctgcccagcagaagatggccccccagccctgaaggagaaggaggagccccactacatcgagatctggaagaagcacctggaggcctacagcggctgcaccctggagctggaggagagcctggaggccagcaccagccagatgatgaacctgaacctgtag

SEQ ID NO: 290956 - DNA, 2346 bp, Artificial Sequence
  derived and/or modified sequence
atggtgcgggtgctgcggagcatgtgcctgccccagctgtgcagccatatcctcagtgtttgtagtggtactacttccgacagaaatgtatacagcgtacctggcagccaatacctctataaccagccttcatgttatcgcggcttccagacagttaagcataggaatgagaatacatgtccgcttccccaggaaatgaaagccctgtttaagaagaagacctacgacgaaaaaaaaacttacgaccagcaaaaattcgattctgaacgagccgacggaacaattagttccgaaataaagagcgcaagaggcagccatcatctctctatctacgcagagaacagtttgaagtcagacggctatcacaagcgtaccgataggaagagccgaataatcgccaagaatgtctcaacctccaagcctgagtttgagttcacaactctggacttccctgagctgcagggggctgaaaacaatatgtctgaaatccagaagcagcctaagtgggggccagtccatagtgtgtccactgatatctcattattgcgggaagtcgtcaaacccgctgcagtactgtccaagggggaaattgtggttaagaacaaccccaatgaatccgtgacggcgaatgccgcaaccaatagccctagctgcactcgcgagctctcatggactcccatgggatatgtggtgagacagactctgagcactgaactgtccgccgcaccaaagaatgttaccagcatgataaatctcaaaacaatagcctcatctgccgaccccaagaacgttagcattccctcctccgaagcgctttcttcagatcctagttacaataaggaaaagcatatcatccaccccactcaaaagtcaaaagcatctcaaggtagcgatcttgaacagaatgaggcctcacgtaagaacaagaagaagaaggagaagagtactagcaagtacgaagtcttgacagtgcaggagcctcccaggatcgaggacgccgaggaatttcctaacctcgctgtggctagcgagaggcgagacaggattgaaacccccaagttccagtccaaacaacagccacaggataattttaagaataacgtgaaaaaatctcagcttcccgtccaactggacctcgggggcatgctaactgctttagaaaagaaacaacacagtcagcacgctaaacagagctctaagcccgtggtggtgtccgtgggcgctgttccagttctgagtaaagagtgtgcatctggagaacggggtcgtcgcatgtcacagatgaaaactccccataacccccttgatagtagcgcccccctcatgaagaaggggaagcagcgggagatccccaaggctaagaagcccacctcactgaaaaagatcatcctgaaggagaggcaagagcgcaagcagcgcctacaggagaatgcggttagccccgcctttacatccgatgacacccaagacggcgaatccgggggggacgatcagttccccgagcaggcagaactgtcagggcccgaggggatggatgagctcatctccactccatcggtcgaggataaaagtgaggagccgcctgggactgagctgcagcgcgacaccgaagcaagccacctcgctcctaaccatacgacttttccaaagatccacagccggcgatttcgcgattactgcagtcagatgctgtccaaggaggtcgacgcatgcgtcaccgacctgcttaaagaattggtgaggttccaggatagaatgtatcagaaggatcctgtaaaagctaagacaaaacgaaggttagtgctcggcctcagagaggtgttgaagcatctcaaactgaagaaactgaagtgcgtgatcatatcacccaactgtgaaaaaatccagagtaagggggggctagacgacactctgcataccataatcgattatgcttgtgagcagaacatcccattcgtcttcgctctgaacaggaaggccctggggcgcagcctgaacaaggctgtacctgtttctgtagtcggcatcttcagctatgacggcgcccaggatcaatttcataagatggttgaactcacagtggcggcgaggcaggcctacaagaccatgctcgagaacgttcaacaggagctggtgggagagccacgccctcaagcacctcccagcctgcccacgcagggccctagctgccccgccgaggacgggccccccgccttgaaggagaaggaggaacctcactatatcgaaatttggaaaaaacatctggaagcatactcagggtgcaccctggagctcgaggaaagcctcgaggcctcgacatcccagatgatgaacttaaacttgtag

SEQ ID NO: 290957 - DNA, 2346 bp, Artificial Sequence
  derived and/or modified sequence
atggtccgcgtgcttcgtagcatgtgtctcccacagctctgctctcacattctctccgtgtgctcagggaccaccagcgaccggaatgtctactctgtcccagggagccagtatctctacaatcagccttcctgttacagggggttccagaccgtcaagcatagaaatgagaatacatgtcctctgcctcaggagatgaaggccctattcaaaaaaaagacctacgatgaaaagaaaacgtacgaccagcagaagttcgacagcgagagagctgatgggaccatcagctccgagatcaagtccgcgcgtggatcccaccatctgagcatatacgccgagaactctctcaaaagcgatgggtaccacaaaagaactgatagaaaatcaaggatcattgccaaaaacgttagcacctcaaaaccagagtttgagtttaccacattagacttccccgagctacagggagctgaaaacaatatgtctgaaatacaaaagcaacctaagtggggacctgtacacagcgtgtcaacagacatctcgctcctccgggaggtggtgaagcctgctgccgttctcagcaaaggggagatcgtggttaagaacaacccaaacgagtccgtgacagccaatgcagccacaaacagtccctcctgcaccagggagctgtcatggacccccatgggctatgtggtacgccaaactctctccacagaactgtcagctgccccaaagaatgttacaagtatgattaatttgaaaacaattgctagctccgccgatccaaagaacgtgtccataccttcctcagaagccctctcctctgacccttcctacaataaagagaaacacataatccatccaactcaaaaatcaaaggcctcccagggatccgacctggagcagaacgaggcctcacggaagaacaagaagaaaaaagagaagagcacaagcaaatacgaggtgctaaccgtccaggagcctccaagaattgaagatgccgaggagttcccaaatctggcagttgcctccgagcgtcgcgatcgcattgagacacctaagtttcaatcaaaacagcagccgcaggacaatttcaaaaataacgtcaagaagtcgcagctgccggttcagctggacttgggcggaatgctcaccgccctggagaagaaacagcatagccagcatgccaagcaatcctctaaacccgtcgtggtctccgttggagcggtgcccgtgctgagcaaagagtgtgcctcaggtgagagaggtcggcgtatgtcgcagatgaaaacaccccacaacccgcttgatagctccgcccctctgatgaaaaaaggcaagcagcgagaaatccctaaggcaaaaaagcccacaagccttaaaaaaatcattttaaaagagaggcaggagcgaaagcagcggctccaggagaatgcagtaagtcctgcatttacctcagacgacacacaggatggggagtcaggcggagacgaccaattccctgaacaggcagagctgagtggaccggaaggcatggatgaactgatcagcactcccagcgtcgaggacaagtccgaagagccccctggaacggaacttcagcgcgacaccgaggcctctcacctggccccaaaccatacaacattccccaaaattcatagccgacgatttcgggactactgtagccagatgttgagcaaggaagtcgacgcttgtgtgactgatctgctaaaggagctcgtccggtttcaggatcggatgtaccagaaggatcctgtgaaggccaagaccaagcggcgactggtgctcggactgagagaagttttaaagcatctgaaactgaaaaagctcaagtgcgtgatcattagcccgaactgtgagaagatccagtcaaaagggggtttagacgacacactccatacaattattgactacgcctgcgagcagaacatcccctttgtgttcgccttgaaccgaaaagccctgggacgcagcctgaacaaagctgttccagtatctgtcgtagggattttctcttacgatggggctcaggaccagttccataagatggtggagctgaccgtggccgcacgccaggcctacaagacgatgcttgagaatgtgcaacaggagctggtgggcgagccccgaccccaagcccctccgagcctgccgactcaaggcccatcctgcccggctgaagatggaccacccgcactcaaagaaaaggaagagcctcactatattgagatctggaaaaaacatcttgaagcctactcaggatgcacattggagcttgaagaatcactggaagcgagcactagtcagatgatgaacttgaatctctag

SEQ ID NO: 290958 - DNA, 3320 bp, Artificial Sequence
  derived and/or modified sequence
ggcaagccgacggcccgctgctggcctccgtgacgcggcctcctccgcgcctcgcggcatggcgtcggaggggccgcgggagcccgaaagcgagggcatcaagttatcagcagatgtcaaaccatttgtccccagatttgccgggctcaatgtggcatggttagagtcctcagaagcatgtgtcttccccagctctgcagccacatactatccgtttgttcaggaaccaccagtgacagaaatgtttactcagtgcctggctcccagtatctttataaccaacccagttgttaccgaggttttcaaacagtgaagcatcgaaatgagaacacatgccctctcccacaagaaatgaaagctctgtttaagaagaaaacctatgatgagaaaaaaacgtatgatcagcaaaagtttgacagtgaaagggctgatggaactatatcatctgagataaaatcagctagaggttcacatcatttgtccatttacgctgagaatagtttgaaatcagatggttaccataagcgaacagacaggaaatccagaatcattgcaaaaaatgtatctacctccaaacctgagtttgaatttaccacactggactttcctgaactgcaaggtgcagagaacaatatgtcagagatacagaagcaacccaagtggggacctgtccactctgtctctaccgacatttctcttctaagagaagtagtaaaaccagctgcagtgttatcaaagggtgaaatagtggtgaaaaataacccaaatgaatctgtaactgctaatgccgctaccaattctccttcatgtacaagagagttatcttggacaccaatgggttatgttgttcgacagacattatctacagaactgtcagcagcccctaaaaatgttacttctatgataaacttaaagaccattgcttcatcagcagatcctaaaaatgttagtataccatcttctgaagctttatcttcggatccttcctacaacaaagaaaaacacattattcatcctacccaaaagtctaaagcatcacaaggtagtgaccttgaacaaaatgaagcctcaagaaagaataagaaaaagaaagaaaaatctacatcaaaatatgaagtcctgacagttcaagagcctccaaggattgaagatgccgaggaatttcccaacctggcagttgcatctgaaagaagagacagaatagagacaccgaaatttcaatctaagcagcagccacaggataattttaaaaataatgtaaagaagagccagcttccagtgcagttggacttggggggcatgctgacagccctggagaagaagcagcactctcagcatgcaaagcagtcctccaaaccagtggtagtctcagttggagcagtgccagtcctttccaaagaatgtgcatcaggggagagaggccgccgcatgagtcaaatgaagaccccgcacaatcccttggactccagcgccccactgatgaagaaagggaagcagagggagatccccaaggccaagaagccaacctcactgaagaagattattttgaaagaacggcaagagagaaagcagcgtctccaagaaaatgctgtgagtccagcttttaccagtgatgacacacaagatggagagagtggtggtgatgaccagtttcccgagcaggcagagctgtcagggccagaggggatggacgaactgatctccactccttcggttgaggacaagtctgaagagccaccaggcacagagctccagagggacacagaggcctcccaccttgctcccaatcacaccaccttccctaagatccacagccgcagattcagggattactgcagccagatgcttagtaaagaagtggatgcttgtgttaccgacctactcaaagaactggtccgtttccaagaccgtatgtaccagaaagatccagtcaaggccaagactaaacgtcgacttgtgttggggttgagggaggttctcaaacacctgaagctcaaaaaactgaaatgtgtcattatttctcccaactgtgagaagatacagtcaaaaggtgggctggatgacactttgcacacaattattgattatgcctgtgagcagaacattccctttgtgtttgctctcaaccgcaaagctctggggcgcagtttgaataaggcagttcctgtcagtgtggtggggatcttcagctatgatggggcccaggatcagttccacaagatggttgagctgacagtggcggcccgacaggcgtacaagaccatgctggagaatgtgcagcaggagctggtgggagagcccaggcctcaggcacctcccagcctacccacacagggccccagctgccctgcagaagatggccccccagccctgaaagaaaaagaagagccacactacattgaaatctggaaaaaacatctggaagcatacagtggatgtaccctggagctagaagaatccttggaggcttcaacctctcaaatgatgaatttgaatttatgagagttcttgcctgtgtgtctgtattttgggtaaggaggggaggtctgaaaaagactttggggctttttcttctgtttttcatgacaatgtaatttgtgtaactgttgaatctggaaattgatcagcattaaagggcacatgaagcagtgtctgcaggcgttcagtgctgcggagcctgttaaaggtcactcagatgtgcaggtgttaatcttctctaaaagcctggtgatacagctctggctttctgagcacactacggatctggaaaatactggaaaatgtgatacttagaatactttggctgctaaggaaacttcctctccattgcagaatagctgagccaagtgagtgagtttgcagaaagcaggtggtgagctcctgcctgctggaggttgccatggagggccattcctgcccggcaacagcaccgtcctgcagggagccacttggcagaagggtgcagggctgctggtgtcagagcaagagggctacagggaaagggccctttctcaggggatgtagcttttttaaaagatttgggaacacttggaggatttgctaaaatgagcctcagaaggaaaattggttttctaacctgtgactttttgaaatgaattattcctttcagtctttatttttcaaagaaacaatgtgtattgaagtacctagatttgtttgataatcaacaaatctttcctttttcaatgaacatattctgaatgtggtttctgtcttagaccaggaggacagagtttgctttcatattttccctgtaagtaagagggcttatttattttaaataaagagtaattattaaa

SEQ ID NO: 290959 - DNA, 2346 bp, Artificial Sequence
  derived and/or modified sequence
atggtgagagtgctgagaagcatgtgcctgccccagctgtgcagccacatcctgagcgtgtgcagcggcaccaccagcgacagaaacgtgtacagcgtgcccggcagccagtacctgtacaaccagcccagctgctacagaggcttccagaccgtgaagcacagaaacgagaacacctgccccctgccccaggagatgaaggccctgttcaagaagaagacctacgacgagaagaagacctacgaccagcagaagttcgacagcgagagagccgacggcaccatcagcagcgagatcaagagcgccagaggcagccaccacctgagcatctacgccgagaacagcctgaagagcgacggctaccacaagagaaccgacagaaagagcagaatcatcgccaagaacgtgagcaccagcaagcccgagttcgagttcaccaccctggacttccccgagctgcagggcgccgagaacaacatgagcgagatccagaagcagcccaagtggggccccgtgcacagcgtgagcaccgacatcagcctgctgagagaggtggtgaagcccgccgccgtgctgagcaagggcgagatcgtggtgaagaacaaccccaacgagagcgtgaccgccaacgccgccaccaacagccccagctgcaccagagagctgagctggacccccatgggctacgtggtgagacagaccctgagcaccgagctgagcgccgcccccaagaacgtgaccagcatgatcaacctgaagaccatcgccagcagcgccgaccccaagaacgtgagcatccccagcagcgaggccctgagcagcgaccccagctacaacaaggagaagcacatcatccaccccacccagaagagcaaggccagccagggcagcgacctggagcagaacgaggccagcagaaagaacaagaagaagaaggagaagagcaccagcaagtacgaggtgctgaccgtgcaggagccccccagaatcgaggacgccgaggagttccccaacctggccgtggccagcgagagaagagacagaatcgagacccccaagttccagagcaagcagcagccccaggacaacttcaagaacaacgtgaagaagagccagctgcccgtgcagctggacctgggcggcatgctgaccgccctggagaagaagcagcacagccagcacgccaagcagagcagcaagcccgtggtggtgagcgtgggcgccgtgcccgtgctgagcaaggagtgcgccagcggcgagagaggcagaagaatgagccagatgaagaccccccacaaccccctggacagcagcgcccccctgatgaagaagggcaagcagagagagatccccaaggccaagaagcccaccagcctgaagaagatcatcctgaaggagagacaggagagaaagcagagactgcaggagaacgccgtgagccccgccttcaccagcgacgacacccaggacggcgagagcggcggcgacgaccagttccccgagcaggccgagctgagcggccccgagggcatggacgagctgatcagcacccccagcgtggaggacaagagcgaggagccccccggcaccgagctgcagagagacaccgaggccagccacctggcccccaaccacaccaccttccccaagatccacagcagaagattcagagactactgcagccagatgctgagcaaggaggtggacgcctgcgtgaccgacctgctgaaggagctggtgagattccaggacagaatgtaccagaaggaccccgtgaaggccaagaccaagagaagactggtgctgggcctgagagaggtgctgaagcacctgaagctgaagaagctgaagtgcgtgatcatcagccccaactgcgagaagatccagagcaagggcggcctggacgacaccctgcacaccatcatcgactacgcctgcgagcagaacatccccttcgtgttcgccctgaacagaaaggccctgggcagaagcctgaacaaggccgtgcccgtgagcgtggtgggcatcttcagctacgacggcgcccaggaccagttccacaagatggtggagctgaccgtggccgccagacaggcctacaagaccatgctggagaacgtgcagcaggagctggtgggcgagcccagaccccaggccccccccagcctgcccacccagggccccagctgccccgccgaggacggcccccccgccctgaaggagaaggaggagccccactacatcgagatctggaagaagcacctggaggcctacagcggctgcaccctggagctggaggagagcctggaggccagcaccagccagatgatgaacctgaacctgtag

SEQ ID NO: 290960 - protein, 784 aa, Artificial Sequence
  derived and/or modified sequence
MGNEHISVHPENSDCIQADVNSDDYKGDKVYHPETGRKNEKEKVGRKGKHLLTVDQKRGEHVVCGSTRNNESESTLDLEGFQNPTAKECEGLATLDNKADLDGESTEGTEELEDSLNHFTHSVQGQTSEMIPSDEEEEDDEEEEEEEEPRLTINQREDEDGMANEDELDNTYTGSGDEDALSEEDDELGEAAKYEDVKECGKHVERALLVELNKISLKEENVCEEKNSPVDQSDFFYEFSKLIFTKGKSPTVVCSLCKREGHLKKDCPEDFKRIQLEPLPPLTPKFLNILDQVCIQCYKDFSPTIIEDQAREHIRQNLESFIRQDFPGTKLSLFGSSKNGFGFKQSDLDVCMTINGLETAEGLDCVRTIEELARVLRKHSGLRNILPITTAKVPIVKFFHLRSGLEVDISLYNTLALHNTRLLSAYSAIDPRVKYLCYTMKVFTKMCDIGDASRGSLSSYAYTLMVLYFLQQRNPPVIPVLQEIYKGEKKPEIFVDGWNIYFFDQIDELPTYWSECGKNTESVGQLWLGLLRFYTEEFDFKEHVISIRRKSLLTTFKKQWTSKYIVIEDPFDLNHNLGAGLSRKMTNFIMKAFINGRRVFGIPVKGFPKDYPSKMEYFFDPDVLTEGELAPNDRCCRICGKIGHFMKDCPMRRKVRRRRDQEDALNQRYPENKEKRSKEDKEIHNKYTEREVSTKEDKPIQCTPQKAKPMRAAADLGREKILRPPVEKWKRQDDKDLREKRCFICGREGHIKKECPQFKGSSGSLSSKYMTQGKASAKRTQQES

SEQ ID NO: 290961 - protein, 1457 aa, Artificial Sequence
  derived and/or modified sequence
MGDTAKPYFVKRTKDRGTMDDDDFRRGHPQQDYLIIDDHAKGHGSKMEKGLQKKKITPGNYGNTPRKGPCAVSSNPYAFKNPIYSQPAWMNDSHKDQSKRWLSDEHTGNSDNWREFKPGPRIPVINRQRKDSFQENEDGYRWQDTRGCRTVRRLFHKDLTSLETTSEMEAGSPENKKQRSRPRKPRKTRNEENEQDGDLEGPVIDESVLSTKELLGLQQAEERLKRDCIDRLKRRPRNYPTAKYTCRLCDVLIESIAFAHKHIKEKRHKKNIKEKQEEELLTTLPPPTPSQINAVGIAIDKVVQEFGLHNENLEQRLEIKRIMENVFQHKLPDCSLRLYGSSCSRLGFKNSDVNIDIQFPAIMSQPDVLLLVQECLKNSDSFIDVDADFHARVPVVVCREKQSGLLCKVSAGNENACLTTKHLTALGKLEPKLVPLVIAFRYWAKLCSIDRPEEGGLPPYVFALMAIFFLQQRKEPLLPVYLGSWIEGFSLSKLGNFNLQDIEKDVVIWEHTDSAAGDTGITKEEAPRETPIKRGQVSLILDVKHQPSVPVGQLWVELLRFYALEFNLADLVISIRVKELVSRELKDWPKKRIAIEDPYSVKRNVARTLNSQPVFEYILHCLRTTYKYFALPHKITKSSLLKPLNAITCISEHSKEVINHHPDVQTKDDKLKNSVLAQGPGATSSAANTCKVQPLTLKETAESFGSPPKEEMGNEHISVHPENSDCIQADVNSDDYKGDKVYHPETGRKNEKEKVGRKGKHLLTVDQKRGEHVVCGSTRNNESESTLDLEGFQNPTAKECEGLATLDNKADLDGESTEGTEELEDSLNHFTHSVQGQTSEMIPSDEEEEDDEEEEEEEEPRLTINQREDEDGMANEDELDNTYTGSGDEDALSEEDDELGEAAKYEDVKECGKHVERALLVELNKISLKEENVCEEKNSPVDQSDFFYEFSKLIFTKGKSPTVVCSLCKREGHLKKDCPEDFKRIQLEPLPPLTPKFLNILDQVCIQCYKDFSPTIIEDQAREHIRQNLESFIRQDFPGTKLSLFGSSKNGFGFKQSDLDVCMTINGLETAEGLDCVRTIEELARVLRKHSGLRNILPITTAKVPIVKFFHLRSGLEVDISLYNTLALHNTRLLSAYSAIDPRVKYLCYTMKVFTKIYKGEKKPEIFVDGWNIYFFDQIDELPTYWSECGKNTESVGQLWLGLLRFYTEEFDFKEHVISIRRKSLLTTFKKQWTSKYIVIEDPFDLNHNLGAGLSRKMTNFIMKAFINGRRVFGIPVKGFPKDYPSKMEYFFDPDVLTEGELAPNDRCCRICGKIGHFMKDCPMRRKVRRRRDQEDALNQRYPENKEKRSKEDKEIHNKYTEREVSTKEDKPIQCTPQKAKPMRAAADLGREKILRPPVEKWKRQDDKDLREKRCFICGREGHIKKECPQFKGSSGSLSSKYMTQGKASAKRTQQES

SEQ ID NO: 290962 - DNA, 387 bp, Artificial Sequence
  derived and/or modified sequence
atgaaacacaagtacaatactctgtcctggtacaaaaaggaaaggtctacacagctgcgccgatttatagtccatcagcctgaggttgggctgttttttttcctgagggatgtcgtatacaattatatcacggaaaaaaccacttgtcggtgccccctcacacaagaaaggccttgcgatacaggcggaaagttcggacggatctggatttgccagcccgaagaactggggaagatgcagatttggatatgccagcctgaggaactgggaaaaatgcagatcgacaaaaatcgcaccatggttcagcagatgtggtacatctggtacggaggccttgatacttctaccaatagcctgctgcctatcctggtgagaggaatggcatag

SEQ ID NO: 290963 - protein, 1153 aa, Artificial Sequence
  derived and/or modified sequence
MAADEGSAEKQAGEAHMAADGETNGSCENSDASSHANAAKHTQDSARVNPQDGTNTLTRIAENGVSERDSEAAKQNHVTADDFVQTSVIGSNGYILNKPALQAQPLRTTSTLASSLPGHAAKTLPGGAGKGRTPSAFPQTPAAPPATLGEGSADTEDRKLPAPGADVKVHRARKTMPKSVVGLHAASKDPREVREARDHKEPKEEINKNISDFGRQQLLPPFPSLHQSLPQNQCYMATTKSQTACLPFVLAAAVSRKKKRRMGTYSLVPKKKTKVLKQRTVIEMFKSITHSTVGSKGEKDLGASSLHVNGESLEMDSDEDDSEELEEDDGHGAEQAAAFPTEDSRTSKESMSEADRAQKMDGESEEEQESVDTGEEEEGGDESDLSSESSIKKKFLKRKGKTDSPWIKPARKRRRRSRKKPSGALGSESYKSSAGSAEQTAPGDSTGYMEVSLDSLDLRVKGILSSQAEGLANGPDVLETDGLQEVPLCSCRMETPKSREITTLANNQCMATESVDHELGRCTNSVVKYELMRPSNKAPLLVLCEDHRGRMVKHQCCPGCGYFCTAGNFMECQPESSISHRFHKDCASRVNNASYCPHCGEESSKAKEVTIAKADTTSTVTPVPGQEKGSALEGRADTTTGSAAGPPLSEDDKLQGAASHVPEGFDPTGPAGLGRPTPGLSQGPGKETLESALIALDSEKPKKLRFHPKQLYFSARQGELQKVLLMLVDGIDPNFKMEHQNKRSPLHAAAEAGHVDICHMLVQAGANIDTCSEDQRTPLMEAAENNHLEAVKYLIKAGALVDPKDAEGSTCLHLAAKKGHYEVVQYLLSNGQMDVNCQDDGGWTPMIWATEYKHVDLVKLLLSKGSDINIRDNEENICLHWAAFSGCVDIAEILLAAKCDLHAVNIHGDSPLHIAARENRYDCVVLFLSRDSDVTLKNKEGETPLQCASLNSQVWSALQMSKALQDSAPDRPSPVERIVSRDIARGYERIPIPCVNAVDSEPCPSNYKYVSQNCVTSPMNIDRNITHLQYCVCIDDCSSSNCMCGQLSMRCWYDKDGRLLPEFNMAEPPLIFECNHACSCWRNCRNRVVQNGLRARLQLYRTRDMGWGVRSLQDIPPGTFVCEYVGELISDSEADVREEDSYLFDLDNKVISA

SEQ ID NO: 290964 - DNA, 3589 bp, Artificial Sequence
  derived and/or modified sequence
gcgcgggaggggcggggccacgctgcgggcccgggccatggccgccgccgatgccgaggcagttccggcgaggggggagcctcagcaggattgctgtgtgaaaaccgagctgctgggagaagagacacctatggctgccgatgaaggctcagcagagaaacaggcaggagaggcccacatggctgcggacggtgagaccaatgggtcttgtgaaaacagcgatgccagcagtcatgcaaatgctgcaaagcacactcaggacagcgcaagggtcaacccccaggatggcaccaacacactaactcggatagcggaaaatggggtttcagaaagagactcagaagcggcgaagcaaaaccacgtcactgccgacgactttgtgcagacttctgtcatcggcagcaacggatacatcttaaataagccggccctacaggcacagcccttgaggactaccagcactctggcctcttcgctgcctggccatgctgcaaaaacccttcctggaggggctggcaaaggcaggactccaagcgcttttccccagacgccagccgccccaccagccacccttggggaggggagtgctgacacagaggacaggaagctcccggcccctggcgccgacgtcaaggtccacagggcacgcaagaccatgccgaagtccgtcgtgggcctgcatgcagccagtaaagatcccagagaagttcgagaagctagagatcataaggaaccaaaagaggagatcaacaaaaacatttctgactttggacgacagcagcttttaccccccttcccatcccttcatcagtcgctacctcagaaccagtgctacatggccaccacaaaatcacagacagcttgcttgccttttgttttagcagctgcagtatctcggaagaaaaaacgaagaatgggaacctatagcctggttcctaagaaaaagaccaaagtattaaaacagaggacggtgattgagatgtttaagagcataactcattccactgtgggttccaagggggagaaggacctgggcgccagcagcctgcacgtgaatggggagagcctggagatggactcggatgaggacgactcagaggagctcgaggaggacgacggccatggtgcagagcaggcggccgcgttccccacagaggacagcaggacttccaaggagagcatgtcggaggctgatcgcgcccagaagatggacggggagtccgaggaggagcaggagtccgtggacaccggggaggaggaggaaggcggtgacgagtctgacctgagttcggaatccagcattaagaagaaatttctcaagaggaaaggaaagaccgacagtccctggatcaagccagccaggaaaaggaggcggagaagtagaaagaagcccagcggtgccctcggttctgagtcgtataagtcatctgcaggaagcgctgagcagacggcaccaggagacagcacagggtacatggaagtttctctggactccctggatctccgagtcaaaggaattctgtcttcacaagcagaagggttggccaacggtccagatgtgctggagacagacggcctccaggaagtgcctctctgcagctgccggatggaaacaccgaagagtcgagagatcaccacactggccaacaaccagtgcatggctacagagagcgtggaccatgaattgggccggtgcacaaacagcgtggtcaagtatgagctgatgcgcccctccaacaaggccccgctcctcgtgctgtgtgaagaccaccggggccgcatggtgaagcaccagtgctgtcctggctgtggctacttctgcacagcgggtaattttatggagtgtcagcccgagagcagcatctctcaccgtttccacaaagactgtgcctctcgagtcaataacgccagctattgtccccactgtggggaggagagctccaaggccaaagaggtgacgatagctaaagcagacaccacctcgaccgtgacaccagtccccgggcaggagaagggctcggccctggagggcagggccgacaccacaacgggcagtgctgccgggccaccactctcggaggacgacaagctgcagggtgcagcctcccacgtgcccgagggctttgatccaacgggacctgctgggcttgggaggccaactcccggcctttcccagggaccagggaaggaaaccttggagagcgctctcatcgccctcgactcggaaaaacccaagaagcttcgcttccacccaaagcagctgtacttctccgccaggcaaggggagcttcagaaggtgctcctcatgctggtggacggaattgaccccaacttcaaaatggagcaccagaataagcgctctccactgcacgccgcggcagaggctggacacgtggacatctgccacatgctggttcaggcgggcgctaatattgacacctgctcagaagaccagaggaccccgttgatggaagcagccgaaaacaaccatctggaagcagtgaagtacctcatcaaggctggggccctggtggatcccaaggacgcagagggctctacgtgtttgcacctggctgccaagaaaggccactacgaagtggtccagtacctgctttcaaatggacagatggacgtcaactgtcaggatgacggaggctggacacccatgatctgggccacagagtacaagcacgtggacctcgtgaagctgctgctgtccaagggctctgacatcaacatccgagacaacgaggagaacatttgcctgcactgggcggcgttctccggctgcgtggacatagccgagatcctgctggctgccaagtgcgacctccacgccgtgaacatccacggagactcgccactgcacattgccgcccgggagaaccgctacgactgtgtcgtcctctttctttctcgggattcagatgtcaccttaaagaacaaggaaggagagacgcccctgcagtgtgcgagcctcaactctcaggtgtggagcgctctgcagatgagcaaggctctgcaggactcggcccccgacaggcccagccccgtggagaggatagtgagcagggacatcgctcgaggctacgagcgcatccccatcccctgtgtcaacgccgtggacagcgagccatgccccagcaactacaagtacgtctctcagaactgcgtgacgtcccccatgaacatcgacagaaatatcactcatctgcagtactgcgtgtgcatcgacgactgctcctccagcaactgcatgtgcggccagctcagcatgcgctgctggtacgacaaggatggccggctcctgccagagttcaacatggcggagcctcccttgatcttcgaatgcaaccacgcgtgctcctgctggaggaactgccgaaatcgcgtcgtacagaatggtctcagggcaaggctgcagctctaccggacgcgggacatgggctggggcgtgcggtccctgcaggacatcccaccaggcacctttgtctgcgagtatgttggggagctgatttcagactcagaagccgacgttcgagaggaagattcttacctctttgatctcgacaataaggtaatctccgcc

SEQ ID NO: 290965 - DNA, 5095 bp, Artificial Sequence
  derived and/or modified sequence
ggcggggccacgctgcgggcccgggccatggccgccgccgatgccgaggcagttccggcgaggggggagcctcagcaggattgctgtgtgaaaaccgagctgctgggagaagagacacctatggctgccgatgaaggctcagcagagaaacaggcaggagaggcccacatggctgcggacggtgagaccaatgggtcttgtgaaaacagcgatgccagcagtcatgcaaatgctgcaaagcacactcaggacagcgcaagggtcaacccccaggatggcaccaacacactaactcggatagcggaaaatggggtttcagaaagagactcagaagcggcgaagcaaaaccacgtcactgccgacgactttgtgcagacttctgtcatcggcagcaacggatacatcttaaataagccggccctacaggcacagcccttgaggactaccagcactctggcctcttcgctgcctggccatgctgcaaaaacccttcctggaggggctggcaaaggcaggactccaagcgcttttccccagacgccagccgccccaccagccacccttggggaggggagtgctgacacagaggacaggaagctcccggcccctggcgccgacgtcaaggtccacagggcacgcaagaccatgccgaagtccgtcgtgggcctgcatgcagccagtaaagatcccagagaagttcgagaagctagagatcataaggaaccaaaagaggagatcaacaaaaacatttctgactttggacgacagcagcttttaccccccttcccatcccttcatcagtcgctacctcagaaccagtgctacatggccaccacaaaatcacagacagcttgcttgccttttgttttagcagctgcagtatctcggaagaaaaaacgaagaatgggaacctatagcctggttcctaagaaaaagaccaaagtattaaaacagaggacggtgattgagatgtttaagagcataactcattccactgtgggttccaagggggagaaggacctgggcgccagcagcctgcacgtgaatggggagagcctggagatggactcggatgaggacgactcagaggagctcgaggaggacgacggccatggtgcagagcaggcggccgcgttccccacagaggacagcaggacttccaaggagagcatgtcggaggctgatcgcgcccagaagatggacggggagtccgaggaggagcaggagtccgtggacaccggggaggaggaggaaggcggtgacgagtctgacctgagttcggaatccagcattaagaagaaatttctcaagaggaaaggaaagaccgacagtccctggatcaagccagccaggaaaaggaggcggagaagtagaaagaagcccagcggtgccctcggttctgagtcgtataagtcatctgcaggaagcgctgagcagacggcaccaggagacagcacagggtacatggaagtttctctggactccctggatctccgagtcaaaggaattctgtcttcacaagcagaagggttggccaacggtccagatgtgctggagacagacggcctccaggaagtgcctctctgcagctgccggatggaaacaccgaagagtcgagagatcaccacactggccaacaaccagtgcatggctacagagagcgtggaccatgaattgggccggtgcacaaacagcgtggtcaagtatgagctgatgcgcccctccaacaaggccccgctcctcgtgctgtgtgaagaccaccggggccgcatggtgaagcaccagtgctgtcctggctgtggctacttctgcacagcgggtaattttatggagtgtcagcccgagagcagcatctctcaccgtttccacaaagactgtgcctctcgagtcaataacgccagctattgtccccactgtggggaggagagctccaaggccaaagaggtgacgatagctaaagcagacaccacctcgaccgtgacaccagtccccgggcaggagaagggctcggccctggagggcagggccgacaccacaacgggcagtgctgccgggccaccactctcggaggacgacaagctgcagggtgcagcctcccacgtgcccgagggctttgatccaacgggacctgctgggcttgggaggccaactcccggcctttcccagggaccagggaaggaaaccttggagagcgctctcatcgccctcgactcggaaaaacccaagaagcttcgcttccacccaaagcagctgtacttctccgccaggcaaggggagcttcagaaggtgctcctcatgctggtggacggaattgaccccaacttcaaaatggagcaccagaataagcgctctccactgcacgccgcggcagaggctggacacgtggacatctgccacatgctggttcaggcgggcgctaatattgacacctgctcagaagaccagaggaccccgttgatggaagcagccgaaaacaaccatctggaagcagtgaagtacctcatcaaggctggggccctggtggatcccaaggacgcagagggctctacgtgtttgcacctggctgccaagaaaggccactacgaagtggtccagtacctgctttcaaatggacagatggacgtcaactgtcaggatgacggaggctggacacccatgatctgggccacagagtacaagcacgtggacctcgtgaagctgctgctgtccaagggctctgacatcaacatccgagacaacgaggagaacatttgcctgcactgggcggcgttctccggctgcgtggacatagccgagatcctgctggctgccaagtgcgacctccacgccgtgaacatccacggagactcgccactgcacattgccgcccgggagaaccgctacgactgtgtcgtcctctttctttctcgggattcagatgtcaccttaaagaacaaggaaggagagacgcccctgcagtgtgcgagcctcaactctcaggtgtggagcgctctgcagatgagcaaggctctgcaggactcggcccccgacaggcccagccccgtggagaggatagtgagcagggacatcgctcgaggctacgagcgcatccccatcccctgtgtcaacgccgtggacagcgagccatgccccagcaactacaagtacgtctctcagaactgcgtgacgtcccccatgaacatcgacagaaatatcactcatctgcagtactgcgtgtgcatcgacgactgctcctccagcaactgcatgtgcggccagctcagcatgcgctgctggtacgacaaggatggccggctcctgccagagttcaacatggcggagcctcccttgatcttcgaatgcaaccacgcgtgctcctgctggaggaactgccgaaatcgcgtcgtacagaatggtctcagggcaaggctgcagctctaccggacgcgggacatgggctggggcgtgcggtccctgcaggacatcccaccaggcacctttgtctgcgagtatgttggggagctgatttcagactcagaagccgacgttcgagaggaagattcttacctctttgatctcgacaataaggacggggaggtttactgcatcgacgcgcggttctacgggaacgtcagccggttcatcaaccaccactgcgagcccaacctggtgcccgtgcgcgtgttcatggcccaccaggacctgcggttcccccggatcgccttcttcagcacccgcctgatcgaggccggcgagcagctcgggtttgactatggagagcgcttctgggacatcaaaggcaagctcttcagctgccgctgcggctcccccaagtgccggcactcgagcgcggccctggcccagcgtcaggccagcgcggcccaggaggcccaggaggacggcttgcccgacaccagctccgcggctgccgccgaccccctatgagacgccgccggccagcggggcgctcgggagccagggaccgccgcgtcgccgattagaggacgaggaggagagattccgcacgcaaccgaaagggtccttcggggctgcgccgccggcttcctggaggggtcggaggtgaggctgcagcccctgcgggcgggtgtggatgcctcccagccaccttcccagacctgcggcctcaccgcgggcccagtgcccaggctggagcgcacactttggtccgcgcgccagagacgctgggagtccgcactggcatcaccttctgagtttctgatgctgatttgtcgttgcgaagtttctcgtttcttcctctgacctccgaggtccccgctgcaccacggggttgctctgttctcctgtccggcccagactcttctgtgtggcgccgccgaagccaccgttagcgcgagctgctccgttcgccctgcccacggcctgcgtggctggggccgagtcccaggggccgcacggagggcacagtctcctgtcaggctcggagaggtcaggagaccgaccccaccactaactttggagaaaatgtgggtttgctttttaaaggaatcctatatctagtcctatatatcaaacctctaactgacgtttcttttcgaggaagtggcttggtgggtgcagcccccgccggttccgttgacgctggcaccttctgttgattttttaagccacatgctatgatgaataaactgatttattttctaccattactgaacattaggacaaacacaaaataaaaaacaaaacacagacaacggtgctgattctggtgtggtttctactcaccacgtgaaataaactatcaactgtataaagagaacaaagtgattttagaataaaatgcaggaaaaacttttttaaagatgttagtcttgtagcgtgaataaatttgccatcaccttttgtgtggtggcctggcaggtcatatacttttttttggcatatacctttttaaagactgtaattagtgcagtaacagtggggttttttttgtgcaactcttctaaaaacattcataatgcagtcatgtttatttttttctgttaaaatgtttttgacagttttaagagcagtcttttggctctgaccatttcttgttctgtttccaatgaaatcaataaaaaaaaagaagtacttt

SEQ ID NO: 290966 - protein, 2093 aa, Artificial Sequence
  derived and/or modified sequence
MGDEMDAMIPEREMKDFQFRALKKVRIFDSPEELPKERSSLLAVSNKYGLVFAGGASGLQIFPTKNLLIQNKPGDDPNKIVDKVQGLLVPMKFPIHHLALSCDNLTLSACMMSSEYGSIIAFFDVRTFSNEAKQQKRPFAYHKLLKDAGGMVIDMKWNPTVPSMVAVCLADGSIAVLQVTETVKVCATLPSTVAVTSVCWSPKGKQLAVGKQNGTVVQYLPTLQEKKVIPCPPFYESDHPVRVLDVLWIGTYVFAIVYAAADGTLETSPDVVMALLPKKEEKHPEIFVNFMEPCYGSCTERQHHYYLSYIEEWDLVLAASAASTEVSILARQSDQINWESWLLEDSSRAELPVTDKSDDSLPMGVVVDYTNQVEITISDEKTLPPAPVLMLLSTDGVLCPFYMINQNPGVKSLIKTPERLSLEGERQPKSPGSTPTTPTSSQAPQKLDASAAAAPASLPPSSPAAPIATFSLLPAGGAPTVFSFGSSSLKSSATVTGEPPSYSSGSDSSKAAPGPGPSTFSFVPPSKASLAPTPAASPVAPSAASFSFGSSGFKPTLESTPVPSVSAPNIAMKPSFPPSTSAVKVNLSENSSQSAPPMSPFSSASKPAASGPLSHPTPLSAPPSSVPLKSSVLPSPSGRSAQGSSSPVPSMVQKSPRITPPAAKPGSPQAKSLQPAVAEKQGHQWKDSDPVMAGIGEEIAHFQKELEELKARTSKACFQVGTSEEMKMLRTESDDLHTFLLEIKETTESLHGDISSLKTTLLEGFAGVEEAREQNERNRDSGYLHLLYKRPLDPKSEAQLQEIRRLHQYVKFAVQDVNDVLDLEWDQHLEQKKKQRHLLVPERETLFNTLANNREIINQQRKRLNHLVDSLQQLRLYKQTSLWSLSSAVPSQSSIHSFDSDLESLCNALLKTTIESHTKSLPKVPAKLSPMKQAQLRNFLAKRKTPPVRSTAPASLSRSAFLSQRYYEDLDEVSSTSSVSQSLESEDARTSCKDDEAVVQAPRHAPVVRTPSIQPSLLPHAAPFAKSHLVHGSSPGVMGTSVATSASKIIPQGADSTMLATKTVKHGAPSPSHPISAPQAAAAAALRRQMASQAPAVNTLTESTLKNVPQVVNVQELKNNPATPSTAKTPHPVLTPVAANQAKQGSLINSLKPSGPTPASGQLSSGDKASGTAKIETAVTSTPSASGQFSKPFSFSPSGTGFNFGIITPTPSSNFTAAQGATPSTKESSQPDAFSSGGGSKPSYEAIPESSPPSGITSASNTTPGEPAASSSRPVAPSGTALSTTSSKLETPPSKLGELLFPSSLAGETLGSFSGLRVGQADDSTKPTNKASSTSLTSTQPTKTSGVPSGFNFTAPPVLGKHTEPPVTSSATTTSVAPPAATSTSSTAVFGSLPVTSAGSSGVISFGGTSLSAGKTSFSFGSQQTNSTVPPSAPPPTTAATPLPTSFPTLSFGSLLSSATTPSLPMSAGRSTEEATSSALPEKPGDSEVSASAASLLEEQQSAQLPQAPPQTSDSVKKEPVLAQPAVSNSGTAASSTSLVALSAEATPATTGVPDARTEAVPPASSFSVPGQTAVTAAAISSAGPVAVETSSTPIASSTTSIVAPGPSAEAAAFGTVTSGSSVFAQPPAASSSSAFNQLTNNTATAPSATPVFGQVAASTAPSLFGQQTGSTASTAAATPQVSSSGFSSPAFGTTAPGVFGQTTFGQASVFGQSASSAASVFSFSQPGFSSVPAFGQPASSTPTSTSGSVFGAASSTSSSSSFSFGQSSPNTGGGLFGQSNAPAFGQSPGFGQGGSVFGGTSAATTTAATSGFSFCQASGFGSSNTGSVFGQAASTGGIVFGQQSSSSSGSVFGSGNTGRGGGFFSGLGGKPSQDAANKNPFSSASGGFGSTATSNTSNLFGNSGAKTFGGFASSSFGEQKPTGTFSSGGGSVASQGFGFSSPNKTGGFGAAPVFGSPPTFGGSPGFGGVPAFGSAPAFTSPLGSTGGKVFGEGTAAASAGGFGSLAMSLSPTLKGRLLLMRPKAGGGREQAAPGRKSNESRSLGHLCMERALTSPLKVWEQQQHHILRHARESECPHFRITVPTDFWFWDPE

SEQ ID NO: 290967 - DNA, 6282 bp, Artificial Sequence
  derived and/or modified sequence
atgggcgatgagatggacgctatgataccagagcgcgaaatgaaagatttccaatttcgagccttgaaaaaagtgagaattttcgatagtcctgaggaactgccaaaggagagatcatcactgctagcagtgagcaataaatatggcttagtgttcgctggcggtgcgagcggcctccagatcttcccaaccaagaatctactgatccaaaataaacctggcgacgatccaaataagatagtcgacaaggtacaggggcttctggttcccatgaagtttccgatacaccatctggcactcagttgtgataatcttacactgtctgcgtgcatgatgtcctcggaatatggttccattatcgccttctttgatgttcggacattctccaatgaagccaaacagcagaaaaggccgttcgcatatcacaagcttcttaaggatgccgggggcatggttatcgacatgaagtggaatcccacagtgccatctatggtggctgtctgtctggctgatggctctatcgcagtcttgcaggttacggagactgttaaggtgtgcgccacacttccctccactgtggccgtgaccagcgtttgctggtctcccaaagggaagcaactcgccgttggaaagcagaacggtaccgttgtacaatatctgccaacacttcaggaaaaaaaagtgatcccatgcccccctttctacgagtctgaccacccagttcgcgtgcttgacgtgctatggataggtacctacgtgttcgccattgtgtatgccgccgcggatggcacacttgaaacttctcccgacgtggttatggccctgcttcctaaaaaggaagagaagcacccagaaatctttgtcaacttcatggagccttgttacgggagttgcacagaacgccaacatcactattacctgtcctatattgaagaatgggaccttgtgctagcagcgtctgctgcctccaccgaggtgtctatcctggcacggcagtcagatcagatcaactgggaaagctggctgttagaggactcaagtagagcagagttgcccgtgacagacaagtctgatgactccctgcccatgggagtggtggttgactatacaaatcaggtggagattactatttctgacgagaagaccctgcccccagccccggtcttaatgctgctgagtaccgatggagtgctctgccctttctatatgatcaaccagaatcccggagtgaagtctttgattaaaacaccggagaggctgagcctggaaggagagcggcagccgaaaagtccaggttccacccctaccacccccacaagctcgcaggcgccgcaaaagctggacgctagtgccgccgccgcaccagcttctcttcccccttcaagccctgcagctccaattgctacattttccttgctccctgccggcggagcccctactgtgttctcttttggcagcagtagtctgaaaagttccgccacagtgacaggtgagcccccgagttattcttctggttccgactcgtctaaggctgcaccaggtcccggaccttcaaccttctcctttgtcccccctagcaaagcctcactggcgccaacacctgccgcctcccctgtagctccttccgccgcatcattcagtttcgggtcctcaggattcaaacccacgctagaaagcacgccggttccctccgtaagcgcacctaacatcgccatgaagccttcctttccgccatcaacgtcggcagtgaaagtaaatctctccgagaactcatcacagtctgccccccccatgtctccattttcatctgcatctaaacccgctgccagcggccctctgagccaccctactccactttctgcccctcctagttccgtaccgttaaagtcgtcagtgctgccctcaccttccggccgatctgcgcagggaagcagcagccccgtcccctcaatggtccaaaagtcgccacggataactcctcccgccgcgaagcctggcagccctcaggcaaagtccctgcagccagcagtggccgagaagcaggggcaccagtggaaagactcggaccccgttatggccggcatcggtgaggagatagctcactttcagaaggagctcgaagagctgaaagcgcggacctctaaggcttgcttccaggtcggcacatctgaggaaatgaaaatgctaaggaccgaaagcgacgacctgcataccttcctgctggaaattaaggaaactaccgaaagcctgcatggcgatatatcttcactgaagaccacattgctggaaggctttgccggtgtggaggaagcaagggagcagaacgaaaggaatagggatagtggatatctacatttgctatacaagcggccattagacccgaagagcgaagcccagctacaggaaatccgcagactgcaccagtacgttaaattcgcggttcaggatgtcaatgatgtcctcgatctggagtgggaccagcacctcgagcagaagaagaagcagcggcacctgctcgtgccagaaagagagacgctgtttaacacgctcgctaataatcgggagatcatcaatcaacagaggaaacggctgaaccacttagtggattcgctccagcagctacgcctgtacaaacagaccagtctttggagtctctcctccgctgttccatctcagagtagcatacactcttttgacagtgacctcgagtcactgtgtaacgccctcctaaagaccaccattgagtcccacaccaaaagcctgcctaaggtccctgccaaactgtcaccaatgaagcaggctcagctgcgtaacttcctcgctaaacgaaaaacccccccagtgcgttccaccgctccagcgtctctcagtcgtagtgcctttctgtcacaacgatactacgaggacctcgacgaagtgtcctctacttcctccgttagccagagcctagagtctgaggatgccaggacatcatgcaaggacgatgaggccgtggttcaagcgcctcgccacgcccccgtcgtccgcactccctcaatccaacctagtctcctgccgcatgcagctccctttgcaaaatcccacctggttcatgggtcctcaccaggcgttatggggacgtctgtcgctacatccgcgtcaaagattatccctcaaggtgcagattctactatgttggccaccaaaacggtgaagcatggcgccccctcaccttcccacccaatcagtgcgccccaagccgccgcagccgctgctctacgccggcagatggcctcacaggctcccgccgtcaacactttgaccgagtcaaccctgaaaaatgtgccacaggttgtgaatgtacaggaattaaagaacaatcctgctaccccctccaccgcaaagaccccccacccggttttgacccctgttgctgccaaccaggcgaagcaggggtcactcatcaattcactgaaaccttccggtcccacgcccgcaagcggacagctgtcttcaggcgataaagccagcggcactgccaaaatagaaactgcagtcacaagcacaccttcagcttccgggcagttctctaagccattttcatttagccctagtggaactggctttaattttggaatcataactccaacaccctccagcaatttcacggctgcacaaggtgcgaccccaagcaccaaagagagttcacagcccgacgcattttcctccggaggaggtagcaaaccaagctacgaagccatacccgaatcctcccctcccagcggaatcaccagtgcctcgaacactactcctggggagccagccgcatccagctcccgccctgtggccccaagcggaactgcactgagtacaactagcagcaaactcgagactcccccttccaaactgggcgagctgcttttcccgagcagcctggccggggagaccttgggctccttctccggcctgagggttggacaggcagatgactctaccaaaccgacaaacaaagcgtcttccacctcattaacatcaacacagccaacgaaaacctccggggttcccagtgggtttaatttcactgccccccccgtcctgggtaagcacacagagcccccagtaactagcagtgctactacgacctccgtcgccccacccgccgccacttctacgtctagcaccgccgtcttcgggagtctgcccgtgaccagcgccgggagtagcggcgtcatatcttttggagggacctccctgtcagccggaaaaaccagtttctctttcgggagccagcagacaaactccaccgtgcctccatccgccccgcctcctacgaccgccgccacaccgcttccaacgtcttttcccacactgagctttggctcactgttatcctcggctaccactccctcgctgcctatgtcagcaggtcgcagcacagaagaagccacatcaagtgccctcccagagaagccgggggattcagaagtttcagcatccgccgcatccttacttgaggaacaacagtctgcacagctgccacaggctcctcctcagacctccgacagtgtgaaaaaggaacccgtactggcacaaccagccgtctccaacagcggcacagcggccagctctacctccctagttgcactctctgcagaggctactcccgctactactggcgttccagacgcacggacggaagcagtccctcccgcttcttccttctcagttcccggacaaacagctgttaccgccgcagccatcagtagcgccggccctgtagcggtggaaacctctagtaccccgatagcaagctcaactacctcaatagtggcgcccggcccaagtgccgaggctgctgctttcggtacagtaacctctggctctagtgtattcgctcaacccccagcggcgtcatctagtagtgccttcaatcaactgaccaataatactgccactgcccctagtgctacaccagtgtttggacaggtcgccgcctctacagccccttctctcttcgggcagcagacgggatctactgcatcaaccgctgcggccacaccccaggtatcctcgtctggctttagctcccccgccttcgggaccacagctcccggcgtgttcgggcagacaaccttcggtcaagctagtgtgtttggtcaatccgccagctccgccgcgtccgtgttctctttctctcagcccggtttcagctccgtgccagcattcggtcagccagcctcgtccacacctacaagcaccagcggcagcgtgttcggtgcagcatcctctacgtcttcatcgtcctcctttagtttcggccagtccagcccaaatacaggcggtggtctgttcggacagagtaacgcgcccgcattcggccagagcccagggtttggacagggcgggagcgtatttggtggtacgagtgctgctacgaccacagcagccacttccggattttcattttgtcaagcaagtggctttggctcaagtaataccggatccgttttcggccaggccgcctccactgggggaattgtctttgggcagcagtcttcctcatcttccggttctgtctttggatccggaaacactggccggggaggcggcttcttttctggcttaggcggaaaaccatctcaagatgccgccaataagaatccgttttctagtgcctccggcggatttggttccacagctacctccaacacgagtaatctgtttggcaacagtggcgcaaagacatttggcggattcgcctcttccagttttggcgaacagaaacccaccggaaccttcagctcgggtggtggaagcgtggcctcccaagggtttggttttagctcaccgaacaaaactggtggttttggagcagcccctgtgtttggaagcccccctacgtttggtggtagccccggttttggaggtgtgcctgcatttggttcggcaccagcttttacaagccccctcggttccaccggcggaaaggtgttcggagagggaactgcagctgcaagcgctggcggtttcggttccctggctatgtcactctctccgaccctaaagggcagactactgctcatgcgacctaaagcaggaggcgggcgcgaacaagccgcaccgggacgcaaatctaacgagtctcgctccttaggtcacctgtgcatggagagggctcttacctcccccctcaaggtgtgggagcagcagcagcaccatatattgcggcatgcaagggagtccgaatgcccacactttcggattacagtgcctactgacttctggttctgggaccctgagtag

SEQ ID NO: 290968 - DNA, 6282 bp, Artificial Sequence
  derived and/or modified sequence
atgggagatgagatggatgccatgatccctgagcgggagatgaaggacttccagttccgggccctgaagaaggtgcgcatctttgacagccctgaggagctgcccaaggagaggagcagcctgctggccgtgagcaacaagtatggcctggtgtttgctggaggagccagcggcctgcagatcttccccaccaagaacctgctgatccagaacaagccaggagatgaccccaacaagatcgtggacaaggtgcagggcctgctggtgcccatgaagttccccatccaccacctggccctgagctgtgacaacctgaccctgagcgcctgcatgatgagcagtgaatatggcagcatcatcgccttctttgatgtgaggaccttcagcaatgaggccaagcagcagaagaggccctttgcctaccacaagctgctgaaggatgctgggggcatggtgattgacatgaagtggaaccccaccgtgcccagcatggtggccgtgtgcctggctgatggcagcattgctgtgctgcaggtgacagagaccgtgaaggtgtgtgccaccctgcccagcacagtggccgtgacctctgtgtgctggagccccaagggcaagcagctggccgtgggcaagcagaatggaacagtggtgcagtacctgcccaccctgcaggagaagaaggtgatcccctgcccccccttctatgaaagtgaccaccctgtgcgggtgctggatgtgctgtggattggcacctacgtgtttgccatcgtgtatgctgctgctgatggcaccctggagaccagcccagatgtggtgatggccctgctgcccaagaaggaggagaagcaccctgagatctttgtgaacttcatggagccctgctacggcagctgcacagagcggcagcaccactactacctgagctacatcgaggagtgggacctggtgctggccgccagcgctgccagcacagaggtgtccatcctggcccggcagagcgaccagatcaactgggagagctggctgctggaggacagcagcagagctgagctgcctgtgacagacaagagtgatgacagcctgcccatgggcgtggtggtggactacaccaaccaggtggagatcaccatcagtgatgagaagaccctgcccccagcccctgtgctgatgctgctgagcacagatggagtgctgtgccccttctacatgatcaaccagaaccctggggtgaagagcctcatcaagaccccagagcggctgagcctggagggggagcggcagcccaagagccctggcagcacccccaccacccccaccagcagccaggccccccagaagctggatgccagcgctgctgctgccccagccagcctgccccccagcagccctgctgcccccatcgccaccttcagcctgctgcctgctggaggagcccccaccgtcttctcctttggcagcagcagcctgaagagcagcgccaccgtgactggagagcccccatcctacagcagcggcagtgacagcagcaaggccgcccctggccctggccccagcaccttctcctttgtgccccccagcaaggccagcctggcccccaccccagctgccagccctgtggcccccagcgctgccagcttctcctttggcagcagcggcttcaagcccaccctggagagcacccctgtgcccagcgtgtctgcccccaacatcgccatgaagcccagcttcccccccagcaccagcgctgtgaaggtgaacctgtctgagaacagcagccagagcgccccacccatgagccccttcagcagcgccagcaagccagctgccagcggccccctgagccaccccacccccctgagcgccccacccagctctgtgcccctgaagagctctgtgctgcccagccccagcggccgcagcgcccagggcagcagcagccctgtgcccagcatggtgcagaagagcccccgcatcaccccacctgctgccaagccaggcagcccccaggccaagagcctgcagcctgctgtggccgagaagcagggccaccagtggaaggacagcgaccctgtgatggccggcattggagaggagatcgcccacttccagaaggagctggaggagctgaaggcccggaccagcaaggcctgcttccaggtgggcaccagcgaggagatgaagatgctgaggacagaaagtgatgacctgcacaccttcctgctggagatcaaggagaccacagagagcctgcatggagacatcagcagcctgaagaccaccctgctggagggctttgctggggtggaggaggcccgggagcagaatgaaagaaacagagattctggctacctgcacctgctgtacaagaggcccctggaccccaagtctgaggcccagctgcaggagatccggcggctgcaccagtatgtgaagtttgctgtgcaggatgtgaatgatgtgctggacctggagtgggaccagcacctggagcagaagaagaagcagaggcacctgctggtgcctgagcgggagaccctcttcaacaccctggccaacaaccgggagatcatcaaccagcagaggaagaggctgaaccacctggtggacagcctgcagcagctgcggctgtacaagcagaccagcctgtggagcctgagcagcgctgtgcccagccagagcagcatccacagctttgacagcgacctggagagcctgtgcaatgccctgctgaagaccaccatcgagagccacaccaagagcctgcccaaggtgcctgccaagctgagccccatgaagcaggcccagctgaggaacttcctggccaagaggaagaccccacctgtgcgcagcacagccccagccagcctgagccgcagcgccttcctgagccagcgctactatgaggacctggatgaggtgagcagcaccagctctgtgtcccagagcctggagagtgaagatgcccggaccagctgcaaggatgatgaagctgtggtgcaggcccccaggcatgcccctgtggtgaggacccccagcatccagcccagcctgctgccccatgctgccccctttgccaagagccacctggtgcacggcagcagccctggggtgatgggcacctctgtggccaccagcgccagcaagatcatcccccagggcgctgacagcaccatgctggccaccaagacagtgaagcacggggcccccagccccagccaccccatcagcgccccccaggccgctgctgctgctgccctgcggcggcagatggccagccaggccccagctgtgaacaccctgacagagagcaccctgaagaatgtgccccaggtggtgaatgtgcaggagctgaagaacaacccagccacccccagcacagccaagaccccccaccctgtgctgacccctgtggccgccaaccaggccaagcagggcagcctcatcaacagcctgaagcccagcggccccaccccagccagcggccagctgagcagcggggacaaggccagcggcacagccaagattgaaacagctgtgaccagcacccccagcgccagcggccagttcagcaagcccttctccttcagccccagcggcaccggcttcaactttggcatcatcacccccacccccagcagcaacttcaccgctgcccagggcgccacccccagcaccaaggagagcagccagccagatgccttcagcagcggcggcggcagcaagcccagctatgaggccatccctgagagcagcccccccagcggcatcaccagcgccagcaacaccaccccaggagagcctgctgccagcagcagcaggcctgtggcccccagcggcacagccctgagcaccaccagcagcaagctggagaccccacccagcaagctgggggagctgctcttccccagcagcctggccggggagaccctgggcagcttcagcggcctgcgggtgggccaggctgatgacagcaccaagcccaccaacaaggccagcagcaccagcctgaccagcacccagcccaccaagaccagcggcgtgcccagcggcttcaacttcaccgcccctcctgtgctgggcaagcacacagagccccctgtgaccagcagcgccaccaccacctctgtggcccccccagctgccaccagcaccagcagcacagctgtgtttggcagcctgcctgtgaccagcgctggcagcagtggagtcatcagctttggaggcaccagcctgtctgctgggaagaccagcttctcctttggcagccagcagaccaacagcacagtgccccccagcgcccccccacccaccacagctgccacccccctgcccaccagcttccccaccctgagctttggcagcctgctgagcagcgccaccacccccagcctgcccatgtctgctggccgcagcacagaggaggccaccagcagcgccctgcctgagaagccaggggacagcgaggtgtctgccagcgctgccagcctgctggaggagcagcagagcgcccagctgccccaggccccaccccagaccagtgacagcgtgaagaaggagcctgtgctggcccagcctgctgtgagcaacagcggcacagctgccagcagcaccagcctggtggccctgtctgctgaggccaccccagccaccactggagtgcctgatgccaggacagaggccgtgcccccagccagcagcttctctgtgcccggccagacagctgtgacagctgctgccatcagcagcgctggccctgtggccgtggagaccagcagcacccccatcgccagcagcaccaccagcatcgtggcccctggccccagcgctgaggccgccgccttcggcaccgtgaccagcggcagctctgtgtttgcccagcccccagctgccagcagcagcagcgccttcaaccagctgaccaacaacacagccacagcccccagcgccacccctgtgtttggccaggtggccgccagcacagcccccagcctgtttggccagcagacaggcagcacagccagcacagctgctgccaccccccaggtgagcagcagcggcttcagcagccctgccttcggcaccacagcccctggggtgtttggccagaccaccttcggccaggcctctgtgtttggccagagcgccagcagcgctgccagcgtcttctccttcagccagcccggcttcagctctgtgcctgccttcggccagcctgccagcagcacccccaccagcaccagcggctctgtgtttggagctgccagcagcaccagcagcagcagcagcttctcctttggccagagcagccccaacacaggaggcggcctgtttggccagagcaatgccccagccttcggccagagccctggcttcggccagggcggctctgtgtttggaggcaccagcgctgccaccaccacagctgccaccagcggcttctccttctgccaggccagcggcttcggcagcagcaacacaggctctgtgtttggccaggccgccagcactggaggcatcgtgtttggccagcagagcagcagcagcagcggctctgtgtttggaagtggcaacacaggccggggcggcggcttcttcagcggcctgggcggcaagcccagccaggatgctgccaacaagaaccccttcagcagcgccagcggcggcttcggcagcacagccaccagcaacaccagcaacctgtttggaaacagcggggccaagacctttggaggctttgccagcagcagctttggagagcagaagcccaccggcaccttcagcagcggcggcggctctgtggccagccagggcttcggcttcagcagccccaacaagacaggaggctttggagctgcccctgtgtttggcagcccccccacctttggaggcagccctggctttggaggagtgcctgcctttggaagtgccccagccttcaccagccccctgggcagcactggaggcaaggtgtttggagagggcacagctgctgccagcgctgggggcttcggcagcctggccatgagcctgagccccaccctgaagggccgcctgctgctgatgaggcccaaggccggcggcggccgggagcaggccgcccctggcaggaagagcaatgaaagccgcagcctgggccacctgtgcatggagcgggccctgaccagccccctgaaggtgtgggagcagcagcagcaccacatcctgcggcatgcccgggagagtgaatgtccccacttccgcatcaccgtgcccacagacttctggttctgggaccctgagtag

SEQ ID NO: 290969 - DNA, 6282 bp, Artificial Sequence
  derived and/or modified sequence
atgggcgacgagatggacgccatgatccccgagcgggagatgaaggatttccagttccgcgctctgaagaaggttcgtatttttgatagtcccgaagaactgcccaaagaacgctcttctttactggcagtgtccaataagtatggcctggtatttgcaggtggcgcctcgggcctgcaaatatttcccactaagaacctgttgatccagaacaagcccggggacgaccctaacaaaatcgtggataaggtacagggactactggtgcctatgaagtttcccattcaccacctcgcgctgtcttgcgataatctgacgctctccgcctgcatgatgtcctccgaatacggttctatcattgcattctttgacgtacgtacattttcaaatgaagctaagcagcagaagaggccgttcgcttaccacaagctgttgaaggatgccggcgggatggtgatcgacatgaagtggaatcctaccgtgccatccatggtagctgtttgtctggctgacggatcaatcgccgtgttgcaggtgactgagactgtcaaggtttgtgcgactctgccgtctacggtggccgtaacatctgtgtgttggtctcctaagggcaaacagttggccgttgggaagcaaaacggaaccgtggtccagtatctgccaaccttacaggaaaaaaaagttatcccttgtccacccttttatgaaagcgatcaccccgtccgtgtcctggatgtgctgtggattggcacctacgtgttcgccatcgtgtatgctgctgctgacggcaccctggagacaagcccagatgtcgttatggcccttctcccaaagaaagaggagaagcaccctgagatctttgttaacttcatggagccctgctatgggtcatgcactgaacgccagcaccattattacctcagctacatcgaggaatgggatctcgtgctggccgcctctgcagcttctacggaggtctccattcttgcgaggcaaagtgatcagattaactgggagagctggctcctggaggacagctcccgggctgaactgccggtgacagataagtcagatgattctctgccaatgggtgtcgtggttgattacacaaatcaagtggaaattaccattagtgatgaaaaaactctgccccctgcaccagtgttaatgctactgtcaactgatggtgtactgtgtcctttctacatgataaatcagaaccctggcgtaaaaagtctgatcaagacgcccgagaggttgagtctcgagggcgagcgtcagcctaagtcccccggatccactcctactacccctacaagtagccaagccccacagaaattggacgctagtgctgctgccgcccctgcctcgttacctccaagttctcctgctgcgccgattgccactttcagtctgctgcccgcgggtggggcccctacggtattcagttttggttcatcatctctcaaatcatcagccaccgtaacaggagaacccccgtcctattcttctggcagcgactctagcaaagctgcccccggccccggtccgagtacctttagcttcgttcccccaagcaaagcatccctggccccaactcccgccgcttcaccagtggcccccagcgcagcctctttttcgtttggtagttctgggtttaagcctactctggagtccacccccgtcccctctgtgagcgcccctaacatcgccatgaagccatctttcccccctagcacctcagcagttaaggtaaatttatcagagaattcttctcagtccgctccacctatgagcccatttagcagtgcttcaaagccggcggcaagcggcccattgagccatcctacacccctgagtgcccccccatcctcggttccactgaagagtagcgtgctcccaagcccaagtggcaggagtgctcaaggctctagttctccagttccaagcatggtccagaagtcccctaggataacacctcccgctgcgaagcctgggtcacctcaagcaaagtcacttcagccggctgtggcagagaagcaaggccatcagtggaaagactctgaccctgtgatggccggtattggagaagaaattgctcatttccagaaggagctcgaggaattgaaggcacgcaccagcaaggcctgttttcaggtggggacgtctgaagaaatgaagatgctcagaacagagagcgacgatctccacacatttctgctggagatcaaagagactacagagtctctgcacggggacatctcgagtctgaaaacaacactactcgagggatttgcaggggttgaagaggcccgggaacagaatgagcgcaacagagactccggttacctgcacctgctgtacaagagaccgcttgatcctaaatccgaggcacagttgcaagagattcgtaggttgcaccagtatgtgaaatttgccgtccaggacgtgaacgacgtgttagatcttgaatgggaccagcacttagagcagaagaaaaaacagcgtcatctcctggtgcccgagagagaaacgctcttcaacacactggctaataatagagaaatcatcaaccagcaacggaagaggctgaatcacctagtagattcactgcagcagctgcgcctgtataagcaaacctctctttggtcgctgagttccgctgtgccgagccaatcctcaattcattctttcgattccgatctcgagagtctgtgtaatgcccttctgaaaacaacaatcgagtcacataccaagtctttgccaaaggtccccgcgaaactgtctcccatgaagcaagctcagcttcgcaattttctcgccaaaagaaaaactcctcccgttaggtccactgctccggcctctctttcccggagcgccttcctctctcagagatattacgaagacctggacgaggtgtcttctaccagcagcgtgagccagtcactggagtctgaagatgccaggacttcttgtaaagatgatgaagctgtggtgcaggcccctagacacgcacccgtcgtgcgcacgcctagtattcaaccaagtctgttgcctcatgccgctccttttgccaaatcccaccttgtgcacgggagctctccaggggtcatggggacttcagtcgccaccagtgccagcaaaataattccccagggcgccgatagtacaatgctggctaccaagaccgtgaaacacggtgctccttcaccctcacacccaattagcgcccctcaggccgctgctgccgctgctctgagaagacagatggcatctcaggcacccgccgtaaacacacttaccgagtcgacccttaagaatgtgccccaggtggtcaacgtgcaggagctcaagaataacccagccacgccgagcacagctaaaacaccgcaccccgtgttaacacccgtggcagccaaccaagcaaagcaaggtagcctgatcaattccctcaaaccaagtgggcccacaccagctagtgggcagctcagctccggcgataaggcatcaggaacggcaaagattgagacagccgtaaccagcaccccaagcgctagtggccaattttcaaaacctttctccttcagcccctccgggaccggatttaacttcgggatcatcactcccacacctagcagcaacttcacagccgcccagggggctactcccagtacgaaagaaagctcacagcccgatgcttttagttcagggggtgggtccaagccaagctatgaggctattcccgagtcctcccccccgtctggtatcactagcgctagcaatacaacgcccggggagcctgcagcttcctcatcacgcccagtggccccctccggcacagccctctcaactacttccagcaaattggagactccacccagtaagcttggagagctcctgtttccgagcagtcttgccggcgaaacattgggctcattcagcggactccgcgtgggtcaggcagatgactccactaaacctactaacaaagcgtcaagtacatcactcactagtactcagccaacgaagacctccggagtccctagtgggtttaattttaccgctccgcccgtgctggggaaacacacagagccgcccgtgacatccagcgctacaactaccagcgtagctcctcccgctgccacgagcacctccagtacagccgtgtttggaagtttacccgttacgagcgctgggagctcaggcgttatcagcttcggaggaacatcacttagcgctggaaaaacttcattcagctttggaagccaacagacgaactcgacggttcctccctctgctcctccgccaactacagccgcaacccccttgccgacatcgttccctacactgtcttttggcagtctcttgtcaagtgctaccacaccttcactacctatgtctgccggcagatcaactgaagaagccacttcaagcgcactccctgaaaagcctggggatagcgaggtcagtgccagtgctgcgagtcttctggaggagcaacagtcggcacaactcccccaggctcccccccagaccagtgactctgtgaagaaagaacccgttttggctcagcctgctgtgtctaacagcggaaccgctgcgtcaagcacgtccctggtggcgctgagcgccgaagctacccccgcaacaacgggcgtacccgacgcccgtactgaggccgtcccacccgcctcttcctttagcgtccctgggcagactgcagtaaccgctgctgcaattagctctgccggcccagtggccgtcgagacatcttctacccctatcgccagttccaccacctcgattgtcgctccgggccccagcgcagaggccgcagcctttggcaccgtgacatctggtagctccgtcttcgcacagccacctgccgcctcaagctctagtgccttcaaccagctgaccaataacacagctacagctccatctgcgacacccgtgtttggccaggttgccgctagtactgccccctccctgtttggccagcagactgggagtaccgcatctacagcagcagcaaccccccaggttagttcatcagggttctctagtcccgcatttggaacaactgcccccggggtgtttgggcaaaccaccttcggccaggctagcgttttcggacagtcggcttctagtgcagctagtgtgttctcattttcacagcctggcttctcatcagtgccagcttttggacagccagcgagctctacccccacatccaccagcggctccgttttcggcgctgcctctagcacatcttcttcatccagctttagtttcggccaatcctccccgaataccgggggcgggctgttcgggcagtctaacgcccctgcttttgggcaatcccctggctttgggcagggtggatccgtgttcgggggaacttctgctgccactacgacagccgccacttccggcttctctttttgtcaggctagcggcttcggctcatctaacaccggcagcgtgttcggccaggccgcaagcacgggtggaatcgtgtttggccagcagagcagctcttccagcggaagcgtgtttgggtctggaaacactggtcgaggcggaggtttctttagcgggctggggggtaaaccatcacaggacgctgctaacaaaaaccccttcagttctgcatccggaggatttggaagcaccgctacctcaaataccagcaatctctttggtaactcgggtgccaagacttttggaggattcgccagttccagtttcggggagcaaaagccgacggggacgttttcttctggaggcggaagtgtggcaagccagggctttggattttcaagccctaacaaaacaggcggttttggtgccgcaccggtgttcggctctccgcccacattcggaggctcgccagggttcggcggtgttccggcctttgggtccgcgcccgccttcacatcgccccttggctccaccggggggaaggttttcggtgaaggaacagcggccgcctctgcaggggggtttgggagcttagctatgagtctgagtccgactctgaaaggccggctgctgctaatgcgcccaaaagctggcggaggaagagagcaggccgcacccggaaggaagtctaatgaatcccgttctctgggacatttatgtatggaacgcgcccttacaagtcccttaaaggtgtgggaacaacagcagcatcatatcttgcgccacgcacgcgaaagcgaatgcccacatttcaggatcacggtccctacagacttttggttttgggacccggagtag

SEQ ID NO: 290970 - DNA, 6698 bp, Artificial Sequence
  derived and/or modified sequence
ctgcgcgccgctggcgctgaggggaggaagtttgctgtcgagcggcctgggttccgtgggcaaggccgtgggaggcagcgttggctgcttcgacacactgagggcggcgcgatgggagacgagatggatgccatgattcccgagcgggagatgaaggattttcagtttagagcgctaaagaaggtgagaatctttgactcccctgaggaattgcccaaggaacgctcgagtctgcttgctgtgtccaacaaatatggtctggtcttcgctggtggagccagtggcttgcagatttttcctactaaaaatcttcttattcaaaataaacccggagatgatcccaacaaaatagttgataaagtccaaggcttgctagttcctatgaaattcccaatccatcacctggccttgagctgtgataacctcacactctctgcgtgcatgatgtccagtgaatatggttccattattgctttttttgatgttcgcacattctcaaatgaggctaaacagcaaaaacgcccatttgcctatcataagcttttgaaagatgcaggaggcatggtgattgatatgaagtggaaccccactgtcccctccatggtggcagtttgtctggctgatggtagtattgctgtcctgcaagtcacggaaacagtgaaagtatgtgcaactcttccttccacggtagcagtaacctctgtgtgctggagccccaaaggaaagcagctggcagtgggaaaacagaatggaactgtggtccagtatcttcctactttgcaggaaaaaaaagtcattccttgtcctccgttttatgagtcagatcatcctgtcagagttctggatgtgctgtggattggtacctacgtcttcgccatagtgtatgctgctgcagatgggaccctggaaacgtctccagatgtggtgatggctctactaccgaaaaaagaagaaaagcacccagagatatttgtgaactttatggagccctgttatggcagctgcacggagagacagcatcattactacctcagttacattgaggaatgggatttagtgctggcagcatctgcggcttcaacagaagttagtatccttgctcgacaaagtgatcagattaattgggaatcttggctactggaggattctagtcgagctgaattgcctgtgacagacaagagtgatgactccttgcccatgggagttgtcgtagactatacaaaccaagtggaaatcaccatcagtgatgaaaagactcttcctcctgctccagttctcatgttactttcaacagatggtgtgctttgtccattttatatgattaatcaaaatcctggggttaagtctctcatcaaaacaccagagcgactttcattagaaggagagcgacagcccaagtcaccaggaagtactcccactaccccaacctcctctcaagccccacagaaactggatgcttctgcagctgcagcccctgcctctctgccaccttcatcacctgctgctcccattgccactttttctttgcttcctgctggtggagcccccactgtgttctcctttggttcttcatctttgaagtcatctgctacggtcactggggagcccccttcatattccagtggctccgacagctccaaagcagccccaggccctggcccatcaaccttctcttttgttcccccttctaaagcctccctagcccccacccctgcagcgtctcctgtggctccatcagctgcttcattctcctttggatcatctggttttaagcctaccctggaaagcacaccagtgccaagtgtgtctgctccaaatatagcaatgaagccctccttcccaccctcaacctctgctgtcaaagtcaaccttagtgaaaatagctcccagagcgcacccccgatgtcgccattctcttctgcctccaagccagctgcttctggaccactcagccaccccacacctctctcagcaccacctagttccgtgccattgaagtcctcagtcttgccctcaccatcaggacgatctgctcagggcagttcaagcccagtgccctcaatggtacagaaatcacccaggataacccctccagcggcaaagccaggctctccccaggcaaagtcacttcagcctgctgttgcagaaaagcagggacatcagtggaaagattcagatcctgtaatggctggaattggggaggagattgcacactttcagaaggagttggaagagttaaaagcccgaacttccaaagcctgtttccaagtgggcacttctgaggagatgaagatgctgcgaacagaatcagatgacttgcatacctttcttttggagattaaagagaccacagagtcgcttcatggagatataagtagcctgaaaacaactttacttgagggctttgctggtgttgaggaagccagagaacaaaatgaaagaaatcgtgactctggttatctgcatttgctttataaaagaccactggatcccaagagtgaagctcagcttcaggaaattcggcgccttcatcagtatgtgaaatttgctgtccaagatgtgaatgatgttctagacttggagtgggatcagcatctggaacaaaagaaaaaacaaaggcacctgcttgtgccagagcgagagacactgtttaacaccctagccaacaatcgggaaatcatcaaccaacagaggaagaggctgaatcacctggtggatagtcttcagcagctccgcctttacaaacagacttccctgtggagcctgtcctcggctgttccttcccagagcagcattcacagttttgacagtgacctggaaagcctgtgcaatgctttgttgaaaaccaccatagaatctcacaccaaatccttgcccaaagtaccagccaaactgtcccccatgaaacaggcacaactgagaaacttcttggccaagaggaagaccccaccagtgagatccactgctccagccagcctgtctcgatcagcctttctgtctcagagatattatgaagacttggatgaagtcagctcaacgtcatctgtctcccagtctctggagagtgaagatgcacggacgtcctgtaaagatgacgaggcagtggttcaggcccctcggcacgcccccgtggttcgcactccttccatccagcccagtctcttgccccatgcagcaccttttgctaaatctcacctggttcatggttcttcacctggtgtgatgggaacttcagtggctacatctgctagcaaaattattcctcaaggggccgatagcacaatgcttgccacgaaaaccgtgaaacatggtgcacctagtccttcccaccccatctcagccccgcaggcagctgccgcagcagcactcaggcggcagatggccagtcaggcaccagctgtaaacactttgactgaatcaacgttgaagaatgtccctcaagtggtaaatgtgcaggaattgaagaataaccctgcaaccccttctacagccaaaacacctcacccagtgttgaccccagtggctgctaaccaagccaagcaggggtctctaataaattcccttaagccatctgggcctacaccagcatccggtcagttatcatctggtgacaaagcttcagggacagccaagatagaaacagctgtgacttcaaccccatctgcttctgggcagttcagcaagcctttctcattttctccatcagggactggctttaattttgggataatcacaccaacaccgtcttctaatttcactgctgcacaaggggcaacaccctccactaaagagtcaagccagccggacgcattctcatctggtgggggaagcaaaccttcttatgaggccattcctgaaagctcacctccctcaggaatcacatccgcatcaaacaccaccccaggagaacctgccgcatctagcagcagacctgtggcaccttctggaactgctctttccaccacctctagtaagctggaaaccccaccgtccaagctgggagagcttctgtttccaagttctttggctggagagactctgggaagtttttcaggactgcgggttggccaagcagatgattctacaaaaccaaccaataaggcttcatccacaagcctaactagtacccagccaaccaagacgtcaggcgtgccctcagggtttaattttactgcccccccggtgttagggaagcacacggagccccctgtgacatcctctgcaaccaccacctcagtagcaccaccagcagccaccagcacttcctcaactgccgtttttggcagtctgccagtcaccagtgcaggatcctctggggtcatcagttttggtgggacatctctaagtgctggcaagactagtttttcatttggaagccaacagaccaatagcacagtgcccccatctgccccaccaccaactacagctgccactccccttccaacatcattccccacattgtcatttggtagcctcctgagttcagcaactaccccctccctgcctatgtccgctggcagaagcacagaagaggccacttcatcagctttgcctgagaagccaggtgacagtgaggtctcagcatcagcagcctcacttctagaggagcaacagtcagcccagcttccccaggctcctccgcaaacttctgactctgttaaaaaagaacctgttcttgcccagcctgcagtcagcaactctggcactgcagcatctagtactagtcttgtagcactttctgcagaggctaccccagccaccacgggggtccctgatgccaggacggaggcagtaccacctgcttcctccttttctgtgcctgggcagactgctgtcacagcagctgctatctcaagtgcaggccctgtggccgtcgaaacatcaagtacccccatagcctccagcaccacgtccattgttgctcccggcccatctgcagaggcagcagcatttggtaccgtcacttctggctcatccgtctttgctcagcctcctgctgccagttctagctcagctttcaaccagctcaccaacaacacagccactgccccctctgccacgcccgtgtttgggcaagtggcagccagcaccgcaccaagtctgtttgggcagcagactggtagcacagccagcacagcagctgccacaccacaggtcagcagctcagggtttagcagcccagcttttggtaccacagccccaggggtctttggacagacaaccttcgggcaggcctcagtctttgggcagtcggcgagcagtgctgcaagtgtcttttccttcagtcagcctgggttcagttccgtgcctgccttcggtcagcctgcttcctccactcccacatccaccagtggaagtgtctttggtgccgcctcaagtaccagtagctccagttccttctcatttggacagtcttctcccaacacaggaggggggctgtttggccaaagcaacgctcctgcttttgggcagagtcctggctttggacagggaggctctgtctttggtggtacctcagctgccaccacaacagcagcaacctctgggttcagcttttgccaagcttcaggttttgggtctagtaatactggttctgtgtttggtcaagcagccagtactggtggaatagtctttggccagcaatcatcctcttccagtggtagcgtgtttgggtctggaaacactggaagagggggaggtttcttcagtggccttggaggaaaacccagtcaggatgcagccaacaaaaacccattcagctcggccagtgggggctttggatccacagctacctcaaatacctctaacctatttggaaacagtggggccaagacatttggtggatttgccagctcgtcgtttggagagcagaaacccactggcactttcagctctggaggaggaagtgtggcatcccaaggctttgggttttcctctccaaacaaaacaggtggcttcggtgctgctccagtgtttggcagccctcctacttttgggggatcccctgggtttggaggggtgccagcattcggttcagccccagcctttacaagccctctgggctcgacgggaggcaaagtgttcggagagggcactgcagctgccagcgcaggaggattcgggtccctggccatgagcctgtctccgaccctgaagggcaggctgttgctgatgaggcccaaggcaggaggaggaagggagcaggccgctcctgggagaaagtccaatgagagcagatcccttggccacctttgtatggaaagagccttgacctcaccattaaaagtttgggagcagcagcaacaccacatccttcggcacgctcgcgagtcagaatgcccccactttcggatcactgtcccaacagacttctggttttgggacccagagtagcggattctctggttttggatcaggcacaggagggttcagctttgggtcaaataactcgtctgtccagggttttggtggctggcgaagctgagggcgtgtcagcaggcctttcgatccctgggaccaaccgcatcctcagcttcttccccgagaaatgctggagcaggctgttcagaccgacgttgccatcaaaacacatacacccagaaagaaacaacagaaaccaaaactcacaaggcgcatgattacttgttttatatttcatgttgggttttccctcccactattaaacagtctgtttccgt

SEQ ID NO: 290971 - DNA, 6281 bp, Artificial Sequence
  derived and/or modified sequence
atgggagacgagatggacgccatgatcccggaaagggagatgaaggatttccagttccgcgctctgaagaaagtcaggatatttgattcccccgaagagctgcctaaggaacggagctctctgttggccgtttctaacaagtatgggctggtgttcgcaggaggcgcaagtggattacagatctttccaacaaaaaacttgttgatacagaataagccaggagacgatcccaacaaaatcgtggacaaagtccaagggttgctggtgcctatgaaattccctattcatcatctcgctctttcctgtgacaatcttacactatctgcctgcatgatgtcttccgagtatgggagcattattgccttctttgatgtaaggaccttctctaatgaggcaaagcagcagaaacgaccattcgcttaccacaaactgcttaaagacgcaggcggtatggttatagacatgaagtggaaccctactgtgccgtccatggtggctgtgtgcctcgccgatggctcaattgcagttttgcaggtgacagaaactgtaaaagtgtgcgcaacgcttccatctactgtggccgtcacctcagtgtgttggtcgcctaagggtaagcagctcgcagtaggaaagcagaacggcaccgtcgtgcagtacttgccaaccctccaggagaagaaagtgatcccttgccctcctttctacgagagcgatcacccagtccgcgtcttggatgtgctttggataggaacctacgtgtttgccatagtctatgcagcggctgacgggacattggaaacgagtcctgacgtggtgatggccctgcttcccaagaaggaggaaaagcacccagagatatttgtgaattttatggaaccatgttacggctcatgtactgagcgacaacaccactactacctgagttatatagaagagtgggatctggtcctagctgcatctgctgcatctaccgaggtctccatcttagccaggcagagcgaccagatcaactgggaaagctggcttctggaagactcgtctagagccgagctacccgtgacagacaagtccgacgactccctgcccatgggggtggtggtggactacaccaatcaggtggaaatcactatctctgacgaaaagacgctgcctcccgctccagtcttaatgctcttgtctaccgacggtgtactctgtccattttatatgattaatcaaaacccaggagtgaaatcattaattaagacaccagaaagactgtctctggaaggggagaggcagcccaaatcacctggatccactcccacaactcccacatcttctcaagcgcctcaaaagttggatgcgagtgcggctgccgcacctgcttccctgccaccctcctctccggctgccccaattgctacgttctctctgctgccagcgggtggcgctccgaccgtgtttagctttggcagctcctctctcaaatcctcagcgacagtaacaggagagcccccaagctactcttccggatccgattcatcaaaggctgcaccaggcccaggtccctccaccttttcctttgttccccctagtaaagcatccctcgcaccgacccccgcagcgtctccagtggctccttccgccgcaagctttagcttcggtagcagcgggtttaagccgacactagagtctacccctgtgccatccgtatctgcccctaacatcgccatgaagcccagctttccaccatccacctctgcagttaaggtgaatttgagcgaaaattctagccagtcagctcctcccatgagcccttttagtagcgcgtccaaacccgcagcaagcggtcccctaagccatccaactccactcagtgcccctccaagctctgtgcctctgaagtcctctgtgctcccatcgcccagcggtaggtcagcccagggatcaagctccccggtgccctccatggtccaaaaatcccctagaataaccccgccagctgccaaaccagggtccccacaggccaagtccttacagccggcagtggcagaaaaacaggggcaccagtggaaggatagcgacccagttatggccggaattggtgaagagatcgctcatttccaaaaagaactggaagaattgaaagccagaactagtaaggcctgtttccaagtgggaacctcagaagagatgaagatgctacggaccgagtcggatgatctgcacacatttctgctcgaaatcaaggaaacaaccgaaagcctccacggagacatcagctcattgaaaactaccctgctcgaggggttcgccggagtggaggaagcacgcgagcagaatgaaagaaaccgagactctggctacctgcatcttctctacaagagaccattggaccccaaatccgaggctcagttgcaggagatacgccgtctgcaccagtacgttaaattcgccgtgcaggatgtgaacgacgtactggatttagagtgggatcagcatctcgagcagaaaaaaaagcagagacatttactggtcccagagcgggagaccctctttaacaccctagctaacaatcgcgagattattaaccagcagcgcaaacgcctgaatcatctggtggattctctccagcagttacggctctacaaacaaacctccttgtggtccctgtcttccgccgtcccttcccaatcctcaattcattcgttcgactcagacctcgagtccttgtgcaacgcccttttaaagaccactatagagagtcatactaagagcctgccgaaagtaccagcgaaactgtccccgatgaagcaggcccagctgcgcaattttttggcaaaacgcaagactcccccagtgagatcgacagcccctgcttccttgagtagatcggcctttctttctcagcgctattacgaggacctagacgaagtcagttccacaagctctgtgagccagtcattggagagcgaggatgccagaacatcctgcaaagacgacgaggcggtggtgcaggctccacgccacgcaccagtggtgaggaccccttcaatccaaccaagtctcctaccacatgctgcgccattcgctaaaagtcacctggttcacggttctagccccggagttatggggacttccgtcgctacaagcgccagcaagattattcctcagggggctgactctactatgctggccactaaaacagtcaaacatggcgctccttcaccatcccatcccatcagtgcaccccaggcagccgcagctgctgctcttcgtcgacagatggctagccaagccccagccgtcaataccctgaccgaatcaactcttaagaatgtgcctcaggtggtgaacgtacaggagttgaagaataaccccgctaccccatcaactgccaaaaccccccatcccgtgctgacaccggttgccgcaaaccaggccaaacagggctctctgatcaattctttaaagccatccggcccaacccctgcatctggccagctgtcctctggggataaggcatctggaacagctaagattgagaccgccgtaacatccacccctagcgcctctggccagttctccaagccattttccttttctccgagtggtacagggtttaacttcggcattatcaccccaacaccttcttctaacttcacggccgctcagggagctacgccaagcacaaaggaatcatcacagcccgacgccttctcatccggaggtggcagcaaaccctcgtacgaggccatccccgaaagcagccccccttcggggatcactagtgcatcaaacactacccccggagagcccgctgcaagttcaagtcgcccagtggcaccctccggtactgctctgtctacaacctccagcaagttggagaccccacctagcaagctcggagagctcttatttccatcctcactggccggagaaacgcttggatccttcagcggactgcgggtgggacaagctgatgacagcactaagccaacaaataaagcctcatctacctctctcacctccacacagccaacaaaaacctctggcgtaccctctggcttcaattttaccgcccctcctgtactcggcaagcataccgagccccctgtcacctctagtgccacaacaacaagcgtggcgccacccgctgctactagtacttcgagcacggcagttttcgggtccctgcccgttacttcagcaggctcgtctggtgtgatttcgtttggaggaacatcattgtctgccggaaagacttcttttagttttggttctcagcagactaatagcaccgtgcccccatccgcacctccacctaccacagctgccacacccttacctacctcctttccaactctgtcttttggatccctgctgagcagcgctaccactccatcccttcccatgtcagcgggtagaagcactgaagaagcaacgtcaagtgccctgccggagaaaccaggggacagcgaggttagtgcttcagctgccagtctcctcgaggagcagcaaagtgcacagctcccacaggcccctcctcagacaagtgactcagtgaaaaaggagcccgtcctggcacagcccgcagtgagcaattcaggaacagctgcatcctccacaagcctcgtagccctctccgcagaggcaactcctgcgaccacaggggtgcccgatgctagaaccgaggccgtgccgccagcctcctcctttagcgttcctgggcaaacagcagtgacagcagctgcaattagttcagccggaccggtggcggtagagacttcgagcactcctattgcatctagtacaacctcaatcgtggctccaggaccatcagcggaggccgcagcatttggaactgtgactagcggcagttccgtgtttgcccagcctcctgccgctagtagcagttccgcattcaatcagttaacaaataacaccgcaactgcacctagtgccacgcccgtcttcgggcaggtcgccgcatccacagctcctagcctgttcgggcagcagaccggatctacagcctctactgcggctgctacccctcaggtttcaagcagtggattttcttcaccagcttttggcaccacagcgcctggcgtattcgggcagaccactttcggccaggcttcggtctttggccagagcgcgagttccgccgcatccgtgttctcgttttctcagccaggtttctcaagcgttcccgcattcggacagcctgccagctcaacacccacctccactagtggcagtgtgttcggagccgcatcttctacatcaagcagctcttctttttcattcggacagtcgagcccgaataccggagggggtttgtttgggcagtcaaacgctcctgcgtttggtcagagtcctggcttcgggcagggcggtagtgtatttggaggtaccagcgcagctactactacggcagcgaccagtggattttctttctgccaggccagcggctttgggtcttccaatacagggtcggttttcggccaggccgctagcactggaggcatcgtgtttgggcagcagtcttccagttcatcgggcagcgttttcggctcaggcaataccggtcgcggaggcggatttttctccggccttgggggaaagccatcgcaggacgccgctaataaaaatcctttttccagtgcatctggaggatttgggagtacagcaactagcaacacgtctaatttgttcggtaattccggcgctaagacattcgggggatttgcttcctcttctttcggcgagcagaagcccaccgggacattctcatcagggggtggtagtgtggcctcacagggcttcggattttcttccccaaataagaccggtggatttggggctgccccagtctttggctccccaccgaccttcggagggagccctgggttcgggggtgtgcccgcttttggaagcgcgccagcattcacctcaccactgggttccaccggcggtaaggttttcggcgagggcactgcagccgcttccgccggaggtttcggaagtctagcaatgtccctttcccccacactgaagggccgactcctcctcatgcggcctaaggccggagggggtagggaacaggcagcccctggaagaaagtccaacgaatcaaggtcgcttgggcacttgtgtatggaacgagccctgactagcccactaaaggtctgggaacaacaacagcaccacatcctaaggcatgctcgcgagtccgagtgcccccacttcagaattaccgtccctaccgacttttggttttgggatccggaata

SEQ ID NO: 290972 - DNA, 6282 bp, Artificial Sequence
  derived and/or modified sequence
atgggcgacgagatggacgccatgatccccgagagagagatgaaggacttccagttcagagccctgaagaaggtgagaatcttcgacagccccgaggagctgcccaaggagagaagcagcctgctggccgtgagcaacaagtacggcctggtgttcgccggcggcgccagcggcctgcagatcttccccaccaagaacctgctgatccagaacaagcccggcgacgaccccaacaagatcgtggacaaggtgcagggcctgctggtgcccatgaagttccccatccaccacctggccctgagctgcgacaacctgaccctgagcgcctgcatgatgagcagcgagtacggcagcatcatcgccttcttcgacgtgagaaccttcagcaacgaggccaagcagcagaagagacccttcgcctaccacaagctgctgaaggacgccggcggcatggtgatcgacatgaagtggaaccccaccgtgcccagcatggtggccgtgtgcctggccgacggcagcatcgccgtgctgcaggtgaccgagaccgtgaaggtgtgcgccaccctgcccagcaccgtggccgtgaccagcgtgtgctggagccccaagggcaagcagctggccgtgggcaagcagaacggcaccgtggtgcagtacctgcccaccctgcaggagaagaaggtgatcccctgcccccccttctacgagagcgaccaccccgtgagagtgctggacgtgctgtggatcggcacctacgtgttcgccatcgtgtacgccgccgccgacggcaccctggagaccagccccgacgtggtgatggccctgctgcccaagaaggaggagaagcaccccgagatcttcgtgaacttcatggagccctgctacggcagctgcaccgagagacagcaccactactacctgagctacatcgaggagtgggacctggtgctggccgccagcgccgccagcaccgaggtgagcatcctggccagacagagcgaccagatcaactgggagagctggctgctggaggacagcagcagagccgagctgcccgtgaccgacaagagcgacgacagcctgcccatgggcgtggtggtggactacaccaaccaggtggagatcaccatcagcgacgagaagaccctgccccccgcccccgtgctgatgctgctgagcaccgacggcgtgctgtgccccttctacatgatcaaccagaaccccggcgtgaagagcctgatcaagacccccgagagactgagcctggagggcgagagacagcccaagagccccggcagcacccccaccacccccaccagcagccaggccccccagaagctggacgccagcgccgccgccgcccccgccagcctgccccccagcagccccgccgcccccatcgccaccttcagcctgctgcccgccggcggcgcccccaccgtgttcagcttcggcagcagcagcctgaagagcagcgccaccgtgaccggcgagccccccagctacagcagcggcagcgacagcagcaaggccgcccccggccccggccccagcaccttcagcttcgtgccccccagcaaggccagcctggcccccacccccgccgccagccccgtggcccccagcgccgccagcttcagcttcggcagcagcggcttcaagcccaccctggagagcacccccgtgcccagcgtgagcgcccccaacatcgccatgaagcccagcttcccccccagcaccagcgccgtgaaggtgaacctgagcgagaacagcagccagagcgccccccccatgagccccttcagcagcgccagcaagcccgccgccagcggccccctgagccaccccacccccctgagcgccccccccagcagcgtgcccctgaagagcagcgtgctgcccagccccagcggcagaagcgcccagggcagcagcagccccgtgcccagcatggtgcagaagagccccagaatcaccccccccgccgccaagcccggcagcccccaggccaagagcctgcagcccgccgtggccgagaagcagggccaccagtggaaggacagcgaccccgtgatggccggcatcggcgaggagatcgcccacttccagaaggagctggaggagctgaaggccagaaccagcaaggcctgcttccaggtgggcaccagcgaggagatgaagatgctgagaaccgagagcgacgacctgcacaccttcctgctggagatcaaggagaccaccgagagcctgcacggcgacatcagcagcctgaagaccaccctgctggagggcttcgccggcgtggaggaggccagagagcagaacgagagaaacagagacagcggctacctgcacctgctgtacaagagacccctggaccccaagagcgaggcccagctgcaggagatcagaagactgcaccagtacgtgaagttcgccgtgcaggacgtgaacgacgtgctggacctggagtgggaccagcacctggagcagaagaagaagcagagacacctgctggtgcccgagagagagaccctgttcaacaccctggccaacaacagagagatcatcaaccagcagagaaagagactgaaccacctggtggacagcctgcagcagctgagactgtacaagcagaccagcctgtggagcctgagcagcgccgtgcccagccagagcagcatccacagcttcgacagcgacctggagagcctgtgcaacgccctgctgaagaccaccatcgagagccacaccaagagcctgcccaaggtgcccgccaagctgagccccatgaagcaggcccagctgagaaacttcctggccaagagaaagaccccccccgtgagaagcaccgcccccgccagcctgagcagaagcgccttcctgagccagagatactacgaggacctggacgaggtgagcagcaccagcagcgtgagccagagcctggagagcgaggacgccagaaccagctgcaaggacgacgaggccgtggtgcaggcccccagacacgcccccgtggtgagaacccccagcatccagcccagcctgctgccccacgccgcccccttcgccaagagccacctggtgcacggcagcagccccggcgtgatgggcaccagcgtggccaccagcgccagcaagatcatcccccagggcgccgacagcaccatgctggccaccaagaccgtgaagcacggcgcccccagccccagccaccccatcagcgccccccaggccgccgccgccgccgccctgagaagacagatggccagccaggcccccgccgtgaacaccctgaccgagagcaccctgaagaacgtgccccaggtggtgaacgtgcaggagctgaagaacaaccccgccacccccagcaccgccaagaccccccaccccgtgctgacccccgtggccgccaaccaggccaagcagggcagcctgatcaacagcctgaagcccagcggccccacccccgccagcggccagctgagcagcggcgacaaggccagcggcaccgccaagatcgagaccgccgtgaccagcacccccagcgccagcggccagttcagcaagcccttcagcttcagccccagcggcaccggcttcaacttcggcatcatcacccccacccccagcagcaacttcaccgccgcccagggcgccacccccagcaccaaggagagcagccagcccgacgccttcagcagcggcggcggcagcaagcccagctacgaggccatccccgagagcagcccccccagcggcatcaccagcgccagcaacaccacccccggcgagcccgccgccagcagcagcagacccgtggcccccagcggcaccgccctgagcaccaccagcagcaagctggagaccccccccagcaagctgggcgagctgctgttccccagcagcctggccggcgagaccctgggcagcttcagcggcctgagagtgggccaggccgacgacagcaccaagcccaccaacaaggccagcagcaccagcctgaccagcacccagcccaccaagaccagcggcgtgcccagcggcttcaacttcaccgccccccccgtgctgggcaagcacaccgagccccccgtgaccagcagcgccaccaccaccagcgtggccccccccgccgccaccagcaccagcagcaccgccgtgttcggcagcctgcccgtgaccagcgccggcagcagcggcgtgatcagcttcggcggcaccagcctgagcgccggcaagaccagcttcagcttcggcagccagcagaccaacagcaccgtgccccccagcgcccccccccccaccaccgccgccacccccctgcccaccagcttccccaccctgagcttcggcagcctgctgagcagcgccaccacccccagcctgcccatgagcgccggcagaagcaccgaggaggccaccagcagcgccctgcccgagaagcccggcgacagcgaggtgagcgccagcgccgccagcctgctggaggagcagcagagcgcccagctgccccaggcccccccccagaccagcgacagcgtgaagaaggagcccgtgctggcccagcccgccgtgagcaacagcggcaccgccgccagcagcaccagcctggtggccctgagcgccgaggccacccccgccaccaccggcgtgcccgacgccagaaccgaggccgtgccccccgccagcagcttcagcgtgcccggccagaccgccgtgaccgccgccgccatcagcagcgccggccccgtggccgtggagaccagcagcacccccatcgccagcagcaccaccagcatcgtggcccccggccccagcgccgaggccgccgccttcggcaccgtgaccagcggcagcagcgtgttcgcccagccccccgccgccagcagcagcagcgccttcaaccagctgaccaacaacaccgccaccgcccccagcgccacccccgtgttcggccaggtggccgccagcaccgcccccagcctgttcggccagcagaccggcagcaccgccagcaccgccgccgccaccccccaggtgagcagcagcggcttcagcagccccgccttcggcaccaccgcccccggcgtgttcggccagaccaccttcggccaggccagcgtgttcggccagagcgccagcagcgccgccagcgtgttcagcttcagccagcccggcttcagcagcgtgcccgccttcggccagcccgccagcagcacccccaccagcaccagcggcagcgtgttcggcgccgccagcagcaccagcagcagcagcagcttcagcttcggccagagcagccccaacaccggcggcggcctgttcggccagagcaacgcccccgccttcggccagagccccggcttcggccagggcggcagcgtgttcggcggcaccagcgccgccaccaccaccgccgccaccagcggcttcagcttctgccaggccagcggcttcggcagcagcaacaccggcagcgtgttcggccaggccgccagcaccggcggcatcgtgttcggccagcagagcagcagcagcagcggcagcgtgttcggcagcggcaacaccggcagaggcggcggcttcttcagcggcctgggcggcaagcccagccaggacgccgccaacaagaaccccttcagcagcgccagcggcggcttcggcagcaccgccaccagcaacaccagcaacctgttcggcaacagcggcgccaagaccttcggcggcttcgccagcagcagcttcggcgagcagaagcccaccggcaccttcagcagcggcggcggcagcgtggccagccagggcttcggcttcagcagccccaacaagaccggcggcttcggcgccgcccccgtgttcggcagcccccccaccttcggcggcagccccggcttcggcggcgtgcccgccttcggcagcgcccccgccttcaccagccccctgggcagcaccggcggcaaggtgttcggcgagggcaccgccgccgccagcgccggcggcttcggcagcctggccatgagcctgagccccaccctgaagggcagactgctgctgatgagacccaaggccggcggcggcagagagcaggccgcccccggcagaaagagcaacgagagcagaagcctgggccacctgtgcatggagagagccctgaccagccccctgaaggtgtgggagcagcagcagcaccacatcctgagacacgccagagagagcgagtgcccccacttcagaatcaccgtgcccaccgacttctggttctgggaccccgagtag

SEQ ID NO: 290973 - DNA, 1719 bp, Artificial Sequence
  derived and/or modified sequence
atggccagcagcgagacagagattcgctgggccgagccagggctcggtaaggggccacagaggagaagatgggcgtgggccgaagacaagagagatgtggacaggtcttcaagccagtcttgggaggaggagcgactgttccctaacgccacctcgccggagctgcttgaggatttccgcctcgcgcaacagcacttgccccccctggaatgggaccctcatccacagccggatgggcaccaggactcagaaagtggagaaacatcaggggaggaagcggaagccgaggatgtggattcccccgctagcagccacgagccattggcctggttaccacagcagggtcgccagttggatatgaccgaagaagagccagatgggacccttggcagtctggaggtggaagaggcgggggaatcaagttccagactgggatatgaagcagggctgagcttggaaggacacggtaacacgtcaccaatggcgcttgggcatggtcaagctcgtggttgggtggcaagcggtgagcaagctagtggagacaaactcagtgagcatagcgaggtgaacccctctgtggaactgagtcccgccaggtcctggagctcaggaacagtgtcactggaccacccttccgactccctggactccacctgggagggagaaaccgacggaccccagcctaccgcccttgctgagaccctgcctgagggccctagtcaccacctcctgagtcccgacggccggacgggtggctcagtcgctagagccacccccatggaattccaggattcaagcgctccgccagcacagtcccctcagcacgccactgataggtggcgccgggagaccacccgctttttctgtccgcagccaaaggaacacatttggaaacagacaaaaacctctcccaagccactgccgtcaaggttcatagggtccatcagtccacttaacccgcaaccaaggcccacccgacagggtcgcccccttccaagacaaggcgccactctagccgggcgcagctcaagcaatgcaccaaagtacgggagggggcagttgaactatcccctgccagacttcagcaaggtcgggcccagggtaaggtttcctaaggacgagagttaccgcccccccaagtctagatcccacaatcgcaagccacaggcccccgctaggccactcatattcaaatcacccgctgagatcgtccaggaagtgctgctgtcctctggtgaagcagcccttgctaaagacaccccgcccgctcaccctatcacacgggtgccacaggaatttcagacgccagaacaggccaccgaactcgttcatcagctccaagtgagtggaacccatgggtgcggatgcgtgacgaaagcccctgtgggcctggggtggagattaatcggcgttggccggcccggggtcgaggccggctggggcggtgaagcgtgggaccgggcttggctcggttgggaagccctgggcaggaggctggtaggatggggggggttgggatggagactggcaagagtgggcagccccggaatggaggccagtggcgtcggccgacccggtgtgggctctcctggcgttgagccaggaggagttggtagacccggcgtggaggccggatgggggcgtaaaccttgggataggggatggtggggaggtgaggcatggggtgggggatggttggggcaggaggcactgggctag

SEQ ID NO: 290974 - DNA, 1719 bp, Artificial Sequence
  derived and/or modified sequence
atggccagcagcgagacagagatccgctgggccgagcccggcctgggcaagggcccccagaggcggcgctgggcctgggccgaggacaagagagatgtggacaggagcagcagccagagctgggaggaggagcggctcttccccaatgccaccagccctgagctgctggaggacttccggctggcccagcagcacctgccccccctggagtgggacccccacccccagccagatggccaccaggacagcgagagcggggagaccagcggggaggaggccgaggccgaggatgtggacagccctgccagcagccatgagcccctggcctggctgccccagcagggccggcagctggacatgacagaggaggagccagatggcaccctgggcagcctggaggtggaggaggccggggagagcagcagccggctgggctatgaggccggcctgagcctggagggccacggcaacaccagccccatggccctgggccacggccaggcccggggctgggtggccagcggggagcaggccagcggggacaagctgtctgagcacagcgaggtgaaccccagcgtggagctgagccctgcccgctcctggagcagcggcaccgtgtccctggaccaccccagcgacagcctggacagcacctgggagggggagacagatggcccccagcccacagccctggccgagaccctgcctgagggccccagccaccacctgctgagcccagatggccgcactggaggctctgtggcccgggccacccccatggagttccaggacagcagcgcccccccagcccagagcccccagcacgccacagaccgctggaggcgggagaccacccgcttcttctgcccccagcccaaggagcacatctggaagcagaccaagaccagccccaagcccctgcccagccgcttcatcggcagcatcagccccctgaacccccagccccggcccacccggcagggccggcccctgccccggcagggcgccaccctggccggccgcagcagcagcaatgcccccaagtatggccggggccagctgaactaccccctgcctgacttcagcaaggtgggcccccgggtgcgcttccccaaggatgagagctaccggccccccaagagccgcagccacaacaggaagccccaggccccagcccggcccctcatcttcaagagccctgctgagatcgtgcaggaggtgctgctgagcagtggagaggccgccctggccaaggacaccccaccagcccaccccatcaccagggtgccccaggagttccagaccccagagcaggccacagagctggtgcaccagctgcaggtgtctggcacccacggctgcggctgtgtgaccaaggcccctgtgggcctgggctggaggctgattggagtgggccggcctggggtggaggccggctggggcggggaggcctgggaccgggcctggctgggctgggaggccctgggccgccgcctggtgggctggggcggcctgggctggaggctggcccgggtgggcagccctggcatggaggccagcggcgtgggccggcctggggtgggcagccctggggtggagcccggcggcgtgggccggcctggggtggaggccggctggggcaggaagccctgggaccggggctggtggggcggggaggcctggggcggcggctggctgggccaggaggccctgggctag

SEQ ID NO: 290975 - DNA, 1719 bp, Artificial Sequence
  derived and/or modified sequence
atggccagcagcgagaccgagatccggtgggccgagcccggcctgggtaagggacctcagagacgccgatgggcctgggccgaagataagcgtgacgtggacaggagttctagccagtcgtgggaagaggaaagactgtttccaaatgccacaagtcctgagctattggaagacttcagactcgcacagcagcacctgcccccactggagtgggacccacatccgcagccagacggccaccaagactccgagagcggggagacttctggcgaagaagcagaagctgaagatgtggatagccccgcctcttcccacgagccgttagcctggttgcctcagcaggggagacagctcgatatgactgaggaggagccagatggaacgcttggctccctcgaggttgaagaggctggggagtcctccagcagactaggttatgaggccggcctaagtttggagggacacggtaatacatctcctatggcgcttggccacggccaggctagagggtgggtcgctagcggagaacaggctagcggtgacaaattatcggagcactcggaggtgaacccttccgtcgagctgtcccctgccaggtcctggtcaagcggcacagtctccctcgaccaccctagcgacagcctggatagcacctgggaaggggagaccgacggcccacaacctacggcccttgcagagaccttgcctgaggggccttctcaccatcttctgtccccagatggccggaccggggggtctgtcgctcgagcgacccccatggagttccaggactcaagtgctccacccgcccagtccccccagcacgctacagacagatggagacgcgaaactacacgatttttctgtcctcagcctaaagagcatatttggaagcagactaagacctcccccaagccactgccttcccggtttattgggtcgatcagccctctgaatcctcaaccccgccctacacgccagggcagacccttaccccggcaaggtgccactctcgccggccgatctagctctaacgcacctaagtacggtcgaggccagctcaactaccccctccctgacttcagcaaagtcggaccgagggttaggttccccaaagacgagtcatatcggccacccaagtctagaagtcataacagaaaaccgcaggcccccgcgaggccgctgatttttaagtccccagcggagatcgtgcaggaggtgttgctcagctccggagaagcggctctcgcgaaggatacgccaccagcccatcctataaccagagtgccacaagagttccagactccagaacaggctacggagctggttcaccaactccaggtcagcggtacccatggctgcggctgcgttactaaagcaccggtcggactcggatggcggctgatcggtgtgggccggcctggtgtggaggctgggtgggggggagaggcctgggatcgggcatggcttgggtgggaagctctgggacgaaggctggttggttggggtggacttggctggaggctggccagggtgggaagtccggggatggaagcttcaggggtcggtcggcccggcgtgggttctccaggggtcgaaccaggcggggtgggcagacccggtgtcgaggctgggtggggtcgaaaaccttgggatcgcgggtggtggggtggtgaagcttggggaggcggctggctagggcaggaggctctcggctag

SEQ ID NO: 290976 - DNA, 1719 bp, Artificial Sequence
  derived and/or modified sequence
atggcgtcatctgagaccgaaatccgctgggccgaaccagggctggggaaaggccctcagaggcggagatgggcttgggcagaggacaagcgggacgtggaccgcagttcatcccagtcctgggaggaggaaaggttattcccgaacgctacgtctcctgagttattggaggactttagattggctcagcagcacctgccccctctagagtgggacccacatcctcagcccgacgggcaccaggattccgagagtggcgaaactagcggtgaagaggcagaggcagaggacgtagatagcccagcttctagccatgagcctctggcatggctgccccagcagggtcggcaactagacatgacggaggaggaacctgatggaaccttaggtagtctggaggtggaggaggccggagaatcatccagccggctcgggtacgaggcgggactctctctggaaggccatggcaatacaagtccaatggcgcttgggcatggacaggcaagaggttgggttgcaagcggggaacaggcttctggcgacaaactttctgaacattccgaggttaaccctagcgttgagctgagcccggctagaagctggtcctccgggaccgtctccctcgaccacccatctgacagtttggactctacatgggaaggagagacagatgggccacagcctacagcgcttgccgagaccctcccggaaggaccatcccatcaccttctatctcctgacgggaggaccggcggatccgtcgctagggcaactcctatggaattccaagacagctcagcccctcccgcacagagcccacaacatgcaactgaccggtggagaagagagaccactcgctttttttgcccccaaccaaaagaacacatttggaaacagaccaagacctcgcccaagcccctgcctagcagattcatcgggagcatctcgccactaaatccccagccccgaccaacaagacagggaaggcctctccctcgtcagggagcaaccctggccggacggtcctcttcaaatgcccctaaatacggcagaggacagttgaactatcctctgcccgacttttccaaagtcggcccaagggtgcgctttcccaaggatgagagttaccggcctccgaaaagtcgctcacacaatcggaagccacaggccccagcacgccctttgatatttaagtcccccgcagaaatcgtacaggaggtgctgctgagttctggcgaagccgctctggccaaagataccccgccagcacaccctatcacacgggtgccccaggagtttcaaaccccagaacaagcaactgagctggtccatcagttgcaggtctccggcacacacggatgcggttgtgttaccaaagcgcctgtgggtttagggtggcggctgataggggtcggtagacccggtgtagaagcaggctggggtggtgaagcttgggatcgcgcttggctggggtgggaggcgctcggacgcaggttagtgggctggggcggactcgggtggaggctggcacgtgtgggtagccctgggatggaagccagcggcgtgggacgacctggggttgggagccccggagtagagcctggcggagtggggcgacccggtgttgaagccggttggggtagaaagccttgggacaggggttggtggggaggtgaagcctggggtgggggttggctgggtcaagaagcactcgggtag

SEQ ID NO: 290977 - DNA, 1881 bp, Artificial Sequence
  derived and/or modified sequence
gcaactgaagacggaggtgcccaaggtcagaaggaagcaccacacagagggcacaggcaggatggccgatgctgacaggaaccagcggtgactctggggcccctggcagcagctctgtctcctgaagatgaagtggcccaggtgaagcccaggccagccccaatggccagctcggagactgagatccgctgggctgagcctggcctggggaagggcccccagcggcggcgctgggcctgggccgaggacaagagggatgtggatagaagtagttcacaaagctgggaagaagagagactctttcccaatgccaccagccccgagctcctagaggacttccgcctggcccagcagcacctgccgcccctggagtgggacccacacccgcagcccgatgggcatcaggattccgagtcaggagagacttcgggagaagaggctgaagcagaggatgtggacagcccagcaagttcccatgagcctcttgcctggctcccccagcagggccgtcagctggacatgactgaagaggagccagatgggaccctcggaagtctggaggttgaggaggctggagagagctcctcaaggttggggtatgaggctggtctcagcttggaaggccatggaaacaccagccccatggctcttgggcatggtcaggccaggggctgggtggcttctggcgaacaagccagtggggacaaactttctgaacattccgaggtcaacccatccgttgaactcagcccggcaaggtcctggagcagtgggacagtgagcctcgaccaccctagtgacagccttgattctacctgggaaggagagaccgatggcccccagcccactgccctggcagaaaccttgccagagggccccagccaccacctcctaagcccagatggcagaactggaggcagtgttgctcgggcaacccccatggaattccaggactcctcagctcccccagcccagagtccgcagcatgccacagatagatggaggagagaaacgaccagattcttctgccctcagcccaaggaacacatctggaagcagacaaagacgtcacctaagccactcccttcccgattcattggctccatcagccccctgaatccccagcccaggccaacgcggcagggcaggccgctgcccagacagggagccactctggctggccgctcctcttctaatgcccccaagtatggccgggggcagttgaactacccactccctgatttctccaaggtagggccccgggtgagattccccaaagatgagagctaccgtccccccaagtccagaagccacaacaggaagcctcaggcccctgccaggcccctcatcttcaagtctccagctgagattgtgcaggaggtgctgttgagcagtggagaagcagccctggcaaaggacacgcctcctgcccaccctatcaccagggtaccccaagaatttcagacgcctgagcaagccactgagctggtccatcagctccaggttagtgggactcatggctgtggatgtgtcaccaaggcccctgttggcttggggtggaggctaattggggtggggaggcctggagtagaggctggctggggtggagaggcctgggatagagcctggctggggtgggaagccctaggacggaggctggtggggtggggaggcctggggtggaggctggctagggtgggaagccctgggatggaggccagtggggtggggaggcctggggtggggagccctggggtagagcctggtggggtggggaggcctggggtggaggctggctggggtaggaagccctgggatagaggctggtggggtggggaggcctggggtggaggctggctggggcaggaagccctggggtag

SEQ ID NO: 290978 - DNA, 1719 bp, Artificial Sequence
  derived and/or modified sequence
atggccagcagcgagaccgagatcagatgggccgagcccggcctgggcaagggcccccagagaagaagatgggcctgggccgaggacaagagagacgtggacagaagcagcagccagagctgggaggaggagagactgttccccaacgccaccagccccgagctgctggaggacttcagactggcccagcagcacctgccccccctggagtgggacccccacccccagcccgacggccaccaggacagcgagagcggcgagaccagcggcgaggaggccgaggccgaggacgtggacagccccgccagcagccacgagcccctggcctggctgccccagcagggcagacagctggacatgaccgaggaggagcccgacggcaccctgggcagcctggaggtggaggaggccggcgagagcagcagcagactgggctacgaggccggcctgagcctggagggccacggcaacaccagccccatggccctgggccacggccaggccagaggctgggtggccagcggcgagcaggccagcggcgacaagctgagcgagcacagcgaggtgaaccccagcgtggagctgagccccgccagaagctggagcagcggcaccgtgagcctggaccaccccagcgacagcctggacagcacctgggagggcgagaccgacggcccccagcccaccgccctggccgagaccctgcccgagggccccagccaccacctgctgagccccgacggcagaaccggcggcagcgtggccagagccacccccatggagttccaggacagcagcgccccccccgcccagagcccccagcacgccaccgacagatggagaagagagaccaccagattcttctgcccccagcccaaggagcacatctggaagcagaccaagaccagccccaagcccctgcccagcagattcatcggcagcatcagccccctgaacccccagcccagacccaccagacagggcagacccctgcccagacagggcgccaccctggccggcagaagcagcagcaacgcccccaagtacggcagaggccagctgaactaccccctgcccgacttcagcaaggtgggccccagagtgagattccccaaggacgagagctacagaccccccaagagcagaagccacaacagaaagccccaggcccccgccagacccctgatcttcaagagccccgccgagatcgtgcaggaggtgctgctgagcagcggcgaggccgccctggccaaggacaccccccccgcccaccccatcaccagagtgccccaggagttccagacccccgagcaggccaccgagctggtgcaccagctgcaggtgagcggcacccacggctgcggctgcgtgaccaaggcccccgtgggcctgggctggagactgatcggcgtgggcagacccggcgtggaggccggctggggcggcgaggcctgggacagagcctggctgggctgggaggccctgggcagaagactggtgggctggggcggcctgggctggagactggccagagtgggcagccccggcatggaggccagcggcgtgggcagacccggcgtgggcagccccggcgtggagcccggcggcgtgggcagacccggcgtggaggccggctggggcagaaagccctgggacagaggctggtggggcggcgaggcctggggcggcggctggctgggccaggaggccctgggctag

SEQ ID NO: 290979 - protein, 162 aa, Artificial Sequence
  derived and/or modified sequence
MSSAAENGEAAPGKQNEEKTYKKTASSAIKGAIQLGIGYTVGNLTSKPERDVLMQDFYVVESVFLPSEGSNLTPAHHYPDFRFKTYAPLAFRYFRELFGIKPDDYLYSICSEPLIELSNPGASGSLFFVTSDDEFIIKTVQHKEAEFLQKLLPGYYMNLNQN

SEQ ID NO: 290980 - protein, 157 aa, Artificial Sequence
  derived and/or modified sequence
MSSAAENGEAAPGKQNEEKTYKKTASSAIKGAIQLGIGYTVGNLTSKPERDVLMQDFYVVESVFLPSEGSNLTPAHHYPDFRFKTYAPLAFRYFRELFGIKPDDYLYSICSEPLIELSNPGASGSLFFVTSDDEFIIKTVQHKEAEFLQKLLPGYYM

SEQ ID NO: 290981 - DNA, 312 bp, Artificial Sequence
  derived and/or modified sequence
atgagttcggccgccgagaacggcgaggccgctcctggaaaacagaacgaagaaaagacctacaagaagactgcttcctcagctattaaaggtgcgattcagctagggatcgggtacaccgtcgggaacttgacaagtaaaccagagagagatgtgttgatgcaggacttttatgttgtggagtctgtgtttcttccatcagaaggttccaacttgacacccgcacatcactatcctgattttcgattcaagacatatgcacccctggcgttcaggtactttagggaattatttggcatcaaacccgattag

SEQ ID NO: 290982 - DNA, 1350 bp, Artificial Sequence
  derived and/or modified sequence
atgcaggatttctacgtcgtcgaatctgtattcttgccttctgaaggatccaatctgacaccggcacatcactaccctgactttagatttaaaacatacgctcccctggcctttcggtacttcagagagctttttgggataaagccagatgactatctctattcgatatgcagtgagcctctcatcgagctctccaaccccggggcctccgggagcctgttcttcgtaacctctgacgacgagtttattatcaaaaccgttcagcataaggaagccgaatttttacagaaactgttacccggatactacatgaacttgaatcagaatcctcgaactctcctgcccaagttttacgggctatactgcatgcagagcggcggcatcaatataaggatcgtggtgatgaacaacgtgctgcctcggagcatgcgaatgcattttacttatgacttaaagggctccacatacaagcgaagggcatcacgtaaagagagagagaaatccaatccaaccttcaaggacctggactttctacaggacatgcacgaaggactgtacttcgacacagaaacttacaacgctttgatgaaaaccctgcaaagagactgtcgtgtcctggaatccttcaaaattatggactattcactcctcctggggattcattttctggatcattctctgaaggagaaagaggaggaaaccccacaaaacgtacccgatgcaaagcgcactggcatgcagaaggtgctgtactctactgccatggaaagtatccaagggccaggaaaaagcggcgatggaatcatcactgagaatcccgataccatgggcggcataccggccaagtctcataggggggagaagctactcttatttatgggcatcattgacatcctccagagctatagattaatgaagaaactagaacactcctggaaggcattggtgtatgatggagataccgtctccgtgcaccgcccctccttttacgcagaccggtttctaaaatttatgaacagtcgggtgtttaagaagatccaagctctgaaggcttccccaagtaagaaaagatgtaattccattgcggcactcaaggcaacctcccaagagatcgtaagctcgatcagtcaggagtggaaggatgagaagcgcgacctgttgaccgaaggccagagcttctcatcgctggacgaggaggccctgggatcaagacatcggccagatctcgttcccagcactccaagcctgttcgaagccgcctcactcgctacaacaatttcaagctccagcttatacgtgaacgagcattacccgcatgaccgccctactctgtatagtaatagtaaatag

SEQ ID NO: 290983 - DNA, 489 bp, Artificial Sequence
  derived and/or modified sequence
atgagctctgccgccgagaatggagaggcagcaccaggtaagcagaacgaggagaagacatacaagaagaccgcttcctcagccataaaaggcgctatacaactgggaatcggctatacagtgggcaacttgacctccaaacccgagcgtgacgttctcatgcaggatttttatgtcgtggaaagcgtgtttttaccttccgaaggctcaaatctgacccctgctcaccactatccagattttagattcaagacatacgctcccttagcatttagatacttcagagaacttttcggtatcaaaccagatgactacctttatagtatttgctcggagcctctaatcgaattgtctaatcctggcgcatctggctccttgttcttcgtcacaagcgacgatgagttcatcattaagaccgtccaacataaggaagccgagtttctccagaaattgctaccaggatactatatgaacctgaaccagaactag

SEQ ID NO: 290984 - DNA, 474 bp, Artificial Sequence
  derived and/or modified sequence
atgtcctccgcagctgaaaatggcgaggccgctccgggaaagcagaatgaagagaaaacatacaagaaaacagcctcctcagcaattaaaggcgctatccagcttggtattgggtacacagtgggtaacctgaccagtaagccagaacgggatgtgctgatgcaggatttctatgtagtggagagcgtattcctgcccagcgagggcagcaatctcactccagcgcaccattaccctgactttcgcttcaaaacttatgcacccctggcgttcaggtatttccgcgagctgtttggtattaaacctgacgattacttgtactcgatttgctctgaacccttgattgaactgtctaaccccggggcttcaggttctctgttctttgtaacctccgacgacgaattcattataaagacggtgcagcacaaggaagcagagtttctgcaaaaactgctgcctggttattacatgtag

SEQ ID NO: 290985 - DNA, 1509 bp, Artificial Sequence
  derived and/or modified sequence
atgagcagcgctgcggagaacggcgaggcggctcctggtaagcaaaatgaggagaaaacttataagaaaactgcaagctccgccatcaaaggcgcgatacagctgggtattggctataccgtgggaaacctgacgagtaagccagaaagagatgtcctgatgcaggatttttacgtcgtagagtctgtgttccttcctagcgaaggatccaacctcacacccgcccaccactaccccgatttcaggttcaaaacttatgcaccactcgcctttcgatactttagggaacttttcggaattaagcccgacgactacctgtattcgatctgctcagaacccttgatagagcttagcaacccgggagcgtccgggagtctgtttttcgtgacatcggacgatgaattcattatcaagaccgtacagcataaggaagcggagttcctccagaagttactgccaggctactacatgaatcttaaccaaaaccccaggactctgctgccgaagttttacggcctctattgtatgcagtcaggcggcatcaacatcagaattgttgttatgaacaacgtactgcctaggtcaatgcgaatgcattttacatatgacttaaagggatctacgtataagcgcagagctagtcgcaaagagagagaaaagtcaaaccccacctttaaggaccttgattttcttcaggacatgcatgaaggactgtacttcgacaccgaaacatacaatgcccttatgaagacacttcagcgcgactgtagggttctggaatcgtttaagattatggactactcacttctgctgggcatacacttccttgatcactctctgaaagaaaaagaagaagagactccccagaatgtacctgacgcaaaacgaaccggaatgcaaaaggtgttgtacagtactgctatggagtccattcagggcccaggtaagtccggggatggcattattactgagaatcctgacacaatgggaggtatccctgccaaatcccatagaggcgaaaagcttctgcttttcatgggcataatcgatatccttcagtcctaccggcttatgaagaagctcgaacatagttggaaagctttagtctacgatggcgacacagtcagcgtgcaccggccatcattctacgcagacagatttcttaaattcatgaatagccgcgtatttaagaaaatccaggcattgaaagcttccccttccaagaaaaggtgtaacagcatcgcagcacttaaagctacttcacaggagatcgtcagcagtatctcccaggagtggaaagacgagaaaagggacctgttgaccgagggccagtctttcagctcattggacgaggaggcattagggtcccggcacaggcccgacctcgttccgagcaccccttccttattcgaagcagcttctctagcaacaacaatatcctcttccagcttgtacgttaacgagcattatccccacgataggccaactttatactccaattccaaatag

SEQ ID NO: 290986 - DNA, 312 bp, Artificial Sequence
  derived and/or modified sequence
atgagcagcgctgctgaaaatggagaggccgcccctgggaagcagaatgaggagaagacctacaagaagacagccagcagcgccatcaagggggccatccagctgggcatcggctacacagtgggcaacctgaccagcaagccagagagagatgtgctgatgcaggacttctacgtggtggagagcgtcttcctgcccagcgagggcagcaacctgaccccagcccaccactacccagacttccgcttcaagacctacgcccccctggccttccgctacttccgggagctgtttggcatcaagccagactag

SEQ ID NO: 290987 - DNA, 1350 bp, Artificial Sequence
  derived and/or modified sequence
atgcaggacttctacgtggtggagagcgtcttcctgcccagcgagggcagcaacctgaccccagcccaccactacccagacttccgcttcaagacctacgcccccctggccttccgctacttccgggagctgtttggcatcaagccagatgactacctgtacagcatctgcagcgagcccctcatcgagctgagcaaccctggggccagcggcagcctcttctttgtgaccagtgatgatgagttcatcatcaagacagtgcagcacaaggaggccgagttcctgcagaagctgctgcccggctactacatgaacctgaaccagaaccccaggaccctgctgcccaagttctacggcctgtactgcatgcagagcggcggcatcaacatccgcatcgtggtgatgaacaacgtgctgcccaggtccatgaggatgcacttcacctatgacctgaagggcagcacctacaagaggcgggccagcaggaaggagcgggagaagagcaaccccaccttcaaggacctggacttcctgcaggacatgcatgagggcctgtactttgacacagagacctacaatgccctgatgaagaccctgcagagggactgccgggtgctggagagcttcaagatcatggactacagcctgctgctgggcatccacttcctggaccacagcctgaaggagaaggaggaggagaccccccagaatgtgcctgatgccaagaggacaggcatgcagaaggtgctgtacagcacagccatggagagcatccagggccctgggaagtctggagatggcatcatcacagaaaatccagacaccatgggcggcatcccagccaagagccacagaggagagaagctgctgctcttcatgggcatcatcgacatcctgcagagctaccgcctgatgaagaagctggagcacagctggaaggccctggtgtatgatggagacacagtgtctgtgcaccggcccagcttctatgctgaccgcttcctgaagttcatgaacagcagggtcttcaagaagatccaggccctgaaggccagccccagcaagaagcgctgcaacagcattgctgccctgaaggccaccagccaggagatcgtgagcagcatcagccaggagtggaaggatgagaagagggacctgctgacagagggccagagcttcagcagcctggatgaggaggccctgggcagccgccacaggccagacctggtgcccagcacccccagcctgtttgaagctgccagcctggccaccaccatcagcagcagcagcctgtatgtgaatgagcactacccccatgaccggcccaccctgtacagcaacagcaagtag

SEQ ID NO: 290988 - DNA, 489 bp, Artificial Sequence
  derived and/or modified sequence
atgagcagcgctgctgaaaatggagaggccgcccctgggaagcagaatgaggagaagacctacaagaagacagccagcagcgccatcaagggggccatccagctgggcatcggctacacagtgggcaacctgaccagcaagccagagagagatgtgctgatgcaggacttctacgtggtggagagcgtcttcctgcccagcgagggcagcaacctgaccccagcccaccactacccagacttccgcttcaagacctacgcccccctggccttccgctacttccgggagctgtttggcatcaagccagatgactacctgtacagcatctgcagcgagcccctgattgagctgagcaaccctggggccagcggcagcctcttctttgtgaccagtgatgatgagttcatcatcaagacagtgcagcacaaggaggccgagttcctgcagaagctgctgcccggctactacatgaacctgaaccagaactag

SEQ ID NO: 290989 - DNA, 474 bp, Artificial Sequence
  derived and/or modified sequence
atgagcagcgctgctgaaaatggagaggccgcccctgggaagcagaatgaggagaagacctacaagaagacagccagcagcgccatcaagggggccatccagctgggcatcggctacacagtgggcaacctgaccagcaagccagagagagatgtgctgatgcaggacttctacgtggtggagagcgtcttcctgcccagcgagggcagcaacctgaccccagcccaccactacccagacttccgcttcaagacctacgcccccctggccttccgctacttccgggagctgtttggcatcaagccagatgactacctgtacagcatctgcagcgagcccctgattgagctgagcaaccctggggccagcggcagcctcttctttgtgaccagtgatgatgagttcatcatcaagacagtgcagcacaaggaggccgagttcctgcagaagctgctgcccggctactacatgtag

SEQ ID NO: 290990 - DNA, 1509 bp, Artificial Sequence
  derived and/or modified sequence
atgagcagcgctgctgaaaatggagaggccgcccctgggaagcagaatgaggagaagacctacaagaagacagccagcagcgccatcaagggggccatccagctgggcatcggctacacagtgggcaacctgaccagcaagccagagagagatgtgctgatgcaggacttctacgtggtggagagcgtcttcctgcccagcgagggcagcaacctgaccccagcccaccactacccagacttccgcttcaagacctacgcccccctggccttccgctacttccgggagctgtttggcatcaagccagatgactacctgtacagcatctgcagcgagcccctgattgagctgagcaaccctggggccagcggcagcctcttctttgtgaccagtgatgatgagttcatcatcaagacagtgcagcacaaggaggccgagttcctgcagaagctgctgcccggctactacatgaacctgaaccagaaccccaggaccctgctgcccaagttctacggcctgtactgcatgcagagcggcggcatcaacatcagaattgtggtgatgaacaacgtgctgcccaggtccatgaggatgcacttcacctatgacctgaagggcagcacctacaagagaagagccagcaggaaggagcgggagaagagcaaccccaccttcaaggacctggacttcctgcaggacatgcatgagggcctgtactttgacacagagacctacaatgccctgatgaagaccctgcagagggactgccgggtgctggagagcttcaagatcatggactacagcctgctgctgggcatccacttcctggaccacagcctgaaggagaaggaggaggagaccccccagaatgtgcctgatgccaagaggacaggcatgcagaaggtgctgtacagcacagccatggagagcatccagggccctgggaagtctggagatggcatcatcacagagaacccagacaccatgggcggcatcccagccaagagccacagaggagagaagctgctgctcttcatgggcatcatcgacatcctgcagagctaccgcctgatgaagaagctggagcacagctggaaggccctggtgtatgatggagacacagtgtctgtgcaccggcccagcttctacgccgaccgcttcctgaagttcatgaacagcagggtcttcaagaagatccaggccctgaaggccagccccagcaagaagcgctgcaacagcattgctgccctgaaggccaccagccaggagatcgtgagcagcatcagccaggagtggaaggatgagaagagggacctgctgacagagggccagagcttcagcagcctggatgaggaggccctgggcagccgccacaggccagacctggtgcccagcacccccagcctgtttgaggccgccagcctggccaccaccatcagcagcagcagcctgtatgtgaatgagcactacccccatgaccggcccaccctgtacagcaacagcaagtag

SEQ ID NO: 290991 - DNA, 312 bp, Artificial Sequence
  derived and/or modified sequence
atgagcagcgccgccgagaacggcgaggccgcccccggcaagcagaacgaggaaaaaacatataaaaagacagcatctagtgcaatcaagggcgcaatccagctggggatagggtatacggtggggaatctcacaagcaaacccgaacgggatgtactaatgcaggatttttatgtggtagagtccgtgttcctgccctctgaggggagcaatctcactcctgctcaccactatcctgactttcgattcaaaacttacgcccccctcgcattcagatatttccgagagctcttcggaattaagcccgactag

SEQ ID NO: 290992 - DNA, 1350 bp, Artificial Sequence
  derived and/or modified sequence
atgcaggacttctacgtggtggagagcgtgttcctgcccagcgaggggtcaaatctcacccctgcccaccactacccagatttcaggtttaaaacctatgctccgctggcatttagatactttagggaactgtttggtatcaaacccgacgactatctgtactccatctgctcagagcccttaatcgagctttcgaacccaggagctagcggttccctctttttcgtgacaagcgacgatgagttcatcattaaaaccgttcagcacaaggaggctgagtttctgcagaagttgttgccaggttactatatgaacctgaaccagaatccacgcacactgctgccaaagttctatgggctgtactgcatgcagtccggaggtatcaacattagaatcgtggtgatgaataacgttctgccacgtagcatgcggatgcacttcacttacgatcttaaagggtcaacttacaagaggagagcctctcggaaagagagggagaagtccaaccctacctttaaagacctcgacttcttgcaggacatgcatgaaggcctctatttcgacacagagacatacaatgccttaatgaagacactccagagggactgtcgggtcctggaatcatttaaaattatggattactctctattgctcggtatccactttctcgaccactcactcaaggagaaagaggaagaaacaccacagaatgtacccgacgccaagcgaacaggaatgcagaaagtgctctattcaacagccatggagagcattcagggaccgggtaaatccggcgacggcattatcacggagaacccggatacaatgggcggtatccccgcaaaatcccaccggggggagaagctgctgctgttcatgggtattatcgacattctgcaatcgtaccggctaatgaagaagctcgaacacagctggaaggccctggtctacgatggggacacggttagtgtccacagaccaagcttctacgctgaccgctttttgaagttcatgaatagtagagtcttcaaaaaaattcaggcactgaaggccagtccttctaagaaacggtgcaacagtatcgctgccctcaaggctacctcgcaagaaattgtgtcctcaatcagtcaagaatggaaagatgagaagagagatctgctcacagaaggacagagcttttctagcctagatgaggaggccctcggatcccgccacagacctgacctggtgccttccacaccaagcctctttgaggctgcttctttagccacaactatctcatcgtcaagcctttatgtgaacgagcattacccacacgacaggcctactctctactcgaatagcaagtag

SEQ ID NO: 290993 - DNA, 489 bp, Artificial Sequence
  derived and/or modified sequence
atgagcagcgccgccgagaacggcgaggccgcccccggcaagcagaacgaagaaaagacttacaaaaagactgcttctagcgccattaaaggagcgattcaattgggcatcggatacactgtcgggaatctcacaagcaagcctgaacgggacgtgctgatgcaggatttttatgtggtggaatcggtgttcctgccttcagagggcagcaacttgacccccgcacatcactacccagactttcgctttaagacttatgcccctcttgctttcaggtacttccgtgaactgttcggcattaaacctgacgattacctgtactccatctgcagcgagcctcttatcgagctctccaatcctggcgcctccggctccctcttctttgtgactagtgacgacgagtttataatcaagacggtccagcacaaggaagccgagttccttcagaaactcctgccagggtattacatgaatcttaatcagaactag

SEQ ID NO: 290994 - DNA, 474 bp, Artificial Sequence
  derived and/or modified sequence
atgagcagcgccgccgagaacggcgaggccgcccccggcaagcagaatgaagagaaaacttataaaaaaactgcgtcctccgccatcaaaggtgctatccagctcggtatcggctataccgtcggaaatttgacaagcaaacccgaacgtgacgtgctcatgcaggatttctatgtagtggaaagtgtgttcctacctagcgagggcagtaacctcactcctgctcatcactacccggactttaggtttaagacatacgcgccactcgccttccgctattttcgagagctctttggcatcaaacccgacgactacctgtactctatttgttcagagccacttatcgaactgtccaaccccggcgctagtggctccctgtttttcgtgacaagcgacgatgagttcatcatcaagacagttcaacacaaggaagccgaattcttgcagaagctcctgccagggtattatatgtag

SEQ ID NO: 290995 - DNA, 1509 bp, Artificial Sequence
  derived and/or modified sequence
atgagcagcgccgccgagaacggcgaggccgcccccggcaagcagaatgaagagaagacttacaagaaaaccgcaagcagcgcaattaagggggctatccagctgggcatcggctataccgtggggaacttaacctctaaacctgaacgggacgtgctaatgcaggacttttacgtcgttgagagtgttttcctgccatccgagggctccaacttgacaccagcgcatcattaccccgattttagatttaaaacctacgcacctctggctttcagatattttagagaactgttcggcatcaaaccggacgactacctctactctatatgctcggagccccttatcgaactctccaatccaggcgcctcaggatctctgttcttcgtgacatctgatgacgaattcattattaaaacagttcagcataaggaggctgaatttcttcagaaactcttacccgggtattacatgaaccttaaccagaatccaaggactcttttacctaagttctatggattgtattgtatgcagtccggagggattaatatccgaatagtggtcatgaataacgtgcttccaagatccatgcgtatgcactttacctacgatctgaagggctctacctacaagcgcagagcgtcacgaaaggaacgggagaagtcaaacccaacgttcaaggatttggatttcctacaggatatgcacgaggggctttactttgacacagagacatataacgcgctgatgaaaacactgcagcgcgattgcagggtgctcgaatctttcaagataatggactatagcctcctgctcggaatccattttctggaccacagtctcaaggaaaaggaagaggaaactccgcagaacgttccggacgccaaacgaaccggcatgcagaaggttttgtatagcactgcaatggaatctatccaaggtcccggcaaatcaggtgacggcattatcaccgaaaatcctgacacgatgggaggcattcctgccaagtcccacaggggggagaaactgctgctgttcatgggcattattgatattttacagtcatatcggctcatgaagaagttggagcatagctggaaggccctcgtatatgatggagacacagtgagcgtccatcgcccctctttctacgcggatcgtttcctcaagtttatgaactctcgggtgttcaagaagatccaggccttgaaggccagccctagcaagaaacggtgtaactctatcgctgctctgaaggcaaccagccaggagatcgtgtcctctatctcacaagaatggaaagacgaaaagagggatctccttactgaagggcagagtttcagcagcctggacgaagaggctctgggctccaggcaccgacccgacctagtcccaagtacccccagtctctttgaggctgcaagtttagctacaaccatcagcagttcttccctatacgtgaatgagcattatccgcacgatcggccaaccctctattccaactccaagtag

SEQ ID NO: 290996 - DNA, 612 bp, Artificial Sequence
  derived and/or modified sequence
gctgaacccaagagactgatgtattgcccagactcctgcacgctgtctgccagccacagatgaggaagccaaggcccagcagagctgagatgtgactgcagagccgtccaaccccagtcctgtgacctttctctggtgcctgatacctctcagcatttgagggccttttctcttcctgcttcatctctaaaggtccttctaggagagaggtgaaagaaacctggcaaagaaaacggtctcgacaatgagtaggccacccatcactactaactacagatgacttgccatttcatttacaaagatgtcttctgctgctgaaaatggagaggcagcacctggaaaacaaaatgaagaaaaaacctataaaaagactgcatcatctgctattaaaggtgctattcagctgggaataggatacacagtgggtaatctcacttccaagccagaacgagatgttcttatgcaagacttttatgtggtggaaagtgtgttcctacccagcgaagggagcaatctgaccccagcacatcactacccagactttagatttaagacatacgctccattagcattccgatatttcagagaactttttggtatcaagcctgatga

SEQ ID NO: 290997 - DNA, 1811 bp, Artificial Sequence
  derived and/or modified sequence
aacttgcagactgtggcgcaactggtcttggtagcggaggcacccgaatgctgcccgggtgagatgaggaagccaaggcccagcagagctgagatgtgactgcagagccgtccaaccccagtcctgtgacctttctctggtgcctgatacctctcagcatttgagggccttttctcttcctgcttcatctctaaaggtccttctaggagagaggtgaaagaaacctggcaaagaaaacggtctcgacaatgagtaggccacccatcactactaactacagatgacttgccatttcatttacaaagatgtcttctgctgctgaaaatggagaggcagcacctggaaaacaaaatgaagaaaaaacctataaaaagactgcatcatctgctattaaaggtgctattcagctgggaataggatacacagtgggtaatctcacttccaagccagaacgagatgttcttatgcaagacttttatgtggtggaaagtgtgttcctacccagcgaagggagcaatctgaccccagcacatcactacccagactttagatttaagacatacgctccattagcattccgatatttcagagaactttttggtatcaagcctgatgattacttgtattccatctgcagtgaacctctaatagaactgtctaaccctggagccagtggatccttgttttttgtgaccagtgatgatgaatttatcatcaaaacagttcagcacaaagaagctgagtttcttcagaagctactgccaggctattacatgaatttaaaccagaatccaaggactcttttgccaaaattttacggactgtattgtatgcaatcaggaggcattaatatcaggattgtggtgatgaacaacgttttgccacgctccatgagaatgcactttacatatgacttgaaaggctcaacgtataagcgaagagcatcccgtaaagagagagagaaatccaaccccacatttaaggacttagatttcctgcaagacatgcacgaagggttgtattttgatacggaaacatacaacgcgcttatgaaaacacttcagagagactgccgggtgctagaaagcttcaagatcatggattatagccttctgttgggaattcatttcctggaccattccctcaaagagaaagaggaggagaccccacaaaatgtgcctgatgctaagcggactgggatgcagaaggttctctactcaacagccatggaatctatccagggtccagggaaatctggagatgggataatcacagagaacccagacacaatgggaggcattccagctaaaagccataggggagaaaaactacttttatttatgggcattattgacattctgcaatcatataggttaatgaagaagttagaacattcctggaaagctcttgtttatgatggggacactgtttctgttcatagaccaagcttttatgcagacagatttcttaagttcatgaattccagagttttcaagaaaattcaagctttgaaggcttcaccgtctaagaaacggtgcaattcaatcgccgccctaaaggccacttcacaggagattgtgtcctcaattagccaggaatggaaggatgagaagcgggatttgctgactgaaggacaaagttttagcagccttgatgaagaagccctgggatcccgacacaggccagacctggtccctagcactccatcactgtttgaagctgcttccttggcaaccacaatttcatcttcttccttatacgtcaatgagcactatccacacgacaggcctacactctattcaaacagtaaa

SEQ ID NO: 290998 - DNA, 791 bp, Artificial Sequence
  derived and/or modified sequence
cgaaagcccaccaatccattgtggaatgacctctacaaatagttttgcttctgcacaaccagatgaggaagccaaggcccagcagagctgagatgtgactgcagagccgtccaaccccagtcctgtgacctttctctggtgcctgatacctctcagcatttgagggccttttctcttcctgcttcatctctaaaggtccttctaggagagaggtgaaagaaacctggcaaagaaaacggtctcgacaatgagtaggccacccatcactactaactacagatgacttgccatttcatttacaaagatgtcttctgctgctgaaaatggagaggcagcacctggaaaacaaaatgaagaaaaaacctataaaaagactgcatcatctgctattaaaggtgctattcagctgggaataggatacacagtgggtaatctcacttccaagccagaacgagatgttcttatgcaagacttttatgtggtggaaagtgtgttcctacccagcgaagggagcaatctgaccccagcacatcactacccagactttagatttaagacatacgctccattagcattccgatatttcagagaactttttggtatcaagcctgatgattacttgtattccatctgcagtgaacctctaatagaactgtctaaccctggagccagtggatccttgttttttgtgaccagtgatgatgaatttatcatcaaaacagttcagcacaaagaagctgagtttcttcagaagctactgccaggctattacatgaatttaaaccagaatc

SEQ ID NO: 290999 - DNA, 813 bp, Artificial Sequence
  derived and/or modified sequence
agtgcattccaagttctaaacagctgagttttggatctcagctcctttgagagttgtggaccagtcagacacaaaattatctttaaatatacagatagggatgaggaagccaaggcccagcagagctgagatgtgactgcagagccgtccaaccccagtcctgtgacctttctctggtgcctgatacctctcagcatttgagggccttttctcttcctgcttcatctctaaaggtccttctaggagagaggtgaaagaaacctggcaaagaaaacggtctcgacaatgagtaggccacccatcactactaactacagatgacttgccatttcatttacaaagatgtcttctgctgctgaaaatggagaggcagcacctggaaaacaaaatgaagaaaaaacctataaaaagactgcatcatctgctattaaaggtgctattcagctgggaataggatacacagtgggtaatctcacttccaagccagaacgagatgttcttatgcaagacttttatgtggtggaaagtgtgttcctacccagcgaagggagcaatctgaccccagcacatcactacccagactttagatttaagacatacgctccattagcattccgatatttcagagaactttttggtatcaagcctgatgattacttgtattccatctgcagtgaacctctaatagaactgtctaaccctggagccagtggatccttgttttttgtgaccagtgatgatgaatttatcatcaaaacagttcagcacaaagaagctgagtttcttcagaagctactgccaggctattacatg

SEQ ID NO: 291000 - DNA, 2019 bp, Artificial Sequence
  derived and/or modified sequence
actgctctcccttcgctgtggggaagcgacaacgtcccgataacttgcagactgtggcgcaactggtcttggtagcggaggcacccgaatgctgcccgggtgagaaacctggcaaagaaaacggtctcgacaatgagtaggccacccatcactactaactacagatgacttgccatttcatttacaaagatgtcttctgctgctgaaaatggagaggcagcacctggaaaacaaaatgaagaaaaaacctataaaaagactgcatcatctgctattaaaggtgctattcagctgggaataggatacacagtgggtaatctcacttccaagccagaacgagatgttcttatgcaagacttttatgtggtggaaagtgtgttcctacccagcgaagggagcaatctgaccccagcacatcactacccagactttagatttaagacatacgctccattagcattccgatatttcagagaactttttggtatcaagcctgatgattacttgtattccatctgcagtgaacctctaatagaactgtctaaccctggagccagtggatccttgttttttgtgaccagtgatgatgaatttatcatcaaaacagttcagcacaaagaagctgagtttcttcagaagctactgccaggctattacatgaatttaaaccagaatccaaggactcttttgccaaaattttacggactgtattgtatgcaatcaggaggcattaatatcaggattgtggtgatgaacaacgttttgccacgctccatgagaatgcactttacatatgacttgaaaggctcaacgtataagcgaagagcatcccgtaaagagagagagaaatccaaccccacatttaaggacttagatttcctgcaagacatgcacgaagggttgtattttgatacggaaacatacaacgcgcttatgaaaacacttcagagagactgccgggtgctagaaagcttcaagatcatggattatagccttctgttgggaattcatttcctggaccattccctcaaagagaaagaggaggagaccccacaaaatgtgcctgatgctaagcggactgggatgcagaaggttctctactcaacagccatggaatctatccagggtccagggaaatctggagatgggataatcacagagaacccagacacaatgggaggcattccagctaaaagccataggggagaaaaactacttttatttatgggcattattgacattctgcaatcatataggttaatgaagaagttagaacattcctggaaagctcttgtttatgatggggacactgtttctgttcatagaccaagcttttatgcagacagatttcttaagttcatgaattccagagttttcaagaaaattcaagctttgaaggcttcaccgtctaagaaacggtgcaattcaatcgccgccctaaaggccacttcacaggagattgtgtcctcaattagccaggaatggaaggatgagaagcgggatttgctgactgaaggacaaagttttagcagccttgatgaagaagccctgggatcccgacacaggccagacctggtccctagcactccatcactgtttgaagctgcttccttggcaaccacaatttcatcttcttccttatacgtcaatgagcactatccacacgacaggcctacactctattcaaacagtaagtgaaaatggtgatcacctaagcacatggatgagacgtgagcacagttatggcagagaagtttctccgcaccagaattatccacagcaacttggctgagccccactacacacagagaaatcatcaacctgacttaagagttttcaagatgtcaacttcaggctgatcagcagatgggatgtgaaaaatactaccctattctatcatttgctgttgcttgctgaactgtgaagaactgcatgaactatatttaagctgctttctgtaccattgccaatcacctttttggagttggaagtgctattttcctatggacttttgcatta

SEQ ID NO: 291001 - DNA, 312 bp, Artificial Sequence
  derived and/or modified sequence
atgtccagcgcagccgagaacggcgaggctgctccagggaaacagaacgaagagaagacttataaaaaaaccgcgagtagcgcaattaaaggcgctatccagttggggatcggttacacagttgggaacctcacctcgaagccggagagggacgtgctgatgcaggatttctatgtcgtcgagagcgtgtttctgccctcagaaggctccaatctgacccccgctcaccactaccccgattttcgctttaagacttatgcgccactggcctttcggtacttcagagagcttttcgggattaagcctgattag

SEQ ID NO: 291002 - DNA, 1350 bp, Artificial Sequence
  derived and/or modified sequence
atgcaggacttctatgtggtggagtctgttttccttccatcagaagggtccaatctgacccctgcccatcactacccagactttaggtttaaaacttacgccccactggccttccgctattttagagagctgttcggaatcaagcccgatgattatttgtactcaatatgttcagagccactgatcgaactgtccaacccaggcgcttccggaagccttttctttgttacatccgatgacgagtttatcattaagaccgtccagcataaggaggccgagtttctgcagaagctgctgcctgggtattacatgaacctgaaccagaacccgcgtactctcttacctaaattttatggcctctactgcatgcagtcagggggtattaacataagaatcgtggtgatgaacaatgttctgcccagaagcatgcgcatgcactttacttatgaccttaagggaagcacctataaacgcagggctagtagaaaagaacgggaaaagagcaacccaacttttaaggacctcgactttctgcaggacatgcacgaaggattatattttgacaccgagacttataatgccttgatgaagaccctccagcgcgattgtagagttttggaatccttcaaaatcatggattactctctcctgctggggatccactttttagatcattccctcaaagagaaggaggaggagacccctcagaacgttccagatgctaaaagaactggaatgcagaaggtcctgtactcgacagcgatggagagcattcagggacctgggaagagcggcgatggaattattaccgaaaatccggatacaatggggggtatcccagccaagtcccatcgcggtgaaaaattgctactcttcatggggattattgatatcctgcagtcctatcgcctcatgaagaaactcgagcactcttggaaagccttggtgtacgatggagatactgtgtcagtgcacagacctagcttctacgccgacaggtttttgaagtttatgaactcccgcgtgttcaagaaaattcaagcccttaaggcctctccctctaaaaagaggtgtaactccatcgcggctctgaaggcaacaagccaggagattgtctcttcaatcagtcaggagtggaaagatgagaaacgggatctcttaacagagggacagagcttctcctctctggatgaggaggcacttggaagtcgccatcgccctgatcttgtcccgagtacaccgagcctcttcgaagctgcctccctcgccacaactatctctagcagtagtttgtacgtgaacgagcactacccacacgaccggccaacgctttatagcaactcgaaatag

SEQ ID NO: 291003 - DNA, 489 bp, Artificial Sequence
  derived and/or modified sequence
atgtcgagtgcggcagagaacggggaggccgctccaggcaagcaaaacgaagagaagacatacaaaaagacggcctccagtgccataaaaggggctatacaactgggaataggatacaccgtaggcaaccttactagcaagccggagcgagatgtgcttatgcaagacttttatgttgtcgagtccgtcttcctcccctctgaggggtctaatctgacgccggcacaccattacccggatttcagattcaagacctacgcacctctcgccttcagatacttcagagagctcttcggcatcaagcccgacgattacctatattccatctgctctgagccgctcatcgagctgtctaatcctggcgcaagcgggagcctgttctttgttacgtctgacgatgagtttattataaaaactgtgcagcacaaggaggctgagtttctgcagaaactgctgcccggatactacatgaatctgaaccagaactag

SEQ ID NO: 291004 - DNA, 474 bp, Artificial Sequence
  derived and/or modified sequence
atgtcaagtgcagccgagaacggcgaagccgcaccaggaaaacagaacgaagagaagacatacaagaaaaccgcttcgtctgcaattaagggagcaattcagctgggtattgggtacacagtcggaaacttgaccagtaaacctgagcgtgacgttctgatgcaggacttctatgtagtggaatctgtgtttctgccatctgaagggtccaatctgaccccggcacaccactacccagacttccgctttaaaacgtacgcaccgttagcctttcggtacttcagagagctgtttggaataaagcctgacgactatctgtattccatctgttccgagcctctgattgaactgagcaatcccggtgccagcggatccctcttcttcgtaacttccgatgacgagttcatcattaagaccgtgcagcacaaggaagccgagtttctgcagaagctgctgcctggctattacatgtag

SEQ ID NO: 291005 - DNA, 1509 bp, Artificial Sequence
  derived and/or modified sequence
atgtctagtgcggctgagaacggtgaggcggcacccggtaaacaaaatgaagaaaagacatacaaaaagacagcgtctagtgctattaagggtgccatccagctaggaattggatacaccgtcggaaacctcacgagcaagccagaaagagacgtcctgatgcaggatttctatgtagtggagagcgtttttctgcctagcgaaggcagcaacttaacccccgctcaccattacccggacttccggttcaagacttacgctcctttggccttccgctatttccgggaactcttcggaattaaacctgacgactacttgtatagcatttgctctgagcctctgatcgagctgagcaaccccggagcatccgggtctctgttttttgtcactagcgacgacgagtttattataaagactgtgcagcataaagaggccgaatttctccaaaagcttcttccgggatactacatgaacctcaaccagaacccacgaacgctgctccctaagttttatggattgtactgtatgcagtcggggggtataaatatccggatagttgtaatgaacaacgttttgcctcgttctatgcgcatgcatttcacatacgatctcaagggatccacttacaaacgcagagcatcacggaaagagcgcgaaaaatctaatccaaccttcaaggatctggactttttacaagatatgcatgaagggctctattttgacactgagacctataacgcactaatgaaaaccctacagagagactgccgcgttctcgaatccttcaagataatggactacagcctcctcctgggaatccactttctggaccattcactcaaggaaaaggaggaggaaaccccacaaaatgtccccgacgccaagcggactgggatgcagaaggtgctgtatagcacagcgatggagtccatccagggaccaggaaagtcaggtgatggaatcataactgagaatcccgacaccatgggtggaatacccgcaaagagccatcgcggagagaagctcttgctgttcatgggaatcatcgacattctccagtcctatcgccttatgaaaaagcttgagcattcttggaaggcactggtgtatgatggggatacagtttccgttcaccgccctagtttctacgctgatcggttccttaagtttatgaactcgagggtgttcaagaaaatacaggcactcaaagcatctcccagtaagaagcgctgcaattccatcgccgcactgaaggctacctcccaggagatcgtgtcttcaattagccaggagtggaaagacgagaaaagggatttgctgacagagggacagtccttctcctcactggatgaggaagctctgggatcgcgccaccggccagacctagtacccagcacacctagtctttttgaggcagctagcttagccacaaccatctcatcctcatccctatacgtgaacgaacactatcctcacgacagaccaaccctttactcaaacagcaaatag

SEQ ID NO: 291006 - DNA, 312 bp, Artificial Sequence
  derived and/or modified sequence
atgagcagcgccgccgagaacggcgaggccgcccccggcaagcagaacgaggagaagacctacaagaagaccgccagcagcgccatcaagggcgccatccagctgggcatcggctacaccgtgggcaacctgaccagcaagcccgagagagacgtgctgatgcaggacttctacgtggtggagagcgtgttcctgcccagcgagggcagcaacctgacccccgcccaccactaccccgacttcagattcaagacctacgcccccctggccttcagatacttcagagagctgttcggcatcaagcccgactag

SEQ ID NO: 291007 - DNA, 1350 bp, Artificial Sequence
  derived and/or modified sequence
atgcaggacttctacgtggtggagagcgtgttcctgcccagcgagggcagcaacctgacccccgcccaccactaccccgacttcagattcaagacctacgcccccctggccttcagatacttcagagagctgttcggcatcaagcccgacgactacctgtacagcatctgcagcgagcccctgatcgagctgagcaaccccggcgccagcggcagcctgttcttcgtgaccagcgacgacgagttcatcatcaagaccgtgcagcacaaggaggccgagttcctgcagaagctgctgcccggctactacatgaacctgaaccagaaccccagaaccctgctgcccaagttctacggcctgtactgcatgcagagcggcggcatcaacatcagaatcgtggtgatgaacaacgtgctgcccagaagcatgagaatgcacttcacctacgacctgaagggcagcacctacaagagaagagccagcagaaaggagagagagaagagcaaccccaccttcaaggacctggacttcctgcaggacatgcacgagggcctgtacttcgacaccgagacctacaacgccctgatgaagaccctgcagagagactgcagagtgctggagagcttcaagatcatggactacagcctgctgctgggcatccacttcctggaccacagcctgaaggagaaggaggaggagaccccccagaacgtgcccgacgccaagagaaccggcatgcagaaggtgctgtacagcaccgccatggagagcatccagggccccggcaagagcggcgacggcatcatcaccgagaaccccgacaccatgggcggcatccccgccaagagccacagaggcgagaagctgctgctgttcatgggcatcatcgacatcctgcagagctacagactgatgaagaagctggagcacagctggaaggccctggtgtacgacggcgacaccgtgagcgtgcacagacccagcttctacgccgacagattcctgaagttcatgaacagcagagtgttcaagaagatccaggccctgaaggccagccccagcaagaagagatgcaacagcatcgccgccctgaaggccaccagccaggagatcgtgagcagcatcagccaggagtggaaggacgagaagagagacctgctgaccgagggccagagcttcagcagcctggacgaggaggccctgggcagcagacacagacccgacctggtgcccagcacccccagcctgttcgaggccgccagcctggccaccaccatcagcagcagcagcctgtacgtgaacgagcactacccccacgacagacccaccctgtacagcaacagcaagtag

SEQ ID NO: 291008 - DNA, 489 bp, Artificial Sequence
  derived and/or modified sequence
atgagcagcgccgccgagaacggcgaggccgcccccggcaagcagaacgaggagaagacctacaagaagaccgccagcagcgccatcaagggcgccatccagctgggcatcggctacaccgtgggcaacctgaccagcaagcccgagagagacgtgctgatgcaggacttctacgtggtggagagcgtgttcctgcccagcgagggcagcaacctgacccccgcccaccactaccccgacttcagattcaagacctacgcccccctggccttcagatacttcagagagctgttcggcatcaagcccgacgactacctgtacagcatctgcagcgagcccctgatcgagctgagcaaccccggcgccagcggcagcctgttcttcgtgaccagcgacgacgagttcatcatcaagaccgtgcagcacaaggaggccgagttcctgcagaagctgctgcccggctactacatgaacctgaaccagaactag

SEQ ID NO: 291009 - DNA, 474 bp, Artificial Sequence
  derived and/or modified sequence
atgagcagcgccgccgagaacggcgaggccgcccccggcaagcagaacgaggagaagacctacaagaagaccgccagcagcgccatcaagggcgccatccagctgggcatcggctacaccgtgggcaacctgaccagcaagcccgagagagacgtgctgatgcaggacttctacgtggtggagagcgtgttcctgcccagcgagggcagcaacctgacccccgcccaccactaccccgacttcagattcaagacctacgcccccctggccttcagatacttcagagagctgttcggcatcaagcccgacgactacctgtacagcatctgcagcgagcccctgatcgagctgagcaaccccggcgccagcggcagcctgttcttcgtgaccagcgacgacgagttcatcatcaagaccgtgcagcacaaggaggccgagttcctgcagaagctgctgcccggctactacatgtag

SEQ ID NO: 291010 - DNA, 1509 bp, Artificial Sequence
  derived and/or modified sequence
atgagcagcgccgccgagaacggcgaggccgcccccggcaagcagaacgaggagaagacctacaagaagaccgccagcagcgccatcaagggcgccatccagctgggcatcggctacaccgtgggcaacctgaccagcaagcccgagagagacgtgctgatgcaggacttctacgtggtggagagcgtgttcctgcccagcgagggcagcaacctgacccccgcccaccactaccccgacttcagattcaagacctacgcccccctggccttcagatacttcagagagctgttcggcatcaagcccgacgactacctgtacagcatctgcagcgagcccctgatcgagctgagcaaccccggcgccagcggcagcctgttcttcgtgaccagcgacgacgagttcatcatcaagaccgtgcagcacaaggaggccgagttcctgcagaagctgctgcccggctactacatgaacctgaaccagaaccccagaaccctgctgcccaagttctacggcctgtactgcatgcagagcggcggcatcaacatcagaatcgtggtgatgaacaacgtgctgcccagaagcatgagaatgcacttcacctacgacctgaagggcagcacctacaagagaagagccagcagaaaggagagagagaagagcaaccccaccttcaaggacctggacttcctgcaggacatgcacgagggcctgtacttcgacaccgagacctacaacgccctgatgaagaccctgcagagagactgcagagtgctggagagcttcaagatcatggactacagcctgctgctgggcatccacttcctggaccacagcctgaaggagaaggaggaggagaccccccagaacgtgcccgacgccaagagaaccggcatgcagaaggtgctgtacagcaccgccatggagagcatccagggccccggcaagagcggcgacggcatcatcaccgagaaccccgacaccatgggcggcatccccgccaagagccacagaggcgagaagctgctgctgttcatgggcatcatcgacatcctgcagagctacagactgatgaagaagctggagcacagctggaaggccctggtgtacgacggcgacaccgtgagcgtgcacagacccagcttctacgccgacagattcctgaagttcatgaacagcagagtgttcaagaagatccaggccctgaaggccagccccagcaagaagagatgcaacagcatcgccgccctgaaggccaccagccaggagatcgtgagcagcatcagccaggagtggaaggacgagaagagagacctgctgaccgagggccagagcttcagcagcctggacgaggaggccctgggcagcagacacagacccgacctggtgcccagcacccccagcctgttcgaggccgccagcctggccaccaccatcagcagcagcagcctgtacgtgaacgagcactacccccacgacagacccaccctgtacagcaacagcaagtag

SEQ ID NO: 291011 - DNA, 642 bp, Artificial Sequence
  derived and/or modified sequence
atggacatgctgggcggccccggcatcgagagccagtgcagaaaggtggacatcatcgccgacgccgcctacagcatcttccagaagcccaagagcttcaccggcaacttcgtgatcgacgagaacatcctgaaggaggagggcatcgagaacttcgacgtgtacgccatcaagcccggccaccccctgcagcccgacttcttcctggacgagtaccccgaggccgtgagcaagaaggtggagagcaccggcgccgtgcccgagttcaaggaggagaagctgcagctgcagcccaagcccagaagcggcgccgtggaggagaccttcagaatcgtgaaggacagcctgagcgacgacgtggtgaaggccacccaggccatctacctgttcgagctgagcggcgaggacggcggcacctggttcctggacctgaagagcaagggcggcaacgtgggctacggcgagcccagcgaccaggccgacgtggtgatgagcatgaccaccgacgacttcgtgaagatgttcagcggcaagctgaagcccaccatggccttcatgagcggcaagctgaagatcaagggcaacatggccctggccatcaagctggagaagctgatgaaccagatgaacgccagactgtag

SEQ ID NO: 291012 - DNA, 642 bp, Artificial Sequence
  derived and/or modified sequence
atggacatgttaggtggacctggaatcgagagtcaatgcagaaaagtggacatcatagcagacgccgcttatagcattttccagaagcccaaatccttcaccggcaacttcgtgatcgatgagaacatcctgaaggaggagggtattgagaacttcgacgtgtacgcaattaaaccaggacacccgctgcagcccgacttttttctggatgagtaccccgaagcagtgagcaagaaagttgaatcaacaggcgcagtgcccgaatttaaggaagaaaagcttcaattgcagcccaaaccacgctcgggggccgtcgaggaaactttcagaattgtgaaggattctctgtccgatgacgtcgtcaaggcaacacaggccatttatttattcgaattgtcaggcgaggacggcggaacatggttcttggatcttaagagtaaaggcggcaatgtcggctatggagagccaagcgatcaggcagacgtggtaatgtcaatgaccacggacgattttgtaaagatgttctctggaaaactcaaacccacaatggcttttatgtccggcaagctgaagattaagggcaacatggccctagctatcaaactagagaagttgatgaatcagatgaatgctcggctctag

SEQ ID NO: 291013 - DNA, 642 bp, Artificial Sequence
  derived and/or modified sequence
atggacatgctgggcggccctggcatcgagagccagtgcaggaaggtggacatcatcgcagatgctgcctacagcatcttccagaagcccaagagcttcaccggcaactttgtgattgatgagaacatcctgaaggaggagggcatcgagaactttgatgtgtatgccatcaagccaggccaccccctgcagcctgacttcttcctggatgagtacccagaggccgtgtccaagaaggtggagagcactggagctgtgcctgagttcaaggaggagaagctgcagctgcagcccaagcccaggtctggagctgtggaggagaccttcagaattgtgaaggacagcctgagtgatgatgtggtgaaggccacccaggccatctacctgtttgagctgtctggagaagatggcggcacctggttcctggacctgaagagcaaaggaggaaatgtgggctatggagagcccagcgaccaggctgatgtggtgatgtccatgaccacagatgactttgtgaagatgttcagcggcaagctgaagcccaccatggccttcatgtctgggaagctgaagatcaagggcaacatggccctggccatcaagctggagaagctgatgaaccagatgaatgcccggctgtag

SEQ ID NO: 291014 - DNA, 642 bp, Artificial Sequence
  derived and/or modified sequence
atggacatgctgggcggccccggcatcgagagccagtgccggaaggtcgacataatcgccgatgcggcctacagtatttttcagaagccaaaatctttcactggtaactttgttattgatgagaatatcctgaaagaggaagggatcgaaaattttgatgtgtacgctattaagcccggtcatcccttgcaacccgacttcttcctagacgagtaccctgaggccgttagcaaaaaagtagaaagcacaggcgccgtgcccgagtttaaggaggaaaagctgcagctgcagcctaagccgcggagtggcgctgtagaagagactttccgaatcgtgaaggatagtctcagcgatgacgtcgtgaaggccactcaggccatatacctttttgagcttagtggcgaggatgggggcacttggttcctggacctcaagagcaaaggtggcaacgtagggtatggagaaccgtccgaccaggccgatgtggtcatgtccatgacgacagatgactttgtgaaaatgttttctggcaaactgaagccgaccatggcttttatgtctgggaagttgaaaataaagggcaatatggctttggcaattaagttagaaaagctgatgaatcagatgaacgcccgactgtag

SEQ ID NO: 291015 - DNA, 642 bp, Artificial Sequence
  derived and/or modified sequence
atggacatgctcggtggcccaggcattgagtcacaatgccgaaaggtggatataattgcagacgcagcttacagcatctttcagaagccaaagagtttcaccgggaattttgtaattgatgagaacattctgaaagaagagggtatcgaaaatttcgacgtttacgctatcaagcctggacatcctttacaacctgatttctttctggacgaatatccagaggcggtgtcgaaaaaggtggagagtaccggcgcagtgcccgagtttaaagaagaaaagctgcagctccagcctaaaccgagaagtggcgcagttgaggagactttcagaattgtgaaggacagtctgtctgatgatgtggtcaaagccacccaggccatatatctgtttgagctgtcaggggaagacgggggaacatggtttctggacctaaagagtaaggggggtaatgtgggctatggagaaccttctgaccaggccgatgtcgtgatgagtatgaccaccgatgacttcgtgaaaatgtttagcggaaaactgaagccgaccatggcctttatgtcaggtaagctgaaaattaaaggtaacatggccctggcaatcaaactcgagaaactgatgaatcagatgaacgcccgactgtag

SEQ ID NO: 291016 - protein, 201 aa, Artificial Sequence
  derived and/or modified sequence
ATFNIINNCPFTVWAAAVPGGGKRLDRGQNWIINPGAGTKGARVWPRTGCNFDGAGRGKCQTGDCNGLLQCQAFGQPPNTLAEYALNQFNNLDFFDISLVDGFNVAMEFSPTSGGCTRGIKCTADINGQCPNELRAPGGCNNPCTVFKTDQYCCNSGNCGLTNFSKFFKDRCPDAYSYPKDDQTSTFTCPAGTNYKVVFCP

SEQ ID NO: 291017 - protein, 819 aa, Artificial Sequence
  derived and/or modified sequence
MDIQLDPARDDLPLMANTSHILVKHYVLDLDVDFESQVIEGTIVLFLEDGNRFKKQNSSIEEACQSESNKACKFGMPEPCHIPVTNARTFSSEMEYNDFAICSKGEKDTSDKDGNHDNQEHASGISSSKYCCDTGNHGSEDFLLVLDCCDLSVLKVEEVDVAAVPGLEKFTRSPELTVVSEEFRNQIVRELVTLPANRWREQLDYYARCSQAPGCGELLFDTDTWSLQIRKTGAQTATDFPHAIRIWYKTKPEGRSVTWTSDQSGRPCVYTVGSPINNRALFPCQEPPVAMSTWQATVRAAASFVVLMSGENSAKPTQLWEECSSWYYYVTMPMPASTFTIAVGCWTEMKMETWSSNDLATERPFSPSEANFRHVGVCSHMEYPCRFQNASATTQEIIPHRVFAPVCLTGACQETLLRLIPPCLSAAHSVLGAHPFSRLDVLIVPANFPSLGMASPHIMFLSQSILTGGNHLCGTRLCHEIAHAWFGLAIGARDWTEEWLSEGFATHLEDVFWATAQQLAPYEAREQQELRACLRWRRLQDEMQCSPEEMQVLRPSKDKTGHTSDSGASVIKHGLNPEKIFMQVHYLKGYFLLRFLAKRLGDETYFSFLRKFVHTFHGQLILSQDFLQMLLENIPEEKRLELSVENIYQDWLESSGIPKPLQRERRAGAECGLARQVRAEVTKWIGVNRRPRKRKRREKEEVFEKLLPDQLVLLLEHLLEQKTLSPRTLQSLQRTYHLQDQDAEVRHRWCELIVKHKFTKAYKSVERFLQEDQAMGVYLYGELMVSEDARQQQLARRCFERTKEQMDRSSAQVVAEMLF

SEQ ID NO: 291018 - protein, 601 aa, Artificial Sequence
  derived and/or modified sequence
LFDTDTWSLQIRKTGAQTATDFPHAIRIWYKTKPEGRSVTWTSDQSGRPCVYTVGSPINNRALFPCQEPPVAMSTWQATVRAAASFVVLMSGENSAKPTQLWEECSSWYYYVTMPMPASTFTIAVGCWTEMKMETWSSNDLATERPFSPSEANFRHVGVCSHMEYPCRFQNASATTQEIIPHRVFAPVCLTGACQETLLRLIPPCLSAAHSVLGAHPFSRLDVLIVPANFPSLGMASPHIMFLSQSILTGGNHLCGTRLCHEIAHAWFGLAIGARDWTEEWLSEGFATHLEDVFWATAQQLAPYEAREQQELRACLRWRRLQDEMQCSPEEMQVLRPSKDKTGHTSDSGASVIKHGLNPEKIFMQVHYLKGYFLLRFLAKRLGDETYFSFLRKFVHTFHGQLILSQDFLQMLLENIPEEKRLELSVENIYQDWLESSGIPKPLQRERRAGAECGLARQVRAEVTKWIGVNRRPRKRKRREKEEVFEKLLPDQLVLLLEHLLEQKTLSPRTLQSLQRTYHLQDQDAEVRHRWCELIVKHKFTKAYKSVERFLQEDQAMGVYLYGELMVSEDARQQQLARRCFERTKEQMDRSSAQVVAEMLF

SEQ ID NO: 291019 - DNA, 2460 bp, Artificial Sequence
  derived and/or modified sequence
atggacatccagctggaccccgccagagacgacctgcccctgatggccaacaccagccacatcctggtgaagcactacgtgctggacctggacgtggacttcgagagccaggtgatcgagggcaccatcgtgctgttcctggaggacggcaacagattcaagaagcagaacagcagcatcgaggaggcctgccagagcgagagcaacaaggcctgcaagttcggcatgcccgagccctgccacatccccgtgaccaacgccagaaccttcagcagcgagatggagtacaacgacttcgccatctgcagcaagggcgagaaggacaccagcgacaaggacggcaaccacgacaaccaggagcacgccagcggcatcagcagcagcaagtactgctgcgacaccggcaaccacggcagcgaggacttcctgctggtgctggactgctgcgacctgagcgtgctgaaggtggaggaggtggacgtggccgccgtgcccggcctggagaagttcaccagaagccccgagctgaccgtggtgagcgaggagttcagaaaccagatcgtgagagagctggtgaccctgcccgccaacagatggagagagcagctggactactacgccagatgcagccaggcccccggctgcggcgagctgctgttcgacaccgacacctggagcctgcagatcagaaagaccggcgcccagaccgccaccgacttcccccacgccatcagaatctggtacaagaccaagcccgagggcagaagcgtgacctggaccagcgaccagagcggcagaccctgcgtgtacaccgtgggcagccccatcaacaacagagccctgttcccctgccaggagccccccgtggccatgagcacctggcaggccaccgtgagagccgccgccagcttcgtggtgctgatgagcggcgagaacagcgccaagcccacccagctgtgggaggagtgcagcagctggtactactacgtgaccatgcccatgcccgccagcaccttcaccatcgccgtgggctgctggaccgagatgaagatggagacctggagcagcaacgacctggccaccgagagacccttcagccccagcgaggccaacttcagacacgtgggcgtgtgcagccacatggagtacccctgcagattccagaacgccagcgccaccacccaggagatcatcccccacagagtgttcgcccccgtgtgcctgaccggcgcctgccaggagaccctgctgagactgatccccccctgcctgagcgccgcccacagcgtgctgggcgcccaccccttcagcagactggacgtgctgatcgtgcccgccaacttccccagcctgggcatggccagcccccacatcatgttcctgagccagagcatcctgaccggcggcaaccacctgtgcggcaccagactgtgccacgagatcgcccacgcctggttcggcctggccatcggcgccagagactggaccgaggagtggctgagcgagggcttcgccacccacctggaggacgtgttctgggccaccgcccagcagctggccccctacgaggccagagagcagcaggagctgagagcctgcctgagatggagaagactgcaggacgagatgcagtgcagccccgaggagatgcaggtgctgagacccagcaaggacaagaccggccacaccagcgacagcggcgccagcgtgatcaagcacggcctgaaccccgagaagatcttcatgcaggtgcactacctgaagggctacttcctgctgagattcctggccaagagactgggcgacgagacctacttcagcttcctgagaaagttcgtgcacaccttccacggccagctgatcctgagccaggacttcctgcagatgctgctggagaacatccccgaggagaagagactggagctgagcgtggagaacatctaccaggactggctggagagcagcggcatccccaagcccctgcagagagagagaagagccggcgccgagtgcggcctggccagacaggtgagagccgaggtgaccaagtggatcggcgtgaacagaagacccagaaagagaaagagaagagagaaggaggaggtgttcgagaagctgctgcccgaccagctggtgctgctgctggagcacctgctggagcagaagaccctgagccccagaaccctgcagagcctgcagagaacctaccacctgcaggaccaggacgccgaggtgagacacagatggtgcgagctgatcgtgaagcacaagttcaccaaggcctacaagagcgtggagagattcctgcaggaggaccaggccatgggcgtgtacctgtacggcgagctgatggtgagcgaggacgccagacagcagcagctggccagaagatgcttcgagagaaccaaggagcagatggacagaagcagcgcccaggtggtggccgagatgctgttctag

SEQ ID NO: 291020 - DNA, 1806 bp, Artificial Sequence
  derived and/or modified sequence
ctgttcgacaccgacacctggagcctgcagatcagaaagaccggcgcccagaccgccaccgacttcccccacgccatcagaatctggtacaagaccaagcccgagggcagaagcgtgacctggaccagcgaccagagcggcagaccctgcgtgtacaccgtgggcagccccatcaacaacagagccctgttcccctgccaggagccccccgtggccatgagcacctggcaggccaccgtgagagccgccgccagcttcgtggtgctgatgagcggcgagaacagcgccaagcccacccagctgtgggaggagtgcagcagctggtactactacgtgaccatgcccatgcccgccagcaccttcaccatcgccgtgggctgctggaccgagatgaagatggagacctggagcagcaacgacctggccaccgagagacccttcagccccagcgaggccaacttcagacacgtgggcgtgtgcagccacatggagtacccctgcagattccagaacgccagcgccaccacccaggagatcatcccccacagagtgttcgcccccgtgtgcctgaccggcgcctgccaggagaccctgctgagactgatccccccctgcctgagcgccgcccacagcgtgctgggcgcccaccccttcagcagactggacgtgctgatcgtgcccgccaacttccccagcctgggcatggccagcccccacatcatgttcctgagccagagcatcctgaccggcggcaaccacctgtgcggcaccagactgtgccacgagatcgcccacgcctggttcggcctggccatcggcgccagagactggaccgaggagtggctgagcgagggcttcgccacccacctggaggacgtgttctgggccaccgcccagcagctggccccctacgaggccagagagcagcaggagctgagagcctgcctgagatggagaagactgcaggacgagatgcagtgcagccccgaggagatgcaggtgctgagacccagcaaggacaagaccggccacaccagcgacagcggcgccagcgtgatcaagcacggcctgaaccccgagaagatcttcatgcaggtgcactacctgaagggctacttcctgctgagattcctggccaagagactgggcgacgagacctacttcagcttcctgagaaagttcgtgcacaccttccacggccagctgatcctgagccaggacttcctgcagatgctgctggagaacatccccgaggagaagagactggagctgagcgtggagaacatctaccaggactggctggagagcagcggcatccccaagcccctgcagagagagagaagagccggcgccgagtgcggcctggccagacaggtgagagccgaggtgaccaagtggatcggcgtgaacagaagacccagaaagagaaagagaagagagaaggaggaggtgttcgagaagctgctgcccgaccagctggtgctgctgctggagcacctgctggagcagaagaccctgagccccagaaccctgcagagcctgcagagaacctaccacctgcaggaccaggacgccgaggtgagacacagatggtgcgagctgatcgtgaagcacaagttcaccaaggcctacaagagcgtggagagattcctgcaggaggaccaggccatgggcgtgtacctgtacggcgagctgatggtgagcgaggacgccagacagcagcagctggccagaagatgcttcgagagaaccaaggagcagatggacagaagcagcgcccaggtggtggccgagatgctgttctag

SEQ ID NO: 291021 - DNA, 2941 bp, Artificial Sequence
  derived and/or modified sequence
atggacatacagctggaccctgccagagatgacctgcctctcatggccaacaccagccacatacttgtgaagcactatgtactggatttggatgtggattttgaaagtcaagtcattgaggggaccatagtgcttttcctcgaggatggaaacagattcaagaaacagaatagctctattgaggaagcctgccaatcagaatcaaacaaagcctgcaaatttgggatgcctgaaccctgccatattcccgtgacaaatgcaaggaccttctcatctgaaatggaatataatgattttgcaatctgtagtaaaggtgaaaaagatacttctgataaagatggtaaccatgacaaccaggaacatgcttctgggatttctagctcaaagtactgctgtgacacagggaatcatgggagtgaggattttttgctagtgttggactgctgtgatttatctgtgttaaaagtcgaggaggtggatgttgctgctgtgccaggtctggaaaaatttacaaggtctcctgagctcacggttgtttctgaggagttcaggaatcagattgtacgtgaacttgtgactttgcctgcaaatcgttggagggagcagttagactattacgctcgctgcagccaggctcctggctgtggggaactcctctttgacactgacacttggagcttgcagataaggaagacaggggctcagacagctactgactttcctcatgctatcaggatatggtacaaaactaaacctgaagggcgatcggttacatggacctcagaccagagtggcaggccatgtgtttatactgtgggatctcccataaacaacagggccctttttccatgccaggagccacccgttgccatgtcaacatggcaggctacagttcgagcagctgcatcttttgttgttttaatgagtggggaaaattctgccaaaccaacgcagctttgggaagagtgctcaagctggtattactatgtaactatgccaatgccagcctccaccttcacaattgcagtgggatgctggacagaaatgaagatggagacatggtcatcaaatgatttggcaacagagagacccttctcaccttctgaggccaacttcaggcatgttggtgtttgcagtcacatggaatacccctgccgcttccagaatgcttctgccaccacccaggagatcattcctcatcgggtctttgcccctgtgtgcctcacgggtgcctgccaagagacccttctgcggctgatccctccttgcctctcagcagcacattctgttctgggagcacacccgttctctcggctggatgttctcatcgtccctgccaactttccaagtctggggatggccagcccacacatcatgttcctctctcagagcatcttgacaggagggaaccatctctgtgggacccgcctctgccatgaaattgcccatgcctggtttggcctagccatcggggcccgagactggacggaggagtggctgagtgaaggcttcgccactcacttggaggatgtgttttgggccacagcacagcagctggccccctatgaggcccgggagcagcaggagctgagggcttgtctgcgctggcgtcgcctccaggacgagatgcaatgctcccccgaggagatgcaggtgttaagacccagtaaagacaaaactggccacacaagtgactcgggagcatctgttatcaagcatggacttaatccggagaagatcttcatgcaggtgcattatttaaagggctacttccttcttcggtttcttgccaaaagacttggagatgaaacctatttttcatttttaagaaaatttgtgcacacatttcatggacagctgattctttcccaggatttccttcaaatgctactggagaacattccagaagaaaaaaggcttgagctgtctgttgaaaacatctaccaagactggcttgagagttccggaataccaaagccgctgcagagggagcgtcgcgccggggcggagtgcgggcttgcgcggcaagtgcgcgccgaggtcacgaaatggattggagtgaaccggagaccccgaaaacggaagcgcagggagaaggaagaggtgtttgaaaagcttcttccagaccagctggtcttgcttctggagcatctcttggagcagaagactctgagcccccgaactctgcaaagcctccagaggacataccacctccaggatcaggatgcagaggttcgccatcggtggtgtgaactcattgttaagcacaagttcacgaaagcctacaaaagtgtggagaggttccttcaggaggatcaggccatgggtgtgtacctctacggggagctgatggtgagtgaggacgccagacagcagcagctcgcccgtaggtgcttcgagcggaccaaggagcagatggataggtcctcagcccaggtggtggccgaaatgttattttaacgaggaaagaccacagcaagattctttcattcgtctcctcctagcctgggggaccaggctcgaactgaccctggacatcaaaggagggattatgtggctgctaaagccatcggcccacagccctgttcacatcttggtgcttctctttcccagaggctggtcccagccaggcacacacaaaaggcagattctcgtaaacgcagcctccctccctggaggctgcctcctgccctggatctggagtggagctgctctgagattttgagttcttctgcagagatgattaaatatatccaagagacattggaaaacctgctgaacattttacattggtctgctcagcacatggctggatgcggatatttctataattccagaaagtcacacagctcctctgtatgagaccagtgggcgccatttaaaagaacaggatgagaatctaagatatattattaataaatgtaatggattttttttttgt

SEQ ID NO: 291022 - DNA, 2288 bp, Artificial Sequence
  derived and/or modified sequence
ctctttgacactgacacttggagcttgcagataaggaagacaggggctcagacagctactgactttcctcatgctatcaggatatggtacaaaactaaacctgaagggcgatcggttacatggacctcagaccagagtggcaggccatgtgtttatactgtgggatctcccataaacaacagggccctttttccatgccaggagccacccgttgccatgtcaacatggcaggctacagttcgagcagctgcatcttttgttgttttaatgagtggggaaaattctgccaaaccaacgcagctttgggaagagtgctcaagctggtattactatgtaactatgccaatgccagcctccaccttcacaattgcagtgggatgctggacagaaatgaagatggagacatggtcatcaaatgatttggcaacagagagacccttctcaccttctgaggccaacttcaggcatgttggtgtttgcagtcacatggaatacccctgccgcttccagaatgcttctgccaccacccaggagatcattcctcatcgggtctttgcccctgtgtgcctcacgggtgcctgccaagagacccttctgcggctgatccctccttgcctctcagcagcacattctgttctgggagcacacccgttctctcggctggatgttctcatcgtccctgccaactttccaagtctggggatggccagcccacacatcatgttcctctctcagagcatcttgacaggagggaaccatctctgtgggacccgcctctgccatgaaattgcccatgcctggtttggcctagccatcggggcccgagactggacggaggagtggctgagtgaaggcttcgccactcacttggaggatgtgttttgggccacagcacagcagctggccccctatgaggcccgggagcagcaggagctgagggcttgtctgcgctggcgtcgcctccaggacgagatgcaatgctcccccgaggagatgcaggtgttaagacccagtaaagacaaaactggccacacaagtgactcgggagcatctgttatcaagcatggacttaatccggagaagatcttcatgcaggtgcattatttaaagggctacttccttcttcggtttcttgccaaaagacttggagatgaaacctatttttcatttttaagaaaatttgtgcacacatttcatggacagctgattctttcccaggatttccttcaaatgctactggagaacattccagaagaaaaaaggcttgagctgtctgttgaaaacatctaccaagactggcttgagagttccggaataccaaagccgctgcagagggagcgtcgcgccggggcggagtgcgggcttgcgcggcaagtgcgcgccgaggtcacgaaatggattggagtgaaccggagaccccgaaaacggaagcgcagggagaaggaagaggtgtttgaaaagcttcttccagaccagctggtcttgcttctggagcatctcttggagcagaagactctgagcccccgaactctgcaaagcctccagaggacataccacctccaggatcaggatgcagaggttcgccatcggtggtgtgaactcattgttaagcacaagttcacgaaagcctacaaaagtgtggagaggttccttcaggaggatcaggccatgggtgtgtacctctacggggagctgatggtgagtgaggacgccagacagcagcagctcgcccgtaggtgcttcgagcggaccaaggagcagatggataggtcctcagcccaggtggtggccgaaatgttattttaacgaggaaagaccacagcaagattctttcattcgtctcctcctagcctgggggaccaggctcgaactgaccctggacatcaaaggagggattatgtggctgctaaagccatcggcccacagccctgttcacatcttggtgcttctctttcccagaggctggtcccagccaggcacacacaaaaggcagattctcgtaaacgcagcctccctccctggaggctgcctcctgccctggatctggagtggagctgctctgagattttgagttcttctgcagagatgattaaatatatccaagagacattggaaaacctgctgaacattttacattggtctgctcagcacatggctggatgcggatatttctataattccagaaagtcacacagctcctctgtatgagaccagtgggcgccatttaaaagaacaggatgagaatctaagatatattattaataaatgtaatggattttttttttgta

SEQ ID NO: 291023 - DNA, 2460 bp, Artificial Sequence
  derived and/or modified sequence
atggacatccaacttgatcctgccagagacgacctacctctcatggcaaatacaagccatatccttgtgaaacactatgtattggatctggatgttgactttgagagccaagtcatcgagggcaccatcgtcctatttctcgaggacggaaatagatttaaaaagcagaactccagcattgaggaggcttgccaatcagaaagcaacaaggcttgcaaatttgggatgcctgaaccatgtcacattccggttacaaacgcacggacctttagtagcgagatggaatataacgacttcgctatttgcagcaaaggtgaaaaggatacttctgacaaagacggcaaccacgataatcaagaacatgcatccggaatcagctccagtaaatattgctgcgatacaggcaaccatggcagcgaggactttctgctcgtactggactgctgtgacttatcagtactcaaagtggaagaggtggacgttgccgccgtccctggtctggagaagttcacacgcagccctgaactcaccgtggtgtctgaggaatttcggaatcagattgtgcgggaactggtgacattgccagcgaatcgatggcgggagcagctcgactactatgccagatgctcccaggcgcccggttgtggagaactactgttcgacacagacacatggtctctccagattcgaaagacaggggctcagactgctaccgatttcccccacgctataagaatctggtacaagaccaagcctgagggtagatctgtcacgtggacatccgaccagtccggtcgcccctgtgtctatacggtgggcagccccattaacaatagggctttgttcccttgccaggaaccccctgttgccatgagcacctggcaggccaccgtccgggcggctgcttctttcgttgtgctgatgagcggggagaacagtgccaaaccgactcagctgtgggaggagtgctcaagctggtattactatgtgacaatgccaatgccagcctccacctttacaatcgctgtaggatgttggaccgagatgaagatggaaacatggagttcaaacgatctggccactgaaagacctttctctccctcagaggccaattttcggcacgtgggagtctgtagccacatggagtatccgtgtcggttccagaacgccagcgctaccacacaggaaattatccctcaccgcgtgttcgccccagtctgcctcactggggcctgtcaagagacactgctccggctgatcccgccctgtctgtctgcagctcactctgtcctcggtgcccaccctttctccagactagatgtgttaattgtgccagctaacttccctagtctgggtatggcctcccctcacatcatgtttctgtcgcagtcgattctcacggggggcaaccatttgtgcggaactcgactctgtcacgaaattgcacacgcgtggttcggcctggcaataggcgctagagactggactgaggagtggttatctgagggctttgctacccatctggaagatgtattctgggccacagcccagcaactggctccttatgaagcgagggagcagcaggagctgcgcgcctgcctacgctggcgtcggctgcaggatgagatgcaatgtagccctgaggaaatgcaggttctgaggccctcaaaggacaaaacaggacacacttccgacagtggagccagtgtcattaagcacggtctcaatccagagaagatttttatgcaggtccattatctgaagggctacttcctgcttagatttttggcaaaacggctgggcgacgagacctacttttccttcttgcgaaagtttgtacacacattccatggccagttgatacttagccaggacttcctccagatgttgctagaaaacattcccgaagaaaaacgattggagctgagcgtcgagaatatctatcaggactggctggaatccagcggtatacctaagcccctgcagcgggagagacgagccggggcggaatgcgggctggctcggcaagtgagagccgaggtgactaagtggatcggagtgaaccgtcggcccaggaagcgcaagcggagggagaaggaagaagtgttcgaaaaactgttgcctgaccagctggttctccttctggaacatttactcgagcagaaaacactgtcccctaggacactgcaaagtctacagcggacataccatctacaggaccaagacgcagaggtcagacatagatggtgtgagctcatcgtgaaacataagttcacaaaggcctataaatcagtcgagcgcttccttcaagaagatcaggcaatgggcgtgtatttatacggtgaattaatggtaagcgaggacgctcggcagcagcagctggctcgcagatgctttgagaggactaaagagcagatggatcggtcgagcgctcaggttgtcgcagagatgctgttctag

SEQ ID NO: 291024 - DNA, 1806 bp, Artificial Sequence
  derived and/or modified sequence
ctcttcgatacagacacatggtcactgcagatcagaaagactggagcacaaacagctacggatttccctcacgccattagaatctggtataagactaaaccggagggcagatccgtgacttggacatcagatcaatcggggcgaccctgcgtgtatacagtagggtctccgattaacaatcgcgctctgtttccatgtcaggaaccgccagtggcaatgtccacctggcaggccacggtgcgggccgccgccagttttgtagtcctaatgtccggagaaaattcagcaaagccaacacagctgtgggaagaatgcagctcatggtactactatgtgaccatgccaatgccagcgtcaacctttaccatcgcagttggctgctggacagagatgaagatggaaacatggtccagcaatgacttagccaccgagaggcccttctctcccagtgaagcgaactttagacatgttggagtctgctctcacatggagtatccttgccggtttcagaacgcctcagcaacgacacaggagattattccacatagagtgtttgcccctgtgtgtctcaccggggcctgtcaggaaacactgttacgcttgattcccccctgtttgtcagccgcacactcagtgctcggtgcacatccattttcccgacttgacgtactcattgtgcccgcaaattttcctagccttggaatggccagcccccacattatgttcctctcccaaagtattttaaccgggggcaaccacctgtgtggaactagactctgccacgagatcgctcacgcatggtttggactggcaatcggagccagggactggacggaggaatggctttccgagggctttgccacacacctggaagatgtattctgggcgacagctcagcaattggcaccctacgaagcacgagaacaacaggaacttagggcctgccttaggtggagaaggttgcaggacgagatgcagtgtagcccagaggagatgcaggtgctgaggcccagtaaggacaagacgggtcacacgtcggactccggtgcctctgttataaaacacggactaaacccagagaaaatattcatgcaggtccactacctgaaagggtacttcctcttaagatttctcgcgaaaaggctgggtgacgaaacttatttctcttttttgcggaaatttgtgcacacatttcacgggcagctcatccttagccaggattttcttcagatgttgttggagaacataccagaagagaagaggctggaattatctgtcgagaatatctatcaggactggttggaaagtagcggaattcccaaacctctgcagcgggagcgtcgggccggagctgagtgcgggttagctagacaagttcgcgccgaggtaaccaaatggatcggcgtaaatcggaggccccgcaagcgcaaaagacgggagaaggaggaggtatttgaaaagctgctccccgatcagctcgtgcttctgttggagcacctcttagagcagaaaactctcagcccacgaacactgcagtccttacagagaacctaccacctgcaggaccaggatgccgaggtgcggcatcggtggtgcgagctcattgtcaagcacaaatttacaaaagcttataaaagtgtagagaggtttctacaggaggaccaggccatgggagtctatctgtatggggaactgatggtgtccgaagatgcccggcagcaacagttagctagacgttgctttgaacgtaccaaggagcagatggacagaagctcggctcaggttgtcgccgaaatgcttttttag

SEQ ID NO: 291025 - DNA, 2460 bp, Artificial Sequence
  derived and/or modified sequence
atggacatccagctggaccctgccagagatgacctgcccctgatggccaacaccagccacatcctggtgaagcactacgtgctggacctggatgtggactttgagagccaggtgattgagggcaccatcgtgctcttcctggaggatggcaaccgcttcaagaagcagaacagcagcattgaggaggcctgccagagcgagagcaacaaggcctgcaagtttggcatgcctgagccctgccacatccctgtgaccaatgcccggaccttcagcagcgagatggagtacaatgactttgccatctgcagcaagggggagaaggacaccagtgacaaggatggcaaccacgacaaccaggagcacgccagcggcatcagcagcagcaagtactgctgtgacaccggcaaccacggcagcgaggacttcctgctggtgctggactgctgtgacctgtctgtgctgaaggtggaggaggtggatgtggccgctgtgcccggcctggagaagttcaccaggagccctgagctgactgtggtgtctgaggagttcaggaaccagatcgtgcgggagctggtgaccctgcctgccaaccgctggagggagcagctggactactatgcccgctgcagccaggcccctggctgtggggagctgctgtttgacacagacacctggagcctgcagatcaggaagacaggagcccagacagccacagacttcccccacgccatccgcatctggtacaagaccaagccagagggccgctctgtgacctggaccagtgaccagagcggccggccctgtgtgtacacagtgggcagccccatcaacaacagagccctcttcccctgccaggagccccctgtggccatgagcacctggcaggccaccgtgcgggctgctgccagctttgtggtgctgatgtctggagaaaattctgccaagcccacccagctgtgggaggagtgcagctcctggtactactacgtgaccatgcccatgcctgccagcaccttcaccatcgctgtgggctgctggacagagatgaagatggagacctggagcagcaatgacctggccacagagcggcccttcagccccagcgaggccaacttccgccacgtgggcgtgtgcagccacatggagtacccctgccgcttccagaatgccagcgccaccacccaggagatcatcccccaccgggtgtttgcccctgtgtgcctgactggagcctgccaggagaccctgctgcggctcatccccccctgcctgtctgctgcccacagcgtgctgggcgcccaccccttcagccggctggatgtgctgattgtgcctgccaacttccccagcctgggcatggccagcccccacatcatgttcctgagccagagcatcctgactggaggcaaccacctgtgtggcacccggctgtgccatgaaattgcccacgcctggtttggcctggccatcggggcccgggactggacagaggagtggctgtctgagggctttgccacccacctggaggatgtgttctgggccacagcccagcagctggccccctatgaggcccgggagcagcaggagctgcgggcctgcctgcgctggaggcggctgcaggatgagatgcagtgcagccctgaggagatgcaggtgctgcggcccagcaaggacaagacaggccacaccagtgacagcggggccagcgtcatcaagcacggcctgaaccctgagaagatcttcatgcaggtgcactacctgaagggctacttcctgctgcgcttcctggccaagaggctgggagatgagacctacttctccttcctgaggaagtttgtgcacaccttccacggccagctgatcctgagccaggacttcctgcagatgctgctggagaacatccctgaggagaagaggctggagctgtctgtggagaacatctaccaggactggctggagagcagcggcatccccaagcccctgcagcgggagaggagagctggagcagaatgtggcctggcccggcaggtgcgggcagaggtgaccaagtggattggagtgaacagaagacccaggaagaggaagaggcgggagaaggaggaggtgtttgagaagctgctgcctgaccagctggtgctgctgctggagcacctgctggagcagaagaccctgagccccaggaccctgcagagcctgcagaggacctaccacctgcaggaccaggatgctgaggtgcgccaccgctggtgtgagctgattgtgaagcacaagttcaccaaggcctacaagtctgtggagcgcttcctgcaggaggaccaggccatgggcgtgtacctgtatggagagctgatggtgtctgaagatgcccggcagcagcagctggcccggcgctgctttgagaggaccaaggagcagatggacaggagcagcgcccaggtggtggccgagatgctgttctag

SEQ ID NO: 291026 - DNA, 1806 bp, Artificial Sequence
  derived and/or modified sequence
ctctttgacacagacacctggagcctgcagatcaggaagacaggagcccagacagccacagacttcccccacgccatccgcatctggtacaagaccaagccagagggccgctctgtgacctggaccagtgaccagagcggccggccctgtgtgtacacagtgggcagccccatcaacaacagagccctcttcccctgccaggagccccctgtggccatgagcacctggcaggccaccgtgcgggctgctgccagctttgtggtgctgatgtctggagaaaattctgccaagcccacccagctgtgggaggagtgcagctcctggtactactacgtgaccatgcccatgcctgccagcaccttcaccatcgctgtgggctgctggacagagatgaagatggagacctggagcagcaatgacctggccacagagcggcccttcagccccagcgaggccaacttccgccacgtgggcgtgtgcagccacatggagtacccctgccgcttccagaatgccagcgccaccacccaggagatcatcccccaccgggtgtttgcccctgtgtgcctgactggagcctgccaggagaccctgctgcggctcatccccccctgcctgtctgctgcccacagcgtgctgggcgcccaccccttcagccggctggatgtgctgattgtgcctgccaacttccccagcctgggcatggccagcccccacatcatgttcctgagccagagcatcctgactggaggcaaccacctgtgtggcacccggctgtgccatgaaattgcccacgcctggtttggcctggccatcggggcccgggactggacagaggagtggctgtctgagggctttgccacccacctggaggatgtgttctgggccacagcccagcagctggccccctatgaggcccgggagcagcaggagctgcgggcctgcctgcgctggaggcggctgcaggatgagatgcagtgcagccctgaggagatgcaggtgctgcggcccagcaaggacaagacaggccacaccagtgacagcggggccagcgtcatcaagcacggcctgaaccctgagaagatcttcatgcaggtgcactacctgaagggctacttcctgctgcgcttcctggccaagaggctgggagatgagacctacttctccttcctgaggaagtttgtgcacaccttccacggccagctgatcctgagccaggacttcctgcagatgctgctggagaacatccctgaggagaagaggctggagctgtctgtggagaacatctaccaggactggctggagagcagcggcatccccaagcccctgcagcgggagaggagagctggagcagaatgtggcctggcccggcaggtgcgggcagaggtgaccaagtggattggagtgaacagaagacccaggaagaggaagaggcgggagaaggaggaggtgtttgagaagctgctgcctgaccagctggtgctgctgctggagcacctgctggagcagaagaccctgagccccaggaccctgcagagcctgcagaggacctaccacctgcaggaccaggatgctgaggtgcgccaccgctggtgtgagctgattgtgaagcacaagttcaccaaggcctacaagtctgtggagcgcttcctgcaggaggaccaggccatgggcgtgtacctgtatggagagctgatggtgtctgaagatgcccggcagcagcagctggcccggcgctgctttgagaggaccaaggagcagatggacaggagcagcgcccaggtggtggccgagatgctgttctag

SEQ ID NO: 291027 - DNA, 2460 bp, Artificial Sequence
  derived and/or modified sequence
atggacatccagctggaccccgcccgggacgacctgcccctgatggccaatactagccacatcctggtcaagcactatgtcctggacttggatgtggacttcgaatcccaagtcattgagggcacaattgtgctttttctggaggacgggaacagatttaagaagcagaattccagcatcgaggaagcctgtcagtccgaaagcaacaaggcgtgtaagttcggcatgccagagccttgccacatcccggtgacaaatgctcggacctttagctccgagatggagtataacgactttgcaatttgctctaaaggagagaaagatacctccgacaaggacggaaatcacgataatcaggagcacgcctctggcatttcttctagcaagtactgctgtgataccggaaatcatggctcggaggattttctcctggtcctggattgctgtgacctgtctgtactgaaggtggaggaggtcgatgttgcagccgtcccgggactcgagaagtttacaaggtctcccgagcttactgttgtcagcgaagaatttcggaaccagatcgtgagagaactcgtcacactccccgccaaccgctggcgggagcagctggactactatgctcggtgttctcaagctcccggctgcggcgagcttctttttgacacagacacatggagcctgcagatcaggaaaaccggagcccagacagccacagactttccgcacgcgattcgcatatggtacaaaactaagcctgaaggccggtccgttacttggacatcagatcaatcaggccgcccttgcgtttatacagtcggatctcctattaacaatagagccctgttcccgtgccaagaaccccccgtggctatgtctacatggcaggcaacggtgcgtgcggctgcctcgttcgtggtgctcatgtctggcgaaaatagcgcaaagcccacgcaactttgggaggaatgctcttcctggtattactatgtaaccatgccgatgccggcaagcacctttacaattgcggtcggatgctggacggaaatgaagatggaaacttggtctagcaacgatctcgctacggagagacccttttccccttcagaggccaattttagacacgttggtgtttgttcacatatggagtacccatgccggtttcagaacgcctccgcgaccacacaggagatcataccccatagagtattcgcccccgtctgccttaccggagcttgtcaggaaacactcctgagacttatacccccatgtctgtccgcagctcactcagtgttgggcgcgcatccattctcccggctcgacgttttgatcgtaccggctaatttcccatctctggggatggctagtcctcacatcatgttcctcagccagtcaattctcacgggaggcaatcatctttgcggcacgaggttgtgccacgagatcgctcatgcatggtttgggctggctattggagctcgggactggacagaggaatggctgagtgaaggtttcgccacacacctggaagacgtcttctgggcaaccgctcagcagctcgctccctacgaagctcgcgagcagcaggagttacgcgcatgcctgcggtggaggcggttacaggatgagatgcagtgtagccccgaagaaatgcaggtccttcgtccttcaaaggataagacaggtcatacgagcgactccggagcatctgttattaaacacggcttgaacccagagaaaatctttatgcaggtccactatttaaaaggctactttctgctgaggttccttgcgaagcgactgggagacgaaacatatttcagtttcctgcggaaatttgttcataccttccatggtcagctgatcctgtctcaggatttccttcagatgctcctggaaaatattcccgaggagaagcggctagaactgtctgttgaaaatatctaccaagattggctggaatcatccggcattcctaagcctcttcagagggagaggcgagctggcgcagaatgtgggctggcacgtcaagtcagagcagaggtgacgaagtggattggggtaaatcggcgaccacggaaacgcaaaaggagggagaaagaggaagtgtttgaaaaactgcttcctgatcagctggtgctgcttttggaacacttgttggaacaaaagactctcagcccccggaccctgcaaagcctacagcggacttaccatctccaggatcaggacgctgaggttcgtcaccgatggtgcgaactcattgttaagcataagtttaccaaagcctacaaatctgtggagcgtttcctacaggaggaccaagccatgggggtttacctctacggtgaattgatggtgtcagaagatgcgaggcagcagcagttggccaggcgctgctttgagaggacgaaggagcagatggaccggtcttcagctcaggtagtcgcagaaatgctgttctag

SEQ ID NO: 291028 - DNA, 1806 bp, Artificial Sequence
  derived and/or modified sequence
ctgttcgacaccgacacctggagcctgcagatccggaagaccggcgctcagactgcgaccgatttcccccacgcgattaggatctggtacaagactaagcccgaaggccgctccgtgacatggacctcggatcagtcaggccgaccgtgcgtatacacagtgggttcgccaatcaataatagggctctgttcccatgccaagaaccaccagtggccatgtccacctggcaggccactgtcagggccgccgcctcctttgtggtgcttatgtctggggaaaatagtgcgaaacccacccaactgtgggaggaatgtagtagttggtattactatgttactatgcctatgcccgcctctacattcaccatcgcggttggatgttggaccgaaatgaaaatggagacctggtcatcgaacgatctcgccaccgagcgcccgttctcgcctagcgaggccaacttcagacatgttggcgtctgctctcacatggagtacccatgtcgattccagaacgcttcagccaccactcaggaaattataccccaccgggtgtttgccccagtctgcctgactggggcttgccaggaaaccctgctcagactaatcccgccatgcctgtccgctgcccattccgtgctgggggcacaccctttttctagactggacgttctcatcgtccccgctaacttcccaagtttagggatggcaagccctcatataatgttcctgtcccagtctatactcacgggagggaatcatttgtgcggcactcggctctgccatgagattgcccacgcctggttcggactcgccatcggtgcacgtgattggacggaagagtggctgtcagaaggtttcgccacccatctagaagacgtcttttgggcgactgcacagcagctcgctccttatgaggccagggaacagcaggaactaagggcctgccttcgctggagacgcctgcaggacgaaatgcagtgctcgcccgaggagatgcaagtacttcgcccttcaaaggacaagaccggtcatactagtgacagcggggcttccgtcatcaagcacgggcttaaccccgaaaagatctttatgcaggtccattacttgaaaggttacttcctgctcaggtttctggccaaaagattgggcgatgagacttacttctctttcttacgcaaattcgtgcacacattccatggacagctgatcctgtcccaggacttcctccagatgctgctcgagaacataccagaagaaaaaaggctcgaactttctgtggagaatatttatcaagattggctggaaagctccgggatccctaaaccgttgcagagagaacgtagagccggagctgaatgcggccttgctcggcaggtgcgcgccgaggtgactaagtggataggcgtaaaccggcggccccggaaacgcaagagacgggagaaagaagaagtgttcgagaagctactgcctgaccagttggtcttgctgcttgagcatctgctggagcagaaaacgctatctcctagaactctgcagtccctccagaggacttatcaccttcaagatcaggacgccgaggtgaggcatcgctggtgcgagctgatcgttaagcacaaatttactaaggcctataagtccgttgaacgcttccttcaggaagaccaggctatgggggtgtacttatacggcgagctgatggtctctgaagatgcccgccaacagcaactggcccgaaggtgttttgaaagaaccaaggagcagatggaccgtagttccgcacaagtggtggccgagatgctgttttag

SEQ ID NO: 291029 - DNA, 2460 bp, Artificial Sequence
  derived and/or modified sequence
atggatatccagctggaccccgcacgggacgatcttccgttgatggcaaacacaagccacatcctcgtgaaacattatgtcctcgacctcgacgtggatttcgagagccaagtgatcgagggcactatcgtgttgtttctggaggacggcaatagatttaaaaagcagaactcatctattgaggaagcctgccaaagcgaatccaacaaggcctgcaagttcgggatgcctgagccttgccacatacccgtgactaatgcgcgaacattttcgtcggaaatggaatataacgatttcgctatctgttccaaaggcgaaaaggatacgtcagacaaagacggcaatcacgataaccaggagcatgcttcaggaatctcgtccagcaagtactgctgcgataccggtaatcacggatcagaggactttctgttggttttagattgctgtgatctgtctgtgttaaaggtagaggaggtagatgtggcggctgtacctggccttgagaagttcacccgaagtcccgagctgactgtggtctccgaggagttccgcaatcaaatagttagggaactggtgactctccctgccaacaggtggagagagcagctcgactactacgccagatgtagtcaggctccaggttgcggggaactcctcttcgatacggacacatggtccctgcagatcagaaagacaggcgcacaaaccgcaactgacttcccacatgccattaggatttggtacaagactaaacccgagggaaggagtgtcacttggactagtgaccagtcaggtcgaccatgcgtctacactgtgggaagtccaatcaacaacagagccctgtttccatgccaggaaccgccagtggctatgagtacctggcaggccaccgtgagggccgctgccagcttcgtggttttgatgtcaggagaaaacagcgctaaacccacacaattgtgggaagagtgttcctcctggtattactacgtgacgatgcctatgcctgcgtcgaccttcactatcgcggttggttgctggactgagatgaaaatggagacttggtccagtaatgatctggcgacggagcgcccattctccccctccgaagcaaatttccgtcatgtgggagtgtgtagtcacatggaatacccgtgccggtttcaaaatgcaagcgcaaccactcaagaaattattccacatcgcgtctttgccccagtatgcctgacaggcgcatgtcaggaaaccctgctccgattgatcccaccttgcctctcagctgcccacagcgtgctcggtgcccatcctttttctcgattggacgtgctgattgtgcctgctaattttccttccctcggtatggcaagtccgcacatcatgttcctttcccagtccatactgactggaggtaaccacttgtgtggaactcgtctgtgccatgaaatcgcacatgcctggtttggtctggcaataggcgcacgcgattggaccgaggagtggttaagcgaaggttttgctacacatctcgaggacgtcttctgggcaactgcccagcagctcgcgccttacgaggcgagagaacagcaggaactccgagcctgtctccggtggcggagactgcaagacgagatgcagtgctcaccagaggagatgcaggtgctgaggcccagtaaagataaaaccggccacacctccgattcgggagcctccgtgattaaacacgggctgaatccagaaaaaatcttcatgcaggtgcactacctcaaaggttattttctgctgaggttcctggccaaaaggttgggagacgaaacttatttctcattccttagaaagttcgtccatacatttcacggccagcttatcttatctcaggattttctccagatgctcttagaaaacattccggaagaaaaaagactggaactgtctgtcgaaaacatctatcaggactggcttgagtcctccggtatccctaagcctttgcagcgagagagacgggctggcgctgaatgtgggttggctaggcaggtcagggctgaggtaactaaatggataggagttaatagacgcccacgaaagcggaaacggagagaaaaagaggaagtattcgagaagctgctgcccgatcaattggtgcttctgctggagcacctattggaacaaaagaccttgagcccacgcaccttacagtcgttacagaggacttaccatctccaggatcaggatgccgaggtgcgacatcgttggtgcgagctgatagtcaagcacaagtttacaaaagcttataagagtgtcgagaggttcctccaagaggaccaggccatgggtgtgtatctgtatggagaactaatggtgagtgaagatgcccgtcagcagcagctggctcgacgatgctttgaacgcactaaagaacagatggatcgctctagcgcacaggtggtggctgagatgctcttttag

SEQ ID NO: 291030 - DNA, 1806 bp, Artificial Sequence
  derived and/or modified sequence
ctgttcgacacagatacctggtcactgcagatacgtaaaacgggagcacagactgccaccgatttccctcacgctattagaatctggtacaagacgaaacctgagggtcggtcagtcacttggacatctgaccagagtggaaggccctgcgtttatacagtaggaagtccgatcaacaaccgggctctgtttccctgtcaggaaccaccagtagccatgagtacttggcaggcaaccgtgagggctgcagccagcttcgtggtcctgatgtctggggaaaactctgcaaaaccaacccaactctgggaagagtgcagcagctggtactactatgtgaccatgccaatgcccgctagtacgttcacaattgccgtgggctgctggaccgagatgaaaatggaaacatggagtagcaacgacctcgccacggagaggcctttttcaccctccgaggcaaatttccgtcatgtgggagtttgttcccatatggagtatccatgtagatttcaaaatgccagtgccacgacccaagagattattccacaccgtgtgtttgctcccgtctgcctgacaggtgcatgccaggagaccttattgaggctgatccccccttgcctttccgccgcacactcagtattgggcgctcacccattctcacgccttgatgtcctcatcgttccggctaatttccccagtttaggcatggcttctcctcatatcatgtttctctcccagtccatcctcaccggcggaaatcacctttgtggaaccaggctgtgtcacgagattgcccatgcatggtttggtcttgccattggcgcaagggactggaccgaggaatggcttagtgagggctttgccacccacctggaggacgtgttctgggcaaccgcccaacagctcgccccttatgaagcccgtgagcagcaggaacttcgcgcttgtctgcggtggaggaggctgcaggatgaaatgcaatgttcaccagaggagatgcaggtcctgaggcccagcaaagacaaaacagggcatacaagcgattcaggagcttccgttataaagcacgggctgaaccctgaaaaaatcttcatgcaggttcactacctgaaaggctacttccttctgagattcttggcaaaaaggttaggagacgagacttacttttcattccttcgtaaattcgtccataccttccacggtcaattgatactgagccaggacttcctacagatgttactggaaaacattcctgaggagaagcgcttggagctgagcgtggaaaatatctaccaggattggttagagtcatcagggatccccaaaccactgcagcgcgagaggagggcaggagctgaatgtgggttggccaggcaagtccgggcagaagttacaaagtggatcggtgtgaacagacgtccgcgtaagcgcaagagaagagaaaaggaagaggtgttcgaaaagctcctgcccgaccagctggtcctcctattggaacaccttttagaacagaaaacactctcacccagaactcttcaatcgctgcagcggacgtatcatctgcaggaccaggacgccgaggtgcgtcaccgctggtgtgaactgatagtaaagcataaattcaccaaggcttacaagagtgtggagcgcttcttgcaggaagatcaggcaatgggtgtctacttgtacggtgagctcatggtgtccgaagatgctcgccagcaacaattagcgagacgttgtttcgaaagaactaaggagcagatggatcgttcatctgctcaggtggtggcagagatgctcttttag

SEQ ID NO: 291031 - protein, 714 aa, Artificial Sequence
  derived and/or modified sequence
LSWTKAGSPAPPGVIPFQSGFIFTQRARLQAPTGTVIPAALGTELALVLSLCSHRVNHAFLFAVRSQKRKLQLGLQFLPGKTVVHLGSRRSVAFDLDMHDGRWHHLALELRGRTVTLVTACGQRRVPVLLPFHRDPALDPGGSFLFGKMNPHAVQFEGALCQFSIYPVTQVAHNYCTHLRKQCGQADTYQSPLGPLFSQDSGRPFTFQSDLALLGLENLTTATPALGSLPAGRGPRGTVAPATPTKPQRTSPTNPHQHMAVGGPAQTPLLPAKLSASNALDPMLPASVGGSTRTPRPAAAQPSQKITATKIPKSLPTKPSAPSTSIVPIKSPHPTQKTAPSSFTKSALPTQKQVPPTSRPVPARVSRPAEKPIQRNPGMPRPPPPSTRPLPPTTSSSKKPIPTLARTEAKITSHASKPASARTSTHKPPPFTALSSSPAPTPGSTRSTRPPATMVPPTSGTSTPRTAPAVPTPGSAPTGSKKPIGSEASKKAGPKSSPRKPVPLRPGKAARDVPLSDLTTRPSPRQPQPSQQTTPALVLAPAQFLSSSPRPTSSGYSIFHLAGSTPFPLLMGPPGPKGDCGLPGPPGLPGLPGIPGARGPRGPPGPYGNPGLPGPPGAKGDMGLPGLSGNPGPPGRKGLPGPVGDPGPKGSRGYIGLPGLFGLPGSDGERGLPGVPGKRGKMGMPVLLPQSSEARGGNSMPSEGALAGRHGSHL

SEQ ID NO: 291032 - DNA, 2145 bp, Artificial Sequence
  derived and/or modified sequence
ctgagctggaccaaggccggcagccccgccccccccggcgtgatccccttccagagcggcttcatcttcacccagagagccagactgcaggcccccaccggcaccgtgatccccgccgccctgggcaccgagctggccctggtgctgagcctgtgcagccacagagtgaaccacgccttcctgttcgccgtgagaagccagaagagaaagctgcagctgggcctgcagttcctgcccggcaagaccgtggtgcacctgggcagcagaagaagcgtggccttcgacctggacatgcacgacggcagatggcaccacctggccctggagctgagaggcagaaccgtgaccctggtgaccgcctgcggccagagaagagtgcccgtgctgctgcccttccacagagaccccgccctggaccccggcggcagcttcctgttcggcaagatgaacccccacgccgtgcagttcgagggcgccctgtgccagttcagcatctaccccgtgacccaggtggcccacaactactgcacccacctgagaaagcagtgcggccaggccgacacctaccagagccccctgggccccctgttcagccaggacagcggcagacccttcaccttccagagcgacctggccctgctgggcctggagaacctgaccaccgccacccccgccctgggcagcctgcccgccggcagaggccccagaggcaccgtggcccccgccacccccaccaagccccagagaaccagccccaccaacccccaccagcacatggccgtgggcggccccgcccagacccccctgctgcccgccaagctgagcgccagcaacgccctggaccccatgctgcccgccagcgtgggcggcagcaccagaacccccagacccgccgccgcccagcccagccagaagatcaccgccaccaagatccccaagagcctgcccaccaagcccagcgcccccagcaccagcatcgtgcccatcaagagcccccaccccacccagaagaccgcccccagcagcttcaccaagagcgccctgcccacccagaagcaggtgccccccaccagcagacccgtgcccgccagagtgagcagacccgccgagaagcccatccagagaaaccccggcatgcccagaccccccccccccagcaccagacccctgccccccaccaccagcagcagcaagaagcccatccccaccctggccagaaccgaggccaagatcaccagccacgccagcaagcccgccagcgccagaaccagcacccacaagcccccccccttcaccgccctgagcagcagccccgcccccacccccggcagcaccagaagcaccagaccccccgccaccatggtgccccccaccagcggcaccagcacccccagaaccgcccccgccgtgcccacccccggcagcgcccccaccggcagcaagaagcccatcggcagcgaggccagcaagaaggccggccccaagagcagccccagaaagcccgtgcccctgagacccggcaaggccgccagagacgtgcccctgagcgacctgaccaccagacccagccccagacagccccagcccagccagcagaccacccccgccctggtgctggcccccgcccagttcctgagcagcagccccagacccaccagcagcggctacagcatcttccacctggccggcagcacccccttccccctgctgatgggcccccccggccccaagggcgactgcggcctgcccggcccccccggcctgcccggcctgcccggcatccccggcgccagaggccccagaggcccccccggcccctacggcaaccccggcctgcccggcccccccggcgccaagggcgacatgggcctgcccggcctgagcggcaaccccggcccccccggcagaaagggcctgcccggccccgtgggcgaccccggccccaagggcagcagaggctacatcggcctgcccggcctgttcggcctgcccggcagcgacggcgagagaggcctgcccggcgtgcccggcaagagaggcaagatgggcatgcccgtgctgctgccccagagcagcgaggccagaggcggcaacagcatgcccagcgagggcgccctggccggcagacacggcagccacctgtag

SEQ ID NO: 291033 - DNA, 2145 bp, Artificial Sequence
  derived and/or modified sequence
ctaagctggaccaaagctgggtctcctgccccgcccggcgtgatcccatttcagagcgggtttatttttacacagagagcgagactccaagctcccacaggaactgtgattcctgctgcccttggaacagagctggcactggtcctctcattgtgttcccaccgggtcaatcatgcttttctcttcgctgttcgaagtcaaaaaaggaaactccagcttggcctgcagttcctccctggcaagactgtggtccacctgggttcacgacggtcagttgcttttgacctcgacatgcatgatgggagatggcaccacctcgctctggaactgcgggggcggactgtcactttggttactgcatgcgggcagcgtcgcgtcccagtgctgttgcccttccatagggaccctgctttggaccccggcggatccttcctgttcggtaagatgaacccccacgctgtgcagtttgaaggcgctctctgccagttttccatatatcctgtgactcaggttgcacataattactgtactcacctcaggaaacaatgtgggcaagcagacacctaccagtcccccctgggaccattgttctcccaggactcaggacggccattcacattccaatccgacttggcactccttggactggaaaacctgactaccgcaacccccgctttgggatccttacccgccggtaggggaccgagggggaccgtcgctccagcaacccctaccaagcctcagaggacctctcccactaatccacaccagcatatggccgtcgggggtccagcacagacgcctcttctccccgctaagctgagcgcatccaatgccctcgatccaatgctacccgcatccgtggggggctctactcgcacccctagacctgctgctgcccagccctcccaaaaaatcactgcaactaaaatacccaaaagcctaccaacaaaaccttccgctccaagcactagcatcgtccctatcaagtctcctcatccaactcagaaaactgctccatcgtcctttaccaagtcagcccttccaacccaaaaacaggtacctccaacgagccgcccagtacctgcgagggtgtccagacccgccgagaagccaatccagaggaatcctggtatgcccaggccaccgcctccaagcacacggccacttcccccaacaacaagtagcagcaagaagcccatccccactctggctaggaccgaggcaaaaattacgtcgcacgcctctaaaccggctagcgcccgcacctctacgcacaagccaccaccttttactgccttgagctccagcccagcccccacaccaggctccacgcggtccacccggccccccgcaacaatggtaccacccactagtggtacctctactcctcgaactgccccagctgtccccaccccagggtccgctcccacaggtagcaagaagcctattggcagcgaggccagcaaaaaggccggccctaaatctagtcctagaaagccggtgcccctgaggcccgggaaggctgccagggatgttcccctaagtgaccttacgactcgaccatctccacggcagcctcagcctagtcagcaaacgactcctgcgctggtccttgcgccagctcaattcctgagctctagtccgcgcccaacaagcagcggatatagcatttttcacttggcagggtccaccccctttccacttttgatgggtccccctggacctaagggcgattgcggtctacctggaccccctgggcttcccggcctgcccggcatacctggcgctcgtggaccccgagggccccccgggccttacgggaaccccggactccctgggcctcccggggctaagggcgatatggggctcccaggcctctctggaaatccggggccccctgggcgcaaagggttgccaggtcctgtgggcgaccccggccccaagggttcgagaggctatattggcctcccgggcctcttcgggcttccaggatctgacggagaacggggcctccctggcgtacctggtaaaagaggcaaaatgggaatgcctgtgttgttaccacagagtagtgaggcccggggggggaacagcatgccctctgagggggcattggctggtagacacggctctcatctgtag

SEQ ID NO: 291034 - DNA, 2145 bp, Artificial Sequence
  derived and/or modified sequence
ctgtcctggaccaaggccggcagccctgcccctcctggggtcatccccttccagagcggcttcatcttcacccagagggcccggctgcaggcccccactggaacagtcatcccagctgccctgggcacagagctggccctggtgctgagcctgtgcagccaccgggtgaaccacgccttcctgtttgctgtgcgcagccagaagaggaagctgcagctgggcctgcagttcctgcccgggaagacagtggtgcacctgggcagcagaagatctgtggcctttgacctggacatgcatgatggccgctggcaccacctggccctggagctgcggggccgcacagtgaccctggtgacagcctgtggccagaggagagtgcctgtgctgctgcccttccaccgggaccctgccctggaccccggcggcagcttcctgtttgggaagatgaacccccatgctgtgcagtttgagggcgccctgtgccagttcagcatctaccctgtgacccaggtggcccacaactactgcacccacctgaggaagcagtgtggccaggccgacacctaccagagccccctgggccccctcttcagccaggacagcggccggcccttcaccttccagagcgacctggccctgctgggcctggagaacctgaccacagccaccccagccctgggcagcctgcctgctggccggggcccccggggcaccgtggccccagccacccccaccaagccccagaggaccagccccaccaacccccaccagcacatggctgtgggcggccctgcccagacccccctgctgcctgccaagctgagcgccagcaatgccctggaccccatgctgcctgcctctgtgggcggcagcaccaggacccccaggcctgctgctgcccagcccagccagaagatcacagccaccaagatccccaagagcctgcccaccaagcccagcgcccccagcaccagcatcgtgcccatcaagagcccccaccccacccagaagacagcccccagcagcttcaccaagagcgccctgcccacccagaagcaggtgccccccaccagcaggcctgtgcctgcccgggtgtccaggcctgctgagaagcccatccagagaaatcctggcatgccccggcccccaccacccagcacccggcccctgccccccaccaccagcagcagcaagaagcccatccccaccctggccaggacagaggccaagatcaccagccacgccagcaagccagccagcgcccggaccagcacccacaagcccccacccttcaccgccctgagcagcagccctgcccccaccccaggcagcaccaggagcacccggcccccagccaccatggtgccccccaccagcggcaccagcacccccaggacagccccagctgtgcccaccccaggcagcgcccccaccggcagcaagaagcccatcggcagcgaggccagcaagaaggccggccccaagagcagccccaggaagcctgtgcccctgcggcctgggaaggccgccagagatgtgcccctgagtgacctgaccacccggcccagcccccggcagccccagcccagccagcagaccaccccagccctggtgctggccccagcccagttcctgagcagcagcccccggcccaccagcagcggctacagcatcttccacctggccggcagcacccccttccccctgctgatgggccccccaggccccaagggggactgtggcctgcccggccccccaggcctgcccggcctgcccggcatccctggggcccggggcccccggggccccccaggcccctacggcaaccctggcctgcccggccccccaggggccaagggggacatgggcctgcccggcctgagcggcaaccctggccccccaggcaggaagggcctgcccggccctgtgggggaccccggccccaagggcagccggggctacatcggcctgcccggcctgtttggcctgcccggcagtgatggagagcggggcctgcccggggtgcctgggaagaggggcaagatgggcatgcctgtgctgctgccccagagcagcgaggcccggggcggcaacagcatgcccagcgagggcgccctggccggccgccacggcagccacctgtag

SEQ ID NO: 291035 - DNA, 2145 bp, Artificial Sequence
  derived and/or modified sequence
ctgagctggaccaaggccggcagccccgccccccccggcgtgatcccttttcagagcggcttcatcttcactcaaagggcgagactgcaggctcctacaggaacagtcatcccagctgcacttggtaccgaacttgctctggtactttctctctgctcccaccgggtaaaccacgccttcctctttgcagtacggtctcaaaagcgcaagctgcagctcggactgcagtttttacccggtaagacagtggtgcacttgggaagcagacgctcagttgcttttgatctggatatgcacgacggaaggtggcaccatctcgccctagaattgcgggggcgaacagttacacttgttacagcttgcgggcagcgacgtgtgccggtgctacttccttttcaccgcgaccccgccctcgatcccggggggtcctttctgttcggcaaaatgaatccccacgctgttcagtttgaaggtgctctctgtcaatttagcatctatcccgtgacacaggtcgcccacaactactgtacacacttgcggaaacagtgcgggcaagcagatacatatcaaagtcccctgggtccactgtttagccaggacagtggaagaccttttacgttccagtccgacctggctttgctgggtctcgagaacttgaccaccgccacgcctgccttaggctcattgccagctggccggggcccaaggggaaccgtggcacccgcgacccccacaaagccccaaagaacgtcgccgactaacccgcaccagcatatggccgttggcggtcctgcacagactcccctgctcccagcaaagctgagtgctagcaatgccctggacccgatgctgcctgccagtgtgggcggtagcaccaggacacccaggcctgcggctgcacaaccatcgcaaaagatcactgcaaccaaaattcccaaaagtcttccaactaaaccttcggcaccgtctacaagcatcgtccctatcaagagccctcaccccacccaaaagactgccccctcaagctttaccaagagtgctctacctacccagaagcaagtaccacctacatcgaggccagtaccagcacgtgtcagccgcccggcagaaaagccaatccaacgcaacccaggcatgcctaggccccctccgccctctacacggccactgccacctactacgtcatcctccaagaagccaattccaactctggcacgaacagaagcaaagattacgagccacgcaagcaaacccgcctctgcccggactagcacacacaaacctcccccttttaccgcactgtcctcctcccccgcccctacccctggctcaacaagaagtacaaggccccccgcgacgatggtcccacctaccagcgggacaagtaccccgcggacggcaccggcggtgcctactccaggctcagccccaactggatcaaagaagcctattgggagcgaagccagtaagaaggcagggccgaaaagttccccccgcaagccagtgcccctcagaccaggcaaggcggcccgagacgtgcctctgtccgacctgacgacccgcccctccccacgtcagcctcagccctcacaacagactactccggcccttgtgcttgctcctgcacagtttctgtcttcaagcccccggcccacctctagtggctactctatctttcacctggctggatctacacccttcccgctcctgatgggcccgccggggccgaagggggactgtgggctcccaggcccccctgggctcccaggcctccccggaattcccggagcgagagggcccagaggccctcctggcccttatggaaacccagggttaccgggcccccccggggccaagggcgacatggggctccctgggctttcaggcaaccccggtcccccagggaggaagggtcttccagggcccgtgggtgaccccggccccaaaggttccagggggtacattggccttccaggtctctttggactccccggctcagacggggagaggggtttgcccggcgttcccgggaagcgcggaaagatgggcatgcccgtcctgctgccccagtcgagcgaggcccgtggaggaaactccatgccgtctgagggagccctggccggtaggcacgggagccatctgtag

SEQ ID NO: 291036 - DNA, 2145 bp, Artificial Sequence
  derived and/or modified sequence
ctgtcatggactaaagcgggaagtcctgcgcctccaggagtgatcccatttcagtctggatttattttcacacagcgggctagactgcaggcaccgactggtactgttattcccgcagccctcggcacagagctcgctctggtgttatccctttgctcccatcgagtgaatcatgccttcctttttgcagtgcggagtcagaagagaaaactgcagcttggactgcaattcttaccaggcaaaaccgtggttcacctaggcagcaggcgcagcgtggcgttcgatttggatatgcatgacggacgttggcatcatctggcccttgagcttagaggtagaacagtcacgttggtcacagcttgtggtcagagacgcgtccccgttctgctgccttttcacagggatcccgcactggatcctggtggtagtttcctgttcgggaagatgaaccctcacgccgttcagttcgaaggcgcactctgtcagttttctatctaccccgttacacaagttgcccacaattattgcacccatttgcggaagcaatgtggccaagctgacacgtaccaatcccctcttggacccctcttttcgcaagacagcggtcgtccatttaccttccaaagcgacctcgcactacttggactggaaaatctgaccacagccactcctgccctggggagtcttcccgctggtagggggcctcgtggaaccgtggccccagcaaccccaactaagccccagcgcacaagccccacaaaccctcatcaacatatggctgttgggggtccagcccaaacaccactgcttcctgccaagctgtccgcctcaaacgcccttgaccccatgttgccagccagcgtgggcggtagtacccgcacccctcgccctgcagcagcccagccttcccaaaaaataaccgccacaaagatccctaagagtctgcccacaaagccctcagccccatcaacctccatcgtgcccatcaagagtcctcaccccactcagaaaactgcaccgagtagtttcacgaaatctgcgctgccaacacagaagcaggtgccacccacctctcggcctgtgcccgctagagtgtccaggcctgcagaaaagccaattcagcggaatccgggaatgccacgtccaccaccgcctagcactagacctcttccacctacaactagcagttctaagaagccgatacctactctggctaggactgaggcaaagattactagtcacgccagtaagcccgcttcagcgcgtacatccactcataaaccacctccgttcactgccctctccagttcccctgctcccaccccaggcagcactcgttcaactaggccccctgccacaatggtgccgccaacaagcggcacctcgacacctcggacagccccagctgtgccaacccccggaagcgcccctacggggagcaagaaacccattggaagtgaagctagcaaaaaggctggtcccaaatcatccccacggaagcccgtccctctgaggccaggaaaggccgcacgggacgtgcctcttagcgatcttacaacaaggcccagcccgaggcagccacagccctcccaacagacaacccccgcattagtgcttgcacccgcacaattcctgtccagctcacccagaccgactagcagcggatatagtatattccacttggcaggatccacaccttttcctctgctgatggggccaccagggccaaagggtgactgcgggctcccagggccaccagggctacccggtctgccaggcatcccaggcgctagagggcctaggggcccaccaggaccctatggtaatcccggactccctggccctcctggggcaaagggggacatgggcctacccggactaagcggaaatcctgggccacccggacgcaagggtttgcccggaccagtgggtgaccccggtcccaagggcagtagaggctatataggcttgcctggcctgttcggtctacctggctccgatggcgaaagagggcttcccggagtgcctggaaagcgcggtaaaatgggtatgccagtcctgctcccccagtcatccgaggcccgtggtggtaacagcatgccttctgaaggtgctcttgccggacggcatggtagccatctctag

SEQ ID NO: 291037 - DNA, 2243 bp, Artificial Sequence
  derived and/or modified sequence
gggggtttctcttctcctggatcttagtctcgtttgcctgtcacctggcctccacccaaggagctcctgaagatgtggacatcctccagcggctgggcctcagctggacgaaggccgggagccctgcacccccgggagtcattcctttccagtcgggcttcatctttacgcagcgggcccggctccaggctcccacgggcaccgtcattcctgccgccttgggcacagagctggcactggtgctgagcctctgctcccaccgggtgaaccatgccttcctcttcgctgtccgcagccagaaacgcaagctgcagctgggcctgcagttcctccccggcaagacggtcgtccacctcgggtcccggcgctcagtggccttcgacctcgacatgcacgacgggcgctggcaccacctggccctcgagctccgaggccgcacagtcactctggtgactgcctgcgggcagcgccgggtgcctgtcctgctgcctttccacagggaccctgcactcgaccctgggggctccttcctctttgggaagatgaacccgcatgcagtccagtttgaaggtgctctctgccagttcagtatctaccctgtgacgcaggtcgctcacaattactgtacccacctgaggaagcagtgtggacaggctgacacgtaccagtccccactgggacctctcttctcccaagactctggcagaccttttaccttccagtccgacctcgccctgctaggcctggagaacttgaccactgccacaccagccctggggtcactgccagcaggcaggggacccagggggactgtggcacccgccacgcccaccaagccccaaaggactagccccacaaaccctcaccagcatatggcggtgggaggcccagcccaaaccccgctgctacctgccaagctgtcagccagtaacgcacttgatcccatgctcccagcctctgttggcggctctaccagaacgcctcgccctgcggccgctcaaccatcacagaagatcacagccaccaaaatccccaaaagcctccctaccaagccttcggccccttctacttcaattgtgcccatcaaaagcccccatcctacccagaaaacagctccatcttcatttacaaagtcagccctacccactcagaagcaagtgccacctacttcccgtccagttcctgccagagtctcccgtcccgcagagaagcccatccagaggaacccgggaatgcccaggcccccaccgcccagcacccggcccctacctcctaccaccagctcctctaaaaaacccattcccacactagctcggactgaggccaagataaccagccatgccagtaagccggcctctgcccgcaccagcacccacaaacctcccccatttactgctttatcctcatctcctgcccctactcctggttctaccaggagtactcggccaccagccacgatggtacctccaacttcgggcaccagcactcccagaacagcacctgccgtccccactcctggctcagctcccactggaagcaagaagcccattggatcggaagcctcaaagaaagccggacccaagagcagcccccggaagcctgtccccctcagacctgggaaggcagccagggatgtccccttgagcgatctgacaaccaggcctagccccagacagccccagcccagtcagcagaccaccccggccctggtattggccccggcgcaattcctgtcctccagcccccggcccacgagcagtggctattcgatcttccacctggcaggatctacgcctttccctctgctgatggggcctccgggacccaagggagactgtggcttgccgggtccccctgggctacctgggctacctggaatccctggtgcacgtgggcctcggggtcctcctgggccttatggaaatccaggtctccccggccctcctggagccaaaggtgacatgggcttgcctgggctctccgggaatccaggacctccgggacgaaaggggttacctggaccggtaggagatcccggccccaaaggcagcaggggctacattgggctcccagggctcttcggcctgccagggtctgatggagaacgaggcctgcctggcgttcctggcaagaggggcaagatgggtatgccggtccttctaccccaaagttcagaggccagaggtgggaactcaatgccttcagaaggtgccctggctggacgccatggctcacacctgtaa

SEQ ID NO: 291038 - protein, 184 aa, Artificial Sequence
  derived and/or modified sequence
MAKQLQARRLDGIDYNPWVEFVKLASEHDVVNLGQGFPDFPPPDFAVEAFQHAVSGDFMLNQYTKTFGYPPLTKILASFFGELLGQEIDPLRNVLVTVGGYGALFTAFQALVDEGDEVIIIEPFFDCYEPMTMMAGGRPVFVSLKPGPIQNGELGSSSNWQLDPMELAGKFTSRTKALVLNTPN

SEQ ID NO: 291039 - protein, 251 aa, Artificial Sequence
  derived and/or modified sequence
MAKQLQARRLDGIDYNPWVEFVKLASEHDVVNLGQGFPDFPPPDFAVEAFQHAVSGDFMLNQYTKTFGYPPLTKILASFFGELLGQEIDPLRNVLVTVGGYGALFTAFQALVDEGDEVIIIEPFFDCYEPMTMMAGGRPVFVSLKPGPIQNGELGSSSNWQLDPMELAGKFTSRTKALVLNTPNNPLGKVFSREELELVASLCQQHDVVCITDEVYQWMVYDGHQHISIASLPGMWERTLTIGSAGKTFSA

SEQ ID NO: 291040 - DNA, 847 bp, Artificial Sequence
  derived and/or modified sequence
cacaggggtgcctgggagggggctcgcgcgccgcggagccggcgagaaggtggtgccccggagactccgggcactggggagcccagagctcgccatggccaaacagctgcaggcccgaaggctagacgggatcgactacaacccctgggtggagtttgtgaaactggccagtgagcatgacgtcgtgaacttgggccagggcttcccggatttcccaccaccagactttgccgtggaagcctttcagcacgctgtcagtggagacttcatgcttaaccagtacaccaagacatttggttacccaccactgacgaagatcctggcaagtttctttggggagctgctgggtcaggagatagacccgctcaggaatgtgctggtgactgttggtggctatggggccctgttcacagccttccaggccctggtggacgaaggagacgaggtcatcatcatcgaacccttttttgactgctacgagcccatgacaatgatggcagggggtcgtcctgtgtttgtgtccctgaagccgggtcccatccagaatggagaactgggttccagcagcaactggcagctggaccccatggagctggccggcaaattcacatcacgcaccaaagccctggtcctcaacacccccaacaaccccctgggcaaggtgttctccagggaagagctggagctggtggccagcctttgccagcagcatgacgtggtgtgtatcactgatgaagtctaccagtggatggtctacgacgggcaccagcacatcagcattgccagcctccctggcatgtgggaacggaccctgaccatcggcagcgccggcaagaccttcagcgcc

SEQ ID NO: 291041 - DNA, 2336 bp, Artificial Sequence
  derived and/or modified sequence
ggcgatttcaactctcgaatgggaggaggcagtatagaggtatctgtgcctaggtttgctgtggggattgtaataggaagaaacggggaaatgatcaaaaagatccagaatgatgctggtgtgaggattcagtttaaaccagatgatgggattagtccagaaagagctgcccaggtcatgggccctccggatcggtgtcagcatgcagcgcatatcatcagcgagctgattcttacagcccaggaaagagacggctttggaggcctggcagcagccagaggaagaggtcgtggccgtggcgactggagcgtgggagcccctggtggcgtccaggagataacatacacggtgccagccgataagtgtggcctcgtcataggcaaagggggtgagaacatcaaaagcatcaaccagcagtcaggggcgcacgtggagcttcagaggaacccccctcccaacagcgaccccaacctgcggagattcaccatcaggggggttccccagcagatcgaggtggccaggcagctcatagatgagaaagttggcgggaccaatctcggagcacctggagccttcggacagagtccattcagccagccacctgccccacctcatcaaaatacctttcctccaaggagctccgggtgcttcccaaacatggctgccaaggtgaatgggaacccccacagcacccctgtgagtggtcctccggcctttctgacccagggctggggcagcacctaccaggcgtggcagcagcccacacagcaggtcccaagccagcagagccagccgcagagcagccagcccaactacagcaaggcctgggaagactattacaaaaaaacagagtcacgccgccagcgctgctcctcaggccagctccccaccagactacacaatggcctgggcagaatattacagacagcaggtcgctttctacggacagacgttagggcaggcgcaggcccacagccaggagcagtaggacagcgtcctcgtggccaactctcccctcaaaatcattgtcaaagaaaacctatttgtaacagaggtttttacatttgcaaaccttttgatgaagaactgttgttttgttctgtgaaacactatatttagattaacggaatttttctaaaaatcaggaaaattagttactaaaaattgctgatcatttttgtttcattatttttgttatttcaaatgtataagctctgggattctttttggagcaatacctacaaagtcaggcaccagaatgtgcctcagagctgtgacatttcaacatgatggttttggtttggtttggttttgtgtcctttttatttgcagttttttctgttgcaacagaaagtggcttggaagtcttaggtggtatgtaacaaattctttttaaaaattttaaagcagtatttaagtattcttaaatgtgtaaattcatttaatgttttacttctaatttcttgtatcttggctgtctggttttattgcatttttaaaaaaactgaactattatgtattgtaatgaatgatgtgaattctgaactgagacagataattgtattgctgtccaacaggggttgggaggggcattttgtagggtttgtataatttctagagttcgaaaggggtaatataaaaatgtgctcgtgtgtttagcctacgtttttctcatgcctccattaccagttgcaattgtgtatctaagacctccaagcttgtttttaaaacaaaacaaaaaacctttctctattatctcagaaatataaatactgttatttttaatattaagaaattcaatataacttttaacacacactgtggaacattaaaccgtataaaaatgtagttataactatttttaattccaaggtgttgtttgcttttttcttttaaatattttcttaatattttgtcagattaactagatgaataaataaatctagtattaaccgcattatgaattaaataattttgatttaatgaaagggataatatgatttccagtgtttactgtagtgtatcttgtacagataacatgtatttttaaaggaaaaaaaacggaattgaagctattttttcttgcatttctaattgacctgagggacattccgtttgaaatgtactgaagttacagtttctggttttttctccttatttttcttataatgcttgaaatgtctaactattaaaaaagacaattggaaaatgttatgcatggggtttttaagaaaacaaagtgttctttttatttgactgacaattcattttacactctatataataaaatctccacaaggcatcttgtgggcaaagtcaaaaaaaaaaaaaaaaaa

SEQ ID NO: 291042 - DNA, 588 bp, Artificial Sequence
  derived and/or modified sequence
tccagggtgcgaagtaccacattactgtcatctccctgtgagtgggattggcaccccggctgcagctccaggagcaagtactccaggaagcacagagctgtaccagtacacggcccacgttgccaggccccaggcatggaagagctgatatgggaacagtacactgtgaccctacaaaaggattccaaaagaggatttggaattgcagtgtccggaggcagagacaacccccactttgaaaatggagaaacgtcaattgtcatttctgatgtgctcccgggtgggcctgctgatgggctgctccaagaaaatgacagagtggtcatggtcaatggcacccccatggaggatgtgcttcattcgtttgcagttcagcagctcagaaaaagtgggaaggtcgctgctattgtaagtactgggtttgctttcagcttgccttaatagcattttggttttttgcccagaagaaaattaccccttgcttttaagcatttgacagaattacataacctagggaccgctgttcttggatcctcagtacttttggaggggtgtgaagatatgtgtaagttatcttcctacttttcc

SEQ ID NO: 291043 - protein, 963 aa, Artificial Sequence
  derived and/or modified sequence
MDAPWGAGERWLHGAAVDRSGVSLGPPPTPQVNQGTLGPQVAPVAAGEVVKTAGGVCKFSGQRLSWWQAQESCEQQFGHLALQPPDGVLASRLRDPVWVGQREAPLRRPPQRRARTTAVLVFDERTADRAARLRSPLPELAALTACTHVQWDCASPDPAALFSVAAPALPNALQLRAFAEPGGVVRAALVVRGQHAPFLAAFRADGRWHHVCATWEQRGGRWALFSDGRRRAGARGLGAGHPVPSGGILVLGQDQDSLGGGFSVRHALSGNLTDFHLWARALSPAQLHRARACAPPSEGLLFRWDPGALDVTPSLLPTVWVRLLCPVPSEECPTWNPGPRSEGSELCLEPQPFLCCYRTEPYRRLQDAQSWPGQDVISRVNALANDIVLLPDPLSEVHGALSPAEASSFLGLLEHVLAMEMAPLGPAALLAVVRFLKRVVALGAGDPELLLTGPWEQLSQGVVSVASLVLEEQVADTWLSLREVIGGPMALVASVQRLAPLLSTSMTSERPRMRIQHRHAGLSGVTVIHSWFTSRVFQHTLEGPDLEPQAPASSEEANRVQRFLSTQVGSAIISSEVWDVTGEVNVAMTFHLQHRAQSPLFPPHPPSPYTGGAWATTGCSVAALYLDSTACFCNHSTSFAILLQIYEVQRGPEEESLLRTLSFVGCGVSFCALTTTFLLFLVAGVPKSERTTVHKNLTFSLASAEGFLMTSEWAKANEVACVAVTVAMHFLFLVAFSWMLVEGLLLWRKVVAVSMHPGPGMRLYHATGWGVPVGIVAVTLAMLPHDYVAPGHCWLNVHTNAIWAFVGPVLFVLTANTCILARVVMITVSSARRRARMLSPQPCLQQQIWTQIWATVKPVLVLLPVLGLTWLAGILVHLSPAWAYAAVGLNSIQGLYIFLVYAACNEEVRSALQRMAEKKVAEVLRALGVWGGAAKEHSLPFSVLPLFLPPKPSTPRHPLKAPA

SEQ ID NO: 291044 - protein, 130 aa, Artificial Sequence
  derived and/or modified sequence
SGGILLDAGGGAAAVEEGGSCEHAPGPRHAALPRHRLGATVKPVLVLLPVLGLTWLAGILVHLSPAWAYAAVGLNSIQGLYIFLVYAACNEEVRSALQRMAEKKVAEGPMALELPQHSPPLQTRRDRLWN

SEQ ID NO: 291045 - protein, 34 aa, Artificial Sequence
  derived and/or modified sequence
MHPPPSLLSFLAPVAAGEVVKTAGGVCKFSGQRL

SEQ ID NO: 291046 - DNA, 2892 bp, Artificial Sequence
  derived and/or modified sequence
atggacgccccctggggcgccggcgagagatggctgcacggcgccgccgtggacagaagcggcgtgagcctgggccccccccccaccccccaggtgaaccagggcaccctgggcccccaggtggcccccgtggccgccggcgaggtggtgaagaccgccggcggcgtgtgcaagttcagcggccagagactgagctggtggcaggcccaggagagctgcgagcagcagttcggccacctggccctgcagccccccgacggcgtgctggccagcagactgagagaccccgtgtgggtgggccagagagaggcccccctgagaagacccccccagagaagagccagaaccaccgccgtgctggtgttcgacgagagaaccgccgacagagccgccagactgagaagccccctgcccgagctggccgccctgaccgcctgcacccacgtgcagtgggactgcgccagccccgaccccgccgccctgttcagcgtggccgcccccgccctgcccaacgccctgcagctgagagccttcgccgagcccggcggcgtggtgagagccgccctggtggtgagaggccagcacgcccccttcctggccgccttcagagccgacggcagatggcaccacgtgtgcgccacctgggagcagagaggcggcagatgggccctgttcagcgacggcagaagaagagccggcgccagaggcctgggcgccggccaccccgtgcccagcggcggcatcctggtgctgggccaggaccaggacagcctgggcggcggcttcagcgtgagacacgccctgagcggcaacctgaccgacttccacctgtgggccagagccctgagccccgcccagctgcacagagccagagcctgcgccccccccagcgagggcctgctgttcagatgggaccccggcgccctggacgtgacccccagcctgctgcccaccgtgtgggtgagactgctgtgccccgtgcccagcgaggagtgccccacctggaaccccggccccagaagcgagggcagcgagctgtgcctggagccccagcccttcctgtgctgctacagaaccgagccctacagaagactgcaggacgcccagagctggcccggccaggacgtgatcagcagagtgaacgccctggccaacgacatcgtgctgctgcccgaccccctgagcgaggtgcacggcgccctgagccccgccgaggccagcagcttcctgggcctgctggagcacgtgctggccatggagatggcccccctgggccccgccgccctgctggccgtggtgagattcctgaagagagtggtggccctgggcgccggcgaccccgagctgctgctgaccggcccctgggagcagctgagccagggcgtggtgagcgtggccagcctggtgctggaggagcaggtggccgacacctggctgagcctgagagaggtgatcggcggccccatggccctggtggccagcgtgcagagactggcccccctgctgagcaccagcatgaccagcgagagacccagaatgagaatccagcacagacacgccggcctgagcggcgtgaccgtgatccacagctggttcaccagcagagtgttccagcacaccctggagggccccgacctggagccccaggcccccgccagcagcgaggaggccaacagagtgcagagattcctgagcacccaggtgggcagcgccatcatcagcagcgaggtgtgggacgtgaccggcgaggtgaacgtggccatgaccttccacctgcagcacagagcccagagccccctgttccccccccacccccccagcccctacaccggcggcgcctgggccaccaccggctgcagcgtggccgccctgtacctggacagcaccgcctgcttctgcaaccacagcaccagcttcgccatcctgctgcagatctacgaggtgcagagaggccccgaggaggagagcctgctgagaaccctgagcttcgtgggctgcggcgtgagcttctgcgccctgaccaccaccttcctgctgttcctggtggccggcgtgcccaagagcgagagaaccaccgtgcacaagaacctgaccttcagcctggccagcgccgagggcttcctgatgaccagcgagtgggccaaggccaacgaggtggcctgcgtggccgtgaccgtggccatgcacttcctgttcctggtggccttcagctggatgctggtggagggcctgctgctgtggagaaaggtggtggccgtgagcatgcaccccggccccggcatgagactgtaccacgccaccggctggggcgtgcccgtgggcatcgtggccgtgaccctggccatgctgccccacgactacgtggcccccggccactgctggctgaacgtgcacaccaacgccatctgggccttcgtgggccccgtgctgttcgtgctgaccgccaacacctgcatcctggccagagtggtgatgatcaccgtgagcagcgccagaagaagagccagaatgctgagcccccagccctgcctgcagcagcagatctggacccagatctgggccaccgtgaagcccgtgctggtgctgctgcccgtgctgggcctgacctggctggccggcatcctggtgcacctgagccccgcctgggcctacgccgccgtgggcctgaacagcatccagggcctgtacatcttcctggtgtacgccgcctgcaacgaggaggtgagaagcgccctgcagagaatggccgagaagaaggtggccgaggtgctgagagccctgggcgtgtggggcggcgccgccaaggagcacagcctgcccttcagcgtgctgcccctgttcctgccccccaagcccagcacccccagacaccccctgaaggcccccgcctag

SEQ ID NO: 291047 - DNA, 1104 bp, Artificial Sequence
  derived and/or modified sequence
ctgaccgacttccacctgtgggccagagccctgagccccgcccagctgcacagagccagagcctgcgccccccccagcgagggcctgctgttcagatgggaccccggcgccctggacgtgacccccagcctgctgcccaccgtgtgggtgagactgctgtgccccgagccctacagaagactgcaggacgcccagagctggcccggccaggacgtgatcagcagagtgaacgccctggccaacgacatcgtgctgctgcccgaccccctgagcgaggtgcacggcgccctgagccccgccgaggccagcagcttcctgggcctgctggagcacgtgctggccatggagatggcccccctgggccccgccgccctgctggccgtggtgagattcctgaagagagtggtggccctgggcgccggcgaccccgagctgctgctgaccggcccctgggagcagctgagccagggcgtggtgagcgtggccagcctggtgctggaggagcaggtgatcggcggccccatggccctggtggccagcgtgcagagactggcccccctgctgagcaccagcatgaccagcgagagacccagaatgagaatccagcacagacacgccggcctggaggtgagaagcctgagactgagagaggccagcaccagaggctgcctgttcaccatgcccggcggcagacccgagggccccggccacatccacatccccgccagcgaggtgagaagactgctgagaaagggcctgagcggcgtgaccgtgatccacagctggttcaccagcagagtgttccagcacaccctggagggccccgacctggagccccaggcccccgccagcagcgaggaggccaacagagtgcagagattcctgagcacccaggtgggcagcgccatcatcagcagcgaggtgtgggacgtgaccggcgaggtgaacgtggccatgaccttccacctgcagcacagagcccagcccatctacagaggctgcctgggccaccacagactgctgagaggctgccccgtgcccggcctgcacagactgctgctgcagccccagcaccagctgtgccaccccgccgccaacctgtag

SEQ ID NO: 291048 - DNA, 393 bp, Artificial Sequence
  derived and/or modified sequence
agcggcggcatcctgctggacgccggcggcggcgccgccgccgtggaggagggcggcagctgcgagcacgcccccggccccagacacgccgccctgcccagacacagactgggcgccaccgtgaagcccgtgctggtgctgctgcccgtgctgggcctgacctggctggccggcatcctggtgcacctgagccccgcctgggcctacgccgccgtgggcctgaacagcatccagggcctgtacatcttcctggtgtacgccgcctgcaacgaggaggtgagaagcgccctgcagagaatggccgagaagaaggtggccgagggccccatggccctggagctgccccagcacagcccccccctgcagaccagaagagacagactgtggaactag

SEQ ID NO: 291049 - DNA, 105 bp, Artificial Sequence
  derived and/or modified sequence
atgcaccccccccccagcctgctgagcttcctggcccccgtggccgccggcgaggtggtgaagaccgccggcggcgtgtgcaagttcagcggccagagactgtag

SEQ ID NO: 291050 - DNA, 2892 bp, Artificial Sequence
  derived and/or modified sequence
atggacgcaccttggggagcaggggaaaggtggctgcacggagcagcggtggacagatcaggagtctctctgggaccccctccaactccccaggtgaatcaaggaacccttgggccccaggttgcccccgtggccgccggcgaggtggtgaagactgcaggtggggtgtgcaagttctctggacagcgactgagctggtggcaggcccaagagtcctgcgagcagcagtttggccacttggcactgcagccccctgatggggttcttgcttcacggctgcgcgatccggtctgggtgggccaaagagaggcccctctgcggagacccccacagaggcgtgcgcgcaccaccgccgtgctggtgttcgacgagaggacggctgaccgggcggcgcggctgcggagccctctgcctgagctggcagcgctgaccgcgtgtactcacgtgcagtgggactgtgcctcgcccgaccccgcagcgctcttctccgttgccgcgcccgcgctgcccaacgcgctgcagctgcgcgccttcgccgagccggggggcgtcgtgcgcgctgcgctggtggtgcgtgggcagcacgcgcccttcctcgcagccttccgcgccgacggccgctggcaccatgtgtgcgccacgtgggagcagcggggcgggcgctgggcgctgttctccgatgggaggcggcgcgctggggcgcgggggctgggcgccggccacccggtgccgtccggcggcatcctggtgctgggccaggatcaggactctctgggcggtggcttctcggtgcgtcacgccctcagcggcaacctcaccgacttccacctgtgggcgcgggcgctgagccccgctcagctgcaccgggcacgggcctgcgcgccgccctcagagggcctgctcttccgctgggacccgggcgccctggacgtcacgccctcgctgctgcccactgtgtgggtgcgccttctctgtcccgtgccctccgaggagtgccctacgtggaacccgggacctcgcagtgagggctctgagctctgcctggagccgcagcccttcctctgctgctaccggacagagccctatcgtcggctgcaggatgcccagtcgtggcctggccaggatgttatcagccgagtcaatgccttggccaacgacattgtgctcctcccggaccccctctccgaagtccatggggccctgtccccagcggaggcctccagcttcctgggccttctggagcatgtcctggcgatggagatggctcccctggggccggccgcactgctggctgttgtccgcttcctgaagagggtggtggccctcggggctggggacccagagctgttgttgacaggcccctgggagcagctgagccaaggcgttgtatctgtggccagcctggtcctggaggagcaggtggctgacacatggctctccctccgtgaagtgattggtgggcctatggccctggtggcgagtgtgcagcgcctggcacccctgctgagcacctcaatgacctcagagcggccccgaatgcgcatccagcaccgccatgctggcctctctggagtcaccgtgatccacagctggttcacctccagagtcttccagcacaccctagagggaccggacctagagccccaggcccctgccagctcagaggaggcaaacagggtgcagaggttcctaagcacccaggtggggtcagccatcatctcctctgaagtgtgggacgtcactggagaggtcaacgtggccatgacctttcatctccagcaccgggcccagagccccctgttccctccccatcccccaagcccatatacagggggtgcctgggccaccacaggctgctccgtggctgccctgtacctggactccaccgcctgcttctgcaaccacagcaccagctttgccatcctgctgcaaatctatgaagtacagagaggccctgaggaggagtcgctgctgaggactctgtcatttgtgggctgtggcgtgtccttctgcgccctcaccaccaccttcttgctcttcctggtggccggggtccccaagtcagagcgaaccacagtccacaagaacctcaccttctccctggcctctgccgagggcttcctcatgaccagcgagtgggccaaggccaatgaggtggcatgtgtggctgtcacagtcgcaatgcacttcctctttctggtggcattctcctggatgctggtggaggggctgctgctgtggaggaaggtggtagctgtgagcatgcacccgggcccaggcatgcggctctaccacgccacaggctggggcgtgcctgtgggcatcgtggcggtcaccctggccatgctcccccatgactacgtggcccccggacattgctggctcaatgtgcacacaaatgccatctgggccttcgtggggcctgtgctcttcgtgctgactgccaacacctgcatcctggcccgtgtggtaatgatcaccgtgtccagtgcccgccgccgtgcccgcatgttgagcccacagccctgcctgcagcagcagatctggacccagatatgggccacggtgaagcccgtgctggtcctgctgcccgtcctaggcctgacctggctggcaggcatcctggtgcacctgagccccgcctgggcctacgctgccgtgggcctcaactccatccaggggctgtacatcttcctggtttatgctgcctgcaatgaggaggtgcggagcgccctgcagaggatggctgagaagaaggtggccgaggtgctcagggcactgggggtgtgggggggcgctgccaaggagcacagcctgcctttctctgtcctccccctctttctgccccctaagcccagcaccccccgtcaccctctgaaggccccggcctga

SEQ ID NO: 291051 - DNA, 1724 bp, Artificial Sequence
  derived and/or modified sequence
gctggtggcaggcccaagagtcctgcgagcagcagtttggccacttggcactgcagccccctgatggggttcttgcttcacggctgcgcgatccggtctgggtgggccaaagagaggcccctctgcggagacccccacagaggcgtgcgcgcaccaccgccgtgctggtgttcgacgagaggacggctgaccgggcggcgcggctgcggagccctctgcctgagctggcagcgctgaccgcgtgtactcacgtgcagtgggactgtgcctcgcccgaccccgcagcgctcttctccgttgccgcgcccgcgctgcccaacgcgctgcagctgcgcgccttcgccgagccggggggcgtcgtgcgcgctgcgctggtggtgcgtgggcagcacgcgcccttcctcgcagccttccgcgccgacggccgctggcaccatgtgtgcgccacgtgggagcagcggggcgggcgctgggcgctgttctccgatgggaggcggcgcgctggggcgcgggggctgggcgccggccacccggtgccgtccggcggcatcctggtgctgggccaggatcaggactctctgggcggtggcttctcggtgcgtcacgccctcagcggcaacctcaccgacttccacctgtgggcgcgggcgctgagccccgctcagctgcaccgggcacgggcctgcgcgccgccctcagagggcctgctcttccgctgggacccgggcgccctggacgtcacgccctcgctgctgcccactgtgtgggtgcgccttctctgtcccgagccctatcgtcggctgcaggatgcccagtcgtggcctggccaggatgttatcagccgagtcaatgccttggccaacgacattgtgctcctcccggaccccctctccgaagtccatggggccctgtccccagcggaggcctccagcttcctgggccttctggagcatgtcctggcgatggagatggctcccctggggccggccgcactgctggctgttgtccgcttcctgaagagggtggtggccctcggggctggggacccagagctgttgttgacaggcccctgggagcagctgagccaaggcgttgtatctgtggccagcctggtcctggaggagcaggtgattggtgggcctatggccctggtggcgagtgtgcagcgcctggcacccctgctgagcacctcaatgacctcagagcggccccgaatgcgcatccagcaccgccatgctggcctggaggtgcggagcttacgcttgagggaggccagcacgaggggctgcttattcacaatgcctggtgggcgtccagaggggcccggccatatccacattcctgcgagtgaagtgaggcgactcctcaggaaaggcctctctggagtcaccgtgatccacagctggttcacctccagagtcttccagcacaccctagagggaccggacctagagccccaggcccctgccagctcagaggaggcaaacagggtgcagaggttcctaagcacccaggtggggtcagccatcatctcctctgaagtgtgggacgtcactggagaggtcaacgtggccatgacctttcatctccagcaccgggcccagcccatatacagggggtgcctgggccaccacaggctgctccgtggctgccctgtacctggactccaccgcctgcttctgcaaccacagcaccagctttgccatcctgctgcaaatctatga

SEQ ID NO: 291052 - DNA, 722 bp, Artificial Sequence
  derived and/or modified sequence
tttctggtggcattctcctggatgctggtggaggggctgctgctgtggaggaaggtggtagctgtgagcatgcacccgggcccaggcatgcggctctaccacgccacaggctgggggccacggtgaagcccgtgctggtcctgctgcccgtcctaggcctgacctggctggcaggcatcctggtgcacctgagccccgcctgggcctacgctgccgtgggcctcaactccatccaggggctgtacatcttcctggtttatgctgcctgcaatgaggaggtgcggagcgccctgcagaggatggctgagaagaaggtggccgagggacctatggccctagaactccctcagcattctcctccattgcaaacccggagagacaggctgtggaactgacagcgttcaaagcttcaggtttctagagagtggctgggaaactcgtcgccaaaccctgcccagctcagctctgctgggaccccagaccccagaacggcgcagcgggagtccctgagccccaacagcggccccagctcccgtggcctcagcctctggctttccctaaaggactgtgggcctcagccccctgttcccctagcccaccaggtccccaggctctttcccccagtctttgcctatctgtgatctgctccttcccccatgctccgaagttccaacgggctctgccgtgtctggtaataaataggactgttgggctctcctgtc

SEQ ID NO: 291053 - DNA, 461 bp, Artificial Sequence
  derived and/or modified sequence
ttttcctcagtccaagttggcctgcctgtgacccctgctgtctgtcacctgctccgttggatccaggatggcaccgtggtgctactgtttcctctgcctcctgatcaggagtctctctgggaccccctccaactccccaggtgaatcaaggaacccttgggccccaggccctgcgaggaacgcttcactggtttccgtctcattcctgccattgcgcagatgacgaaaagagctctgcaagaggacaggactcagcaggccatagacatgggcgggttcagccccatccagcccgaatgactccaagcccagtgtccttggctccgcccagccctggaagagtcagatgcccacaaaatgcaccccccaccgtctctcttatcgtttttagcccccgtggccgccggcgaggtggtgaagactgcaggtggggtgtgcaagttctctggacagcgactgag

SEQ ID NO: 291054 - DNA, 2892 bp, Artificial Sequence
  derived and/or modified sequence
atggacgctccctggggcgcaggcgagcgatggctgcatggcgccgccgttgatcggtcaggtgtgagccttggtccccctcctactccccaagtgaaccagggaaccttaggaccccaggtcgctcccgtagccgcaggagaagtggtgaagaccgccggaggggtgtgcaaatttagtggccagcggctcagctggtggcaggcccaggagtcttgtgaacagcagtttggccatttagctttgcagccgccggacggggttctggcaagcaggctccgggaccccgtgtgggtgggacagagggaagccccattacggagaccgccccagagaagggccagaactaccgcggtcctggtcttcgatgaacgcaccgcggatcgtgctgcccgattgcgatctcccctgccagagctcgccgccctgacagcttgcacccatgttcaatgggactgtgcctctcccgaccccgccgccctattcagtgtggccgcccctgcactgcctaatgctctgcaactgagagcgtttgccgagcccgggggagtggttagagccgcgcttgtcgtgcgagggcagcatgctcctttccttgccgcattcagagcagatggccggtggcatcacgtttgtgctacatgggagcaacgaggaggccgatgggcactgtttagcgatggaaggcggcgagcaggagcacgggggttgggtgcaggacatcccgtgccatcaggtggcatcctcgtgttaggccaggatcaggatagcctcggcgggggcttcagtgtgcgacatgccctgtcaggtaatctcacagattttcacctgtgggcgcgggctctctcacctgctcagttgcatcgggcaagggcttgtgctcctccgagcgaagggcttctcttcagatgggatccgggcgcactggacgtgacccccagtttactgcctaccgtttgggtgcggctcctgtgccccgtccctagcgaggagtgtcctacatggaatcctggcccaaggagcgaaggttctgagttgtgtttagaaccccagccgttcctttgttgctatcgcactgagccctatcggagactccaggatgcccaatcgtggcctgggcaagacgtgatcagccgagtgaacgctttagccaacgatatcgtgctgctgcctgatccactgtcagaggttcatggcgctctgagccctgccgaagccagtagttttctcggcttgctggagcacgtgcttgccatggaaatggctcctctgggacccgcagccctgctagcagtggtgcggttcctgaaacgggtggtggccctgggagccggtgatcctgagctccttttgaccggcccatgggagcagctatctcaaggtgtcgtctccgtagcgtccctggtgcttgaggagcaggtcgcagacacctggctctccctcagagaagttattggcgggccaatggccttagtggccagtgttcagcggcttgctcctctgctctccaccagcatgacttctgagcggcctcgcatgagaatccagcaccgccacgctggcttatccggcgtaaccgtaatccatagctggttcactagtcgcgtgtttcagcatactctggagggccccgacctcgaaccccaggcaccggcgtcttcagaggaagccaatagggttcagcgctttttgtctacacaggttgggtctgccatcatttcctctgaagtatgggacgtaactggggaggtgaacgttgctatgacttttcacctccagcacagagcgcagtccccactcttccccccacatcctccgtctccttacaccggcggagcatgggccacaacgggctgtagtgttgcggcgctatacctcgacagcactgcatgtttttgtaatcactccacgtcctttgctatcctgctccaaatctacgaggtccaacgcgggcctgaggaagagtctctgttgaggacgctgtcatttgtagggtgcggcgtttccttttgtgccctcacgacaacttttttgctgttccttgtcgctggggtgcccaagtccgaacgtacaacagtccacaaaaacttgactttttctcttgcctccgccgaagggtttctgatgacgtctgaatgggccaaggcaaatgaggtcgcctgtgtcgccgtgaccgttgccatgcactttctgtttctggttgctttcagctggatgctggtggaggggctactcctctggcgcaaggtagtggcagtgagcatgcaccccggccccggaatgagactgtaccacgcgactggctggggggtgccagtggggatagtcgctgtgactttggctatgcttccgcacgattatgtggctcctggtcactgctggttgaatgtgcatacaaacgcgatctgggcctttgtggggccagtactgtttgtcctcaccgctaatacctgtattctggcccgggtagtgatgattactgtgtcatccgcccgccgtagggctcgaatgctgtcgccccaaccatgcttgcaacagcagatctggacacagatatgggccaccgttaagcctgtgttggtgctgctccctgtcctcggcctaacctggctggcaggcatcctggtccacctttccccggcatgggcatacgcagctgttggcctgaactccatacaggggctgtacattttcctagtgtacgcagcctgcaacgaagaagtccgatctgccctgcagcggatggctgagaaaaaggtggcagaggtcctccgcgcattaggagtctggggaggggcagccaaggaacattccctgcctttttcggtgttgccattgtttctgccccctaagccttccactccacgacaccctcttaaagcacccgcctag

SEQ ID NO: 291055 - DNA, 1104 bp, Artificial Sequence
  derived and/or modified sequence
ttaaccgattttcatctctgggcccgtgccctgtctcctgcccagctgcacagggctcgggcctgcgccccccccagtgaaggcttactcttccgatgggatccaggcgccctggatgttacaccctcactcttgccaactgtgtgggtccgccttctgtgcccggaaccgtacaggaggctgcaggacgcccagagctggcctggccaggacgtaatctcaagggtaaacgccctggccaatgacatcgtactactccccgaccccctgagtgaggtacacggcgctctttcccctgccgaagcaagctcctttctaggtttgctcgaacacgtgttggctatggaaatggcccctctgggaccagcggcattactggctgtggtccgctttcttaaaagggtggtggcacttggcgcaggcgacccagagttactgctaacaggtccatgggagcagctgtctcagggagttgtctccgtagcttctttggtgttggaggagcaggtcatcggcggccccatggccttggtggcttcagtccagagattggccccgctgctgagcacttctatgacatctgaacgtccacggatgcgtatccaacaccgccacgccggactggaggtgcggagcctacggctccgcgaggcgtcaacacgcggctgtctttttacaatgccagggggacgcccagagggccctggtcatatccatatcccagcctctgaggtccggcgactgctgcgcaagggactgagtggcgtgaccgtgatccacagctggttcacatctagggtgttccagcatactctggagggcccagatctcgagccccaggccccagcgtccagcgaagaagccaacagagtccagcgcttcctcagcacccaggtaggcagtgccatcatcagttctgaggtgtgggatgtgacaggggaagtgaacgtggccatgacttttcacttgcagcaccgcgcacagcccatatacagaggatgcctcggccatcataggctgttgcgtgggtgtcctgtccctgggttacatcggttgttgctgcagccccaacatcaattatgccaccctgctgccaacctgtag

SEQ ID NO: 291056 - DNA, 393 bp, Artificial Sequence
  derived and/or modified sequence
agtggaggcattctgctggatgctgggggtggagctgccgcagtggaagaaggaggtagttgcgagcatgcccctggcccacggcacgcggcactcccgcggcaccgcctcggggctaccgttaaaccagttctggtacttctgcctgtgctggggttaacttggttagctggcatattggtacatctaagtcctgcatgggcctatgccgctgtgggtttgaattctattcagggcctatatattttccttgtgtatgctgcctgtaacgaagaagtgcgctctgctctgcaacggatggcagagaagaaagtagctgagggccccatggccctcgagttaccgcagcatagtccccctttgcagacgagacgtgacagactgtggaattag

SEQ ID NO: 291057 - DNA, 105 bp, Artificial Sequence
  derived and/or modified sequence
atgcaccctccgccaagcctgctatctttcctggcacccgttgctgccggcgaggtcgtgaagactgccgggggagtttgcaaatttagtggtcagcgcttgtag

SEQ ID NO: 291058 - DNA, 2892 bp, Artificial Sequence
  derived and/or modified sequence
atggatgccccctggggcgctggggagcgctggctgcatggagctgctgtggacagaagtggagtgtccctgggccccccacccaccccccaggtgaaccagggcaccctgggcccccaggtggcccctgtggccgccggggaggtggtgaagacagctggaggagtgtgcaagttcagcggccagaggctgtcctggtggcaggcccaggagagctgtgagcagcagtttggccacctggccctgcagcccccagatggagtgctggccagccggctgcgggaccctgtgtgggtgggccagcgggaggcccccctgcggcggcccccccagaggcgggcccggaccacagctgtgctggtgtttgatgagaggacagctgaccgggccgcccggctgcggagccccctgcctgagctggccgccctgacagcctgcacccacgtgcagtgggactgtgccagcccagaccctgctgccctcttctctgtggccgccccagccctgcccaatgccctgcagctgcgggcctttgctgagcctggaggagtggtgcgggccgccctggtggtgcggggccagcacgcccccttcctggccgccttccgggcagatggccgctggcaccacgtgtgtgccacctgggagcagagaggaggccgctgggccctcttcagtgatggaagaagaagagctggggcccggggcctgggcgccggccaccctgtgcccagcggcggcatcctggtgctgggccaggaccaggacagcctgggcggcggcttctctgtgagacatgccctgagcggcaacctgacagacttccacctgtgggcccgggccctgagccctgcccagctgcaccgggcccgggcctgtgcccctccttctgagggcctgctcttccgctgggaccccggggccctggatgtgacccccagcctgctgcccaccgtgtgggtgcggctgctgtgccctgtgcccagtgaagaatgtcccacctggaaccctggccccaggtctgagggcagcgagctgtgcctggagccccagcccttcctgtgctgctacagaacagagccctacagaaggctgcaggatgcccagagctggccaggccaggatgtgatcagccgggtgaatgccctggccaatgacatcgtgctgctgcctgaccccctgtctgaggtgcacggggccctgagccctgctgaggccagcagcttcctgggcctgctggagcacgtgctggccatggagatggcccccctgggccctgctgccctgctggccgtggtgcgcttcctgaagagggtggtggccctgggcgctggggaccctgagctgctgctgaccggcccctgggagcagctgagccagggcgtggtgtctgtggccagcctggtgctggaggagcaggtggccgacacctggctgagcctgcgggaggtgattggaggccccatggccctggtggcctctgtgcagaggctggcccccctgctgagcacctccatgaccagcgagcggcccaggatgaggatccagcacagacatgctggcctgtctggagtgaccgtcatccacagctggttcaccagcagggtcttccagcacaccctggagggccctgacctggagccccaggccccagccagcagcgaggaggccaacagagtgcagcgcttcctgagcacccaggtgggcagcgccatcatcagcagcgaggtgtgggatgtgactggagaggtgaatgtggccatgaccttccacctgcagcaccgggcccagagccccctcttccccccccacccccccagcccctacacaggaggagcctgggccaccaccggctgcagcgtggccgccctgtacctggacagcacagcctgcttctgcaaccacagcaccagctttgccatcctgctgcagatctatgaggtgcagaggggccctgaggaggagagcctgctgcggaccctgagctttgtgggctgcggcgtgtccttctgtgccctgaccaccaccttcctgctcttcctggtggccggcgtgcccaagtctgagaggaccaccgtgcacaagaacctgaccttcagcctggccagcgctgagggcttcctgatgaccagcgagtgggccaaggccaatgaggtggcctgtgtggccgtgacagtggccatgcacttcctgttcctggtggccttctcctggatgctggtggagggcctgctgctgtggaggaaggtggtggccgtgtccatgcaccctggccctggcatgaggctgtaccacgccaccggctggggcgtgcctgtgggcatcgtggccgtgaccctggccatgctgccccatgactatgtggcccctggccactgctggctgaatgtgcacaccaatgccatctgggcctttgtgggccctgtgctgtttgtgctgacagccaacacctgcatcctggcccgggtggtgatgatcaccgtgagcagcgccaggagaagagccaggatgctgagcccccagccctgcctgcagcagcagatctggacccagatctgggccaccgtgaagcctgtgctggtgctgctgcctgtgctgggcctgacctggctggccggcatcctggtgcacctgagccctgcctgggcctatgctgctgtgggcctgaacagcatccagggcctgtacatcttcctggtgtatgctgcctgcaatgaggaggtgcgcagcgccctgcagaggatggccgagaagaaggtggccgaggtgctgcgggccctgggcgtgtggggcggggccgccaaggagcacagcctgcccttctctgtgctgcccctcttcctgccccccaagcccagcacccccaggcaccccctgaaggccccagcctag

SEQ ID NO: 291059 - DNA, 1104 bp, Artificial Sequence
  derived and/or modified sequence
ctgacagacttccacctgtgggcccgggccctgagccctgcccagctgcaccgggcccgggcctgtgccccacccagcgagggcctgctcttccgctgggaccccggggccctggatgtgacccccagcctgctgcccaccgtgtgggtgcggctgctgtgcccagagccctacagaaggctgcaggatgcccagagctggccaggccaggatgtgatcagccgggtgaatgccctggccaatgacatcgtgctgctgcctgaccccctgtctgaggtgcacggggccctgagccctgctgaggccagcagcttcctgggcctgctggagcacgtgctggccatggagatggcccccctgggccctgctgccctgctggccgtggtgcgcttcctgaagagggtggtggccctgggcgctggggaccctgagctgctgctgaccggcccctgggagcagctgagccagggcgtggtgtctgtggccagcctggtgctggaggagcaggtgattggaggccccatggccctggtggcctctgtgcagaggctggcccccctgctgagcacctccatgaccagcgagcggcccaggatgaggatccagcacagacatgctggcctggaggtgcgcagcctgcggctgcgggaggccagcacccggggctgcctcttcaccatgcctgggggccggcctgagggccctggccacatccacatcccagccagcgaggtgcggcggctgctgaggaagggcctgagcggcgtgaccgtcatccacagctggttcaccagcagggtcttccagcacaccctggagggccctgacctggagccccaggccccagccagcagcgaggaggccaacagagtgcagcgcttcctgagcacccaggtgggcagcgccatcatcagcagcgaggtgtgggatgtgactggagaggtgaatgtggccatgaccttccacctgcagcaccgggcccagcccatctaccggggctgcctgggccaccaccggctgctgcggggctgccctgtgcccggcctgcaccggctgctgctgcagccccagcaccagctgtgccaccctgctgccaacctgtag

SEQ ID NO: 291060 - DNA, 393 bp, Artificial Sequence
  derived and/or modified sequence
tctgggggcatcctgctggatgctgggggcggcgctgctgctgtggaggagggcggcagctgtgaacatgcccctggccccaggcatgctgccctgcccaggcaccggctgggcgccaccgtgaagcctgtgctggtgctgctgcctgtgctgggcctgacctggctggccggcatcctggtgcacctgagccctgcctgggcctatgctgctgtgggcctgaacagcatccagggcctgtacatcttcctggtgtatgctgcctgcaatgaggaggtgcgcagcgccctgcagaggatggccgagaagaaggtggccgagggccccatggccctggagctgccccagcacagcccccccctgcagacccggcgggaccggctgtggaactag

SEQ ID NO: 291061 - DNA, 105 bp, Artificial Sequence
  derived and/or modified sequence
atgcaccccccacccagcctgctgtccttcctggcccctgtggccgccggggaggtggtgaagacagctggaggagtgtgcaagttcagcggccagaggctgtag

SEQ ID NO: 291062 - DNA, 2892 bp, Artificial Sequence
  derived and/or modified sequence
atggacgccccctggggcgccggcgagcggtggctgcacggcgccgcagtggataggtccggggtcagcctcggccccccaccaaccccacaggtgaaccaaggcactcttgggcctcaagtggcgcccgtcgccgccggcgaggttgtgaagactgccggtggcgtttgtaagtttagcggacagagactatcctggtggcaggcacaggagtcctgcgagcaacagttcggtcacctagctcttcaacctccagacggcgtcttagccagccggctgcgcgacccagtgtgggtagggcagcgggaggccccgctacgtagacctccccagcggagagcccgcaccactgccgtgctagtcttcgacgagagaacagccgacagggccgctcgcttacgatcaccactgcccgagctggcggccctgacagcctgtactcacgtgcagtgggactgcgcctctcccgacccagcagccctgttttccgttgcagccccagctcttccaaacgcgctgcaactgcgggcgttcgctgaaccaggcggagtggtccgggccgctctcgtggtcagagggcagcacgctccctttcttgcagctttcagggccgatggacgttggcatcatgtgtgtgccacatgggagcagcggggcggtagatgggcgctttttagcgacgggcgcaggcgggccggcgctcgaggcctaggggcagggcatcctgttccttccggcggcatactggttcttgggcaggatcaggactctcttggcggggggttctcagtccgccatgccctgagcggcaacctcactgactttcacttgtgggctagagcgctgtcaccagcacagctgcacagggctagggcctgcgctcccccttctgagggccttctctttcggtgggatcccggtgccctcgacgtgacaccgtctctactgcctacggtgtgggtgaggctgttatgccccgtgcctagcgaggaatgtcccacctggaatcccggcccccgctccgagggttctgagctgtgcctggagccgcaacccttcctttgttgctaccgtaccgagccctacaggagattgcaggatgcccagagctggcccggtcaagacgtcatctcccgtgtgaatgcccttgccaatgatatcgtgttactgcctgatccactcagtgaggtgcatggggctctgtcgcctgctgaagcctcctccttcttaggccttttggagcacgtgctcgccatggaaatggcccccctaggcccggctgccctcctggccgtcgtacggttcttaaaacgcgtcgtcgccctgggcgcaggagacccggagctgttgctcactggcccatgggagcagttatcccaaggtgtggtgagcgttgcctccttggtgctggaggaacaggtcgccgatacctggctttctctccgggaggtcattgggggccctatggccttggtcgcctccgtccagcgccttgccccgctcctcagcacctccatgacgagtgaaaggccaagaatgcgaattcagcatagacatgccggcctgtctggcgtgacagttattcattcgtggttcacgtctcgggtttttcagcacacattagaaggcccagacttagaaccacaggctccagcttcatccgaagaggcaaaccgcgtccagaggttcttgtccacacaggtcggtagtgccatcatctcctccgaagtgtgggacgttacaggggaggtgaacgtggcaatgacattccatttacaacaccgggctcaatctcctctctttccacctcatccccccagcccatacaccgggggcgcgtgggccaccacgggctgttccgtggcggctctttacctggatagtacagcatgtttctgtaaccatagtacatcatttgcgattctgctacaaatctacgaagtacaaaggggtcctgaagaggaatccctcctccgaaccctctccttcgtaggctgtggcgtctccttctgcgcactgactacgacgttcctcctgttcctggtagccggcgtcccaaagtccgagaggaccactgtccataaaaatctgaccttcagcttggcctcagccgaaggatttctaatgacgtctgaatgggcaaaggcgaatgaagtggcctgcgtggctgtcacggttgccatgcatttcctgtttttggtagcttttagttggatgttggtagagggactgctgctctggcgtaaggtcgtggctgtgagtatgcatccaggccccggtatgaggttgtatcacgcaaccgggtggggggttcctgtcggtatagtagctgttaccctcgccatgctgccacacgattatgttgcacctggccactgctggctgaacgtccatactaatgcgatctgggccttcgtggggccagtgctgttcgtgttgaccgccaatacctgcattcttgccagggtggtaatgattaccgtgtcttctgcgcgaaggcgggcaagaatgctgtccccccagccatgccttcagcagcagatttggacacagatatgggcaacagtgaagcccgtattagtcctactaccagtgttaggacttacttggctggccggcatcctggtgcaccttagccctgcctgggcgtacgccgctgtcggtctgaacagcattcaggggctgtacatctttcttgtttacgccgcatgcaacgaagaggtgaggagtgccctgcagcggatggcagagaaaaaggtagcagaggtgcttcgggcgcttggagtctggggtggcgccgccaaggaacatagtttgcctttttcggttttacctctgttcctgcccccaaagccctcaaccccgaggcatccactgaaagctccagcctag

SEQ ID NO: 291063 - DNA, 1104 bp, Artificial Sequence
  derived and/or modified sequence
ctgaccgacttccacctgtgggcccgggccctgagccccgcccagctgcacagagccagggcttgtgcccccccgagcgagggactgctgtttaggtgggacccgggcgcattggacgtaaccccctccctgcttcccacggtttgggttcgtttactgtgcccagagccttacagacgcctccaggacgctcagtcatggccggggcaggatgtaatctcacgggtgaatgccctggctaacgacattgtgctgctccctgaccccctttccgaggtgcatggggcactctcgccagctgaagcaagcagcttcctgggacttcttgaacatgtactggccatggagatggctccgctggggccagccgccctcttagccgtcgtcagatttctcaagcgtgtagttgcactcggagccggcgacccagagctgcttttgacaggaccctgggagcagctcagccagggagttgtttcggtggcttctctggtgttagaggaacaggttatcggaggacccatggctttggtagctagtgtacagcgactggctcctctactgtcgacgagcatgacatccgagcgccccagaatgaggatccagcaccgacacgccggactggaggttaggtcccttcggctgagggaggcctcaacacgcggctgtctgtttaccatgccgggaggcaggcccgaaggacccggccatatccatataccagcatctgaggtgcgcaggctcctgagaaaggggctgtccggcgtgaccgtcattcactcctggtttacttcaagggtgtttcagcacactttggaaggcccagacctcgaaccccaggctcctgccagctctgaggaggctaacagagtccaacgctttctgagcacgcaggtgggctcagctatcatttcatcagaagtctgggacgtgacaggggaggtaaatgtcgcgatgacattccatctgcaacatcgcgctcagcccatatatcggggttgcctcggtcaccatcgcttgttaaggggctgcccagttcccggccttcacaggctactactgcagcctcagcaccaactgtgtcacccagcggcaaatctctag

SEQ ID NO: 291064 - DNA, 393 bp, Artificial Sequence
  derived and/or modified sequence
agcggcggcatcctgctggacgccggcggcggcgccgccgccgtggaagagggtgggtcttgcgaacacgcgcctggacctcgacatgcagctctcccacgacaccgtttaggtgcgactgtgaaaccggtactggtactgcttcctgtccttggactgacatggcttgcagggattctggtacatctgtccccagcatgggcttacgcagcggtcggcctgaacagcatacagggcttatatatatttctggtgtacgcagcctgcaacgaagaggtacgcagtgcgctgcagagaatggctgaaaagaaagttgccgaaggacccatggccctggagctcccacagcattctccacccctccagacacgccgcgatcgcttatggaattag

SEQ ID NO: 291065 - DNA, 105 bp, Artificial Sequence
  derived and/or modified sequence
atgcaccccccccccagcctgctgagcttcctggcccccgtggccgctggagaagtagtgaagactgcaggcggagtgtgcaagtttagtgggcagcggttgtag

SEQ ID NO: 291066 - DNA, 2892 bp, Artificial Sequence
  derived and/or modified sequence
atggatgctccttggggggcaggggagcggtggttacacggtgctgccgttgatcgatccggcgtgtctctcggaccaccaccaacgccccaagtaaaccaaggcactttaggtccccaggtagcccctgtcgcagccggtgaggtggtcaaaaccgcagggggtgtctgtaagttctccggccagcgactttcgtggtggcaggcccaggaatcttgcgaacagcaattcggacacctagccctgcaacctccagatggcgtactcgccagccgcctgagagatccagtgtgggttgggcagagggaggcacccctgaggaggccaccccagagaagggcaaggaccaccgctgtgctggtgttcgacgaacggactgccgaccgggcagccaggttgcgaagccccctccccgaactcgcagctttgaccgcgtgtacacatgttcaatgggattgtgcaagtcctgaccccgctgctctgttcagtgtggccgctcctgcgttgccgaatgctttacagttgagggcgtttgcggagcctgggggagtcgtgcgggctgctcttgttgtgcgaggtcaacatgccccatttttagctgcctttagagccgacggccgatggcatcacgtctgcgctacatgggagcaaagggggggtagatgggctcttttcagcgacggcaggcggagagctggtgcaaggggccttggtgccggacaccccgtgccaagcgggggtatccttgtgctgggccaggaccaggactccctgggaggcggattctctgtccgacatgcactcagtgggaatctcactgacttccacctgtgggcacgggctctcagcccagctcagttgcacagagctagagcttgtgcacctccaagcgaggggctcctgttcagatgggaccccggtgctctggacgtgacccctagcctcctgccgactgtttgggtgagactcctctgtcccgtccccagtgaggagtgccccacctggaaccccggacctagatcagaaggttccgagttgtgtctcgagccgcaaccttttctctgctgttaccgcactgaaccatatcggcgtctgcaggatgcccaatcttggcctgggcaggatgtgatctccagagtgaacgcactggcaaacgatattgtcctcctgccagaccccctgagcgaggtccatggagccctcagccctgctgaggcaagtagcttcctggggttgcttgagcacgtccttgcaatggagatggctccactggggcctgctgccctgctggccgtcgtgcggtttctgaaaagagtggtggccttaggtgccggagatcccgagctattgctgaccggaccctgggaacagctgtctcaaggggtggtatcggtcgcttccctggtgttggaggagcaggtggccgatacgtggctctctctgcgggaggttattgggggacctatggcccttgttgcctctgttcagcgcctggcacctctgctgagcaccagcatgacaagcgagcgacccaggatgcgcatccaacacaggcacgccggattaagtggcgtcaccgtcattcacagctggtttacttccagagtgttccagcacactctggagggaccagatcttgaaccccaagcaccagcctcatccgaggaggctaaccgcgtgcaacgctttctctccactcaggtggggagcgctatcatttcaagcgaggtgtgggacgtgaccggcgaagttaacgtagccatgacgtttcacctgcagcatagggcacagtcacccctgttcccacctcaccccccttcaccctatactggcggagcctgggcgacaaccggatgctcggtggctgctctgtacctcgacagcaccgcttgtttctgcaaccattcaacgtcctttgcgattctactgcaaatctacgaggttcagagaggcccagaagaagaatccctactaaggactttgagctttgtcggatgcggcgtcagtttctgcgcccttactaccactttcctgttgttcctcgtcgccggagttccaaagagcgaaagaaccacggtgcataagaatcttacattctctctggcatcagccgaaggctttctgatgacatctgaatgggctaaggccaacgaagtcgcatgcgtagccgtgacagtggcgatgcattttttgttcctcgttgcgttctcatggatgttggtcgagggactgctgctgtggaggaaggtggtggctgtaagcatgcaccccggaccaggcatgaggctgtaccacgctaccgggtggggagttccagtgggcatcgttgctgtcacactggcgatgctgccgcatgactatgttgctcccggtcactgttggcttaatgtgcacaccaatgctatttgggcgtttgtcggacccgtgctgtttgttcttaccgccaacacctgtatcctggcacgggtggttatgattacagtcagtagcgcgaggagacgtgcaagaatgctgtcaccacaaccttgccttcagcagcaaatctggacccagatttgggctactgtcaagccagtgctcgtgttgctgcccgtccttggactgacttggcttgctggtattctggtgcaccttagtcccgcatgggcctatgcagctgttggtcttaatagcatccaaggactatacatttttctcgtttacgcagcgtgcaacgaagaagtgaggagcgccctgcagagaatggctgaaaaaaaagtggcggaagtcctgagagccctgggcgtctgggggggtgctgctaaggagcattccttgcccttcagtgtgctgcccctttttctccctcctaaaccatccactccgcgacaccctttgaaggcccctgcatag

SEQ ID NO: 291067 - DNA, 1104 bp, Artificial Sequence
  derived and/or modified sequence
ctgactgatttccatctttgggctagggcgctgagcccggctcagttgcacagggccagagcttgcgcaccccctagtgaaggacttctgtttaggtgggaccctggtgccttggatgtgacacccagtcttttgcctactgtctgggtcaggctgttgtgtccagaaccttataggcgcctgcaagacgcccagtcttggccgggacaagacgtgatctcccgagtgaacgccctcgctaatgatatcgtccttcttcccgacccgctttccgaagttcatggcgcacttagccccgcagaggcgtcttcttttctgggcctcctagaacacgttttagccatggaaatggcaccacttggacctgccgcactactggcagtggttaggtttctaaaacgagtggtcgctctcggtgctggtgaccccgagctgttactaactggcccttgggaacaattgagccagggcgtcgtctcagttgccagccttgtgttggaagagcaggtgattggagggccaatggccctcgtggcctcagtgcaaaggctcgccccactgcttagcaccagcatgacgtctgagcgacccagaatgaggattcagcaccgccatgcaggcttagaagtgaggagcctgcggctccgcgaagcctcaactcggggatgtctttttacaatgccaggcggaaggccagaaggccctggtcacattcatattcccgcaagcgaagtacgtagattactccgcaagggcctaagcggtgtgaccgtgatacactcttggttcacgagtcgagtgtttcagcacactctcgagggacccgacttagaaccacaggccccagcctcgtctgaggaagcaaacagagtgcagaggtttctttcaacacaggtagggagcgccatcatctcatcagaagtgtgggatgtcactggtgaagttaacgtagcaatgacatttcatttgcagcaccgcgcacagccaatttacagaggctgcctaggacatcaccgcctcctgcgcggatgccccgtgccgggactacacagactgttactgcagcctcaacaccaactatgtcatccggcagcaaacttatag

SEQ ID NO: 291068 - DNA, 393 bp, Artificial Sequence
  derived and/or modified sequence
tctggcggtatcttactggacgctggcggaggggcagctgccgtagaagaggggggatcttgtgagcacgcacctggcccacggcacgccgctctgccaagacacagactgggtgcgaccgtgaaacccgttttggtgctcctgccggtgctcgggctcacctggctggccggtatactggttcacctgtcccccgcatgggcgtacgctgccgtcgggctaaactctatccagggcctttacatctttctggtgtatgccgcttgtaacgaggaagtccgctcagctctgcaaaggatggcagaaaaaaaggtggcagaggggcctatggcgctagaactgccgcagcattctcccccattacagaccagacgcgaccgtttgtggaactag

SEQ ID NO: 291069 - DNA, 105 bp, Artificial Sequence
  derived and/or modified sequence
atgcacccccctccatcattgctgagttttttggcccctgttgcagccggagaggtcgttaagaccgcagggggagtgtgtaagttctcggggcagagactctag

SEQ ID NO: 291070 - protein, 86 aa, Artificial Sequence
  derived and/or modified sequence
VNATPQQMPQTEKAVEDFLRSIGRSKKERRPVRPHTVEKPVPSSSGGDAHVPHGSQVIRKLVMYTLRHHVKIGGLHVSFTVRNCVE

SEQ ID NO: 291071 - DNA, 261 bp, Artificial Sequence
  derived and/or modified sequence
gtgaacgccaccccccagcagatgccccagaccgagaaggccgtggaggacttcctgagaagcatcggcagaagcaagaaggagagaagacccgtgagaccccacaccgtggagaagcccgtgcccagcagcagcggcggcgacgcccacgtgccccacggcagccaggtgatcagaaagctggtgatgtacaccctgagacaccacgtgaagatcggcggcctgcacgtgagcttcaccgtgagaaactgcgtggagtag

SEQ ID NO: 291072 - DNA, 702 bp, Artificial Sequence
  derived and/or modified sequence
tgactgatcgagagcggcctgggcaccgacttcagccccgacgtgggctacaacggctacaccagagaggcctacttcagcgtgggcctgcagggcatcgccgagaaggacatcgagaccgtgagaagcctgatcgacagaaccatcgacgaggtggtggagaagggcttcgaggacgacagaatcgaggccctgctgcacaagatcgagatccagatgaagcaccagagcaccagcttcggcctgatgctgaccagctacatcgccagctgctggaaccacgacggcgaccccgtggagctgctgaagctgggcaaccagctggccaagttcagacagtgcctgcaggagaaccccaagttcctgcaggagaaggtgaagcagtacttcaagaacaaccagcacaagctgaccctgagcatgagacccgacgacaagtaccacgagaagcaggcccaggtggaggccaccaagctgaagcagaaggtggaggccctgagccccggcgacagacagcagatctacgagaagggcctggagctgagaagccagcagagcaagccccaggacgccagctgcctgcccgccctgaaggtgagcgacatcgagcccaccatccccgtgaccgagctggacgtggtgctgaccggccactgcgagagatacgccttccccggcagcagagtgccctggggcaactag

SEQ ID NO: 291073 - DNA, 261 bp, Artificial Sequence
  derived and/or modified sequence
gtcaacgcaaccccacagcagatgccacagactgagaaggccgtggaggattttctgcgaagcatcggaagatccaaaaaggaacgacggcccgtgagacctcatacagtggagaaaccagttccgtcttccagtggcggtgatgcccatgtcccgcatggctcccaggtcattcgtaaactagtcatgtatacgctccggcatcacgttaaaattggcggcttgcatgttagttttaccgtgcgtaactgtgtcgagtag

SEQ ID NO: 291074 - DNA, 702 bp, Artificial Sequence
  derived and/or modified sequence
tgactgatagagtctggcctgggaacggacttctcgcccgatgtgggttataacgggtacacgagagaagcttatttcagtgtgggactgcaaggtatagctgaaaaagatattgaaaccgtaagatctcttatcgaccgtaccatcgacgaagtcgtggagaaaggattcgaggacgaccggattgaggcattgctgcacaaaatcgagatccagatgaaacaccagtccacaagcttcggcctcatgctcacttcatatatcgcctcgtgctggaaccacgacggcgatccagttgaactcctcaaattgggcaatcagctcgccaagttcagacagtgcctccaggaaaatccgaagtttcttcaggagaaggtcaaacagtacttcaagaacaaccagcacaagctcacactctcaatgcggcccgatgacaagtatcacgagaaacaagcgcaggtggaagccacaaaactcaagcagaaagtagaagctctatctcctggcgaccgccaacagatctacgaaaagggactggaattacgcagccagcagtccaagccccaggacgcatcctgtctacctgctctgaaagtttctgacatcgaacctaccattcctgttacagaacttgatgttgtcctaactggccattgcgagaggtacgcattcccaggctctcgggtgccatggggcaattag

SEQ ID NO: 291075 - DNA, 261 bp, Artificial Sequence
  derived and/or modified sequence
gtgaatgccaccccccagcagatgccccagacagagaaggctgtggaggacttcctgcggagcatcggccgcagcaagaaggagaggaggcctgtgcggccccacacagtggagaagcctgtgcccagcagcagtggaggagatgcccacgtgccccacggcagccaggtgatcaggaagctggtgatgtacaccctgcggcaccacgtgaagattggaggcctgcacgtgtccttcaccgtgaggaactgtgtggagtag

SEQ ID NO: 291076 - DNA, 702 bp, Artificial Sequence
  derived and/or modified sequence
tgactgattgaaagtggcctgggcacagacttctccccagatgtgggctacaacggctacacccgggaggcctacttctctgtgggcctgcagggcattgctgagaaggacatcgagaccgtgcgcagcctgattgacaggaccattgatgaggtggtggagaagggctttgaagatgaccgcatcgaggccctgctgcacaagattgagatccagatgaagcaccagagcaccagctttggcctgatgctgaccagctacatcgccagctgctggaaccatgatggagaccctgtggagctgctgaagctgggcaaccagctggccaagttccggcagtgcctgcaggagaaccccaagttcctgcaggagaaggtgaagcagtacttcaagaacaaccagcacaagctgaccctgtccatgaggccagatgacaagtaccacgagaagcaggcccaggtggaggccaccaagctgaagcagaaggtggaggccctgagccctggggaccggcagcagatctatgagaagggcctggagctgcggagccagcagagcaagccccaggatgccagctgcctgcctgccctgaaggtgtctgacatcgagcccaccatccctgtgacagagctggatgtggtgctgaccggccactgtgaaagatatgccttccctggcagccgggtgccctggggcaactag

SEQ ID NO: 291077 - DNA, 261 bp, Artificial Sequence
  derived and/or modified sequence
gtgaacgccaccccccagcagatgccccagaccgagaaggccgtggaggattttctgagaagcatcggacgttccaaaaaggagcgccggccagtgagacctcacacggtggagaagcccgtgccctcctcttctggtggtgacgctcacgtgccacacggcagccaggtaattagaaagctcgtaatgtatacactacgccaccacgtaaaaattggcggtctccacgtgtcttttacagtgcggaactgcgtcgagtag

SEQ ID NO: 291078 - DNA, 702 bp, Artificial Sequence
  derived and/or modified sequence
tgactgatcgagagcggcctgggcaccgacttcagccccgacgtggggtacaacggatacacgagagaggcctattttagtgtgggactccaaggtatagctgagaaggatatcgagaccgtaagatctcttattgatagaaccatcgatgaggtggttgaaaaaggcttcgaggatgatcgcatcgaggccctgctccataaaatcgaaatccagatgaagcaccagagtactagttttggacttatgcttacctcatacatcgctagctgctggaaccatgatggcgacccagtggagctgcttaagctgggcaaccagttggctaagtttagacagtgtcttcaggaaaaccccaaatttttacaggaaaaagtcaaacaatacttcaagaacaatcaacataagctgaccctgagtatgagacccgatgacaagtatcatgagaaacaggcccaggtggaggctaccaaacttaaacagaaagtggaggcgttatcgcctggagatcggcagcagatctatgagaagggacttgagctgagaagccagcaatctaaaccccaggatgcatcctgcctgccggctctgaaagtttctgatattgaaccaactatacccgtgacggaactggacgttgtgcttacggggcactgtgaacgatacgcgttccccgggagtcgggtgccttgggggaactag

SEQ ID NO: 291079 - DNA, 482 bp, Artificial Sequence
  derived and/or modified sequence
gtgaatgcgactcctcagcagatgcctcagacagaaaaagcggtcgaagacttccttagaagcatcggtcggagtaaaaaggaacggaggcctgtgcgcccacacacggtcgagaaacctgtgcccagcagctctggtggagatgcccacgttccccatggctcccaggtcattaggaagctggtcatgtatacgttaaggcatcacgtcaagattggaggacttcatgtcagttttacagtgagaaattgtgtggagtgacggaactgcagtgccttgctctcgcgccccagcacctggctgcagagtgtcacggagatgggacccctgagatggctccagtcccagtgccgtgggcagtgcgtgggagcacagccgcctctgacccctgagtgggtccagtcccagtgccgtgggcggtgcatggcagcacagccgcctctgaccataccgtgtccctcaggaacccaccttcaagccct

SEQ ID NO: 291080 - DNA, 718 bp, Artificial Sequence
  derived and/or modified sequence
cttgattgaatctggccttggcacagacttttctcctgatgttggatataatggctacacgagggaggcctactttagtgtcggcctccaagggattgcggagaaagacattgagaccgtcagaagcctcatagacagaacgattgatgaagtagttgagaaaggatttgaagatgatcgaattgaggctttacttcataaaattgaaatacagatgaaacatcagtctaccagctttgggctgatgctgacatcatacatagcttcttgctggaaccatgatggggaccctgtggagctcttgaagttgggaaatcagttagctaaattcagacagtgcctgcaggaaaatccaaaatttttgcaagaaaaagtaaaacagtattttaagaataaccagcataagctgactttatcgatgaggccagatgacaagtatcacgagaagcaggcacaggtggaagccacgaagctcaagcagaaggtcgaggctctgtcccccggagacaggcagcagatctacgagaaaggtctagaattacggagtcaacaaagcaaacctcaagatgcctcttgtctgccagcgttgaaagtttccgatattgaacccaccatacctgtcacagagttggacgtggtcctgacaggtcactgtgaacgctacgcttttcccgggtctcgggttccttgggggaattaaatgtcactcctcacagaa

SEQ ID NO: 291081 - DNA, 261 bp, Artificial Sequence
  derived and/or modified sequence
gtcaacgctactccacagcagatgccccagaccgagaaagccgtcgaggactttctacgtagcattggcaggtccaaaaaggaacgcaggcccgtcagaccgcacactgttgagaaacccgtgcccagctcatccggtggcgacgctcacgtcccacatgggtcccaggttattcgaaaactcgtcatgtacaccttgcggcatcatgtaaagatcggcggactgcatgtctcttttaccgtccgcaattgtgttgaatag

SEQ ID NO: 291082 - DNA, 702 bp, Artificial Sequence
  derived and/or modified sequence
tgattgatcgaatccggtcttggtacggatttttcccctgatgtgggatacaatggctacacgcgtgaggcgtatttctccgtcggtctacagggaattgcagagaaagatattgagaccgtgcgcagcctgatcgaccgcactatcgacgaagtggtggaaaagggctttgaggatgatcggattgaagcactgctccacaagattgagatacaaatgaaacaccagagtacaagcttcggtctgatgctgacgtcttacatagcaagctgctggaaccatgacggggatccagtggaacttctgaagctgggaaatcaattagctaaattccgccaatgcctgcaggagaatcctaaatttctacaggaaaaagtcaagcagtacttcaagaataaccagcacaagctgactctctccatgcgccctgacgacaaataccatgaaaagcaggcccaggtagaggcgaccaaactcaagcagaaggttgaggccctgtcacccggagacagacagcagatatacgagaagggtctggagctaagatcacagcaaagtaagcctcaggacgcctcctgcctgcccgctctaaaagtcagcgatatcgagcctacaatacctgtgaccgaattggacgtagtcttgactggacattgcgaacgatacgctttcccgggtagcagggttccctgggggaattag

SEQ ID NO: 291083 - DNA, 2378 bp, Artificial Sequence
  derived and/or modified sequence
cctgctcgttcctgacagaattaacggcacagccaacaagatgaacggagctttggatcactcagaccaaccagacccagatgccattaagatgtttgtcggacagatcccccggtcatggtcggaaaaggagctgaaagaactttttgagccttacggagccgtctaccagatcaacgtcctccgggaccggagtcagaaccctccgcagagtaaaggttgttgtttcgtaacattttatacaagaaaagctgcacttgaggcccagaatgcactgcacaatattaaaactttacctgggatgcatcatcccattcagatgaaacctgcagatagtgaaaagtccaacgctgtggaagacagaaaattgttcataggaatggtatcgaagaaatgtaatgagaacgacatcagggtgatgttctctccatttggccagatagaagaatgccggatcctccggggacctgatgggctgagtcgaggctgtgcgtttgtcacattttctacaagggcaatggcacagaatgcaatcaaagccatgcatcagtctcagaccatggagggctgctcttcacctatcgtggtgaagtttgctgacactcagaaggacaaagagcaaaggcgcctccagcagcagctcgctcagcagatgcagcagctcaacactgccacctgggggaacctgacagggctgggcggactgaccccacagtatctggcgctcctgcagcaggccacctcctccagcaacctgggtgcgttcagcggcattcaacaaatggcaggcatgaatgctttacagttgcagaacctggcgacgctggctgctgctgcagctgcggcccagacctcagccaccagcaccaatgcaaaccctctctctaccacgagcagcgccctgggagccctcacgagtcccgtggctgcttcaacccccaactccactgctggtgcagccatgaactccttgacctctctcgggactctgcaaggactggctggagccactgttggactgaataatattaatgcactagcaggtaccatcaacagtatggcggctctgaatggaggacttggcgccacaggcttgacgaatggcacggctggcaccatggacgccctcacccaggcctactcaggaattcaacagtacgcagccgccgcgctgcccactctgtacagccagagcctgctgcagcagcagagcgctgcaggcagccagaaggaaggtccagagggggcaaacctctttatttaccaccttccacaggaatttggagaccaggacattctgcagatgttcatgccttttggaaatgttatctctgctaaagtcttcattgacaaacagaccaatctgagcaagtgctttggttttgttagctacgacaatccagtctctgcacaagctgctatccaagctatgaatggctttcagatcggcatgaaacgcttgaaggtgcagctgaagcgttccaaaaacgacagcaaaccttactgatcctaaccccagaggctccctgctctcattttagctttcttaggacatcttcatgcccgttagttcatcgtttgcctagcatgtccctgtggcgtctcaaaaaaaagtttcatcgtcccgtcattgtttctgatgtctttctgacctcacatcatatttggttctcctactgacctttgatctagtttgacctttgaaatttgcatgtgacctcatctagctatgaattctgggaagtcaatgtgaaaaacattgctgcattcatgcaagactgaaatttattattagacaaattcattatagaaaaaacctgtggcaaaaacgtttctttcttattttttttcttttcctaaaacagacttgaaagtattatacagggattggcattcttcccggtcactggtaacaatagcaatatgtgtccagggacacagaatgttggtttctaacagactacttccaaaaacagtttgagaaaaaaactgtctgattttaagtctctagaggtctgtaatagtttttacatttttcaggcagtgtaaagttttttgataaggccattttaggtggctcactttctcattaagatatatatatagaaccactttttgtagattagtataagaaaaatatttaccctgttttggggcaaatgctacctatttgtgtcaccttttgctgaactcacagttagacaatccatggtttaatgcacatgaaattacctatattttatactgtttcaatgtacaggagaaaggttactgtaaactgtgttatgttggtgcttctgtgaattaagttgtggtttcatcatgagtcttaatgttctttgttgataagacaagtttagaattggtttacttaatac

SEQ ID NO: 291084 - protein, 498 aa, Artificial Sequence
  derived and/or modified sequence
MNGALDHSDQPDPDAIKMFVGQIPRSWSEKELKELFEPYGAVYQINVLRDRSQNPPQSKGCCFVTFYTRKAALEAQNALHNIKTLPGMHHPIQMKPADSEKSNAVEDRKLFIGMVSKKCNENDIRVMFSPFGQIEECRILRGPDGLSRGCAFVTFSTRAMAQNAIKAMHQSQTMEGCSSPIVVKFADTQKDKEQRRLQQQLAQQMQQLNTATWGNLTGLGGLTPQYLALLQQATSSSNLGAFSGIQQMAGMNALQLQNLATLAAAAAAAQTSATSTNANPLSTTSSALGALTSPVAASTPNSTAGAAMNSLTSLGTLQGLAGATVGLNNINALAAPRSKRLLLPKDNNGMAALNGGLGATGLTNGTAGTMDALTQAYSGIQQYAAAALPTLYSQSLLQQQSAAGSQKEGPEGANLFIYHLPQEFGDQDILQMFMPFGNVISAKVFIDKQTNLSKCFGFVSYDNPVSAQAAIQAMNGFQIGMKRLKVQLKRSKNDSKPY

SEQ ID NO: 291085 - DNA, 5787 bp, Artificial Sequence
  derived and/or modified sequence
aaaagggcggtggggcggggggcggggcagggagagggagagaaatccagcagacatctagctctgcctttctttcccagccacagccagggtagggctgataaggcgctgatgcgttgatggcagccttgcagagctagacctgcacttaacttgcagctgcctcccgagcctccaagatgtccacgccctgggtgacaggcggcagggcgctgccccgtgctcccccggctctgctcgacagcagcacgcagtgagagcctcgccgccgccgaggagcaactcatgtaacggcacagccaacaagatgaacggagctttggatcactcagaccaaccagacccagatgccattaagatgtttgtcggacagatcccccggtcatggtcggaaaaggagctgaaagaactttttgagccttacggagccgtctaccagatcaacgtcctccgggaccggagtcagaaccctccgcagagtaaaggttgttgtttcgtaacattttatacaagaaaagctgcacttgaggcccagaatgcactgcacaatattaaaactttacctgggatgcatcatcccattcagatgaaacctgcagatagtgaaaagtccaacgctgtggaagacagaaaattgttcataggaatggtatcgaagaaatgtaatgagaacgacatcagggtgatgttctctccatttggccagatagaagaatgccggatcctccggggacctgatgggctgagtcgaggctgtgcgtttgtcacattttctacaagggcaatggcacagaatgcaatcaaagccatgcatcagtctcagaccatggagggctgctcttcacctatcgtggtgaagtttgctgacactcagaaggacaaagagcaaaggcgcctccagcagcagctcgctcagcagatgcagcagctcaacactgccacctgggggaacctgacagggctgggcggactgaccccacagtatctggcgctcctgcagcaggccacctcctccagcaacctgggtgcgttcagcggcattcaacaaatggcaggcatgaatgctttacagttgcagaacctggcgacgctggctgctgctgcagctgcggcccagacctcagccaccagcaccaatgcaaaccctctctctaccacgagcagcgccctgggagccctcacgagtcccgtggctgcttcaacccccaactccactgctggtgcagccatgaactccttgacctctctcgggactctgcaaggactggctggagccactgttggactgaataatattaatgcactagcagctcccagaagcaaaaggcttttacttccaaaagataacaacggtatggcggctctgaatggaggacttggcgccacaggcttgacgaatggcacggctggcaccatggacgccctcacccaggcctactcaggaattcaacagtacgcagccgccgcgctgcccactctgtacagccagagcctgctgcagcagcagagcgctgcaggcagccagaaggaaggtccagagggggcaaacctctttatttaccaccttccacaggaatttggagaccaggacattctgcagatgttcatgccttttggaaatgttatctctgctaaagtcttcattgacaaacagaccaatctgagcaagtgctttggttttgttagctacgacaatccagtctctgcacaagctgctatccaagctatgaatggctttcagatcggcatgaaacgcttgaaggtgcagctgaagcgttccaaaaacgacagcaaaccttactgatcctaaccccagaggctccctgctctcattttagctttcttaggacatcttcatgcccgttagttcatcgtttgcctagcatgtccctgtggcgtctcaaaaaaaagtttcatcgtcccgtcattgtttctgatgtctttctgacctcacatcatatttggttctcctactgacctttgatctagtttgacctttgaaatttgcatgtgacctcatctagctatgaattctgggaagtcaatgtgaaaaacattgctgcattcatgcaagactgaaatttattattagacaaattcattatagaaaaaacctgtggcaaaaacgtttctttcttattttttttcttttcctaaaacagacttgaaagtattatacagggattggcattcttcccggtcactggtaacaatagcaatatgtgtccagggacacagaatgttggtttctaacagactacttccaaaaacagtttgagaaaaaaactgtctgattttaagtctctagaggtctgtaatagtttttacatttttcaggcagtgtaaagttttttgataaggccattttaggtggctcactttctcattaagatatatatatagaaccactttttgtagattagtataagaaaaatatttaccctgttttggggcaaatgctacctatttgtgtcaccttttgctgaactcacagttagacaatccatggtttaatgcacatgaaattacctatattttatactgtttcaatgtacaggagaaaggttactgtaaactgtgttatgttggtgcttctgtgaattaagttgtggtttcatcatgagtcttaatgttctttgttgataagacaagtttagaattggtttacttaatacaaaaaaaaaaaaaagaatttcaaaaaaaaaagttgtttgcttaaaaaaaatttcatgtgagggaaaaaaaaaaaacctattccagaataagttttgtgttggcttgtgaagcattgatgtcattttttttaattgtggactatttagatgtgtttgtgttcagcaaaatgtgatgtttttttcttttaaagaaaaaaagtgaaaatatatagtgccaaattccaaaggtacttccttcctagagcttcagtgtgtttcttgtgagaagtaatttgataacatgggtattttattatgtgttttgtataaatccctaatatttaaaaaaaaaaacaaaacaaaaaaaggttacaaagtttgttaacttgctatcctgtggtcttgttgcctgaaattgttattgtttgttatttctctctgatgttttttgtaagacattgtataagtgcccatgtcccacttttttaaccactccgcacatcagtgctgtgaaggcaacctcaccatgtattttcttcataatctatggaaacctctaaggtgagaaagttttgaacttttaaccctttctacccagagctatctggaatgttgatgactttttatactgtcatgatttgagtttgttttggggtgtttccaatttggatttttttccctgcatctatcctctaagttgtttcggtttgactactttgttctttggttaagatccaaaagaaaacagaaaacaattccacgaggccaatctaaagggaaaaaatcctacactacttttactacttttgattatttctcatttttgggaaaagaattcctaatgtgctactagaattccttcttcagttttaacgagtaattggataaaccctgagggaaaacggaggtagattcagcacctaacaatcctgtatgcttttgagatcacgtttagtgctatgtcctagtctagaatattttcatataccttgcagtaaaacgactttgtggcaggacagtctcttgaggggttttgtttctgtttcctaaatactcctaaataatatttctaatcagccattatgctggggcatctctgatcccagtaggtacctctgaatataccaggtgtctggagttagaagcccatagccctttcccagcctttttggtttttttaattgaacacatttcatctaagtaaagctcagttctttatcacaatttactgaccaaatacctagcaccagttcctgctgccactttttaaagtgccatatgactttctacgaacaggtaccttgctgtcttgacaaatcctaatgtcacgcctacagccccaacacaagctccagtcttcctcttcggcatgccctggaagcttcttccagtcttcctcttcggcatgccctggaagcttcttggcctcagctccccttccccgctcagcaccctgttaggatcagtgtgtgtggatgggatagccctgggatggaaaggactagcctctactgatgcaaaaaaacaaaaagcaacacaaacgtttccttcttatagcacatgcacttccttacaatgacatgatttgtattatcctcacatgtgtttactactgctggggccttccttcatcctctgagggctattttgtactttctgcagcaatcagcttaataacaacacttattgcacctgtctctctctgagaacacggtgtgtctcgacacgtaccacgtacgtggaaacacaagagcccaccacttgaatttctaagaccatttcattctgaaacttcttatcaattacctaaatctcaacgaaaaacaatttactgaagccgactcccctccccatctccctctcaacctcaacccacctgcatgcatctcccccagaggaaacactgagggtaggggacaggaggctcaggacgcgccctctgaatcgagtgtttcttcttcacaagtcaccaagagaggacatgagggggaaagtcctttttgcccttctccaaaaaataaccttccacagagacaaactgtccttctatccacttttatcttttaataaatatcaaaaggaaaaagctgcaagggtgcaaagggcctgtgccagaagaaaacacacacagggaaaccgctttttttaatcaattgtagagaatagtcatttttaatctaaattagagaattgtgatacaatggcagtcctcaaaggcgtaacgagttcatctttctttcaccataggggttatagttggcttgtgctactctggaatcattttactgtttgtttttattatcttaagtgctaattaaaaaaaaaataaaattttaaaaaaacctgtagtttcattacctttttgaataatgtcatacaaaaaatgtatttgtttttttgtgctgtgagaattgatgtttgtagattaataatcattttgtttagaattacaaaatagtttttaaatattgtctgagaaaagccaaagttaatgcaacctagtggaaactgtaagaccatttgagtattgtttgttttattgatgcatttggattttgttgtttgatggaatttgagccaaaaaaaaaatacgcaggctttcctatttctacaactgattgtacttatgcattttgtaccagtggaactttttatactggagattaaaaaaaaaatggaaatttttgtggcttgctctggtgggcccctgacaatgactgatttcaagtttgatttcgggttgattgattgattgattgatagaaagaaagttgcttttcttttgagaattaaaaactttggcttgatttcttttttccctttgcttatatctagcattagaattttgtcttaaaataacagcggtaagtttcactttttattctgtattgtgcagttacacaataaggtaattagatttagaagtactcagtcactttaagtggataaatgtattagttaaaactttagggtttgcttttttgctgtttagatcaaagttttttctgattcttctgtcctcattgtgaacataaccgtgtagttgaaacagtcaaacttatttttgtaatgtatgttattgtgtgatgcagttttttgcttctgtctccaatattaaaccattttcctaata

SEQ ID NO: 291086 - protein, 403 aa, Artificial Sequence
  derived and/or modified sequence
MHHPIQMKPADSEKSNAVEDRKLFIGMVSKKCNENDIRVMFSPFGQIEECRILRGPDGLSRGCAFVTFSTRAMAQNAIKAMHQSQTMEGCSSPIVVKFADTQKDKEQRRLQQQLAQQMQQLNTATWGNLTGLGGLTPQYLALLQQATSSSNLGAFSGIQQMAGMNALQLQNLATLAAAAAAAQTSATSTNANPLSTTSSALGALTSPVAASTPNSTAGAAMNSLTSLGTLQGLAGATVGLNNINALAVAQMLSGMAALNGGLGATGLTNGTAGTMDALTQAYSGIQQYAAAALPTLYSQSLLQQQSAAGSQKEGPEGANLFIYHLPQEFGDQDILQMFMPFGNVISAKVFIDKQTNLSKCFGFVSYDNPVSAQAAIQAMNGFQIGMKRLKVQLKRSKNDSKPY

SEQ ID NO: 291087 - DNA, 1212 bp, Artificial Sequence
  derived and/or modified sequence
atgcaccaccccatccagatgaagcccgccgacagcgagaagagcaacgccgtggaggacagaaagctgttcatcggcatggtgagcaagaagtgcaacgagaacgacatcagagtgatgttcagccccttcggccagatcgaggagtgcagaatcctgagaggccccgacggcctgagcagaggctgcgccttcgtgaccttcagcaccagagccatggcccagaacgccatcaaggccatgcaccagagccagaccatggagggctgcagcagccccatcgtggtgaagttcgccgacacccagaaggacaaggagcagagaagactgcagcagcagctggcccagcagatgcagcagctgaacaccgccacctggggcaacctgaccggcctgggcggcctgaccccccagtacctggccctgctgcagcaggccaccagcagcagcaacctgggcgccttcagcggcatccagcagatggccggcatgaacgccctgcagctgcagaacctggccaccctggccgccgccgccgccgccgcccagaccagcgccaccagcaccaacgccaaccccctgagcaccaccagcagcgccctgggcgccctgaccagccccgtggccgccagcacccccaacagcaccgccggcgccgccatgaacagcctgaccagcctgggcaccctgcagggcctggccggcgccaccgtgggcctgaacaacatcaacgccctggccgtggcccagatgctgagcggcatggccgccctgaacggcggcctgggcgccaccggcctgaccaacggcaccgccggcaccatggacgccctgacccaggcctacagcggcatccagcagtacgccgccgccgccctgcccaccctgtacagccagagcctgctgcagcagcagagcgccgccggcagccagaaggagggccccgagggcgccaacctgttcatctaccacctgccccaggagttcggcgaccaggacatcctgcagatgttcatgcccttcggcaacgtgatcagcgccaaggtgttcatcgacaagcagaccaacctgagcaagtgcttcggcttcgtgagctacgacaaccccgtgagcgcccaggccgccatccaggccatgaacggcttccagatcggcatgaagagactgaaggtgcagctgaagagaagcaagaacgacagcaagccctactag

SEQ ID NO: 291088 - DNA, 1212 bp, Artificial Sequence
  derived and/or modified sequence
atgcaccatccgatccagatgaaacccgcggacagtgagaaatccaacgcagtagaggaccgcaagctgtttatcgggatggtgtctaagaagtgtaacgaaaacgatataagggtgatgttttccccatttgggcagatagaggagtgtcgcatcctcaggggaccggatggactgtcccggggttgcgctttcgtgacgttcagcacccgggctatggctcaaaatgccattaaggccatgcatcaatcccagaccatggaggggtgctcatcacctatcgtggtcaaattcgccgacacccagaaggataaggagcaaaggaggctgcagcaacaactcgcccagcaaatgcagcagctgaatactgctacctgggggaatctgactggtctcggcggcttaaccccgcaatacctcgccctccttcagcaggcaacaagcagcagtaatctcggtgcattttccgggatccaacagatggcgggtatgaatgctcttcagctgcagaacctggccactttggcggctgccgccgcggcagctcaaacatccgccacctcgacgaacgctaacccgctctctacaactagctccgcccttggggctttgacttcccctgtcgccgcaagcaccccgaatagcaccgctggcgccgccatgaacagtctgacctccttggggacgctccagggattggccggggcaacagttggtttaaataacattaatgccctggccgtggcacaaatgctatccggcatggccgccctcaatggaggactgggagcgacaggcctgaccaatgggactgccggaaccatggacgccctcacgcaggcttacagtgggattcagcagtatgccgccgctgccttacctactttatactcccagtcactgctgcaacagcagtctgcggctggatctcaaaaggaggggccagaaggagcaaacctgttcatctaccatctgccccaggagttcggggatcaggacatcttacagatgttcatgcctttcgggaatgtgatttcagcaaaggtattcattgacaagcagactaatctttctaaatgcttcggctttgtgagctatgacaaccctgtctctgcccaggcggccattcaggcaatgaatggatttcagatcgggatgaagagactaaaggtacagctgaaacgttcaaagaatgatagtaaaccatattag

SEQ ID NO: 291089 - DNA, 1212 bp, Artificial Sequence
  derived and/or modified sequence
atgcaccaccccatccagatgaagccagctgacagcgagaagagcaatgctgtggaggacaggaagctgttcatcggcatggtgtccaagaagtgcaatgaaaatgacatccgggtgatgttcagccccttcggccagattgaagaatgtcgcatcctgcggggcccagatggcctgagccggggctgtgcctttgtgaccttcagcacccgggccatggcccagaatgccatcaaggccatgcaccagagccagaccatggagggctgcagcagccccatcgtggtgaagtttgctgacacccagaaggacaaggagcagaggcggctgcagcagcagctggcccagcagatgcagcagctgaacacagccacctggggcaacctgaccggcctgggcggcctgaccccccagtacctggccctgctgcagcaggccaccagcagcagcaacctgggcgccttcagcggcatccagcagatggccggcatgaatgccctgcagctgcagaacctggccaccctggccgctgctgctgctgctgcccagaccagcgccaccagcaccaatgccaaccccctgagcaccaccagcagcgccctgggcgccctgaccagccctgtggccgccagcacccccaacagcacagctggagctgccatgaacagcctgaccagcctgggcaccctgcagggcctggccggggccaccgtgggcctgaacaacatcaatgccctggccgtggcccagatgctgagcggcatggccgccctgaatggaggcctgggcgccaccggcctgaccaatggaacagctggcaccatggatgccctgacccaggcctacagcggcatccagcagtatgctgctgctgccctgcccaccctgtacagccagagcctgctgcagcagcagagcgctgctggcagccagaaggagggccctgagggcgccaacctcttcatctaccacctgccccaggagtttggagaccaggacatcctgcagatgttcatgccctttggaaatgtcatcagcgccaaggtgttcatcgacaagcagaccaacctgagcaaatgttttggatttgtgtcctatgacaaccctgtgtctgcccaggccgccatccaggccatgaatggcttccagatcggcatgaagaggctgaaggtgcagctgaagaggagcaagaatgacagcaagccctactag

SEQ ID NO: 291090 - DNA, 1212 bp, Artificial Sequence
  derived and/or modified sequence
atgcaccaccccatccagatgaagcccgccgacagcgagaagagcaatgctgtagaagatcggaagctctttataggcatggtgtccaagaagtgtaacgaaaacgacattcgtgtgatgttctcccctttcgggcaaattgaggagtgtcgcatacttcgggggcccgacggactctctcgggggtgtgcctttgtgacattctcaacacgcgctatggcacagaatgccatcaaggctatgcatcagtcacagaccatggaaggctgcagttccccaatcgtggtgaaattcgctgatacacagaaagataaagaacaacggaggctgcagcagcagttggcccagcaaatgcagcagttaaacacagcgacttggggaaacctgactggtctgggcggtttgacaccacagtacttggccttgctacagcaggcgacaagcagttctaacctcggcgcattctctggcatccagcagatggccggcatgaatgcactgcaactgcaaaacttagcaactctggccgctgcagcagccgctgcccaaacaagtgctacatctaccaatgccaacccgctgtctaccaccagtagcgcgctgggcgcactgacatcaccggtggcggcatctactccaaactctaccgctggggccgctatgaattcactcacctcacttggtaccctccagggactcgctggcgcaaccgtaggtcttaataatattaatgcgttggctgtggcacaaatgctgtccggcatggccgccttgaatggagggctgggcgcaacaggactgaccaacggtactgcaggaacaatggatgccctcacccaggcctatagcggaattcagcagtacgcagccgctgcgctgcctacactatatagccaaagtctgctgcaacagcagagcgcagccggcagccagaaagaaggtccagaaggcgccaaccttttcatttaccatcttccacaggaatttggagatcaggacatccttcagatgttcatgccattcgggaacgtcatcagcgcaaaagtgtttatcgataagcagacaaatttatctaaatgctttggctttgtgtcatacgataatccagtctccgcccaagccgctatccaggccatgaatggattccagattgggatgaagagactcaaggtgcagctgaagcggagcaaaaacgattccaagccttattag

SEQ ID NO: 291091 - DNA, 1212 bp, Artificial Sequence
  derived and/or modified sequence
atgcatcaccccattcaaatgaagcctgccgattctgagaagagtaacgccgtagaggacagaaagctgtttatcggcatggtatctaagaaatgcaacgagaacgacattagagttatgttctcaccgtttggtcaaatcgaagagtgccgaatccttcggggtcctgatgggttgagccgcggatgtgcttttgttacattttccacacgggcaatggcgcaaaacgcaattaaagctatgcatcagtcacagacaatggaaggctgttcgtcccctatagtagtgaaattcgcagatacacaaaaagacaaggaacagcgcaggctgcagcaacagctggcccaacagatgcagcagctgaacaccgccacctgggggaacctgaccggactgggcggattaacccctcagtacctcgcccttcttcagcaggccacgtcctcatccaatcttggagctttttcaggaatccagcagatggcaggaatgaacgctctgcagctgcagaacctggccaccttggctgctgccgcagctgctgcacagacgtccgccacatctactaacgcgaatcccttgtctacaaccagcagcgccctgggtgctctgacttcccccgtggctgcatctacacctaattccactgctggtgccgctatgaactctctgacttcattgggaacgctccaaggcctggcgggtgccaccgtgggtctgaacaatattaatgcgttagcagttgctcagatgctgtctgggatggctgcactaaacggcggtctgggggctacaggattgaccaacgggaccgcgggaacgatggatgccctcacacaggcctactctggcatccagcagtacgcagcagctgctttgcccaccctctattcccagagtctccttcagcaacagtcagctgcaggcagccaaaaagaaggcccagaaggcgcaaatcttttcatctatcatctgccccaggagtttggtgatcaagacatcttacaaatgttcatgccctttggaaatgtgatctccgccaaagttttcatcgacaagcagacaaacctctctaagtgcttcggtttcgtgtcctacgacaatcccgttagtgctcaggcagccatccaagccatgaatgggtttcagattggtatgaagcgcctcaaagtccaactcaaacggagcaagaacgattccaagccgtactag

SEQ ID NO: 291092 - DNA, 1406 bp, Artificial Sequence
  derived and/or modified sequence
agaccaaccagacccagatgccattaagatgtttgtcggacagatcccccggtcatggtcggaaaaggagctgaaagaactttttgagccttacggagccgtctaccagatcaacgtcctccgggaccggagtcagaaccctccgcagagtaaagatgcatcatcccattcagatgaaacctgcagatagtgaaaagtccaacgctgtggaagacagaaaattgttcataggaatggtatcgaagaaatgtaatgagaacgacatcagggtgatgttctctccatttggccagatagaagaatgccggatcctccggggacctgatgggctgagtcgaggctgtgcgtttgtcacattttctacaagggcaatggcacagaatgcaatcaaagccatgcatcagtctcagaccatggagggctgctcttcacctatcgtggtgaagtttgctgacactcagaaggacaaagagcaaaggcgcctccagcagcagctcgctcagcagatgcagcagctcaacactgccacctgggggaacctgacagggctgggcggactgaccccacagtatctggcgctcctgcagcaggccacctcctccagcaacctgggtgcgttcagcggcattcaacaaatggcaggcatgaatgctttacagttgcagaacctggcgacgctggctgctgctgcagctgcggcccagacctcagccaccagcaccaatgcaaaccctctctctaccacgagcagcgccctgggagccctcacgagtcccgtggctgcttcaacccccaactccactgctggtgcagccatgaactccttgacctctctcgggactctgcaaggactggctggagccactgttggactgaataatattaatgcactagcagttgctcaaatgctctcaggtatggcggctctgaatggaggacttggcgccacaggcttgacgaatggcacggctggcaccatggacgccctcacccaggcctactcaggaattcaacagtacgcagccgccgcgctgcccactctgtacagccagagcctgctgcagcagcagagcgctgcaggcagccagaaggaaggtccagagggggcaaacctctttatttaccaccttccacaggaatttggagaccaggacattctgcagatgttcatgccttttggaaatgttatctctgctaaagtcttcattgacaaacagaccaatctgagcaagtgctttggttttgttagctacgacaatccagtctctgcacaagctgctatccaagctatgaatggctttcagatcggcatgaaacgcttgaaggtgcagctgaagcgttccaaaaacgacagcaaaccttactgatcctaaccccagaggctccctgctctcattttagctttc

SEQ ID NO: 291093 - protein, 508 aa, Artificial Sequence
  derived and/or modified sequence
MSRVHGMHPKETTRQLSLAVKDGLIVETLTVGCKGSKAGIEQEGYWLPGDEISIKKKNTNKQEMGTYLRFIVSRMKERAIDLNKKGKDNKHPMYRRLVHSAVDVPTIQEKVNEGKYRSYEEFKADAQLLLHNTVIFYGADSEQADIARMLYKDTCHELDELQLCKNCFYLSNARPDNWFCYPCIPNHELVWAKMKGFGFWPAKVMQKEDNQVDVRFFGHHHQRAWIPSENIQDITVNIHRLHVKRSMGWKKACDELELHQRFLREGRFWKSKNEDRGEEEAESSISSTSNEQLKVTQEPRAKKGRRNQSVEPKKEEPEPETEAVSSSQEIPTMPQPIEKVSVSTQTKKLSASSPRMLHRSTQTTNDGVCQSMCHDKYTKIFNDFKDRMKSDHKRETERVVREALEKLRSEMEEEKRQAVNKAVANMQGEMDRKCKQVKEKCKEEFVEEIKKLATQHKQLISQTKKKQWCYNCEEEAMYHCCWNTSYCSIKCQQEHWHAEHKRTCRRKR

SEQ ID NO: 291094 - protein, 522 aa, Artificial Sequence
  derived and/or modified sequence
MARLTKRRQADTKAIQHLWAAIEIIRNQKQIANIDRITKYMSRVHGMHPKETTRQLSLAVKDGLIVETLTVGCKGSKAGIEQEGYWLPGDEISIKKKNTNKQEMGTYLRFIVSRMKERAIDLNKKGKDNKHPMYRRLVHSAVDVPTIQEKVNEGKYRSYEEFKADAQLLLHNTVIFYGADSEQADIARMLYKDTCHEIPNHELVWAKMKGFGFWPAKVMQKEDNQVDVRFFGHHHQRAWIPSENIQDITVNIHRLHVKRSMGWKKACDELELHQRFLREGRFWKSKNEDRGEEEAESSISSTSNEQLKVTQEPRAKKGRRNQSVEPKKEEPEPETEAVSSSQEIPTMPQPIEKVSVSTQTKKLSASSPRMLHRSTQTTNDGVCQSMCHDKYTKIFNDFKDRMKSDHKRETERVVREALEKLRSEMEEEKRQAVNKAVANMQGEMDRKCKQVKEKCKEEFVEEIKKLATQHKQLISQTKKKQWCYNCEEEAMYHCCWNTSYCSIKCQQEHWHAEHKRTCRRKR

SEQ ID NO: 291095 - protein, 482 aa, Artificial Sequence
  derived and/or modified sequence
MSRVHGMHPKETTRQLSLAVKDGLIVETLTVGCKGSKAGIEQEGYWLPGDEISIKKKNTNKQEMGTYLRFIVSRMKERAIDLNKKGKDNKHPMYRRLVHSAVDVPTIQEKVNEGKYRSYEEFKADAQLLLHNTVIFYGADSEQADIARMLYKDTCHEIPNHELVWAKMKGFGFWPAKVMQKEDNQVDVRFFGHHHQRAWIPSENIQDITVNIHRLHVKRSMGWKKACDELELHQRFLREGRFWKSKNEDRGEEEAESSISSTSNEQLKVTQEPRAKKGRRNQSVEPKKEEPEPETEAVSSSQEIPTMPQPIEKVSVSTQTKKLSASSPRMLHRSTQTTNDGVCQSMCHDKYTKIFNDFKDRMKSDHKRETERVVREALEKLRSEMEEEKRQAVNKAVANMQGEMDRKCKQVKEKCKEEFVEEIKKLATQHKQLISQTKKKQWCYNCEEEAMYHCCWNTSYCSIKCQQEHWHAEHKRTCRRKR

SEQ ID NO: 291096 - DNA, 1527 bp, Artificial Sequence
  derived and/or modified sequence
atgagcagagtgcacggcatgcaccccaaggagaccaccagacagctgagcctggccgtgaaggacggcctgatcgtggagaccctgaccgtgggctgcaagggcagcaaggccggcatcgagcaggagggctactggctgcccggcgacgagatcagcatcaagaagaagaacaccaacaagcaggagatgggcacctacctgagattcatcgtgagcagaatgaaggagagagccatcgacctgaacaagaagggcaaggacaacaagcaccccatgtacagaagactggtgcacagcgccgtggacgtgcccaccatccaggagaaggtgaacgagggcaagtacagaagctacgaggagttcaaggccgacgcccagctgctgctgcacaacaccgtgatcttctacggcgccgacagcgagcaggccgacatcgccagaatgctgtacaaggacacctgccacgagctggacgagctgcagctgtgcaagaactgcttctacctgagcaacgccagacccgacaactggttctgctacccctgcatccccaaccacgagctggtgtgggccaagatgaagggcttcggcttctggcccgccaaggtgatgcagaaggaggacaaccaggtggacgtgagattcttcggccaccaccaccagagagcctggatccccagcgagaacatccaggacatcaccgtgaacatccacagactgcacgtgaagagaagcatgggctggaagaaggcctgcgacgagctggagctgcaccagagattcctgagagagggcagattctggaagagcaagaacgaggacagaggcgaggaggaggccgagagcagcatcagcagcaccagcaacgagcagctgaaggtgacccaggagcccagagccaagaagggcagaagaaaccagagcgtggagcccaagaaggaggagcccgagcccgagaccgaggccgtgagcagcagccaggagatccccaccatgccccagcccatcgagaaggtgagcgtgagcacccagaccaagaagctgagcgccagcagccccagaatgctgcacagaagcacccagaccaccaacgacggcgtgtgccagagcatgtgccacgacaagtacaccaagatcttcaacgacttcaaggacagaatgaagagcgaccacaagagagagaccgagagagtggtgagagaggccctggagaagctgagaagcgagatggaggaggagaagagacaggccgtgaacaaggccgtggccaacatgcagggcgagatggacagaaagtgcaagcaggtgaaggagaagtgcaaggaggagttcgtggaggagatcaagaagctggccacccagcacaagcagctgatcagccagaccaagaagaagcagtggtgctacaactgcgaggaggaggccatgtaccactgctgctggaacaccagctactgcagcatcaagtgccagcaggagcactggcacgccgagcacaagagaacctgcagaagaaagagatag

SEQ ID NO: 291097 - DNA, 1569 bp, Artificial Sequence
  derived and/or modified sequence
atggccagactgaccaagagaagacaggccgacaccaaggccatccagcacctgtgggccgccatcgagatcatcagaaaccagaagcagatcgccaacatcgacagaatcaccaagtacatgagcagagtgcacggcatgcaccccaaggagaccaccagacagctgagcctggccgtgaaggacggcctgatcgtggagaccctgaccgtgggctgcaagggcagcaaggccggcatcgagcaggagggctactggctgcccggcgacgagatcagcatcaagaagaagaacaccaacaagcaggagatgggcacctacctgagattcatcgtgagcagaatgaaggagagagccatcgacctgaacaagaagggcaaggacaacaagcaccccatgtacagaagactggtgcacagcgccgtggacgtgcccaccatccaggagaaggtgaacgagggcaagtacagaagctacgaggagttcaaggccgacgcccagctgctgctgcacaacaccgtgatcttctacggcgccgacagcgagcaggccgacatcgccagaatgctgtacaaggacacctgccacgagatccccaaccacgagctggtgtgggccaagatgaagggcttcggcttctggcccgccaaggtgatgcagaaggaggacaaccaggtggacgtgagattcttcggccaccaccaccagagagcctggatccccagcgagaacatccaggacatcaccgtgaacatccacagactgcacgtgaagagaagcatgggctggaagaaggcctgcgacgagctggagctgcaccagagattcctgagagagggcagattctggaagagcaagaacgaggacagaggcgaggaggaggccgagagcagcatcagcagcaccagcaacgagcagctgaaggtgacccaggagcccagagccaagaagggcagaagaaaccagagcgtggagcccaagaaggaggagcccgagcccgagaccgaggccgtgagcagcagccaggagatccccaccatgccccagcccatcgagaaggtgagcgtgagcacccagaccaagaagctgagcgccagcagccccagaatgctgcacagaagcacccagaccaccaacgacggcgtgtgccagagcatgtgccacgacaagtacaccaagatcttcaacgacttcaaggacagaatgaagagcgaccacaagagagagaccgagagagtggtgagagaggccctggagaagctgagaagcgagatggaggaggagaagagacaggccgtgaacaaggccgtggccaacatgcagggcgagatggacagaaagtgcaagcaggtgaaggagaagtgcaaggaggagttcgtggaggagatcaagaagctggccacccagcacaagcagctgatcagccagaccaagaagaagcagtggtgctacaactgcgaggaggaggccatgtaccactgctgctggaacaccagctactgcagcatcaagtgccagcaggagcactggcacgccgagcacaagagaacctgcagaagaaagagatag

SEQ ID NO: 291098 - DNA, 1449 bp, Artificial Sequence
  derived and/or modified sequence
atgagcagagtgcacggcatgcaccccaaggagaccaccagacagctgagcctggccgtgaaggacggcctgatcgtggagaccctgaccgtgggctgcaagggcagcaaggccggcatcgagcaggagggctactggctgcccggcgacgagatcagcatcaagaagaagaacaccaacaagcaggagatgggcacctacctgagattcatcgtgagcagaatgaaggagagagccatcgacctgaacaagaagggcaaggacaacaagcaccccatgtacagaagactggtgcacagcgccgtggacgtgcccaccatccaggagaaggtgaacgagggcaagtacagaagctacgaggagttcaaggccgacgcccagctgctgctgcacaacaccgtgatcttctacggcgccgacagcgagcaggccgacatcgccagaatgctgtacaaggacacctgccacgagatccccaaccacgagctggtgtgggccaagatgaagggcttcggcttctggcccgccaaggtgatgcagaaggaggacaaccaggtggacgtgagattcttcggccaccaccaccagagagcctggatccccagcgagaacatccaggacatcaccgtgaacatccacagactgcacgtgaagagaagcatgggctggaagaaggcctgcgacgagctggagctgcaccagagattcctgagagagggcagattctggaagagcaagaacgaggacagaggcgaggaggaggccgagagcagcatcagcagcaccagcaacgagcagctgaaggtgacccaggagcccagagccaagaagggcagaagaaaccagagcgtggagcccaagaaggaggagcccgagcccgagaccgaggccgtgagcagcagccaggagatccccaccatgccccagcccatcgagaaggtgagcgtgagcacccagaccaagaagctgagcgccagcagccccagaatgctgcacagaagcacccagaccaccaacgacggcgtgtgccagagcatgtgccacgacaagtacaccaagatcttcaacgacttcaaggacagaatgaagagcgaccacaagagagagaccgagagagtggtgagagaggccctggagaagctgagaagcgagatggaggaggagaagagacaggccgtgaacaaggccgtggccaacatgcagggcgagatggacagaaagtgcaagcaggtgaaggagaagtgcaaggaggagttcgtggaggagatcaagaagctggccacccagcacaagcagctgatcagccagaccaagaagaagcagtggtgctacaactgcgaggaggaggccatgtaccactgctgctggaacaccagctactgcagcatcaagtgccagcaggagcactggcacgccgagcacaagagaacctgcagaagaaagagatag

SEQ ID NO: 291099 - DNA, 1527 bp, Artificial Sequence
  derived and/or modified sequence
atgagtagggtgcacgggatgcaccccaaggaaaccacccgtcagctgtccctggccgtcaaggacggactgattgtagaaacactgacagttggatgcaaggggtccaaggccgggattgaacaggagggatactggttacctggcgacgaaatttccatcaaaaaaaagaataccaataagcaggagatgggcacgtacttgcgcttcatcgtgtcccgaatgaaagagagagcaatagaccttaataaaaagggtaaagacaacaaacacccaatgtacagaaggctcgtacattccgcggtcgatgttcctactatacaagaaaaggtcaatgaaggcaaatacagaagctatgaggaattcaaggcagacgctcagctcctgctgcataacactgtgattttctatggcgcagactctgagcaagcggacattgcccggatgctttataaggacacatgccacgagctcgatgaactgcagctctgtaaaaactgcttttatctctctaacgctagacccgacaactggttttgttacccctgtataccgaatcacgaacttgtttgggccaagatgaagggatttggcttctggcccgcaaaggtgatgcagaaggaagataaccaggtggatgtgcggttcttcggacaccaccaccagagagcgtggatcccctctgaaaatatccaggatattactgtgaacatccaccgactccatgtgaagaggtccatgggctggaaaaaagcttgtgatgagttagagttgcaccagcggttcctgcgggaggggcgcttctggaagagtaaaaatgaagatcgcggcgaggaagaggccgagtcgtcgattagctcaacctccaacgaacagttgaaagttacacaggagccccgcgcgaagaaaggccggcgaaatcagtcggtggaacccaagaaagaagagccagaacctgagactgaggctgtgagcagctcccaagaaataccgactatgccgcagcctatcgagaaagtgtctgtatctactcagacaaagaagctgagcgcttcgtccccacgtatgctgcaccgcagtacccagactacgaatgacggagtctgtcaaagcatgtgccatgacaaatataccaaaatttttaatgacttcaaggatcggatgaagagcgatcataagagggagactgaacgagtggtgagagaggccctcgagaagttacgctcagagatggaggaagagaaacggcaggccgtaaataaagccgtagcaaacatgcagggtgagatggaccgcaaatgtaaacaggtcaaggagaaatgtaaagaggaattcgtggaggagataaagaaattggccacgcagcacaaacagctcatttctcagactaaaaagaaacaatggtgttacaattgcgaagaggaggccatgtaccattgctgttggaatacttcttactgctctatcaaatgtcagcaggaacactggcatgcagagcacaaaaggacctgcaggagaaaacgctag

SEQ ID NO: 291100 - DNA, 1569 bp, Artificial Sequence
  derived and/or modified sequence
atggcccggcttacaaaacgccggcaagcagataccaaagccattcaacatctgtgggcagcaatcgagattatcagaaatcaaaagcagatcgccaatatcgatcgcatcacaaaatacatgtcaagagtgcatggaatgcatcctaaagaaaccacccgacaactgagtcttgccgtgaaagatggcctcattgtcgaaactttgactgttggctgcaagggtagcaaagccggaatcgagcaggaggggtattggctcccaggagatgaaatctctatcaagaaaaagaataccaataaacaggagatgggcacatatctccgctttatagtctcgaggatgaaggaacgggcgatcgacttgaataagaaagggaaggacaataagcaccccatgtatcgccggctggtccactccgccgttgatgtccctacaattcaggagaaggtgaatgaaggtaagtacaggtcctatgaagaatttaaagcagatgcccagctgctgctccacaacacagtgattttttatggcgctgacagcgagcaggcggatattgcccgcatgctgtataaagacacctgtcacgagattcctaaccatgagctggtgtgggctaaaatgaagggttttggtttctggcccgccaaagtcatgcaaaaagaggacaaccaggtcgacgtgcgcttctttggccatcatcaccagcgcgcatggattccttccgaaaacattcaagacattacggttaatattcatcgcctccacgtcaaacgatcgatgggctggaaaaaggcttgcgacgaactggaactccaccagagatttcttagggagggacgtttctggaaatctaaaaacgaagatcgaggagaggaagaggctgaatcctcgatttccagcaccagcaatgaacaactgaaggtcactcaggaacccagggctaaaaaaggtcggcggaatcagagcgttgagcctaagaaggaggagcccgaacccgaaactgaggcagtatcaagctcccaggaaatccctacgatgccccaacccatagagaaggtttcagtgagcacccaaacaaaaaagctctctgcctctagtcccagaatgctgcacagatctacacagacaaccaatgatggggtgtgccagtccatgtgtcacgataagtacacaaagatctttaacgattttaaggaccgcatgaagtccgaccacaaaagggaaaccgaacgagtggtccgagaggcccttgaaaagctgcgcagcgagatggaagaggagaaacgacaggccgtaaataaagctgtggcaaatatgcaaggcgagatggatagaaagtgcaagcaggtgaaagaaaagtgcaaggaggagttcgtcgaggagatcaaaaaattagcgactcagcacaagcagttgatctctcagacaaaaaagaaacaatggtgctataattgtgaagaagaagcaatgtatcactgttgctggaacacgtcatactgcagtatcaagtgccagcaggaacactggcacgcagaacacaagcgaacttgtagacggaagcgatag

SEQ ID NO: 291101 - DNA, 1449 bp, Artificial Sequence
  derived and/or modified sequence
atgtcgcgagttcacgggatgcatcccaaagaaactactcgtcaattatctctggcggttaaagatggacttatcgtggagaccttaacagtcgggtgtaagggcagcaaggcagggattgagcaggaagggtactggttgccaggtgacgagatcagcattaaaaagaagaacaccaataagcaggaaatgggcacttatctcagattcattgtttcccgcatgaaggagcgcgccattgatctcaataagaagggcaaggataataaacacccaatgtatcgacgcctagtgcactcagcagttgacgttcccacaatccaggaaaaggtgaatgaaggtaaatatcgctcctacgaggagtttaaggctgacgcccaactgctcctccataacactgttattttttatggagccgactccgaacaggccgacatcgcaaggatgttatacaaagatacttgccatgagatcccaaaccatgaactggtctgggccaagatgaaggggttcggcttctggcctgccaaggttatgcagaaagaagataatcaggtggatgtccgattttttggccaccatcaccagcgggcttggattccttctgaaaacattcaggatatcaccgtgaacattcatcgactccatgtgaaacgaagcatgggctggaagaaggcgtgcgacgaattagaattgcaccagaggttcttgagagagggcaggttctggaagagtaaaaatgaggatcgtggcgaagaggaggcggagtcctcaatttcatctacctccaatgagcagttgaaagtcacacaggagcctcgcgcgaagaagggacgaagaaaccagtcagtcgagcctaaaaaagaagagcctgaaccagagacagaggccgttagcagcagccaagagatccccaccatgccacaacccatcgagaaggtctctgtgtccactcaaacaaagaagctctccgcgagctcacctaggatgctgcatcgaagtacccagaccaccaacgacggtgtctgccagtccatgtgccatgataagtacacgaaaatttttaatgattttaaagacaggatgaagtcagaccataaacgggaaacggagagggtagtgagggaggctctggaaaagttaagatccgaaatggaggaggagaagaggcaggccgtgaataaagctgttgccaatatgcagggagaaatggatcggaagtgtaaacaggttaaagagaaatgcaaagaagaatttgttgaggaaatcaagaagctcgctacacagcacaagcagctgattagccagaccaaaaagaaacaatggtgctataactgtgaagaggaggcaatgtaccactgttgctggaatacatcctactgtagtatcaagtgccagcaagagcattggcatgccgaacacaagcgcacatgtcgccgcaagaggtag

SEQ ID NO: 291102 - DNA, 1527 bp, Artificial Sequence
  derived and/or modified sequence
atgagccgggtgcacggcatgcaccccaaggagaccacccggcagctgagcctggccgtgaaggatggcctgattgtggagaccctgactgtgggctgcaagggcagcaaggccggcatcgagcaggagggctactggctgcctggagatgagatcagcatcaagaagaagaacaccaacaagcaggagatgggcacctacctgcgcttcatcgtgtccaggatgaaggagcgggccatcgacctgaacaagaagggcaaggacaacaagcaccccatgtacagaaggctggtgcacagcgctgtggatgtgcccaccatccaggagaaggtgaatgaaggcaagtaccgctcctatgaggagttcaaggcagatgcccagctgctgctgcacaacacagtcatcttctatggagctgacagcgagcaggccgacatcgccaggatgctgtacaaggacacctgccacgagctggatgagctgcagctgtgcaagaactgcttctacctgagcaatgcccggccagacaactggttctgctacccctgcatccccaaccacgagctggtgtgggccaagatgaagggcttcggcttctggccagccaaggtgatgcagaaggaggacaaccaggtggatgtgcgcttcttcggccaccaccaccagagggcctggatccccagcgagaacatccaggacatcaccgtgaacatccaccggctgcacgtgaagaggtccatgggctggaagaaggcctgtgatgagctggagctgcaccagcgcttcctgcgggagggccgcttctggaagagcaagaatgaagatagaggagaggaggaggccgagagcagcatcagcagcaccagcaatgagcagctgaaggtgacccaggagccccgggccaagaagggcagaagaaaccagagcgtggagcccaagaaggaggagcctgagcctgagacagaagctgtgagcagcagccaggagatccccaccatgccccagcccatcgagaaggtgtctgtgtccacccagaccaagaagctgagcgccagcagccccaggatgctgcacaggagcacccagaccaccaatgatggagtgtgccagagcatgtgccacgacaagtacaccaagatcttcaatgacttcaaggacaggatgaagagtgaccacaagcgggagacagagcgggtggtgcgggaggccctggagaagctgcggtctgagatggaggaggagaagaggcaggccgtgaacaaggctgtggccaacatgcagggcgagatggacaggaagtgcaagcaggtgaaggagaagtgcaaggaggagtttgtggaggagatcaagaagctggccacccagcacaagcagctgatcagccagaccaagaagaagcagtggtgctacaactgtgaggaggaggccatgtaccactgctgctggaacaccagctactgcagcatcaagtgccagcaggagcactggcacgccgagcacaagaggacctgcaggaggaagaggtag

SEQ ID NO: 291103 - DNA, 1569 bp, Artificial Sequence
  derived and/or modified sequence
atggcccggctgaccaagaggcggcaggccgacaccaaggccatccagcacctgtgggccgccatcgagatcatccggaaccagaagcagatcgccaacatcgaccgcatcaccaagtacatgagccgggtgcacggcatgcaccccaaggagaccacccggcagctgagcctggccgtgaaggatggcctgattgtggagaccctgactgtgggctgcaagggcagcaaggccggcatcgagcaggagggctactggctgcctggagatgagatcagcatcaagaagaagaacaccaacaagcaggagatgggcacctacctgcgcttcatcgtgtccaggatgaaggagcgggccatcgacctgaacaagaagggcaaggacaacaagcaccccatgtacagaaggctggtgcacagcgctgtggatgtgcccaccatccaggagaaggtgaatgaaggcaagtaccgctcctatgaggagttcaaggcagatgcccagctgctgctgcacaacacagtcatcttctatggagctgacagcgagcaggccgacatcgccaggatgctgtacaaggacacctgccacgagatccccaaccacgagctggtgtgggccaagatgaagggcttcggcttctggccagccaaggtgatgcagaaggaggacaaccaggtggatgtgcgcttcttcggccaccaccaccagagggcctggatccccagcgagaacatccaggacatcaccgtgaacatccaccggctgcacgtgaagaggtccatgggctggaagaaggcctgtgatgagctggagctgcaccagcgcttcctgcgggagggccgcttctggaagagcaagaatgaagatagaggagaggaggaggccgagagcagcatcagcagcaccagcaatgagcagctgaaggtgacccaggagccccgggccaagaagggcagaagaaaccagagcgtggagcccaagaaggaggagcctgagcctgagacagaagctgtgagcagcagccaggagatccccaccatgccccagcccatcgagaaggtgtctgtgtccacccagaccaagaagctgagcgccagcagccccaggatgctgcacaggagcacccagaccaccaatgatggagtgtgccagagcatgtgccacgacaagtacaccaagatcttcaatgacttcaaggacaggatgaagagtgaccacaagcgggagacagagcgggtggtgcgggaggccctggagaagctgcggtctgagatggaggaggagaagaggcaggccgtgaacaaggctgtggccaacatgcagggcgagatggacaggaagtgcaagcaggtgaaggagaagtgcaaggaggagtttgtggaggagatcaagaagctggccacccagcacaagcagctgatcagccagaccaagaagaagcagtggtgctacaactgtgaggaggaggccatgtaccactgctgctggaacaccagctactgcagcatcaagtgccagcaggagcactggcacgccgagcacaagaggacctgcaggaggaagaggtag

SEQ ID NO: 291104 - DNA, 1449 bp, Artificial Sequence
  derived and/or modified sequence
atgagccgggtgcacggcatgcaccccaaggagaccacccggcagctgagcctggccgtgaaggatggcctgattgtggagaccctgactgtgggctgcaagggcagcaaggccggcatcgagcaggagggctactggctgcctggagatgagatcagcatcaagaagaagaacaccaacaagcaggagatgggcacctacctgcgcttcatcgtgtccaggatgaaggagcgggccatcgacctgaacaagaagggcaaggacaacaagcaccccatgtacagaaggctggtgcacagcgctgtggatgtgcccaccatccaggagaaggtgaatgaaggcaagtaccgctcctatgaggagttcaaggcagatgcccagctgctgctgcacaacacagtcatcttctatggagctgacagcgagcaggccgacatcgccaggatgctgtacaaggacacctgccacgagatccccaaccacgagctggtgtgggccaagatgaagggcttcggcttctggccagccaaggtgatgcagaaggaggacaaccaggtggatgtgcgcttcttcggccaccaccaccagagggcctggatccccagcgagaacatccaggacatcaccgtgaacatccaccggctgcacgtgaagaggtccatgggctggaagaaggcctgtgatgagctggagctgcaccagcgcttcctgcgggagggccgcttctggaagagcaagaatgaagatagaggagaggaggaggccgagagcagcatcagcagcaccagcaatgagcagctgaaggtgacccaggagccccgggccaagaagggcagaagaaaccagagcgtggagcccaagaaggaggagcctgagcctgagacagaagctgtgagcagcagccaggagatccccaccatgccccagcccatcgagaaggtgtctgtgtccacccagaccaagaagctgagcgccagcagccccaggatgctgcacaggagcacccagaccaccaatgatggagtgtgccagagcatgtgccacgacaagtacaccaagatcttcaatgacttcaaggacaggatgaagagtgaccacaagcgggagacagagcgggtggtgcgggaggccctggagaagctgcggtctgagatggaggaggagaagaggcaggccgtgaacaaggctgtggccaacatgcagggcgagatggacaggaagtgcaagcaggtgaaggagaagtgcaaggaggagtttgtggaggagatcaagaagctggccacccagcacaagcagctgatcagccagaccaagaagaagcagtggtgctacaactgtgaggaggaggccatgtaccactgctgctggaacaccagctactgcagcatcaagtgccagcaggagcactggcacgccgagcacaagaggacctgcaggaggaagaggtag

SEQ ID NO: 291105 - DNA, 1527 bp, Artificial Sequence
  derived and/or modified sequence
atgagccgggtgcacggcatgcaccccaaggagaccacccggcagctaagtctggctgtgaaggacggccttattgtggaaacactgacagtcgggtgcaaggggtccaaggccggcatcgaacaagagggttactggctacctggagatgagatcagcatcaaaaaaaaaaacacaaataagcaggagatgggcacctaccttaggtttattgtgagtagaatgaaagaaagggcgattgatctgaacaagaagggcaaagacaataagcatcctatgtatcgaaggctcgtgcatagcgctgtagacgttccaacaatccaggaaaaagttaacgaaggtaaatacaggtcctacgaggaatttaaagctgatgcacagctcctgctgcacaacactgtcattttttacggcgccgattctgagcaagcggacattgctcgcatgctctacaaggacacctgccatgaactggatgaattgcagctgtgtaaaaactgtttctatttgtcgaacgcccgtcccgacaactggttttgttacccttgcatcccaaaccacgagctggtctgggctaagatgaaggggtttggattttggcccgccaaagttatgcagaaagaggacaaccaagtggatgtgagattctttggacatcatcaccaaagggcttggattccaagcgagaacatccaggacatcacagtcaatattcatcggctgcatgtcaaaagatctatgggctggaagaaggcttgtgatgaactggaactacatcagcgattcctcagagagggccgcttctggaagtctaagaacgaggaccgcggagaggaagaggccgaatcgagcatatctagtacaagtaacgagcagctgaaggtgacgcaggaaccgcgggccaaaaagggcagaagaaaccagagcgtggagccaaagaaggaggagccagagcccgaaactgaagcagtgtcttcttcccaggagattcccaccatgcctcaacctattgaaaaggtgtcggtatctactcaaacgaagaagctttcagccagctcgcctcggatgctacatcgaagcacacaaaccacaaacgacggcgtgtgtcagagcatgtgccacgataagtacacaaagatattcaatgactttaaagaccgcatgaagtctgaccacaagagggaaaccgagcgagtggtaagagaagccctcgagaaactgcgttccgagatggaggaagagaagcgtcaagcagtaaacaaagcggtcgccaatatgcagggtgaaatggatcggaaatgtaaacaggtgaaggagaaatgtaaagaggaattcgtggaagagatcaaaaaattggcgacacaacacaagcagttaatttctcaaaccaagaaaaaacagtggtgttataactgtgaggaagaagctatgtaccactgctgctggaatacatcctactgcagcataaagtgtcagcaggagcattggcacgcagagcataagcgcacatgccggagaaaacggtag

SEQ ID NO: 291106 - DNA, 1569 bp, Artificial Sequence
  derived and/or modified sequence
atggcccggctgaccaagcggcggcaggccgacaccaaggccatccagcatctatgggcggcaattgagatcattcgaaatcaaaagcaaattgccaatatcgataggatcaccaagtacatgtctagagtgcatgggatgcaccctaaggagacgacccggcaattgtctcttgcagtcaaggacggcctgatcgtcgaaaccctgacggtcgggtgcaaaggcagtaaagccggcatcgagcaggaagggtactggcttccgggagatgagatttcgataaagaagaagaacacgaacaagcaggagatgggaacttaccttcgattcattgtttcaaggatgaaagaacgggccattgacttaaataaaaaggggaaagacaacaaacatccaatgtaccgacgcctggtgcacagcgcagtggacgtgcccaccatacaggagaaggttaatgaaggcaagtaccggtcttacgaagagtttaaggccgacgcacagctgctcttacacaacacagtcatattctacggggctgactctgagcaggccgatatcgcccggatgctgtacaaggatacctgccacgagattccaaatcacgaactagtgtgggccaaaatgaagggattcggattctggcccgccaaggtcatgcagaaggaagacaaccaagtcgacgtaagattttttggtcaccaccaccagcgcgcatggattccctccgagaacatccaagacatcacggtgaatatacatagactacacgtaaagcgctccatggggtggaaaaaagcatgtgacgaattggagttacaccaacgtttcttacgcgaggggaggttttggaaatcgaagaatgaggacaggggggaagaagaagccgaatcgagcatatccagtacatcaaacgagcagctaaaagtcacccaggaaccccgggcgaaaaagggacggaggaaccagtccgtggaacctaaaaaggaggagcccgagcccgagactgaagccgtgagcagctctcaggagatccctaccatgccccagccaatcgaaaaagtgtctgtttctactcagacaaagaagctcagtgccagcagcccccgaatgctgcacaggtcaactcagaccacaaacgatggcgtgtgccagtccatgtgccatgacaagtatacgaaaatcttcaatgatttcaaagatcgcatgaagagtgatcataagagggagaccgagcgggtggtcagggaagccctggaaaaacttaggtctgagatggaagaagagaagcgtcaagctgtaaacaaggctgtggcaaacatgcagggcgagatggatcgcaagtgcaaacaagtcaaagaaaagtgcaaggaggaatttgtggaggaaatcaagaaattagcaactcagcataagcagctcatatctcaaaccaaaaaaaaacagtggtgttacaactgcgaagaagaagccatgtatcattgctgctggaacacaagttactgctcaatcaagtgccagcaggaacactggcacgccgagcataaaaggacatgtcggaggaagagatag

SEQ ID NO: 291107 - DNA, 1449 bp, Artificial Sequence
  derived and/or modified sequence
atgagccgggtgcacggcatgcaccccaaggagaccacccggcagctgtccttggccgtgaaagacggacttatcgtggaaactctgacagttgggtgtaaggggagtaaggctgggatcgagcaggagggttattggctgccaggggatgaaatttcaatcaagaagaaaaataccaataaacaggagatgggaacctatttgcgtttcattgtgtcccgtatgaaggaaagggccatcgacctgaataagaaggggaaggacaataaacaccctatgtacagacgcctggtgcacagcgccgtggacgtgcccacaattcaggagaaagttaacgaaggtaaatacagatcttacgaagaattcaaagccgatgcccagttgttgctccacaacaccgtaattttttacggggccgattccgaacaggctgacatcgcccggatgctatataaggacacatgtcacgagattcccaaccacgaattggtgtgggcaaagatgaaaggttttgggttctggcccgctaaggtgatgcagaaagaggataaccaagtggacgtgaggttcttcgggcatcatcaccaaagagcatggatcccttctgaaaatattcaggacatcacagtgaatattcacaggcttcacgtaaaacgatcaatggggtggaagaaggcttgcgatgagctcgaactgcaccagcgcttcctgcgcgagggccgattttggaagtcgaagaacgaagatagaggagaagaggaagctgagagctctattagcagcacatccaacgagcaacttaaggtgactcaggagcccagggccaaaaaagggcgcagaaatcaatctgtggagcctaaaaaggaggaaccggagcctgagacagaagccgtgtcctccagtcaggaaatccccacaatgccacagcctatagaaaaggtgtccgtatccacccaaaccaaaaaactttccgccagcagcccaaggatgctgcatagatcaacacagacaactaatgacggcgtctgccaatctatgtgccacgacaagtacactaagatcttcaatgatttcaaggaccggatgaaatccgaccataagcgagaaaccgaaagagtcgtcagggaagccctcgaaaaactccggtcagagatggaggaggagaaacgacaggcggtgaacaaagcagtcgcaaatatgcagggggaaatggacaggaaatgtaaacaggtcaaagagaaatgcaaagaggaattcgtggaggaaatcaagaaacttgctactcagcataagcagttaattagccaaacaaagaaaaaacagtggtgctataattgcgaggaggaggccatgtaccactgctgctggaacacttcatattgctcaattaagtgccagcaagaacactggcacgctgaacataagcggacgtgccgcagaaagcgatag

SEQ ID NO: 291108 - DNA, 1527 bp, Artificial Sequence
  derived and/or modified sequence
atgtcccgcgtacacgggatgcaccccaaggaaaccactcgtcagctttccctggccgtgaaggacggactcattgtggaaaccctcactgttggctgcaaagggtccaaggccggaatagagcaggagggctattggctgcctggcgacgagatctcgataaaaaagaagaacacgaacaagcaagagatgggcacatatctgcgctttatcgtgagccggatgaaggaaagggccattgatctgaataagaaagggaaagacaataagcatccaatgtaccgaagactggtgcattccgcagtggacgtcccaaccatccaagagaaagtgaatgaagggaagtacaggtcctatgaggagttcaaagcggacgcgcagctcctgcttcataacactgtaattttctatggggcagattccgagcaggcagacatcgcaagaatgctttataaagacacatgtcatgagcttgacgagctacagttgtgtaagaattgcttctatctgtccaatgccaggccagacaattggttctgctacccgtgtattcctaaccacgaactggtgtgggctaagatgaagggctttggtttttggccggcaaaagtgatgcagaaggaggataatcaagtggatgttaggttttttggccatcaccaccagcgggcttggatcccatcagaaaatattcaggacatcacggtgaacatccatagattacacgtgaagagaagcatgggctggaagaaagcttgcgatgagctcgaactgcaccaaaggttccttagggaagggcgtttctggaagtccaagaatgaagatagaggcgaggaagaagctgaaagttctatctcttctacatcgaacgaacagctcaaggtgacccaagagcctcgagccaaaaaggggagacgcaaccagagcgtggagcctaagaaagaggagccggaacctgaaaccgaagccgtgtcttctagccaagagatcccaacaatgccccaaccaatcgaaaaggtgagtgtcagcacccagaccaagaagttgagcgcgagctcgccccgaatgctgcaccgatctacacagactactaatgatggagtgtgccagtctatgtgccatgataagtatacaaaaatctttaatgacttcaaggaccgaatgaagtcagatcataaaagggaaactgaacgggtggtcagggaggccctggaaaagctgcggtctgaaatggaagaggagaagcgacaagccgtaaacaaggcagtggcgaatatgcagggcgagatggacagaaagtgcaaacaggttaaagagaaatgcaaagaagaattcgttgaggagattaagaaactcgccacccagcacaagcaactgatctcccagacaaagaaaaagcaatggtgttataactgcgaagaggaggcaatgtatcattgttgttggaacacgtcttactgttccatcaaatgccagcaggagcactggcacgccgaacacaaacgaacctgtagaaggaaaaggtag

SEQ ID NO: 291109 - DNA, 1569 bp, Artificial Sequence
  derived and/or modified sequence
atggccaggctgactaagcgcagacaggccgacaccaaggcgatacagcacttgtgggctgctattgagatcatccgcaatcagaaacaaattgccaatatcgaccgaatcaccaagtatatgtccagagtgcatggaatgcatccgaaggaaacaactcggcagctgagcttggcagttaaagacggactaatagttgaaaccctgaccgtagggtgcaaggggtcaaaggccggaatagagcaggaaggctattggctgcccggagacgagattagtatcaagaagaaaaacaccaacaagcaggaaatggggacctatctcagattcatcgtctcccgaatgaaggaacgcgctatcgatttgaataagaaaggaaaggataacaaacaccccatgtacaggcgcctggttcattctgccgtggatgtacctactatccaagagaaagtgaacgaggggaaatacagatcatatgaagagttcaaggccgatgctcagcttctcttgcacaacactgtgatattttatggggcagattctgagcaggcagatatagctagaatgttgtacaaggacacctgtcatgagatacctaaccacgaactagtgtgggccaagatgaaagggttcgggttctggcctgccaaggttatgcagaaggaggacaatcaggtggacgtcagattcttcgggcaccaccaccaacgtgcttggatcccaagcgagaatatacaggacattaccgtgaacattcaccggcttcatgtcaagcggagcatggggtggaaaaaggcttgcgatgagctggagctgcatcagagatttcttcgggaagggaggttctggaaaagtaagaatgaagaccggggagaggaggaagctgagtcctcaatttcaagcactagcaatgagcagctcaaagttactcaggagccaagagccaaaaaggggaggagaaaccaaagcgtggaacccaaaaaggaggagcccgagcctgagacagaagctgtgtctagctcccaggaaatccctaccatgccgcagccaattgagaaagtctcagtatcaacccaaacaaaaaagctgagcgctagctccccaagaatgttgcacagatccactcagactaccaatgacggggtgtgccaaagtatgtgccatgacaagtacacaaagatttttaacgatttcaaggacaggatgaaatctgaccacaaacgcgagaccgaaagggtggtgcgcgaggccttggaaaagctgaggagcgaaatggaagaagagaagcgacaggcagtcaacaaggcggtcgctaacatgcagggcgagatggataggaaatgtaagcaggtgaaggagaagtgcaaagaagaattcgttgaagagattaaaaagttggccacacagcacaagcaattgatttcacagacaaagaagaaacagtggtgctacaactgcgaggaggaagcaatgtaccactgctgctggaacacttcatattgcagcattaaatgccagcaggagcactggcacgcagaacacaaacgaacatgtaggcgcaagcgctag

SEQ ID NO: 291110 - DNA, 1449 bp, Artificial Sequence
  derived and/or modified sequence
atgagcagggtgcacgggatgcatcctaaagaaacaacacgccagctgagtttggccgtcaaagatggcctcatcgtggagacacttacagttggttgcaagggcagcaaagcaggaatcgagcaggaaggttattggcttcccggagatgagatatctataaagaaaaagaatacaaataaacaggaaatgggtacctaccttcgatttatcgtatctcggatgaaggaaagggctatcgacctcaataaaaagggtaaggataataaacaccctatgtataggcgcctggtccacagcgcagtagacgtgccaaccatacaagagaaggtgaatgagggaaaatacagatcttatgaggaattcaaggctgatgcacagttacttctgcacaacacagtgattttttacggagccgacagcgagcaggcagacatcgcccgtatgctctacaaagatacttgtcatgagataccgaatcacgaactggtctgggccaagatgaagggattcggcttctggcccgctaaagtgatgcagaaagaagacaatcaggtggacgttagattcttcggtcatcatcaccagcgggcttggattccctccgaaaacatccaggacattacagttaatatccatagattacatgttaagaggtctatgggctggaagaaagcatgtgacgagctggagctccaccagcgattcttacgagaaggcaggttttggaagagcaagaatgaagatcgcggagaagaggaagccgagtcctccatcagctcgacgtctaatgagcagctgaaggttacccaggaaccacgagcaaaaaagggcaggcggaaccaatctgtcgaacccaagaaagaagagcctgagcctgagactgaggcagtgtcctccagccaagaaatccccacaatgccacagcctatcgaaaaggtgtcagtttctacccagacaaagaaactgagcgcctcgagtccacgcatgctgcatagaagcactcaaacaacaaacgacggcgtgtgccaatctatgtgtcatgataagtacactaagattttcaacgatttcaaagacagaatgaagagcgaccacaagcgcgagacggaaagagtggtcagggaggccttggagaagctcaggagcgagatggaggaggagaagaggcaagcagtgaataaagctgtggcgaacatgcaaggagagatggaccgcaaatgtaaacaggttaaagagaaatgcaaggaagagttcgtggaagagatcaaaaagcttgcaacccagcacaaacagttgataagtcaaacaaaaaagaagcagtggtgttacaactgcgaagaagaagctatgtaccactgctgctggaacacatcctattgtagtatcaagtgccagcaggagcattggcatgccgagcataaacggacatgccggagaaagaggtag

SEQ ID NO: 291111 - DNA, 3898 bp, Artificial Sequence
  derived and/or modified sequence
gcggcgggaaggaggcggcaccggaggggagggccgggcgcggcggcggcggcggtggaggagccggagcataatgctaaagaagtaaacaggtcatggcacgtttaacaaaaagacgacaggcggatacaaaagctatccagcatctttgggcagccattgagattatacggaaccagaagcagattgccaacattgaccgtattacaaagtatatgtctcgagtccacggtatgcaccctaaagagaccacccgtcagctgagcttagctgtgaaagatggtcttattgtcgaaactctaacagtgggctgcaaaggttcaaaagctggtattgaacaagaaggatattggttgccaggagatgagattagcattaagaagaagaatacaaacaaacaggagatgggcacatacctcagattcattgtctcccgcatgaaggagagggctatagatcttaataaaaaggggaaggacaataaacacccgatgtacaggaggctggtgcactcagctgtggacgttcccaccattcaagagaaagtgaatgaagggaaataccgaagttatgaagagttcaaagctgatgcccaattgcttctccacaataccgtgattttctatggagcagacagtgagcaagctgacattgcgaggatgctatataaagacacatgtcatgagctggatgaactgcagctttgcaagaattgcttttacttgtcaaatgctcgtcctgacaactggttctgttatccttgtatacctaatcatgagctggtttgggctaaaatgaaaggttttgggttttggccagccaaagtcatgcagaaagaagacaatcaagtcgacgttcgcttctttggccaccaccaccagagggcctggattccttctgaaaacattcaagatatcacagtcaacattcatcggctgcacgtgaagcgcagtatgggttggaaaaaggcctgtgatgagctggagctgcatcagcgtttcctacgagaagggagattttggaaatctaagaatgaggaccgaggtgaggaagaggcagaatccagtatctcctccaccagtaatgagcagctaaaggtcactcaagaaccaagagcaaagaaaggacgacgtaatcaaagtgtggagcccaaaaaggaagaaccagagcctgaaacagaagcagtaagttctagccaggaaatacccacgatgcctcagcccatcgaaaaagtctccgtgtcaactcagacaaagaagttaagtgcctcttcaccaagaatgctgcatcggagcacccagaccacaaacgacggcgtgtgtcagagcatgtgccatgacaaatacaccaagatcttcaatgacttcaaagaccggatgaagtcggaccacaagcgggagacagagcgtgttgtccgagaagctctggagaagctgcgttctgaaatggaagaagaaaagagacaagctgtaaataaagctgtagccaacatgcagggtgagatggacagaaaatgtaagcaagtaaaggaaaagtgtaaggaagaatttgtagaagaaatcaagaagctggcaacacagcacaagcaactgatttctcagaccaagaagaagcagtggtgctacaactgtgaggaggaggccatgtaccactgctgctggaacacatcctactgctccatcaagtgccagcaggagcactggcacgcggagcacaagcgcacctgccgccggaaaagatgaagctggcccttcccggagtcaccccgatgattactcttttcagacacagcggtttttgtttccaagaagccaaaattgtttagaatttgcttcccattttgcaccagcctttaaacacttttcgtgaagaaattttgcacagtagtttaaatcttttgttaatgctcctccgaagtttttcagggggtaaaagtaacatcagtggagggtattattttaaataaattttaattgagaatttgttgcattttcagcaaattttaaaacatttttaggttttacagagattttaacctttaaacaacagatctttaaaaaacaggtgaatacaagtgagtttaacaaagaaacatttagaatagatctgaatgtaagaactacagaactgtttcagaaataaaacatactaccttgatgtgacatttttttcttaaccttgttgagctggttttgttcagcttaatttactgttcaaaggcattatctgttggtcacaccagtgggtatatgattgaatttagggaacagggttgacacagcagggctagtcctgcatattttttcttaaatatttcccaattgtgtttttcattatttcttttcaatatataacttttataacaaattattagctttgatcttgtagtttaaaattgcagggaactggggtaatcttttactgagctggatcttagagaaaatgaatatttaaattttaaagtttgcacatttcatctttgtcctaacatgagtgcttgtaacaaaataaacaacaaaaacaaagccaaaaactacctttatccatatgtgaaattatagatgaggcatacgaatttgtttaatgcttcccttcccttcccacatatcatctcactgcctattatctggtgtcacctcatgtatcgtaagttaatactaaaagaagagaaagcacttaagtttcacagaagccgttatgtttgtagtaatgggtcattgcctactaatgaactccatcactgtacacagaatgaagaataatgcatgttaattttcttgtattaaagatgccgtgatttgtaaaaagtctgtattttgcggaatgtctggattaagaagcattaccaataggaatggatcgatagttgaataatgattttttatacatagatatataaaatacagccaggaaaacttaaattacttttcttttaaaatatctcacaatttatgtggtatttttaaagactgatcttagaccaagtcaaattcccatttatcatttagttattttttgaggttagagaataatttgtacatatttatttagacctttgatatttattaaagcaattactcacaatggaagtgaaagaatcaggagaaaagccttttaaaaagtattctccaggtttgtcagggtcactctaaagataaaaatgtaactaagtcttctgtgaaatatcatccatctaatcttgatgctgttgcagatggtggtgacacaagttaattgacaaactactgccaaatggtgcacaatattttgtaaaaagtacccagtagccccatttcatacaatgtacctaaattatgcagtaacttggcatcatcgttccctccttgttgctgtgtaattagtcagtgttgccacagtgtgtggcgctgatggagatgtcagaaccgagaacacttaaccttctttgattgtttttcaagttttaagacttcgatccacccctatgagagcaagtaattgtggaaatatttttggtgtaaaatcattccagagtatgtaatatttaactgatagctgcatgaaagtgagattcgtgttactttggcttttctgtctctgttgacacggttgcacatttccaagttactacagcgtgaaaactgtgtgtttaaaaaaaaacaaaattaaaaaaagagattgtggcctggttttgtaaaagttttaggtaaaattacaattgattgttttaggaatcattattaaaaattttctgcaaatcataaagctatatcgaggtgttgagcttagccactatgcacattgtaattattcattgtggctgtccagttctatgatgcattctggcattttgtaagctgctctgactagcaatatatagattcatttaatgtgttaacattggttaataaatgtattt

SEQ ID NO: 291112 - DNA, 1664 bp, Artificial Sequence
  derived and/or modified sequence
gcggcgggaaggaggcggcaccggaggggagggccgggcgcggcggcggcggcggtggaggagccggagcataatgctaaagaagtaaacaggtcatggcacgtttaacaaaaagacgacaggcggatacaaaagctatccagcatctttgggcagccattgagattatacggaaccagaagcagattgccaacattgaccgtattacaaagtatatgtctcgagtccacggtatgcaccctaaagagaccacccgtcagctgagcttagctgtgaaagatggtcttattgtcgaaactctaacagtgggctgcaaaggttcaaaagctggtattgaacaagaaggatattggttgccaggagatgagattagcattaagaagaagaatacaaacaaacaggagatgggcacatacctcagattcattgtctcccgcatgaaggagagggctatagatcttaataaaaaggggaaggacaataaacacccgatgtacaggaggctggtgcactcagctgtggacgttcccaccattcaagagaaagtgaatgaagggaaataccgaagttatgaagagttcaaagctgatgcccaattgcttctccacaataccgtgattttctatggagcagacagtgagcaagctgacattgcgaggatgctatataaagacacatgtcatgagatacctaatcatgagctggtttgggctaaaatgaaaggttttgggttttggccagccaaagtcatgcagaaagaagacaatcaagtcgacgttcgcttctttggccaccaccaccagagggcctggattccttctgaaaacattcaagatatcacagtcaacattcatcggctgcacgtgaagcgcagtatgggttggaaaaaggcctgtgatgagctggagctgcatcagcgtttcctacgagaagggagattttggaaatctaagaatgaggaccgaggtgaggaagaggcagaatccagtatctcctccaccagtaatgagcagctaaaggtcactcaagaaccaagagcaaagaaaggacgacgtaatcaaagtgtggagcccaaaaaggaagaaccagagcctgaaacagaagcagtaagttctagccaggaaatacccacgatgcctcagcccatcgaaaaagtctccgtgtcaactcagacaaagaagttaagtgcctcttcaccaagaatgctgcatcggagcacccagaccacaaacgacggcgtgtgtcagagcatgtgccatgacaaatacaccaagatcttcaatgacttcaaagaccggatgaagtcggaccacaagcgggagacagagcgtgttgtccgagaagctctggagaagctgcgttctgaaatggaagaagaaaagagacaagctgtaaataaagctgtagccaacatgcagggtgagatggacagaaaatgtaagcaagtaaaggaaaagtgtaaggaagaatttgtagaagaaatcaagaagctggcaacacagcacaagcaactgatttctcagaccaagaagaagcagtggtgctacaactgtgaggaggaggccatgtaccactgctgctggaacacatcctactgctccatcaagtgccagcaggagcactggcacgcggagcacaagcgcacctgccgccggaaaagatga

SEQ ID NO: 291113 - DNA, 1449 bp, Artificial Sequence
  derived and/or modified sequence
atgtctcgagtccacggtatgcaccctaaagagaccacccgtcagctgagcttagctgtgaaagatggtcttattgtcgaaactctaacagtgggctgcaaaggttcaaaagctggtattgaacaagaaggatattggttgccaggagatgagattagcattaagaagaagaatacaaacaaacaggagatgggcacatacctcagattcattgtctcccgcatgaaggagagggctatagatcttaataaaaaggggaaggacaataaacacccgatgtacaggaggctggtgcactcagctgtggacgttcccaccattcaagagaaagtgaatgaagggaaataccgaagttatgaagagttcaaagctgatgcccaattgcttctccacaataccgtgattttctatggagcagacagtgagcaagctgacattgcgaggatgctatataaagacacatgtcatgagatacctaatcatgagctggtttgggctaaaatgaaaggttttgggttttggccagccaaagtcatgcagaaagaagacaatcaagtcgacgttcgcttctttggccaccaccaccagagggcctggattccttctgaaaacattcaagatatcacagtcaacattcatcggctgcacgtgaagcgcagtatgggttggaaaaaggcctgtgatgagctggagctgcatcagcgtttcctacgagaagggagattttggaaatctaagaatgaggaccgaggtgaggaagaggcagaatccagtatctcctccaccagtaatgagcagctaaaggtcactcaagaaccaagagcaaagaaaggacgacgtaatcaaagtgtggagcccaaaaaggaagaaccagagcctgaaacagaagcagtaagttctagccaggaaatacccacgatgcctcagcccatcgaaaaagtctccgtgtcaactcagacaaagaagttaagtgcctcttcaccaagaatgctgcatcggagcacccagaccacaaacgacggcgtgtgtcagagcatgtgccatgacaaatacaccaagatcttcaatgacttcaaagaccggatgaagtcggaccacaagcgggagacagagcgtgttgtccgagaagctctggagaagctgcgttctgaaatggaagaagaaaagagacaagctgtaaataaagctgtagccaacatgcagggtgagatggacagaaaatgtaagcaagtaaaggaaaagtgtaaggaagaatttgtagaagaaatcaagaagctggcaacacagcacaagcaactgatttctcagaccaagaagaagcagtggtgctacaactgtgaggaggaggccatgtaccactgctgctggaacacatcctactgctccatcaagtgccagcaggagcactggcacgcggagcacaagcgcacctgccgccggaaaagatga

SEQ ID NO: 291114 - protein, 300 aa, Artificial Sequence
  derived and/or modified sequence
MSKCARKKYIKTNPRQMTMETVESQHDGSITASLTESKSAHVQTQTGQNSIPALAQVAAIAETDESAESEGVIDSHKRREILSRRPSYRKILNELSSDVPGVPKIEEERSEEEGTPPSIATMAVPTSIYQTSTGQYIAIAQGGTIQISNPGSDGVQGLQALTMTNSGAPPPGATIVQYAAQSADGTQQFFVPGSQVVVQAATGDMPTYQIRAPTAALPQGVVMAASPGSLHSPQQLAEEATRKRELRLMKNREAAKECRRRKKEYVKCLESRVAVLEVQNKKLIEELETLKDICSPKTDY

SEQ ID NO: 291115 - protein, 157 aa, Artificial Sequence
  derived and/or modified sequence
MSKCARKKYIKTNPRQMTMETVESQHDGSITASLTESKSAHVQTQTGQNSIPALAQVAAIAETDESAESEGVIDSHKRREILSRRPSYRKILNELSSDVPGVPKIEEERSEEEGTPPSIATMAVPTSIYQTSTGQYIAIAQGGTIQISNPGSDGVQG

SEQ ID NO: 291116 - protein, 205 aa, Artificial Sequence
  derived and/or modified sequence
MTMETVESQHDGSITASLTESKSAHVQTQTGQNSIPALAQVVAIAQGGTIQISNPGSDGVQGLQALTMTNSGAPPPGATIVQYAAQSADGTQQFFVPGSQVVVQAATGDMPTYQIRAPTAALPQGVVMAASPGSLHSPQQLAEEATRKRELRLMKNREAAKECRRRKKEYVKCLESRVAVLEVQNKKLIEELETLKDICSPKTDY

SEQ ID NO: 291117 - DNA, 903 bp, Artificial Sequence
  derived and/or modified sequence
atgtcaaaatgtgctaggaaaaaatatattaaaaccaatcctcgccaaatgactatggagaccgtggagtcacagcacgacggaagcattaccgcctccctaaccgaatccaagtcggctcacgttcagacccaaaccggtcagaactctattcccgccctagctcaggtcgctgctattgctgagacggatgaatccgccgagtcagaaggagttatcgattcgcataagaggcgagaaatactcagcagaagaccttcctatcgaaagattctgaatgagctctcatctgatgttcctggcgtcccaaaaattgaggaggagcggagtgaggaggaagggacgcctccgtccatcgccaccatggctgtcccaacctccatctaccagaccagcaccggtcagtatattgccatcgcccaaggaggaaccatacagattagcaacccagggagcgacggcgtgcaggggctacaagcccttactatgactaattccggggcccctccacccggtgccactatagttcagtatgccgcccagtcagcagatggtactcaacaattttttgtgcctggatcacaggtggtcgtgcaagcggcgacaggcgacatgccaacctatcagattagagcccctaccgctgcgctccctcagggcgtggtgatggcagcctcacccgggtccctccattcaccacagcaactggctgaggaggccaccagaaaacgcgagctgaggctaatgaagaatcgagaagcagccaaagaatgtcggaggcgaaagaaagagtacgtcaaatgtcttgagtctcgagttgctgtcttagaggtgcagaacaaaaagctgatcgaagagctggagaccctaaaggacatctgctccccaaagactgattattag

SEQ ID NO: 291118 - DNA, 903 bp, Artificial Sequence
  derived and/or modified sequence
atgagcaaatgtgccaggaagaagtacatcaagaccaacccccggcagatgaccatggagaccgtggagagccagcatgatggcagcatcacagccagcctgacagagagcaagagcgcccacgtgcagacccagacaggccagaacagcatcccagccctggcccaggtggccgccatcgccgagacagatgagagcgctgagagcgagggcgtgattgacagccacaagaggcgggagatcctgagccggcggcccagctacaggaagatcctgaatgagctgagcagtgatgtgcctggggtgcccaagattgaggaggagaggtctgaggaggagggcaccccacccagcatcgccaccatggctgtgcccaccagcatctaccagaccagcacaggccagtacatcgccatcgcccagggcggcaccatccagatcagcaaccctggcagtgatggagtgcagggcctgcaggccctgaccatgaccaacagcggggcccctcctcctggggccaccatcgtgcagtatgctgcccagagcgcagatggcacccagcagttctttgtgcccggcagccaggtggtggtgcaggccgccaccggggacatgcccacctaccagatccgggcccccacagctgccctgccccagggcgtggtgatggccgccagccctggcagcctgcacagcccccagcagctggccgaggaggccaccaggaagcgggagctgcggctgatgaagaaccgggaggccgccaaggaatgtagaagaaggaagaaggagtatgtgaagtgcctggagagccgggtggccgtgctggaggtgcagaacaagaagctgattgaggagctggagaccctgaaggacatctgcagccccaagacagactactag

SEQ ID NO: 291119 - DNA, 903 bp, Artificial Sequence
  derived and/or modified sequence
atgagcaagtgcgcccggaagaagtacatcaagaccaacccccggcagatgacgatggagacagtggaatcccagcacgatggatcaattaccgccagtcttacagaatctaaaagtgcccatgtgcagactcagactggacaaaacagcattcccgctctggcgcaggttgctgcaatcgccgaaaccgatgagtcagcagagagtgagggcgtgatcgatagccataagaggagggaaatccttagcagaaggccctcctatagaaagattctcaatgaactttcttcagacgttccgggagtcccaaaaatagaagaagagcgcagcgaagaggaaggtacccccccctctatcgcaacgatggcagttccaacatctatttaccagacgtctacgggccagtatatcgcaattgcccagggcggaacaatccaaatctccaatcctggttcggacggcgtgcagggcttgcaagctctgaccatgacaaacagcggcgcacctcccccaggcgcaacaattgttcagtatgcagctcagagcgcagacggcacgcaacagtttttcgtgcccgggtctcaagtagtggtccaggctgcgactggggacatgccaacgtatcaaattcgggccccgacggctgctctgccccagggggtagtcatggctgccagcccaggctcgctgcacagtcctcaacagctcgccgaggaagcaactaggaagcgagaactgcgtcttatgaagaatagggaggcggccaaagaatgtcgacggaggaagaaagaatacgtgaagtgcctcgagagccgagttgctgtgctggaggttcaaaataagaagttaatagaggaactggaaacactgaaagacatctgctccccgaaaaccgactattag

SEQ ID NO: 291120 - DNA, 903 bp, Artificial Sequence
  derived and/or modified sequence
atgtccaagtgtgcgaggaagaaatacattaagaccaaccccagacagatgacgatggaaaccgtggagagtcaacacgatggatcaatcacagcctcgcttaccgagtccaagtcagcccatgtccagacacagacaggacagaactccatccccgcactggctcaggtggcagccatcgcagaaactgatgaaagcgctgaatcagagggggtgatagattcccataaaagacgagaaatcctgagccggcgacctagttacaggaagatcctgaacgaactgagtagcgatgtgccaggcgtacctaaaatcgaggaagaaagaagtgaggaggagggaaccccgccatctattgccaccatggcagtcccgacttccatctatcaaacatctacagggcagtatattgcaattgcccagggaggtaccatccagatctcaaaccctgggtcagatggcgtacagggattacaagccctgactatgacgaattctggggctcctcctcctggagcaaccatcgtacagtacgccgcacagagtgccgacgggactcaacaattttttgttccaggctctcaggtcgtcgttcaggcggctactggtgatatgccgacctatcagatcagagcgccaactgccgcactcccgcagggcgtagtgatggccgctagccccggtagtctgcacagcccacagcagttggccgaggaggctacccgcaagagagaattgagactgatgaagaatagagaggccgctaaagagtgccggaggcggaagaaagagtatgttaaatgtctcgagtcacgggtggctgtgttggaagtgcagaataaaaagctcattgaagagctggagacactgaaggatatatgctcgccaaagaccgactactag

SEQ ID NO: 291121 - DNA, 2220 bp, Artificial Sequence
  derived and/or modified sequence
gacccgcctgcctcctcgcgaacttgggacgagttggaaaatcctccctgagagagccgtgcggctcaggggagcggtttaactcggaaaaggaaaaggaatccagaagataaataaagaaaacaggaaaggaggaaagcattgattacaaatatcttaacaatgagcaaatgtgcaaggaaaaaatatattaagacaaatccaagacaaatgaccatggaaacagttgaatcccagcatgatggaagtataacagcttctttgacagagagcaagtctgctcatgtgcagactcagactggccaaaattcaatccctgctttagctcaggtagcagcaattgcagagacagatgaatctgcagaatcagaaggtgtaattgattctcataaacgtagagaaatcctttcacgaagaccctcttataggaaaatactgaatgaactgtcctctgatgtgcctggtgttcccaagattgaagaagagagatcagaggaagaaggaacaccacctagtattgctaccatggcagtaccaactagcatatatcagactagcacggggcaatacattgctatagcccaaggtggaacaatccagatttctaacccaggatctgatggtgttcagggactgcaggcattaacaatgacaaattcaggagctcctccaccaggtgctacaattgtacagtacgcagcacaatcagctgatggcacacagcagttctttgtcccaggcagccaggttgttgttcaagctgccactggtgacatgccaacttaccagatccgagctcctactgctgctttgccacagggagtggtgatggctgcatcgcccggaagtttgcacagtccccagcagctggcagaagaagcaacacgcaaacgagagctgaggctaatgaaaaacagggaagctgccaaagaatgtcgacgtcgaaagaaagaatatgtaaaatgtctggagagccgagttgcagtgctggaagtccagaacaagaagcttatagaggaacttgaaaccttgaaagacatttgttctcccaaaacagattactagaaatatttaactatgaactgaaggcagcatgtatagttgcttttgaaggaatacaatatatagctggcaagaatggtggcttcttttctttgtatcattcatcttcttctttaatcacttaacattcctaaaatgcttcactgtacgtagttaagtcgtagctataacttcaaattttttaaaagagacaaactgtaaaaaatgtgtgtattcttaaaatgcaatatttgtaaggcttgttccaatgccacatacttgcagctcccattctatgtgtcatcaatagtgtcctatgcaataaaattatttgcaggtctttaaatcattttaggaaaggatgatcaaaaataatgcatccagcagtacaataaaagtaaaccacaaaaaaatacctcaggaaagaatagaaagaaagtctatctaatgacatgcctatatgagaagaatagcctagatatgaatatatggcatttgcagatttttatattagttgctttgttaaaaaaaaaaagattgtattgctgtccttgaatgccatagtcaaagagagtttttaatagaaccatgttggttgcactttgtagtgtttggtgctcatttaaatatctgaacatttactacagtttttaactctactgtgtaatataaaagatcttgcagaagttcttagtgttggtttaatattacctaatgaaagtgatgacatattttttatatctggaatgagcctgttgggatcgcattgcataccttcggggtacaagtcagtttctacactgggtgctgatccttgcacgcgccctttctaccatctcacggtggggatggccgcagggctgtgcacccagaagaagatggctgttagcgtttcggccttcataatggcctgagactttctttctgtaggtggtctggagctgtccggctggtggccccctattttgccatttagcgaacaaccacaggaattttaaaaacaaaaacatcccaagattttttcatttcaaaatgcttcaaagtccacattagatcagatactccgctgtcggcacattcagctgaggttcattacaatcgagactgcaatgtgatctatgtttcatcttgtttttataataaaaagcttcagggaacaagcccaaagccctcaccaca

SEQ ID NO: 291122 - DNA, 903 bp, Artificial Sequence
  derived and/or modified sequence
atgagcaagtgcgccagaaagaagtacatcaagaccaaccccagacagatgaccatggagaccgtggagagccagcacgacggcagcatcaccgccagcctgaccgagagcaagagcgcccacgtgcagacccagaccggccagaacagcatccccgccctggcccaggtggccgccatcgccgagaccgacgagagcgccgagagcgagggcgtgatcgacagccacaagagaagagagatcctgagcagaagacccagctacagaaagatcctgaacgagctgagcagcgacgtgcccggcgtgcccaagatcgaggaggagagaagcgaggaggagggcaccccccccagcatcgccaccatggccgtgcccaccagcatctaccagaccagcaccggccagtacatcgccatcgcccagggcggcaccatccagatcagcaaccccggcagcgacggcgtgcagggcctgcaggccctgaccatgaccaacagcggcgcccccccccccggcgccaccatcgtgcagtacgccgcccagagcgccgacggcacccagcagttcttcgtgcccggcagccaggtggtggtgcaggccgccaccggcgacatgcccacctaccagatcagagcccccaccgccgccctgccccagggcgtggtgatggccgccagccccggcagcctgcacagcccccagcagctggccgaggaggccaccagaaagagagagctgagactgatgaagaacagagaggccgccaaggagtgcagaagaagaaagaaggagtacgtgaagtgcctggagagcagagtggccgtgctggaggtgcagaacaagaagctgatcgaggagctggagaccctgaaggacatctgcagccccaagaccgactactag

SEQ ID NO: 291123 - protein, 299 aa, Artificial Sequence
  derived and/or modified sequence
MSKCARKKYIKTNPRQMTMETVESQHDGSITASLTESKSAHVQTQTGQNSIPALAQVAAIAETDESAESEGVIDSHKRREILSRRPSYRKILNELSSDVPGVPKIEEERSEEEGTPPSIATMAVPTSIYQTSTGQYIAIAQGGTIQISNPGSDGVQGLQALTMTNSGAPPPGATIVQYAAQSADGTQQFFVPGSQVVVQAATGDMPTYQIRAPTAALPQGVVMAASPGSLHSPQQLAEEATRKRELRLMKNREAARECRRKKKEYVKCLENRVAVLENQNKTLIEELKALKDLYCHKVE

SEQ ID NO: 291124 - DNA, 900 bp, Artificial Sequence
  derived and/or modified sequence
atgtccaagtgcgctaggaagaaatatatcaaaaccaacccacgacagatgaccatggaaacggtagaaagtcagcacgacggttctattaccgcaagcctcactgaatctaaaagcgcgcacgtacagacccagaccgggcaaaactcgattcccgcactggcgcaggttgccgccatcgcagaaaccgacgaatctgccgaatcagaaggggtcattgactcccataagaggcgcgaaatcctctcaaggcggccttcttaccggaagatcctaaatgaactgtcaagcgacgtgcctggagtccccaaaatcgaagaggagcgatccgaggaggaggggacccccccatcaatagctactatggcagtgcctacctccatctaccagaccagcacaggacagtacatcgcaatcgctcagggtgggaccatacaaattagcaatccggggagtgacggggtgcaaggactgcaggccttgacaatgacaaacagtggagctccacctccaggcgccaccatcgtgcagtatgctgctcagagtgccgatggaacccaacagttctttgtccctggctcccaggtcgtggtgcaggctgcaaccggtgacatgcccacctatcaaatacgtgctcccactgctgctctaccacagggcgtggtgatggccgcatctccgggatctctgcacagtccccagcagctggcagaggaggcgactaggaagagggaactcaggcttatgaagaatagggaagcggcccgcgagtgtcgtcgcaagaagaaggagtatgtcaagtgtctcgagaaccgcgtggctgtgctggagaatcagaacaagacactcatcgaagagttaaaggccctgaaagatttgtattgccacaaggtagagtag

SEQ ID NO: 291125 - DNA, 474 bp, Artificial Sequence
  derived and/or modified sequence
atgtccaagtgcgcccgtaagaaatacatcaaaactaacccccgtcagatgactatggagacggtagagtctcaacacgatggttccataacagcctcactgacagagtcaaaatcagctcacgtccagactcagaccgggcaaaactctattccggccctggcgcaggttgcagccattgctgaaactgacgaatccgcagagtctgagggggtgattgatagccacaaacgcagagaaattctgagtaggaggcccagctatagaaaaattcttaatgaactatcctccgacgtgccgggtgtgcccaaaatcgaagaggagcgttcggaagaagagggaacccctccaagcatagcaacaatggccgtccctacaagtatataccaaacctcaacgggacaatacatcgccattgcacagggcggtactattcaaatttccaaccctggctcggacggggtccagggttag

SEQ ID NO: 291126 - DNA, 900 bp, Artificial Sequence
  derived and/or modified sequence
atgagcaaatgtgccaggaagaagtacatcaagaccaacccccggcagatgaccatggagaccgtggagagccagcatgatggcagcatcacagccagcctgacagagagcaagagcgcccacgtgcagacccagacaggccagaacagcatcccagccctggcccaggtggccgccatcgccgagacagatgagagcgctgagagcgagggcgtgattgacagccacaagaggcgggagatcctgagccggcggcccagctacaggaagatcctgaatgagctgagcagtgatgtgcctggggtgcccaagattgaggaggagaggtctgaggaggagggcaccccacccagcatcgccaccatggctgtgcccaccagcatctaccagaccagcacaggccagtacatcgccatcgcccagggcggcaccatccagatcagcaaccctggcagtgatggagtgcagggcctgcaggccctgaccatgaccaacagcggggcccctcctcctggggccaccatcgtgcagtatgctgcccagagcgcagatggcacccagcagttctttgtgcccggcagccaggtggtggtgcaggccgccaccggggacatgcccacctaccagatccgggcccccacagctgccctgccccagggcgtggtgatggccgccagccctggcagcctgcacagcccccagcagctggccgaggaggccaccaggaagcgggagctgcggctgatgaagaaccgggaggccgccagagaatgtagaaggaagaagaaggagtatgtgaagtgcctggagaacagagtggccgtgctggagaaccagaacaagaccctcatcgaggagctgaaggccctgaaggacctgtactgccacaaggtggagtag

SEQ ID NO: 291127 - DNA, 474 bp, Artificial Sequence
  derived and/or modified sequence
atgagcaaatgtgccaggaagaagtacatcaagaccaacccccggcagatgaccatggagaccgtggagagccagcatgatggcagcatcacagccagcctgacagagagcaagagcgcccacgtgcagacccagacaggccagaacagcatcccagccctggcccaggtggccgccatcgccgagacagatgagagcgctgagagcgagggcgtgattgacagccacaagaggcgggagatcctgagccggcggcccagctacaggaagatcctgaatgagctgagcagtgatgtgcctggggtgcccaagattgaggaggagaggtctgaggaggagggcaccccacccagcatcgccaccatggctgtgcccaccagcatctaccagaccagcacaggccagtacatcgccatcgcccagggcggcaccatccagatcagcaaccctggcagtgatggagtgcagggctag

SEQ ID NO: 291128 - DNA, 900 bp, Artificial Sequence
  derived and/or modified sequence
atgagcaagtgcgcccggaagaagtacatcaagaccaacccccggcagatgactatggagaccgtcgagagtcagcatgacggcagcataaccgcgagtctgacagaaagcaaatctgcccatgtgcagacccagacaggacaaaacagtattccggctctggcgcaggtagccgccatcgctgaaaccgacgagtctgccgaatcagaaggcgtgatcgattctcataaacgacgcgagatcctgtcaagacgtccatcttacaggaaaatcttaaacgagttatctagcgatgtccccggggtgcctaaaattgaggaggaaagatctgaggaggagggaacaccccccagtatcgcaactatggcagtgcccacaagcatctaccaaacctcgacagggcaatatatcgctatcgcgcagggcgggacaattcagatttccaatcctggcagtgatggagtgcaagggctacaagcgctaaccatgaccaattccggcgcccctccaccgggcgctaccatcgtgcagtacgccgcacaatccgctgatggaacgcaacaattcttcgtcccaggctcccaggtcgttgttcaggcggctactggagacatgcccacctaccagatcagagcgcctaccgcggccctcccacagggcgtcgtgatggcagcctctcctggctccctgcattctccccagcaattggcggaggaggctacccggaaacgcgagttgcgcctcatgaagaatagggaagccgcacgggagtgccgccggaagaagaaagaatatgtaaagtgcctggagaatcgggtcgccgtgctcgagaatcaaaacaaaacactgatagaagaattgaaagccctgaaagacctgtactgccacaaggtcgagtag

SEQ ID NO: 291129 - DNA, 474 bp, Artificial Sequence
  derived and/or modified sequence
atgagcaagtgcgcccggaagaagtacatcaagaccaacccccggcaaatgacgatggaaaccgtagagtcacagcatgacgggagtatcactgcttccctgacagagtctaaatccgcccacgtgcagacccagacaggacagaactcgatcccggctctcgcccaggtggccgcaattgccgaaaccgacgaaagcgccgaatccgaaggagttattgattctcacaagagaagagaaattctgtcaagacggccctcttatagaaagatcctcaacgagctgtccagtgatgttccaggcgtgcccaagatcgaggaggaaagaagcgaagaggagggcacccctccatccattgccacaatggctgttcctacaagcatttaccagacatcaactggccagtacattgcaatcgcccagggcggtacaattcaaatcagcaacccaggctccgacggcgtacaggggtag

SEQ ID NO: 291130 - DNA, 900 bp, Artificial Sequence
  derived and/or modified sequence
atgagtaaatgcgcacgcaagaaatacatcaagaccaaccccaggcagatgactatggagacagtggagtctcaacacgacgggtcgattactgccagcctgacagaaagtaaatcagcacacgtgcagacacagacagggcaaaatagcatcccagctcttgcccaagtggctgctatcgctgagaccgacgagtcagccgaatcagagggagtcattgactctcacaagagacgtgaaatactctcacgacgcccatcttaccgtaaaatacttaatgaattatcaagtgacgtccccggtgttcccaagatcgaggaagaaaggagcgaagaagaggggacccctccgagtatcgccactatggcagtgcccacctccatctatcaaacttccacagggcaatatattgccatcgcgcagggcggaacaatccagatcagcaacccgggatctgatggcgtgcaaggtctgcaggcactcaccatgactaattcaggtgcccctcctccaggggctaccatcgttcagtacgcggctcagtccgccgatggaacccagcagttctttgttcctggcagccaggtggtcgtccaggccgcaacaggcgatatgcccacctatcagatcagagccccaaccgcggctctgccacagggcgtggtcatggcagcctcccctgggagcctgcattccccccaacagctggcggaggaagcaacccgcaaaagagagctgaggttgatgaaaaatagggaagcagctcgcgaatgcagacggaaaaagaaggagtacgtgaagtgtctggagaacagggtggccgtgttagagaaccagaacaagaccctaattgaggagttgaaggccctgaaggatctctactgtcataaggtggaatag

SEQ ID NO: 291131 - DNA, 474 bp, Artificial Sequence
  derived and/or modified sequence
atgagcaagtgtgccaggaaaaagtatataaaaacaaaccctcggcagatgacgatggagaccgttgagtcccagcatgacggtagcataacagcctcactgactgaaagtaagtcggctcacgttcagactcagaccggacagaactcaattccagcgctcgcacaggtcgccgcaatcgctgagactgatgagtcggcggaatctgaaggcgtgatcgactctcataagaggcgggaaatcttatcgcgcaggccctcctaccgaaagatcctcaacgagctgtctagtgacgtcccgggagtgcccaagatcgaggaggaaaggtccgaggaggaaggaacccctccttccattgctacaatggctgtgccaactagtatttatcagactagcacgggccagtacattgccatagctcaggggggaaccattcagatctctaatcctggctctgacggtgtccaagggtag

SEQ ID NO: 291132 - DNA, 900 bp, Artificial Sequence
  derived and/or modified sequence
atgagcaaatgtgcaaggaaaaaatatattaagacaaatccaagacaaatgaccatggaaacagttgaatcccagcatgatggaagtataacagcttctttgacagagagcaagtctgctcatgtgcagactcagactggccaaaattcaatccctgctttagctcaggtagcagcaattgcagagacagatgaatctgcagaatcagaaggtgtaattgattctcataaacgtagagaaatcctttcacgaagaccctcttataggaaaatactgaatgaactgtcctctgatgtgcctggtgttcccaagattgaagaagagagatcagaggaagaaggaacaccacctagtattgctaccatggcagtaccaactagcatatatcagactagcacggggcaatacattgctatagcccaaggtggaacaatccagatttctaacccaggatctgatggtgttcagggactgcaggcattaacaatgacaaattcaggagctcctccaccaggtgctacaattgtacagtacgcagcacaatcagctgatggcacacagcagttctttgtcccaggcagccaggttgttgttcaagctgccactggtgacatgccaacttaccagatccgagctcctactgctgctttgccacagggagtggtgatggctgcatcgcccggaagtttgcacagtccccagcagctggcagaagaagcaacacgcaaacgagagctgaggctaatgaaaaacagggaagctgcccgggagtgtcgcaggaagaagaaagaatatgtcaaatgtcttgaaaatcgtgtggctgtgcttgaaaaccaaaacaagactctcattgaggaactcaaggccctcaaagatctttattgccataaagtagagtaa

SEQ ID NO: 291133 - DNA, 635 bp, Artificial Sequence
  derived and/or modified sequence
cgggacccgcctgcctcctcgcgaacttgggacgagttggaaaatcctccctgagagagccgtgcggctcaggggagcggtttaactcggaaaaggaaaaggaatccagaagataaataaagaaaacaggaaaggaggaaagcattgattacaaatatcttaacaatgagcaaatgtgcaaggaaaaaatatattaagacaaatccaagacaaatgaccatggaaacagttgaatcccagcatgatggaagtataacagcttctttgacagagagcaagtctgctcatgtgcagactcagactggccaaaattcaatccctgctttagctcaggtagcagcaattgcagagacagatgaatctgcagaatcagaaggtgtaattgattctcataaacgtagagaaatcctttcacgaagaccctcttataggaaaatactgaatgaactgtcctctgatgtgcctggtgttcccaagattgaagaagagagatcagaggaagaaggaacaccacctagtattgctaccatggcagtaccaactagcatatatcagactagcacggggcaatacattgctatagcccaaggtggaacaatccagatttctaacccaggatctgatggtgttcaggg

SEQ ID NO: 291134 - DNA, 900 bp, Artificial Sequence
  derived and/or modified sequence
atgagcaagtgcgccagaaagaagtacatcaagaccaaccccagacagatgaccatggagaccgtggagagccagcacgacggcagcatcaccgccagcctgaccgagagcaagagcgcccacgtgcagacccagaccggccagaacagcatccccgccctggcccaggtggccgccatcgccgagaccgacgagagcgccgagagcgagggcgtgatcgacagccacaagagaagagagatcctgagcagaagacccagctacagaaagatcctgaacgagctgagcagcgacgtgcccggcgtgcccaagatcgaggaggagagaagcgaggaggagggcaccccccccagcatcgccaccatggccgtgcccaccagcatctaccagaccagcaccggccagtacatcgccatcgcccagggcggcaccatccagatcagcaaccccggcagcgacggcgtgcagggcctgcaggccctgaccatgaccaacagcggcgcccccccccccggcgccaccatcgtgcagtacgccgcccagagcgccgacggcacccagcagttcttcgtgcccggcagccaggtggtggtgcaggccgccaccggcgacatgcccacctaccagatcagagcccccaccgccgccctgccccagggcgtggtgatggccgccagccccggcagcctgcacagcccccagcagctggccgaggaggccaccagaaagagagagctgagactgatgaagaacagagaggccgccagagagtgcagaagaaagaagaaggagtacgtgaagtgcctggagaacagagtggccgtgctggagaaccagaacaagaccctgatcgaggagctgaaggccctgaaggacctgtactgccacaaggtggagtag

SEQ ID NO: 291135 - DNA, 474 bp, Artificial Sequence
  derived and/or modified sequence
atgagcaagtgcgccagaaagaagtacatcaagaccaaccccagacagatgaccatggagaccgtggagagccagcacgacggcagcatcaccgccagcctgaccgagagcaagagcgcccacgtgcagacccagaccggccagaacagcatccccgccctggcccaggtggccgccatcgccgagaccgacgagagcgccgagagcgagggcgtgatcgacagccacaagagaagagagatcctgagcagaagacccagctacagaaagatcctgaacgagctgagcagcgacgtgcccggcgtgcccaagatcgaggaggagagaagcgaggaggagggcaccccccccagcatcgccaccatggccgtgcccaccagcatctaccagaccagcaccggccagtacatcgccatcgcccagggcggcaccatccagatcagcaaccccggcagcgacggcgtgcagggctag

SEQ ID NO: 291136 - protein, 221 aa, Artificial Sequence
  derived and/or modified sequence
MTMETVESQHDGSITASLTESKSAHVQTQTGQNSIPALAQVAAIAETDESAESEGVIDSHKRREILSRRPSYRKILNELSSDVPGVPKIEEERSEEEGTPPSIATMAVPTSIYQTSTGQYTATGDMPTYQIRAPTAALPQGVVMAASPGSLHSPQQLAEEATRKRELRLMKNREAAKECRRRKKEYVKCLESRVAVLEVQNKKLIEELETLKDICSPKTDY

SEQ ID NO: 291137 - DNA, 1930 bp, Artificial Sequence
  derived and/or modified sequence
gacccgcctgcctcctcgcgaacttgggacgagttggaaaatcctccctgagagagccgtgcggctcaggggagcggtttaactcggaaaaggaaaaggaatccagaaacaaatgaccatggaaacagttgaatcccagcatgatggaagtataacagcttctttgacagagagcaagtctgctcatgtgcagactcagactggccaaaattcaatccctgctttagctcaggtagcagcaattgcagagacagatgaatctgcagaatcagaaggtgtaattgattctcataaacgtagagaaatcctttcacgaagaccctcttataggaaaatactgaatgaactgtcctctgatgtgcctggtgttcccaagattgaagaagagagatcagaggaagaaggaacaccacctagtattgctaccatggcagtaccaactagcatatatcagactagcacggggcaatacactgccactggtgacatgccaacttaccagatccgagctcctactgctgctttgccacagggagtggtgatggctgcatcgcccggaagtttgcacagtccccagcagctggcagaagaagcaacacgcaaacgagagctgaggctaatgaaaaacagggaagctgccaaagaatgtcgacgtcgaaagaaagaatatgtaaaatgtctggagagccgagttgcagtgctggaagtccagaacaagaagcttatagaggaacttgaaaccttgaaagacatttgttctcccaaaacagattactagaaatatttaactatgaactgaaggcagcatgtatagttgcttttgaaggaatacaatatatagctggcaagaatggtggcttcttttctttgtatcattcatcttcttctttaatcacttaacattcctaaaatgcttcactgtacgtagttaagtcgtagctataacttcaaattttttaaaagagacaaactgtaaaaaatgtgtgtattcttaaaatgcaatatttgtaaggcttgttccaatgccacatacttgcagctcccattctatgtgtcatcaatagtgtcctatgcaataaaattatttgcaggtctttaaatcattttaggaaaggatgatcaaaaataatgcatccagcagtacaataaaagtaaaccacaaaaaaatacctcaggaaagaatagaaagaaagtctatctaatgacatgcctatatgagaagaatagcctagatatgaatatatggcatttgcagatttttatattagttgctttgttaaaaaaaaaaagattgtattgctgtccttgaatgccatagtcaaagagagtttttaatagaaccatgttggttgcactttgtagtgtttggtgctcatttaaatatctgaacatttactacagtttttaactctactgtgtaatataaaagatcttgcagaagttcttagtgttggtttaatattacctaatgaaagtgatgacatattttttatatctggaatgagcctgttgggatcgcattgcataccttcggggtacaagtcagtttctacactgggtgctgatccttgcacgcgccctttctaccatctcacggtggggatggccgcagggctgtgcacccagaagaagatggctgttagcgtttcggccttcataatggcctgagactttctttctgtaggtggtctggagctgtccggctggtggccccctattttgccatttagcgaacaaccacaggaattttaaaaacaaaaacatcccaagattttttcatttcaaaatgcttcaaagtccacattagatcagatactccgctgtcggcacattcagctgaggttcattacaatcgagactgcaatgtgatctatgtttcatcttgtttttataataaaaagcttcagggaacaagcccaaagccctcacc

SEQ ID NO: 291138 - protein, 236 aa, Artificial Sequence
  derived and/or modified sequence
MSKCARKKYIKTNPRQMTMETVESQHDGSITASLTESKSAHVQTQTGQNSIPALAQVAAIAETDESAESEGVIDSHKRREILSRRPSYRKILNELSSDVPGVPKIEEERSEEEGTPPSIATMAVPTSIYQTSTGQYTATGDMPTYQIRAPTAALPQGVVMAASPGSLHSPQQLAEEATRKRELRLMKNREAARECRRKKKEYVKCLENRVAVLENQNKTLIEELKALKDLYCHKVE

SEQ ID NO: 291139 - DNA, 711 bp, Artificial Sequence
  derived and/or modified sequence
atgtcaaagtgcgcaaggaaaaaatacatcaagactaacccaaggcaaatgactatggaaacggtcgagtcacaacacgacggaagtatcacggcctccttgacagagtccaagagcgctcatgtgcaaacacagacaggacagaacagcatacccgcgcttgcccaggtggccgccattgcagagaccgatgagtcagcagagtccgaaggtgtcattgattcccacaaacgaagggagattctgtcacggagaccctcatatagaaagatccttaacgaactgtctagcgacgtcccaggcgtcccaaaaatcgaggaagagaggtctgaggaagaaggtacaccacccagcattgcaacgatggccgtgcccacttcgatctaccagacctcaacagggcagtacaccgctacaggtgacatgcctacctatcagattagggcccctacggcggcgctgccgcaaggcgttgtcatggcagccagccccggttctcttcacagtccccagcagctggccgaggaagcaaccagaaagagagaactccgcttgatgaaaaatcgtgaggccgcccgggaatgccgtagaaaaaaaaaggagtatgtcaaatgcctcgaaaatcgggtggcagtgctggagaatcaaaacaaaaccctgatagaagagttgaaagcactaaaggatctttactgtcacaaggtagaatag

SEQ ID NO: 291140 - DNA, 711 bp, Artificial Sequence
  derived and/or modified sequence
atgagcaaatgtgccaggaagaagtacatcaagaccaacccccggcagatgaccatggagaccgtggagagccagcatgatggcagcatcacagccagcctgacagagagcaagagcgcccacgtgcagacccagacaggccagaacagcatcccagccctggcccaggtggccgccatcgccgagacagatgagagcgctgagagcgagggcgtgattgacagccacaagaggcgggagatcctgagccggcggcccagctacaggaagatcctgaatgagctgagcagtgatgtgcctggggtgcccaagattgaggaggagaggtctgaggaggagggcaccccacccagcatcgccaccatggctgtgcccaccagcatctaccagaccagcacaggccagtacacagccactggagacatgcccacctaccagatccgggcccccacagctgccctgccccagggcgtggtgatggccgccagccctggcagcctgcacagcccccagcagctggccgaggaggccaccaggaagcgggagctgcggctgatgaagaaccgggaggccgcccgggagtgcaggaggaagaagaaggagtatgtgaagtgcctggagaacagagtggccgtgctggagaaccagaacaagaccctgattgaggagctgaaggccctgaaggacctgtactgccacaaggtggagtag

SEQ ID NO: 291141 - DNA, 711 bp, Artificial Sequence
  derived and/or modified sequence
atgagcaagtgcgcccggaagaagtacatcaagaccaacccccggcaaatgaccatggagacagttgagagccagcatgatgggagcatcacagcgagtctgactgagtcaaagagcgcccatgtccagactcagaccggacagaacagcattcccgctctggcacaggtagccgcaatcgccgagactgatgagagcgcagaaagcgagggtgtgatcgatagtcacaagcgtcgggaaatcctgagtcgacggcccagctacagaaagatacttaatgaactgagtagtgatgtgcctggcgtgcccaagatcgaagaggaacgctcagaagaagaagggacacccccgtcaattgctacaatggcagtgcctacttctatttaccaaaccagtactgggcagtatacagctactggagacatgccgacctaccagattagggctccaaccgctgctctgcctcagggtgtggtgatggccgcttctccaggtagtttgcattctcctcagcaactggctgaggaagccacccggaagcgtgagcttaggctaatgaaaaatcgtgaggccgcaagggagtgtaggcgtaagaagaaggagtacgtcaaatgtttggagaatcgggtagcagtcctggagaaccagaacaagaccctgattgaggaactcaaagcactaaaagatttgtactgtcataaggtggagtag

SEQ ID NO: 291142 - DNA, 711 bp, Artificial Sequence
  derived and/or modified sequence
atgtccaagtgtgccagaaagaaatacatcaaaaccaatccgcgacagatgactatggagaccgtggagtcgcaacatgatgggtctatcaccgccagtctaacagaatctaagtcagcccacgtccaaacgcagaccggacagaatagcatacccgctcttgctcaagtagccgcaatcgctgaaaccgatgagtctgccgagtcagaaggagtaattgattcccacaagcggagggaaatactgtctagacgtccctcttaccgaaaaattcttaacgagttatcatcagacgttcctggcgttcctaaaatcgaagaagagaggtcagaggaggagggcaccccaccgagcattgcaaccatggctgtcccaactagtatctatcagacctctacaggccagtacaccgccaccggcgacatgcctacataccaaattcgtgcccctaccgccgcactgcctcaaggtgtggtcatggcagcttcaccaggctctctccactctccccagcagctggccgaggaagccacaagaaagcgtgagctgagactgatgaaaaatagagaagctgctcgagaatgcaggagaaaaaagaaggagtacgtgaaatgccttgaaaatcgggtggcagttctagaaaatcagaataagaccctgatcgaggaacttaaagcattaaaagacctctattgtcataaagtagagtag

SEQ ID NO: 291143 - DNA, 711 bp, Artificial Sequence
  derived and/or modified sequence
atgagcaaatgtgcaaggaaaaaatatattaagacaaatccaagacaaatgaccatggaaacagttgaatcccagcatgatggaagtataacagcttctttgacagagagcaagtctgctcatgtgcagactcagactggccaaaattcaatccctgctttagctcaggtagcagcaattgcagagacagatgaatctgcagaatcagaaggtgtaattgattctcataaacgtagagaaatcctttcacgaagaccctcttataggaaaatactgaatgaactgtcctctgatgtgcctggtgttcccaagattgaagaagagagatcagaggaagaaggaacaccacctagtattgctaccatggcagtaccaactagcatatatcagactagcacggggcaatacactgccactggtgacatgccaacttaccagatccgagctcctactgctgctttgccacagggagtggtgatggctgcatcgcccggaagtttgcacagtccccagcagctggcagaagaagcaacacgcaaacgagagctgaggctaatgaaaaacagggaagctgcccgggagtgtcgcaggaagaagaaagaatatgtcaaatgtcttgaaaatcgtgtggctgtgcttgaaaaccaaaacaagactctcattgaggaactcaaggccctcaaagatctttattgccataaagtagagtaa

SEQ ID NO: 291144 - DNA, 711 bp, Artificial Sequence
  derived and/or modified sequence
atgagcaagtgcgccagaaagaagtacatcaagaccaaccccagacagatgaccatggagaccgtggagagccagcacgacggcagcatcaccgccagcctgaccgagagcaagagcgcccacgtgcagacccagaccggccagaacagcatccccgccctggcccaggtggccgccatcgccgagaccgacgagagcgccgagagcgagggcgtgatcgacagccacaagagaagagagatcctgagcagaagacccagctacagaaagatcctgaacgagctgagcagcgacgtgcccggcgtgcccaagatcgaggaggagagaagcgaggaggagggcaccccccccagcatcgccaccatggccgtgcccaccagcatctaccagaccagcaccggccagtacaccgccaccggcgacatgcccacctaccagatcagagcccccaccgccgccctgccccagggcgtggtgatggccgccagccccggcagcctgcacagcccccagcagctggccgaggaggccaccagaaagagagagctgagactgatgaagaacagagaggccgccagagagtgcagaagaaagaagaaggagtacgtgaagtgcctggagaacagagtggccgtgctggagaaccagaacaagaccctgatcgaggagctgaaggccctgaaggacctgtactgccacaaggtggagtag

SEQ ID NO: 291145 - protein, 287 aa, Artificial Sequence
  derived and/or modified sequence
MEFNPSDHPRASTIFLSKSQTDVREKRKSLFINHHPPGQIARKYSSCSTIFLDDSTVSQPNLKYTIKCVALAIYYHIKNRDPDGRMLLDIFDENLHPLSKSEVPPDYDKHNPEQKQIYRFVRTLFSAAQLTAECAIVTLVYLERLLTYAEIDICPANWKRIVLGAILLASKVWDDQAVWNVDYCQILKDITVEDMNELERQFLELLQFNINVPSSVYAKYYFDLRSLAEANNLSFPLEPLSRERAHKLEAISRLCEDKYKDLRRSARKRSASADNLTLPRWSPAIIS

SEQ ID NO: 291146 - protein, 208 aa, Artificial Sequence
  derived and/or modified sequence
MDPDGRMLLDIFDENLHPLSKSEVPPDYDKHNPEQKQIYRFVRTLFSAAQLTAECAIVTLVYLERLLTYAEIDICPANWKRIVLGAILLASKVWDDQAVWNVDYCQILKDITVEDMNELERQFLELLQFNINVPSSVYAKYYFDLRSLAEANNLSFPLEPLSRERAHKLEAISRLCEDKYKDLRRSARKRSASADNLTLPRWSPAIIS

SEQ ID NO: 291147 - protein, 1726 aa, Artificial Sequence
  derived and/or modified sequence
MKKIFSKKGESPLGSFARRQRSSAGGGGEPGEGAYSQPGYHVRDRDLGKIHKAASAGNVAKVQQILLLRKNGLNDRDKMNRTALHLACANGHPEVVTLLVDRKCQLNVCDNENRTALMKAVQCQEEKCATILLEHGADPNLADVHGNTALHYAVYNEDISVATKLLLYDANIEAKNKDDLTPLLLAVSGKKQQMVEFLIKKKANVNAVDKLESSHQLISEYKEERIPKHSSQNSNSVDESSEDSLSSLFYFIFFETKSCTVAQAGVLQHDLSSLQSLLPGFTQFFCLHLPSSWDHRLSGKPGVDDSWPTSDDEDLNFDTKNVPKPSLAKLMTASQQSRKNLEATYGTVRTGNRTLFEDRDSDSQDEVVVESLPTTSIKVQCFSHPTYQSPDLLPKPSHKSLANPGLMKEEPTKPGIAKKENGIDIIESAPLEQTNNDNLTYVDEVHKNNRSDMMSALGLGQEEDIESPWDSESISENFPQKYVDPLAGAADGKEKNIGNEQAEESPERYLHLKPTIEMKDSVPNKAGGMKDVQTSKAAEHDLEVASEEEQEREGSENNQPQVEEERKKHRNNEMEVSANIHDGATDDAEDDDDDDGLIQKRKSGETDHQQFPRKENKEYASSGPALQMKEVKSTEKEKRTSKESVNSPVFGKASLLTGGLLQVDDDSSLSEIDEDEGRPTKKTSNEKNKVKNQIQSMDDVDDLTQSSETASEDCELPHSSYKNFMLLIEQLGMECKDSVSLLKIQDAALSCERLLELKKNHCELLTVKIKKMEDKVNVLQRELSETKEIKSQLEHQKVEWERELCSLRFSLNQEEEKRRNADTLYEKIREQLRRKEEQYRKEVEVKQQLELSLQTLEMELRTVKSNLNQVVQERNDAQRQLSREQNARMLQDGILTNHLSKQKEIEMAQKKMNSENSHSHEEEKDLSHKNSMLQEEIAMLRLEIDTIKNQNQEKEKKCFEDLKIVKEKNEDLQKTIKQNEETLTQTISQYNGRLSVLTAENAMLNSKLENEKQSKERLEAEVESYHSRLAAAIHDRDQSETSKRELELAFQRARDECSRLQDKMNFDVSNLKDNNEILSQQLFKTESKLNSLEIEFHHTRDALREKTLGLERVQKDLSQTQCQMKEMEQKYQNEQVKVNKYIGKQESVEERLSQLQSENMLLRQQLDDAHNKADNKEKTVINIQDQFHAIVQKLQAESEKQSLLLEERNKELISECNHLKERQYQYENEKAEREVVVRQLQQELADTLKKQSMSEASLEVTSRYRINLEDETQDLKKKLGQIRNQLQEAQDRHTEAVRCAEKMQDHKQKLEKDNAKLKVTVKKQMDKIEELQKNLLNANLSEDEKEQLKKLMELKQSLECNLDQEMKKNVELEREITGFKNLLKMTRKKLNEYENGEFSFHGDLKTSQFEMDIQINKLKHKIDDLTAELETAGSKCLHLDTKNQILQEELLSMKTVQKKCEKLQKNKKKLEQEVINLRSHIERNMVELGQVKQYKQEIEERARQEIAEKLKEVNLFLQAQAASQENLEQFRENNFASMKSQMELRIKDLESELSKIKTSQEDFNKTELEKYKQLYLEELKVRKSLSSKLTKTNERLAEVNTKLLVEKQQSRSLFTTLTTRPVMEPPCVGNLNNSLDLNRKLIPRENLVISTSNPRASNNSMENYLSKMQQELEKNITRELKEAAAELESGSIASPLGSTDESNLNQDLVWKASREYVQVLKKNYMI

SEQ ID NO: 291148 - DNA, 5181 bp, Artificial Sequence
  derived and/or modified sequence
atgaagaagatcttttcgaagaagggcgagtcacctctggggagctttgccaggcgacagaggagctccgcgggcgggggaggcgagcccggggaaggggcctactcccagcccggctaccacgtgcgggaccgtgaccttgggaaaatccacaaggctgcaagcgccgggaacgttgccaaagttcagcagatcctcctcctgcggaaaaatgggctgaatgatcgcgacaaaatgaatcgcacagctttgcacctggcatgtgccaatggccaccccgaggtggtcacgctactggttgatagaaagtgccagttgaacgtgtgcgacaatgagaatcggaccgccttgatgaaagcagtccagtgtcaggaagaaaagtgtgccacaatcctgttggaacacggggctgatcccaatctcgctgatgtgcacgggaacactgccctgcattacgctgtgtacaacgaagacatatccgtggcaacaaagctcctcctgtacgatgccaacatagaggctaagaacaaagacgatttgacgccattgttgttggcggtatctgggaaaaagcagcagatggtggagtttctaatcaagaaaaaagctaacgtaaatgcagtggacaagcttgaatcctcccatcagctcatctctgaatacaaggaggagagaattcctaagcactcttcacagaactccaacagcgttgatgaatcatctgaggactccctgagttctctgttttattttatcttttttgaaacgaagagttgtacggtagcgcaggccggcgtactgcagcacgatctctcaagccttcagtcgctgctcccaggttttacacagtttttctgtttgcacctccccagtagctgggaccacaggctcagtggaaaacccggcgtggatgatagctggccaactagtgacgacgaagacctcaacttcgacactaaaaacgtacccaagccctcactagctaagctgatgactgccagccagcagtccaggaagaatctggaggccacatacggtaccgtgcggacaggaaatagaactctctttgaggatagggactccgactcacaggatgaagtggtcgtcgaaagcctacctactacgtccatcaaggtgcagtgtttctcccaccccacatatcagagcccagatttactgccaaaaccctcacacaagtccctggcaaatccaggcctgatgaaggaggaacctacaaagccgggaatcgccaagaaggaaaacggcatcgatatcattgaaagtgctccgcttgagcagacgaacaatgataacctgacctatgtcgacgaggttcataagaacaacagatccgatatgatgagcgctctgggactgggccaggaagaagatattgagagtccttgggatagtgagagcatttcagagaacttcccccagaaatacgtggatcccctcgccggcgctgcagatgggaaagagaagaacatcggcaatgagcaggctgaagagtctcctgaacgatatttacatcttaagccaactatcgagatgaaagacagcgtgcctaacaaagcaggagggatgaaagatgtgcagacgtctaaggctgccgaacacgaccttgaggtggccagtgaagaagagcaagaaagagagggatcagagaacaaccaaccgcaggtggaggaagagagaaagaaacatagaaacaatgagatggaggtcagtgcgaacatccacgatggcgctactgacgacgccgaggacgatgatgacgatgacggtctgatacaaaagaggaagagtggggaaactgatcaccagcagttcccaagaaaggaaaacaaagaatacgcctcttccggtccggctctccagatgaaggaggttaaatcaacggaaaaggagaagagaacctccaaggaatctgtcaacagcccagtgtttgggaaagccagcctcctaacaggcggattgctgcaggtggacgatgactcctcattgagtgaaatcgatgaggatgaggggagacccaccaagaagacaagcaacgaaaagaacaaggtgaagaatcagatacaatctatggatgatgtggatgacctgacgcagagctccgagaccgccagcgaagattgtgaactgccacactcaagttacaagaattttatgcttttaattgagcagctgggtatggagtgcaaagactccgtctccctgctcaaaattcaggacgcagcgcttagctgtgagcgtctacttgagctcaagaagaatcactgcgagctgcttaccgtgaagatcaagaagatggaggataaggtaaacgtgctgcaacgggagctctccgaaacaaaggaaatcaaatctcagctcgagcatcagaaggttgagtgggaacgcgagctctgcagccttcggttcagcttgaaccaggaagaagaaaaacggcgaaacgccgacacactgtatgaaaaaatcagggagcaacttcgtaggaaagaggaacaatatcgcaaggaggtggaggtaaaacagcaacttgaactaagtctccagactttagaaatggaactgcgcacagtcaagagtaatcttaaccaggtggttcaggaaaggaacgacgctcagcggcagctttctagagaacagaatgccaggatgttacaagatggcattcttacaaatcatcttagtaaacagaaagagattgaaatggctcagaagaaaatgaattccgagaacagccatagtcacgaggaagagaaagacctaagtcataagaattccatgctacaagaggagatagctatgctccgtctggaaatagacactatcaaaaaccagaaccaggagaaagagaagaagtgtttcgaagatttgaagattgttaaagaaaaaaacgaagacctgcaaaaaacgattaagcagaacgaagaaacccttacccagacaataagccaatataacggcagactctcagtcctgacggcagaaaacgccatgctgaatagtaagttggagaatgagaaacagtctaaggaaaggcttgaggccgaggttgagtcgtaccactcccggttggccgcggccatacacgacagagaccagtcagaaacctccaagcgggagctggaactggctttccagcgcgcaagagacgaatgctctaggctacaagacaagatgaacttcgacgtgtctaatctcaaagataacaacgagattttgagccagcagctgttcaaaacagaatctaagctgaattcgctcgagatcgagttccaccatacacgtgatgccttgagagagaagactttagggctggaacgggtccagaaggatcttagccaaactcagtgtcagatgaaggagatggagcagaaatatcagaacgagcaagtcaaagttaacaaatacattggaaagcaagagagcgtggaagagagactgtctcagctgcaaagcgagaacatgttgcttagacaacagcttgatgacgcccacaacaaagcagacaacaaggagaaaacggtgataaacatccaagaccagttccacgccatcgtccaaaagttacaggcggaatccgagaagcagtcactgctgctagaggagcgaaacaaagagcttatttccgagtgtaaccacctgaaggaaaggcagtaccagtatgagaacgagaaagcagagagagaggtggttgtgcggcagcttcagcaagagctcgctgatactcttaagaagcaaagcatgtccgaggcctctcttgaggtgacctctcgctaccggattaacctggaggacgaaactcaagatctcaagaaaaagctggggcagattagaaaccaattgcaggaggctcaggatcgccacacggaggctgtgcgatgtgccgagaaaatgcaggatcataaacaaaagctggagaaggataacgccaagcttaaggtgactgtgaagaaacaaatggacaaaatagaagaactgcaaaaaaacctgttaaacgccaatctctccgaagacgagaaagaacagcttaagaagttgatggaactgaagcagagtctagagtgtaatctcgatcaggagatgaaaaaaaacgtcgagctcgagagagaaattaccgggttcaaaaatctgctgaagatgaccagaaaaaaacttaacgagtacgaaaatggagagttttcatttcacggcgacttgaagacctcccaattcgagatggatatccagatcaacaagttgaaacacaagatagacgacctgactgcagagcttgaaacggcaggctccaaatgtttgcacctggacactaagaatcaaattttacaagaggaactcttgagcatgaaaacggttcaaaagaagtgtgaaaaattgcagaaaaataagaaaaagctggagcaggaggtgatcaacttgcgtagtcatattgagagaaacatggtggagctgggccaggtcaagcagtataagcaagagatagaggagagggcgagacaggaaatcgcggaaaaactgaaagaggtgaacttattcctccaggcccaggcagcttcccaggaaaacctggagcagtttcgagagaataattttgcttccatgaagtctcaaatggaacttaggatcaaagatttggagagcgaactctctaaaatcaaaaccagtcaggaagatttcaacaagacagagttggagaagtacaagcagctctacctggaggagttgaaggtgcgaaaatcgctgtcttcgaaactgactaagaccaacgaacgattagctgaagtaaacaccaagctgctcgttgagaagcagcagagccgatcgctgttcacaacactgacgacccgacctgtcatggagcccccatgcgtgggtaacctcaataattctctcgaccttaaccggaaacttatcccacgggaaaacctggttatttcaacgtcaaacccaagggccagcaataattccatggaaaattatttgtccaaaatgcagcaggagctggaaaagaacattacccgggaacttaaggaagccgccgccgagctggagtccgggtcaattgcatccccactcggctccaccgatgaaagtaatctgaatcaggatctcgtgtggaaggcctcccgcgagtacgtgcaggtccttaaaaagaactacatgatctag

SEQ ID NO: 291149 - DNA, 5181 bp, Artificial Sequence
  derived and/or modified sequence
atgaagaagatcttcagcaagaagggggagagccccctgggcagctttgcccggcggcagaggagcagcgctgggggcggcggggagcccggggagggcgcctacagccagcccggctaccacgtgcgggaccgggacctgggcaagatccacaaggccgccagcgctggaaatgtggccaaggtgcagcagatcctgctgctgaggaagaatggcctgaatgaccgggacaagatgaacagaacagccctgcacctggcctgtgccaacggccaccctgaggtggtgaccctgctggtggacaggaagtgccagctgaatgtgtgtgacaatgaaaatagaacagccctgatgaaggctgtgcagtgccaggaggagaagtgtgccaccatcctgctggagcacggggctgaccccaacctggctgatgtgcacggcaacacagccctgcactatgctgtgtacaatgaagacatctctgtggccaccaagctgctgctgtatgatgccaacatcgaggccaagaacaaggatgacctgacccccctgctgctggccgtgtctgggaagaagcagcagatggtggagttcctgatcaagaagaaggccaacgtgaatgctgtggacaagctggagagcagccaccagctgatcagcgagtacaaggaggagcgcatccccaagcacagcagccagaacagcaacagcgtggatgagagcagcgaggacagcctgagcagcctcttctacttcatcttctttgagaccaagagctgcaccgtggcccaggccggcgtgctgcagcacgacctgagcagcctgcagagcctgctgcccggcttcacccagttcttctgcctgcacctgcccagctcctgggaccaccggctgagcggcaagccaggagtggatgacagctggcccaccagtgatgatgaggacctgaactttgacaccaagaatgtgcccaagcccagcctggccaagctgatgacagccagccagcagagcaggaagaacctggaggccacctatggaacagtgaggacaggcaacagaaccctgtttgaagatcgggacagcgacagccaggatgaggtggtggtggagagcctgcccaccaccagcatcaaggtgcagtgcttcagccaccccacctaccagagcccagacctgctgcccaagcccagccacaagagcctggccaaccctggcctgatgaaggaggagcccaccaagccaggcatcgccaagaaggaaaatggaattgacatcatcgagagcgcccccctggagcagaccaacaatgacaacctgacctacgtggatgaggtgcacaagaacaacagaagtgacatgatgtctgccctgggcctgggccaggaggaggacatcgagagcccctgggacagcgagagcatcagcgagaacttcccccagaagtatgtggaccccctggccggggctgctgatggcaaggagaagaacattggaaatgagcaggccgaggagagccctgagcgctacctgcacctgaagcccaccatcgagatgaaggacagcgtgcccaacaaggccggcggcatgaaggatgtgcagaccagcaaggctgctgagcatgacctggaggtggccagcgaggaggagcaggagcgggagggcagcgagaacaaccagccccaggtggaggaggagaggaagaagcacaggaacaatgagatggaggtgtctgccaacatccatgatggagccacagatgatgctgaagatgatgatgatgatgatggcctcatccagaagaggaagtctggagaaacagaccaccagcagttccccaggaaagaaaacaaggagtatgccagcagcggccctgccctgcagatgaaggaggtgaagagcacagagaaggagaagaggaccagcaaggagagcgtgaacagccctgtgtttgggaaggccagcctgctgactggaggcctgctgcaggtggatgatgacagcagcctgtctgaaattgatgaagatgagggccggcccaccaagaagaccagcaatgagaagaacaaggtgaagaaccagatccagagcatggatgatgtggatgacctgacccagagcagcgagacagccagcgaggactgtgagctgccccacagcagctacaagaacttcatgctgctgattgagcagctgggcatggagtgcaaggacagcgtgtccctgctgaagatccaggatgctgccctgagctgtgagcggctgctggagctgaagaagaaccactgtgagctgctgactgtgaagatcaagaagatggaggacaaggtgaatgtgctgcagcgggagctgtctgagaccaaggagatcaagagccagctggagcaccagaaggtggagtgggagcgggagctgtgcagcctgcgcttcagcctgaaccaggaggaggagaagagaagaaatgctgacaccctgtatgagaagatccgggagcagctgcggaggaaggaggagcagtacaggaaggaggtggaggtgaagcagcagctggagctgagcctgcagaccctggagatggagctgaggacagtgaagagcaacctgaaccaggtggtgcaggagagaaatgatgcccagaggcagctgagccgggagcagaatgccaggatgctgcaggacggcatcctgaccaaccacctgagcaagcagaaggagattgagatggcccagaagaagatgaacagcgagaacagccacagccatgaggaggagaaggacctgagccacaagaacagcatgctgcaggaggagatcgccatgctgcggctggagattgacaccatcaagaaccagaaccaggagaaggagaagaagtgctttgaggacctgaagatcgtgaaggagaagaatgaagacctgcagaagaccatcaagcagaatgaggagaccctgacccagaccatcagccagtacaacggccgcctgtctgtgctgacagcagaaaatgccatgctgaacagcaagctggagaatgagaagcagagcaaggagcggctggaggccgaggtggagagctaccacagccggctggccgccgccatccatgaccgggaccagagcgagaccagcaagcgggagctggagctggccttccagagggccagagatgagtgcagccggctgcaggacaagatgaactttgatgtgagcaacctgaaggacaacaatgagatcctgagccagcagctgttcaagacagagagcaagctgaacagcctggagattgagttccaccacaccagagatgccctgcgggagaagaccctgggcctggagcgggtgcagaaggacctgagccagacccagtgccagatgaaggagatggagcagaagtaccagaatgagcaggtgaaggtgaacaagtacatcggcaagcaggagagcgtggaggagcggctgagccagctgcagagcgagaacatgctgctgcggcagcagctggatgatgcccacaacaaggctgacaacaaggagaagacagtcatcaacatccaggaccagttccacgccatcgtgcagaagctgcaggccgagagcgagaagcagagcctgctgctggaggagaggaacaaggagctgatcagcgagtgcaaccacctgaaggagcggcagtaccagtatgaaaatgagaaggccgagcgggaggtggtggtgcggcagctgcagcaggagctggccgacaccctgaagaagcagagcatgtctgaggccagcctggaggtgaccagccgctaccgcatcaacctggaggatgagacccaggacctgaagaagaagctgggccagatccggaaccagctgcaggaggcccaggacagacacacagaggccgtgcgctgtgccgagaagatgcaggaccacaagcagaagctggagaaggacaatgccaagctgaaggtgacagtgaagaagcagatggacaagattgaggagctgcagaagaacctgctgaatgccaacctgtctgaagatgagaaggagcagctgaagaagctgatggagctgaagcagagcctggagtgcaacctggaccaggagatgaagaagaatgtggagctggagcgggagatcaccggcttcaagaacctgctgaagatgaccaggaagaagctgaatgaatatgaaaatggagagttctccttccatggagacctgaagaccagccagtttgagatggacatccagatcaacaagctgaagcacaagattgatgacctgacagctgagctggagacagctggcagcaagtgcctgcacctggacaccaagaaccagatcctgcaggaggagctgctgtccatgaagacagtgcagaagaagtgtgagaagctgcagaagaacaagaagaagctggagcaggaggtgatcaacctgcggagccacattgaaagaaacatggtggagctgggccaggtgaagcagtacaagcaggagattgaggagcgggcccggcaggagattgctgagaagctgaaggaggtgaacctcttcctgcaggcccaggccgccagccaggagaacctggagcagttccgggagaacaactttgcctccatgaagagccagatggagctgcgcatcaaggacctggagagcgagctgagcaagatcaagaccagccaggaggacttcaacaagacagagctggagaagtacaagcagctgtacctggaggagctgaaggtgaggaagagcctgagcagcaagctgaccaagaccaatgaaaggctggccgaggtgaacaccaagctgctggtggagaagcagcagagccgcagcctcttcaccaccctgaccaccaggcctgtgatggagcccccctgtgtgggcaacctgaacaacagcctggacctgaacaggaagctgatcccccgggagaacctggtgatcagcaccagcaacccccgggccagcaacaacagcatggagaactacctgagcaagatgcagcaggagctggagaagaacatcacccgggagctgaaggaggccgctgctgagctggagagcggcagcatcgccagccccctgggcagcacagatgagagcaacctgaaccaggacctggtgtggaaggccagccgggagtatgtgcaggtgctgaagaagaactacatgatctag

SEQ ID NO: 291150 - DNA, 5181 bp, Artificial Sequence
  derived and/or modified sequence
atgaagaagatcttcagcaagaagggcgagagccccctgggcagctttgcccggcggcagagatcatcagcgggcggtggaggcgaacctggggagggagcatacagccagccaggatatcacgttagggatagagatctggggaaaatacacaaggccgcatcagctggtaacgtggcgaaggtgcagcagattctgttgcttcgaaaaaatgggctgaatgaccgagataaaatgaaccgtactgccttacaccttgcctgcgccaatggtcaccctgaggtcgttacacttctggttgaccgaaaatgtcagctgaatgtatgtgacaatgaaaacaggactgccctgatgaaagcagtgcagtgccaggaagaaaagtgcgccaccatcttgctagagcacggggcggacccgaatttggcagacgtgcatggaaataccgctctccactacgccgtgtataacgaagatatctctgtggcgacaaaactgctgctctacgacgccaatatcgaagctaagaataaagacgatcttacacctctgcttctggcggtgtccggcaagaaacagcaaatggtagagttcctcataaagaagaaagcgaatgtcaacgccgtcgataagttggaatcctcacaccaacttatctctgaatataaggaagagagaatcccgaaacacagtagccaaaattcgaattcagtagatgaatcttcagaggattctctgtcctccctgttttatttcatctttttcgaaacaaagagctgtactgtggcacaggctggggtattacagcacgacctctcatctcttcaaagtctgctgccggggtttactcagtttttctgcctacacctcccttcgagttgggaccatcggttgtccggcaaacccggagttgatgactcctggcccacctcagatgatgaggatctcaacttcgatacgaagaacgttcccaagccgtctttagccaaacttatgaccgcaagtcagcagtctcgaaagaatctggaagctacctacggcacggttcgaactggaaatcgaaccctcttcgaagacagggacagtgattctcaggacgaggtggtcgtggaatccttgccgactaccagcattaaggtgcagtgtttctcccatcccacttaccagagccctgatctgcttccaaagccttctcataaatcgcttgcgaaccccggcctgatgaaggaggaacccacaaaacccgggatcgctaagaaggaaaatggaatcgatatcattgagagtgcacctttagagcagactaataatgataacctgacctatgtagatgaagtacataagaataaccggtctgatatgatgtcagccctgggcctggggcaggaggaggatatcgagtccccttgggattctgaaagtatcagcgagaattttccacaaaaatatgtggacccactggccggtgcagctgatggtaaggaaaaaaatattggcaatgaacaggctgaagaatctccggaacgctacttgcacttaaagccgacgattgaaatgaaggacagcgtacccaataaagcaggaggaatgaaggacgttcaaacatcaaaagctgccgagcacgaccttgaggttgccagcgaagaggagcaagagagagagggcagcgaaaataatcagcctcaagtggaggaagagcgaaaaaaacaccggaataacgagatggaagtgagcgcaaatatacatgatggtgctactgacgatgccgaggacgacgacgatgacgacggtctgatccagaaaagaaagagcggggagaccgatcatcagcagtttcctagaaaggaaaataaggaatatgcatcatcgggacctgccttacagatgaaagaggtgaagtctaccgaaaaggaaaagagaaccagcaaagagtccgtaaacagtcctgtcttcgggaaggctagcttacttaccggtgggttgctgcaggtggacgatgactcctcactgagcgagattgatgaagacgaaggccgacccacgaagaaaacatcaaacgaaaagaacaaggtgaagaatcagattcagtccatggacgacgtggacgatctcacacagtcatccgagaccgcctccgaggattgtgaactcccacacagttcttacaagaacttcatgctcctgatcgagcagctgggtatggaatgcaaggactcagtctccctgttgaagatccaagacgctgcgctgtcttgcgagcgccttctggagctgaagaagaatcactgcgagttattgaccgtgaaaattaaaaaaatggaagataaagttaacgtgctgcagcgagagctgtctgaaacgaaggagatcaagagccagctggagcaccaaaaagtggagtgggagcgtgagctgtgcagtctgagattctctctgaaccaggaagaggagaaaaggcggaatgctgacacactctacgagaaaatcagggaacagctcagaagaaaagaggagcagtacagaaaagaggttgaggtgaagcagcaactggaactgtcactgcaaaccttggagatggagctgcggacagttaaatcaaacctgaaccaggtcgtccaggagcggaacgatgcccaaagacagctttcccgtgaacagaatgctcgcatgctgcaggacggcatcctgacaaaccacctgtcaaaacaaaaggaaattgaaatggcccagaaaaagatgaatagcgagaacagtcactctcacgaagaagagaaagacctcagtcacaagaacagtatgttgcaggaagagattgctatgttaaggcttgagattgacacgatcaaaaaccagaatcaggagaaggaaaagaagtgtttcgaggacttaaagatcgtgaaggagaaaaacgaagacctgcagaagacaatcaagcagaatgaagagactctgacacagaccatatcccagtacaatggacgcctgagcgtgttaaccgctgagaacgcaatgcttaattccaaattggagaacgagaagcagagcaaggagcgcctggaggccgaggtcgagtcttaccactcgaggctcgccgctgccatacacgatcgcgaccagagcgagacctctaagagggagctggagctcgcctttcaaagggcgagagacgaatgttcccgcctgcaggataagatgaatttcgacgtcagcaacctgaaggacaataatgagatcctgtcccaacagctcttcaagactgagtcaaaactgaactctttggagatcgagttccatcacaccagggacgccctgagggagaagacactgggacttgaacgcgttcagaaagacctctctcagacccaatgccaaatgaaggagatggagcagaagtaccagaacgagcaagtcaaggtcaacaaatacattggtaagcaggaaagcgtggaggagcggctctctcagttgcaatcagaaaatatgctcttgagacagcagctggacgatgcgcacaacaaggctgacaataaagagaagaccgtcattaacatccaggaccagtttcacgcaatcgttcagaaattacaggccgaaagcgagaaacagtcgcttctgctcgaagaacgaaataaggagttaattagtgagtgcaaccacctaaaagagcgacagtatcagtatgagaacgagaaagccgagagggaggtggtcgtgcgtcagttgcagcaggagcttgctgacactttaaagaaacagtccatgtcagaggcttctctagaagtaactagtaggtaccggataaatctggaggacgaaacccaagacctcaaaaagaaacttggccagatccgcaatcagttacaggaggcacaggacaggcataccgaggcggtgcgctgcgcggaaaagatgcaagaccacaagcaaaaactggagaaagataatgccaagctcaaggtcactgtaaaaaagcagatggataaaattgaggaattgcagaagaaccttctgaacgccaacctgtcagaggatgaaaaggagcagctgaagaagttgatggagcttaagcagagcctcgaatgcaacttggaccaagaaatgaaaaaaaatgtcgaactggagcgagagataaccgggtttaagaatctgctgaagatgacccggaaaaagcttaatgaatatgagaatggagagtttagctttcacggcgatctgaagaccagtcagttcgaaatggatatacagatcaataaactgaaacataagatcgacgacctgactgccgaactcgaaactgccggttccaagtgcctccatctcgacactaagaatcagatcctccaggaagagctgctcagcatgaaaacggttcaaaagaaatgcgagaaactgcagaagaataagaagaaactggagcaagaagtgattaacctccggagtcatatagagcgaaatatggtcgagttgggtcaagtcaaacagtataaacaagagattgaggagagagctaggcaggaaatcgctgaaaagctgaaggaggtgaatctgtttctgcaggcccaagctgccagccaggaaaatttagagcagtttagagagaacaattttgcttccatgaaatctcagatggagctgaggattaaagatctggagtccgagctctctaaaattaaaacttcacaagaagacttcaataaaacggagctagagaagtataagcagctttatctcgaagagctgaaagtccgtaagtctctgtcatccaagctgactaagacgaatgaaagattggccgaagtgaataccaagttgctagttgaaaaacagcagagtcgctccctcttcaccactcttacaacccggcccgtgatggaacctccgtgtgtggggaatctcaataattcattagacctcaatcgaaaactgatcccaagggaaaacttggtgatctccacctctaacccacgagcctcaaacaacagtatggagaactatctttccaagatgcagcaagagctggagaaaaatataactcgggagcttaaagaagccgctgccgagctggaatccgggagtatcgcatcgccccttgggtccactgacgaaagcaatttgaatcaggacctggtgtggaaagcttcacgcgaatatgtccaggtgctcaaaaaaaattatatgatctag

SEQ ID NO: 291151 - DNA, 5287 bp, Artificial Sequence
  derived and/or modified sequence
ggctccggaggccgttaagagccgagagagacatgaggtgtctctgaagcccggtcgcctgggccatgaagaagatttttagtaagaagggcgagtcgcccttgggctccttcgcgcggcggcagaggagcagcgcgggaggcgggggcgagccgggggagggcgcctactcgcagcccggctaccacgtccgagaccgagatctcggcaagatccacaaagctgccagcgcgggtaatgtggcgaaagtgcagcagatccttttgctcaggaagaatggcttgaacgatagagacaagatgaacaggacggctctacatttggcctgtgccaatggtcatccagaagtagtaactctcctggtggacagaaaatgccagctcaatgtctgtgacaacgaaaacaggacagctctgatgaaggctgtacaatgccaggaagagaaatgtgcaactattctgctagaacatggtgctgatccaaatcttgcggatgtccatggcaacactgctcttcactatgctgtctataatgaggacatatcagtagcaacaaagctgcttttgtatgatgcaaatattgaagcaaaaaacaaggatgacctcacaccacttttacttgcagtaagtggaaaaaagcagcaaatggtggaatttttaataaagaaaaaagcaaatgtaaatgcagtagataagttggaaagcagtcaccaactaatttcagaatataaagaagaaaggatacctaaacattcttctcaaaatagtaattcagtggatgaaagctctgaagactccttaagcagtttattttattttattttttttgagacaaagtcttgcactgttgcccaggctggagtgctacagcatgatctcagctcactgcaatctctgcttcctgggttcacacaattcttctgcctccacctcccaagtagctgggaccacaggctttctggcaaaccgggtgttgatgattcatggcctacctcagatgacgaagacctcaattttgatactaagaatgtcccaaaaccaagcttagcaaagctaatgactgcttctcagcaatccaggaaaaatttagaagcaacatatggcactgtgagaacaggaaatagaactttgtttgaggatagagattccgatagtcaagatgaagttgtggttgaaagccttcctacaacatcaatcaaagtccagtgcttttctcatcctacctatcaatcacctgaccttcttccaaaaccttcccacaagtcgttagcaaaccctggtcttatgaaggaagaaccaacaaagccaggcattgcaaaaaaagaaaatggtattgatattattgaaagtgctccactagagcaaacaaataatgacaatttgacttatgttgatgaagtgcacaaaaataatagaagtgatatgatgtccgcattaggattaggacaagaggaagatatagaatcaccttgggattctgagagtatctctgagaattttccacagaagtatgttgatcctttagctggggctgcagacggaaaagaaaaaaatataggaaatgaacaagcagaagagtctcctgagagatatcttcacttgaagcctaccattgaaatgaaagattctgttccaaataaagcaggaggaatgaaggatgtacaaacatccaaagcagctgaacatgacttagaagtagcatcagaagaagagcaagaaagggaagggagtgaaaataaccagccacaggttgaagaagaaaggaaaaaacacagaaataatgaaatggaagtatcagcaaacatacatgatggtgctactgatgatgctgaagatgatgatgatgatgatggattaattcaaaaaagaaagagtggagaaactgatcatcagcaatttcccaggaaggaaaataaagagtatgctagtagtggtcctgccttgcaaatgaaggaagtaaagagcactgaaaaagaaaaacggacctcgaaagaatctgtgaattcaccagtgtttgggaaggccagtttactaactggtggcctgctacaagtggatgatgacagcagtttaagtgaaatagatgaggatgaaggaaggcctactaagaaaacatctaatgaaaagaacaaggtcaaaaaccaaatacagtctatggatgatgttgatgacttaactcagtcatctgaaacagcctcagaggattgtgagctaccccactctagttacaagaattttatgttgctcattgaacaacttggaatggagtgtaaagattctgttagcctattgaaaatccaggatgcagctctttcatgtgaaagattattagaacttaaaaaaaatcactgtgaactacttacagtaaaaattaaaaaaatggaagacaaggttaatgtactacaaagggagctatctgaaacaaaagaaataaaatcacagttagagcatcaaaaagttgaatgggaacgagaactgtgctctttgagatttagcttaaaccaagaagaagagaagagaagaaatgctgatacgttgtatgaaaaaattagggaacagttaagaagaaaagaagagcaatataggaaagaagttgaagtgaaacaacagcttgaactgagtctccaaacactggagatggaattgaggactgtaaaaagtaatttgaatcaggtcgttcaagagcgaaatgacgctcagaggcaactttctcgagaacagaatgccagaatgttacaagatggaattctgaccaatcacctttccaaacaaaaggagattgaaatggctcaaaagaaaatgaattctgagaattctcatagtcatgaagaagaaaaagacctatcgcataaaaatagcatgttgcaggaagaaattgctatgctaagactagaaatagacacaataaaaaatcaaaaccaggaaaaagaaaagaaatgttttgaggaccttaaaattgtaaaagaaaagaatgaagaccttcagaagactataaaacagaatgaggaaacattaacacaaacaatatcccagtataatggacggcttagtgttctgacagctgagaatgcaatgctaaattctaaactggagaatgaaaagcaaagcaaggaaagactggaagcagaagttgaatcataccattctagattggctgctgctatacatgatcgtgatcaaagtgagacatcaaaaagagaactagaacttgctttccagagagcaagagatgaatgttctcgtttacaggacaaaatgaattttgatgtgtctaacctaaaagataacaatgagattctttctcaacaactatttaaaactgaaagtaaactcaatagcctagaaattgagttccatcacacgagagatgccctcagagaaaagactttgggtttagaacgggtacaaaaggacctaagccaaacacagtgtcaaatgaaggaaatggaacaaaagtatcaaaatgaacaagttaaagtgaataaatacattggaaagcaggagtctgtagaggagagattgtctcaactacaaagtgagaatatgttgcttcgacaacaactggatgatgcccacaacaaggctgacaataaagagaagacagtgattaatatccaagaccagtttcatgctattgtgcaaaaacttcaagctgagagtgaaaagcaaagtcttctgctagaagaaagaaataaggagttaatcagtgaatgtaatcacttaaaagaaagacagtatcaatatgaaaatgaaaaggcagaaagagaagttgttgtgagacaacttcaacaagaactagctgataccctaaaaaaacaatctatgtcagaggcttcactggaggttacgtcacgttatcgtattaatttagaagatgagacacaggatttaaagaagaaattaggtcaaatcagaaatcaattgcaagaagcacaggatcgacatacagaagctgtcagatgtgctgagaagatgcaagatcacaagcaaaagcttgaaaaagataatgccaagttaaaagttacagtcaaaaagcaaatggacaaaattgaggagcttcagaaaaacctgttaaatgcaaatttgtctgaagatgaaaaggaacaattaaagaaacttatggaattaaaacagtcactggaatgtaatttggatcaagaaatgaagaaaaatgttgaattagaaagagagataactggatttaagaacctcttaaaaatgacaagaaagaagttaaatgaatatgaaaatggagaatttagtttccatggagatttaaaaactagtcaatttgaaatggatattcagattaataagctaaaacataagattgatgatcttacagcagaactggagactgcaggttcaaaatgtctacatctggatacaaagaaccaaattcttcaagaggagttgttatctatgaaaacagtacaaaagaaatgtgaaaaactacagaagaataaaaagaagttggaacaagaagtgatcaacctgagaagtcatatagaaaggaatatggtagaacttggtcaagtcaaacagtataaacaggagattgaagaaagagcaagacaggaaatagcagaaaaattaaaagaagtcaatctatttttacaggcacaagcagcatctcaagaaaacttagagcagtttagagagaataattttgcttcaatgaaaagtcagatggaactcagaattaaagatctggaatctgaactctccaaaataaaaacttctcaagaagactttaataaaaccgaactggaaaaatataagcaactctatctagaagaattaaaagttagaaaatctttgtcaagtaaactaaccaaaactaatgagaggctagcagaggtcaacaccaaacttcttgtggaaaaacagcagagcagatctttgttcaccactctcactaccaggccagtcatggagccaccttgtgtgggaaatcttaataatagtttagatctcaacagaaaacttattccaagagaaaacttagtgatctctacctcaaatccacgggcttcaaataatagcatggagaactacttgagcaagatgcagcaggagttggaaaaaaatataactagagaactcaaagaagctgctgctgaattggaatctggatcaatagcttcccctctagggtctactgatgagtcaaatctaaatcaagatctagtttggaaagcatcaagagaatatgtacaggttttaaagaaaaattatatgatctgaaagataagattttattactgggctgtttatgtgacattttg

SEQ ID NO: 291152 - DNA, 5180 bp, Artificial Sequence
  derived and/or modified sequence
atgaaaaaaattttttctaaaaaaggtgaatcgccactaggctctttcgctaggcggcagaggtcctctgccggtggcggtggggagcctggtgaaggtgcctatagccaacctggataccacgtaagggaccgcgatctgggtaaaattcacaaggccgcttccgcaggcaatgtggcaaaggtccagcagattctcctgctccggaaaaacggattgaacgatagagataagatgaatagaaccgcactgcacctcgcgtgtgctaacggacatcctgaggtcgttacattgctcgtggaccgcaaatgccaattgaacgtctgcgataacgagaaccgcacagctctgatgaaagcagtccaatgtcaggaggaaaagtgtgccaccatcctgctggagcacggagcagatccaaatttagctgatgttcacggtaataccgcgctccactatgcggtgtataatgaagacatctcagttgctactaagcttctcctttacgatgctaatatcgaggcaaagaataaagacgacctgacgccactcctcctggcagtttctggaaagaaacagcaaatggtcgagttcttgatcaagaagaaagcaaatgtaaatgcggtggacaagctggaatctagccaccagttgatcagcgagtacaaagaggagcggatcccgaagcacagctctcagaattccaactctgtcgacgaaagctctgaagactctctgtcgtccctgttctactttattttctttgaaactaaatcttgcaccgtggctcaagctggagtgctgcagcatgacctgagcagtctgcagtcactgttaccgggttttactcagttcttttgtttgcacctgccaagcagttgggatcacagactgtctgggaaacccggagtggacgattcttggcctacatcggacgatgaggatcttaattttgacactaaaaatgtacctaaacccagcctggcaaaactcatgaccgctagccagcaatctcgcaagaatctagaagcgacctatggaacagtgcgaaccgggaatcgcactctcttcgaagatcgggacagtgattcccaggatgaagttgttgtcgagtcactgccaaccacctcaatcaaggttcagtgcttctctcacccaacttaccaaagcccagacttgctgccaaagccctcacacaaaagccttgcaaatccaggcctcatgaaagaagaacccaccaagcccggaattgccaaaaaggagaacggcatcgatataatcgagtctgccccattggagcagaccaataatgacaatcttacctatgttgatgaggtgcacaagaacaacaggtcagacatgatgagcgccttaggccttggccaggaggaggatatcgaatcgccctgggatagtgagagcatcagcgagaacttccctcagaagtacgtcgaccctctcgccggagctgcagacggcaaagagaaaaacattggaaacgaacaagctgaagaatcgccggaacgctatctacacctgaagcccaccattgaaatgaaggatagcgtccccaacaaagcagggggaatgaaggacgtccaaactagcaaggccgctgagcacgatctggaagtcgcctcagaggaagaacaggagcgcgaggggtccgaaaacaatcagcctcaggtggaggaggaacgaaagaagcacagaaataatgagatggaggtctctgccaacatccatgacggagccacagatgatgcagaagatgacgatgatgatgacggactgatccagaagcggaaatctggcgaaacagatcaccagcagtttccgcgaaaagagaataaagagtacgcgagttccggcccagctctacagatgaaagaggtgaagtccacagaaaaggagaagcgtacaagcaaagagagcgtgaactcacccgttttcggcaaagccagcctcctgactggcggattgttacaggtggacgatgacagctctctgtcagagatcgacgaggatgaaggaagaccaaccaagaaaacaagcaatgagaaaaacaaggtaaagaaccagatccagagcatggacgacgttgatgacctgactcaatcctccgaaactgcatcagaggactgtgagctgccacacagttcatacaagaacttcatgcttctgattgaacaattaggcatggagtgtaaggattccgtcagtttacttaaaatacaggacgccgctctcagttgtgaacgtctgctggagctcaagaagaatcactgcgaactcttgaccgttaagataaagaaaatggaagacaaagttaatgtcttacagcgggaattatccgagaccaaagagatcaagtcgcaactggagcatcagaaggtggaatgggagcgcgagctgtgctccctgcgtttctcgttgaaccaagaggaggagaagaggaggaatgctgacaccctttacgagaagataagggaacagctaagacgtaaggaagaacagtaccggaaggaggttgaggtgaaacagcaactggaacttagcttgcaaacactcgagatggaactgcgtaccgtcaagagcaatctgaatcaagttgttcaggagcgcaatgacgctcagaggcagttgtcccgcgagcagaacgctagaatgttgcaggatggaattctgacaaaccacttgtcaaaacagaaggaaatagagatggcccagaaaaagatgaattctgagaactcccactctcatgaagaagaaaaggatttatctcacaaaaattcaatgcttcaggaggagatagccatgctcaggctggagatcgacactataaagaatcaaaaccaggaaaaagagaaaaagtgctttgaagatctcaagatcgtgaaggagaagaacgaggatttgcaaaagactattaaacaaaatgaagagactcttacccagaccatatcccagtacaacggcaggctaagtgtcttgactgccgaaaatgctatgttgaacagcaaactcgagaatgaaaaacaatcaaaggagagattagaagctgaggtcgagtcataccatagtcgactggctgcagctatccacgatcgggatcagtctgaaacctccaagcgggagctggagttggctttccaaagggcccgagatgagtgttcaagattgcaggacaaaatgaatttcgacgtatccaatcttaaagacaataacgagattctgagccagcagctctttaagaccgagtccaaactcaacagtctcgaaatcgaattccatcatacccgcgacgccctgcgtgagaagaccctcggcttggaaagagtacagaaggatctgtcccagacgcagtgccagatgaaagagatggagcaaaagtaccagaacgaacaggtcaaagtgaataagtatataggcaagcaggagagcgtggaagagcgattgtctcagctgcaatctgaaaacatgttgttgaggcagcaattggatgacgctcacaacaaagcagataataaagagaagaccgtgataaatatccaggatcagttccatgcaattgttcagaaactgcaggccgagtctgaaaagcaatcactcttattggaggagcggaacaaagaactcatttccgagtgcaaccacctgaaggagagacagtaccagtacgaaaatgaaaaagccgaaagggaggtcgtggtcagacaactccaacaggaactggctgacaccctgaagaagcagtcgatgagtgaagcatcactcgaggtgacttcccgttacagaataaacctagaggacgagacccaggacctgaagaagaaactcggccagattagaaaccagcttcaggaagctcaggatagacacacagaggccgtccggtgcgctgagaagatgcaggaccataaacaaaaactcgagaaggataatgctaaattgaaggttaccgtaaaaaaacaaatggacaagatcgaagagctacaaaaaaatctgctgaacgccaatctgagtgaggacgagaaagagcagctcaaaaaacttatggaactcaagcagagcctggaatgcaatctggatcaggagatgaagaagaatgtggaactggaaagagagatcaccggtttcaaaaacctgctcaagatgactcgcaaaaagcttaatgagtatgagaacggcgagttctcatttcatggcgatctcaaaaccagccagttcgagatggatatacagatcaataagctgaagcacaagatcgatgacctgacggccgaattggaaactgccggaagtaagtgtctccacctcgacaccaaaaatcagatattgcaggaggaattgctgtccatgaagacggtccaaaagaaatgcgagaagctgcagaagaataaaaagaaactcgagcaagaggtgattaatctacggagtcacattgagaggaatatggtggagctgggtcaggtcaagcagtataagcaggaaatcgaggaacgggctcgacaagaaatagctgaaaagcttaaggaggtaaatttgttccttcaagcacaggcagcttcacaagagaacctagaacagttcagagaaaataatttcgcctcaatgaagagccagatggagcttcgaatcaaagatctggagtctgaactcagcaagattaagacgagccaggaggatttcaacaaaaccgagttagagaaatacaagcaactgtacctggaggagctgaaggtccggaaaagcttgtcatccaagctgacaaaaacaaatgaacgactggccgaggtgaatactaaactgctggtcgagaaacagcagtctcgttccttatttaccaccttgaccacccgaccagtgatggagcctccctgtgttggcaatttaaataactcactggatctcaaccgcaaattaatcccaagggaaaacctcgtgattagcacttcgaaccctagagccagcaataattccatggagaactatctgagcaaaatgcagcaggagctggaaaagaacattacccgagaacttaaagaagcagccgctgagctagaatcaggatcgatagcatctcccctgggttctaccgatgagtcaaacctgaatcaagacttggtatggaaagcctcacgggagtatgtgcaggtgctgaaaaaaaattatatgatcta

SEQ ID NO: 291153 - DNA, 5181 bp, Artificial Sequence
  derived and/or modified sequence
atgaagaagatcttcagcaagaagggcgagagccccctgggcagcttcgccagaagacagagaagcagcgccggcggcggcggcgagcccggcgagggcgcctacagccagcccggctaccacgtgagagacagagacctgggcaagatccacaaggccgccagcgccggcaacgtggccaaggtgcagcagatcctgctgctgagaaagaacggcctgaacgacagagacaagatgaacagaaccgccctgcacctggcctgcgccaacggccaccccgaggtggtgaccctgctggtggacagaaagtgccagctgaacgtgtgcgacaacgagaacagaaccgccctgatgaaggccgtgcagtgccaggaggagaagtgcgccaccatcctgctggagcacggcgccgaccccaacctggccgacgtgcacggcaacaccgccctgcactacgccgtgtacaacgaggacatcagcgtggccaccaagctgctgctgtacgacgccaacatcgaggccaagaacaaggacgacctgacccccctgctgctggccgtgagcggcaagaagcagcagatggtggagttcctgatcaagaagaaggccaacgtgaacgccgtggacaagctggagagcagccaccagctgatcagcgagtacaaggaggagagaatccccaagcacagcagccagaacagcaacagcgtggacgagagcagcgaggacagcctgagcagcctgttctacttcatcttcttcgagaccaagagctgcaccgtggcccaggccggcgtgctgcagcacgacctgagcagcctgcagagcctgctgcccggcttcacccagttcttctgcctgcacctgcccagcagctgggaccacagactgagcggcaagcccggcgtggacgacagctggcccaccagcgacgacgaggacctgaacttcgacaccaagaacgtgcccaagcccagcctggccaagctgatgaccgccagccagcagagcagaaagaacctggaggccacctacggcaccgtgagaaccggcaacagaaccctgttcgaggacagagacagcgacagccaggacgaggtggtggtggagagcctgcccaccaccagcatcaaggtgcagtgcttcagccaccccacctaccagagccccgacctgctgcccaagcccagccacaagagcctggccaaccccggcctgatgaaggaggagcccaccaagcccggcatcgccaagaaggagaacggcatcgacatcatcgagagcgcccccctggagcagaccaacaacgacaacctgacctacgtggacgaggtgcacaagaacaacagaagcgacatgatgagcgccctgggcctgggccaggaggaggacatcgagagcccctgggacagcgagagcatcagcgagaacttcccccagaagtacgtggaccccctggccggcgccgccgacggcaaggagaagaacatcggcaacgagcaggccgaggagagccccgagagatacctgcacctgaagcccaccatcgagatgaaggacagcgtgcccaacaaggccggcggcatgaaggacgtgcagaccagcaaggccgccgagcacgacctggaggtggccagcgaggaggagcaggagagagagggcagcgagaacaaccagccccaggtggaggaggagagaaagaagcacagaaacaacgagatggaggtgagcgccaacatccacgacggcgccaccgacgacgccgaggacgacgacgacgacgacggcctgatccagaagagaaagagcggcgagaccgaccaccagcagttccccagaaaggagaacaaggagtacgccagcagcggccccgccctgcagatgaaggaggtgaagagcaccgagaaggagaagagaaccagcaaggagagcgtgaacagccccgtgttcggcaaggccagcctgctgaccggcggcctgctgcaggtggacgacgacagcagcctgagcgagatcgacgaggacgagggcagacccaccaagaagaccagcaacgagaagaacaaggtgaagaaccagatccagagcatggacgacgtggacgacctgacccagagcagcgagaccgccagcgaggactgcgagctgccccacagcagctacaagaacttcatgctgctgatcgagcagctgggcatggagtgcaaggacagcgtgagcctgctgaagatccaggacgccgccctgagctgcgagagactgctggagctgaagaagaaccactgcgagctgctgaccgtgaagatcaagaagatggaggacaaggtgaacgtgctgcagagagagctgagcgagaccaaggagatcaagagccagctggagcaccagaaggtggagtgggagagagagctgtgcagcctgagattcagcctgaaccaggaggaggagaagagaagaaacgccgacaccctgtacgagaagatcagagagcagctgagaagaaaggaggagcagtacagaaaggaggtggaggtgaagcagcagctggagctgagcctgcagaccctggagatggagctgagaaccgtgaagagcaacctgaaccaggtggtgcaggagagaaacgacgcccagagacagctgagcagagagcagaacgccagaatgctgcaggacggcatcctgaccaaccacctgagcaagcagaaggagatcgagatggcccagaagaagatgaacagcgagaacagccacagccacgaggaggagaaggacctgagccacaagaacagcatgctgcaggaggagatcgccatgctgagactggagatcgacaccatcaagaaccagaaccaggagaaggagaagaagtgcttcgaggacctgaagatcgtgaaggagaagaacgaggacctgcagaagaccatcaagcagaacgaggagaccctgacccagaccatcagccagtacaacggcagactgagcgtgctgaccgccgagaacgccatgctgaacagcaagctggagaacgagaagcagagcaaggagagactggaggccgaggtggagagctaccacagcagactggccgccgccatccacgacagagaccagagcgagaccagcaagagagagctggagctggccttccagagagccagagacgagtgcagcagactgcaggacaagatgaacttcgacgtgagcaacctgaaggacaacaacgagatcctgagccagcagctgttcaagaccgagagcaagctgaacagcctggagatcgagttccaccacaccagagacgccctgagagagaagaccctgggcctggagagagtgcagaaggacctgagccagacccagtgccagatgaaggagatggagcagaagtaccagaacgagcaggtgaaggtgaacaagtacatcggcaagcaggagagcgtggaggagagactgagccagctgcagagcgagaacatgctgctgagacagcagctggacgacgcccacaacaaggccgacaacaaggagaagaccgtgatcaacatccaggaccagttccacgccatcgtgcagaagctgcaggccgagagcgagaagcagagcctgctgctggaggagagaaacaaggagctgatcagcgagtgcaaccacctgaaggagagacagtaccagtacgagaacgagaaggccgagagagaggtggtggtgagacagctgcagcaggagctggccgacaccctgaagaagcagagcatgagcgaggccagcctggaggtgaccagcagatacagaatcaacctggaggacgagacccaggacctgaagaagaagctgggccagatcagaaaccagctgcaggaggcccaggacagacacaccgaggccgtgagatgcgccgagaagatgcaggaccacaagcagaagctggagaaggacaacgccaagctgaaggtgaccgtgaagaagcagatggacaagatcgaggagctgcagaagaacctgctgaacgccaacctgagcgaggacgagaaggagcagctgaagaagctgatggagctgaagcagagcctggagtgcaacctggaccaggagatgaagaagaacgtggagctggagagagagatcaccggcttcaagaacctgctgaagatgaccagaaagaagctgaacgagtacgagaacggcgagttcagcttccacggcgacctgaagaccagccagttcgagatggacatccagatcaacaagctgaagcacaagatcgacgacctgaccgccgagctggagaccgccggcagcaagtgcctgcacctggacaccaagaaccagatcctgcaggaggagctgctgagcatgaagaccgtgcagaagaagtgcgagaagctgcagaagaacaagaagaagctggagcaggaggtgatcaacctgagaagccacatcgagagaaacatggtggagctgggccaggtgaagcagtacaagcaggagatcgaggagagagccagacaggagatcgccgagaagctgaaggaggtgaacctgttcctgcaggcccaggccgccagccaggagaacctggagcagttcagagagaacaacttcgccagcatgaagagccagatggagctgagaatcaaggacctggagagcgagctgagcaagatcaagaccagccaggaggacttcaacaagaccgagctggagaagtacaagcagctgtacctggaggagctgaaggtgagaaagagcctgagcagcaagctgaccaagaccaacgagagactggccgaggtgaacaccaagctgctggtggagaagcagcagagcagaagcctgttcaccaccctgaccaccagacccgtgatggagcccccctgcgtgggcaacctgaacaacagcctggacctgaacagaaagctgatccccagagagaacctggtgatcagcaccagcaaccccagagccagcaacaacagcatggagaactacctgagcaagatgcagcaggagctggagaagaacatcaccagagagctgaaggaggccgccgccgagctggagagcggcagcatcgccagccccctgggcagcaccgacgagagcaacctgaaccaggacctggtgtggaaggccagcagagagtacgtgcaggtgctgaagaagaactacatgatctag

SEQ ID NO: 291154 - DNA, 1700 bp, Artificial Sequence
  derived and/or modified sequence
tccgtttccggctggctgagtactggggtccagaaagtgatcgctgccgtggtcgccatggggaagtcggattttcttactcccaaggctatcgccaacaggatcaagtccaaggggctgcagaagctacgctggtattgccagatgtgccagaagcagtgccgggacgagggaattccgaaatgactttctagaacttctcaggagacgctttggcactaaaagggtccacaacaacattgtctacaacgaatacatcagccaccgagagcacatccacatgaatgccactcagtgggaaactctgactgattttactaagtggctgggcagagaaggcttgtgcaaagtggacgagacaccaaaaggctggtatattcagtacatagacagggacccagaaactatccgccggcaactggaactggagaaaaagaaaaagcaggaccttgatgatgaagaaaaaactgccaaatttattgaagagcaagtgagaagaggcctggaagggaaggaacaggaggtccctacttttacggaattaagcagagaaaatgatgaagagaaagtcacgtttaatttgagtaaaggagcatgtagctcatccggagcaacatcttccaagtcaagtactctgggaccgagtgcactgaagacgataggaagttcagcatcagtgaaacgaaaagaatcttcccagagctcaactcagtctaaagaaaagaagaaaaagaaatctgcactggatgaaatcatggagattgaagaggaaaagaaaagaactgcccgaacagactactggctacagcctgaaattattgtgaaaattataaccaagaaactgggagagaaatatcataagaaaaaggctattgttaaggaagtaattgacaaatatacagctgttgtgaagatgattgattctggagacaagctgaaacttgaccagactcatttagagacagtaattccagcaccaggaaaaagaattctagttttaaatggaggctacagaggaaatgaaggtaccctagaatccatcaatgagaagactttttcagctactatcgtcattgaaactgtaagtttgtttacacaaagacagaaatttcaaaatgctttaaaaatgtgccatagttttttttaattggattgttctttattttagaatttgagttttttgttagccttctatcctatttggaaatctgtaagcttattttctccagtgactctgccattgctaaagtattttattttctgattataaaagaaatgtgtactcatgcataaaaccccaaaaaacataatttaatataaataattataaaaattaatcatagtcccccagcccaacaataaaccccattaatattttggtctgttcctttccaatcttggtgttttatgaaagtgtgtgtaataggtacagttttatatccttttttcccctcatatcgaatataaaactcaatttggcatagtaaagttagtgggggaagtaaagtcattgtcaagagggagggaaccacagaggtcaaccactttttaaaatgtctccccttttttcataaaggatttaaggtagcagagatcaatacagtaatttaaagaactctgacttataaataaagttggttattgacttagaactgatatttcactcacaggtctgtgagtgaggtctgagatatcttcag

SEQ ID NO: 291155 - protein, 288 aa, Artificial Sequence
  derived and/or modified sequence
MNATQWETLTDFTKWLGREGLCKVDETPKGWYIQYIDRDPETIRRQLELEKKKKQDLDDEEKTAKFIEEQVRRGLEGKEQEVPTFTELSRENDEEKVTFNLSKGACSSSGATSSKSSTLGPSALKTIGSSASVKRKESSQSSTQSKEKKKKKSALDEIMEIEEEKKRTARTDYWLQPEIIVKIITKKLGEKYHKKKAIVKEVIDKYTAVVKMIDSGDKLKLDQTHLETVIPAPGKRILVLNGGYRGNEGTLESINEKTFSATIVIETVSLFTQRQKFQNALKMCHSFF

SEQ ID NO: 291156 - DNA, 867 bp, Artificial Sequence
  derived and/or modified sequence
atgaacgcgactcaatgggagaccctcaccgactttacaaagtggttaggccgagagggcctgtgtaaggtcgacgaaactcctaaaggctggtatatccagtacattgacagagatcccgaaaccatccgacggcagttagaactggagaaaaagaaaaaacaggacctcgatgatgaagagaagacggctaagtttattgaagagcaagtgcgtaggggattggagggaaaagagcaagaagtgcccacttttacggaattgtcccgtgagaatgatgaggagaaggttacatttaacttatcaaagggcgcgtgctcatcctcaggggcaacctcatccaagtccagcactctggggcccagcgctctgaaaaccatcggaagttccgcgtccgtaaaacgcaaggaatcctcccagagttcaacccaatctaaggagaaaaaaaaaaagaagagcgctctggatgagatcatggagattgaggaggaaaaaaaacggacagcccgcacggactactggctgcagcccgaaattatcgtgaagatcattaccaaaaaactaggcgagaagtatcacaagaagaaagccattgtgaaagaagtcatagacaagtacactgcggtcgtgaagatgattgatagcggggacaaactcaagttagatcaaacacatctggaaacagtaattccggcgcctgggaagagaatactcgtgctcaatggcgggtacagaggtaatgagggtaccttagaatccattaacgagaagacattctcagctacaattgtaatcgagacagtgtcacttttcacccagagacagaaattccagaacgccctgaagatgtgccactcttttttttag

SEQ ID NO: 291157 - DNA, 867 bp, Artificial Sequence
  derived and/or modified sequence
atgaatgccacccagtgggagaccctgacagacttcaccaagtggctgggccgggagggcctgtgcaaggtggatgagacccccaagggctggtacatccagtacatcgaccgggaccctgagaccatccggcggcagctggagctggagaagaagaagaagcaggacctggatgatgaggagaagacagccaagttcatcgaggagcaggtgcggcggggcctggagggcaaggagcaggaggtgcccaccttcacagagctgagcagagaaaatgatgaggagaaggtgaccttcaacctgagcaaaggagcctgcagcagcagcggggccaccagcagcaagagcagcaccctgggccccagcgccctgaagaccatcggcagcagcgcctctgtgaagaggaaggagagcagccagagcagcacccagagcaaggagaagaagaagaagaagagcgccctggatgagatcatggagattgaggaggagaagaagaggacagccaggacagactactggctgcagcctgagatcatcgtgaagatcatcaccaagaagctgggggagaagtaccacaagaagaaggccatcgtgaaggaggtgattgacaagtacacagctgtggtgaagatgattgattctggggacaagctgaagctggaccagacccacctggagaccgtcatcccagcccctgggaagaggatcctggtgctgaatggaggctacagaggaaatgaaggcaccctggagagcatcaatgagaagaccttcagcgccaccatcgtgattgaaacagtgtccctcttcacccagaggcagaagttccagaatgccctgaagatgtgccacagcttcttctag

SEQ ID NO: 291158 - DNA, 867 bp, Artificial Sequence
  derived and/or modified sequence
atgaacgccacccagtgggagaccctgaccgacttcaccaagtggttaggacgggaagggctgtgcaaggtggatgagactcctaaaggctggtatattcagtatattgaccgcgaccctgagactattagacgccaattagagctggagaaaaagaaaaagcaggatctcgatgatgaggagaagacggcaaagtttatcgaagaacaagtgagaagagggctcgaaggaaaagaacaggaggtgcctactttcacagagttaagcagagagaatgacgaggagaaggtcacgttcaatctatctaaaggagcctgcagctcctcgggtgcaaccagttccaagtctagcacattaggaccttctgcactcaagacaataggctcttccgcaagcgtcaaacgtaaagagtcctcccagagctcaacgcagagcaaggagaaaaagaaaaaaaagtctgccctggacgagattatggagatagaagaggaaaagaagcgaactgctagaaccgactattggttgcagccagagattatagttaagattatcactaaaaaactgggggaaaaataccacaaaaagaaggccattgtgaaggaagttattgataaatataccgccgttgttaaaatgattgactccggcgataagcttaagctcgatcagacacacttggaaacagtgatccccgctccagggaaacgaatcctagttcttaacggaggctacaggggtaatgaaggtacgctggaatctattaacgagaagaccttcagtgcgacaattgtcattgaaacagtgagcctcttcacccaacggcagaaatttcagaatgctctgaaaatgtgccattcctttttttag

SEQ ID NO: 291159 - DNA, 867 bp, Artificial Sequence
  derived and/or modified sequence
atgaacgcaacgcaatgggaaacgctgaccgacttcacaaaatggctcggtcgcgagggactgtgcaaagtagatgaaacccctaaaggctggtacatacagtacatcgacagagacccggagacaatccgacgccagttggaactagagaaaaagaagaagcaggacttagatgatgaggagaagactgccaagttcatcgaggagcaggtacgacgaggactcgaaggcaaagagcaggaagtccctacctttacggaattatcacgggaaaatgacgaagaaaaagtgactttcaatttgtccaaaggggcttgctcttcctctggagcaaccagtagcaaaagttctaccctggggccaagtgctctgaaaactattggttcctcagcttccgtgaaaaggaaggaaagtagccagtcctcaacccagtccaaggagaagaagaagaagaagtctgctctggatgagatcatggagattgaggaggaaaaaaaaagaaccgcccgaacagactattggcttcagcccgaaattattgtcaaaattattaccaaaaagctgggagaaaaatatcacaagaaaaaggccatcgtgaaagaggtgatcgacaagtataccgccgtggttaagatgattgacagcggcgataagctgaagctggaccagactcacctagagaccgttatccctgctccagggaaacgaatactggtgcttaatggaggctataggggtaacgagggtacactggagtcgattaatgaaaagacattttctgcaactatagttatcgagaccgtcagcctgttcacacagcggcagaaattccaaaatgccctgaaaatgtgtcactctttcttttag

SEQ ID NO: 291160 - DNA, 867 bp, Artificial Sequence
  derived and/or modified sequence
atgaacgccacccagtgggagaccctgaccgacttcaccaagtggctgggcagagagggcctgtgcaaggtggacgagacccccaagggctggtacatccagtacatcgacagagaccccgagaccatcagaagacagctggagctggagaagaagaagaagcaggacctggacgacgaggagaagaccgccaagttcatcgaggagcaggtgagaagaggcctggagggcaaggagcaggaggtgcccaccttcaccgagctgagcagagagaacgacgaggagaaggtgaccttcaacctgagcaagggcgcctgcagcagcagcggcgccaccagcagcaagagcagcaccctgggccccagcgccctgaagaccatcggcagcagcgccagcgtgaagagaaaggagagcagccagagcagcacccagagcaaggagaagaagaagaagaagagcgccctggacgagatcatggagatcgaggaggagaagaagagaaccgccagaaccgactactggctgcagcccgagatcatcgtgaagatcatcaccaagaagctgggcgagaagtaccacaagaagaaggccatcgtgaaggaggtgatcgacaagtacaccgccgtggtgaagatgatcgacagcggcgacaagctgaagctggaccagacccacctggagaccgtgatccccgcccccggcaagagaatcctggtgctgaacggcggctacagaggcaacgagggcaccctggagagcatcaacgagaagaccttcagcgccaccatcgtgatcgagaccgtgagcctgttcacccagagacagaagttccagaacgccctgaagatgtgccacagcttcttctag

SEQ ID NO: 291161 - protein, 666 aa, Artificial Sequence
  derived and/or modified sequence
MGESSEDIDQMFSTLLGEMDLLTQSLGVDTLPPPDPNPPRAEFNYSVGFKDLNESLNALEDQDLDALMADLVADISEAEQRTIQAQKESLQNQHHSASLQASIFSGAASLGYGTNVAATGISQYEDDLPPPPADPVLDLPLPPPPPEPLSQEEEEAQAKADKIKLALEKLKEAKVKKLVVKVHMNDNSTKSLMVDERQLARDVLDNLFEKTHCDCNVDWCLYEIYPELQIERFFEDHENVVEVLSDWTRDTENKILFLEKEEKYAVFKNPQNFYLDNRGKKESKETNEKMNAKNKESLLEESFCGTSIIVPELEGALYLKEDGKKSWKRRYFLLRASGIYYVPKGKTKTSRDLACFIQFENVNIYYGTQHKMKYKAPTDYCFVLKHPQIQKESQYIKYLCCDDTRTLNQWVMGIRIAKYGKTLYDNYQRAVAKAGLASRWTNLGTVNAAAPAQPSTGPKTGTTQPNGQIPQATHSVSAVLQEAQRHAETSKDKKPALGNHHDPAVPRAPHAPKSSLPPPPPVRRSSDTSGSPATPLKAKGTGGGGLPAPPDDFLPPPPPPPPLDDPELPPPPPDFMEPPPDFVPPPPPSYAGIAGSELPPPPPPPPAPAPAPVPDSARPPPAVAKRPPVPPKRQENPGHPGGAGGGEQDFMSDLMKALQKKRGNVS

SEQ ID NO: 291162 - protein, 635 aa, Artificial Sequence
  derived and/or modified sequence
MGESSEDIDQMFSTLLGEMDLLTQSLGVDTLPPPDPNPPRAEFNYSVGFKDLNESLNALEDQDLDALMADLVADISEAEQRTIQAQKESLQNQHHSASLQASIFSGAASLGYGTNVAATGISQYEDDLPPPPADPVLDLPLPPPPPEPLSQEEEEAQAKADKIKLALEKLKEAKVKKLVVKVHMNDNSTKSLMVDERQLARDVLDNLFEKTHCDCNVDWCLYEIYPELQIERFFEDHENVVEVLSDWTRDTENKILFLEKEEKYAVFKNPQNFYLDNRGKKESKETNEKMNAKNKESLLEESFCGTSIIVPELEGALYLKEDGKKSWKRRYFLLRASGIYYVPKGKTKTSRDLACFIQFENVNIYYGTQHKMKYKAPTDYCFVLKHPQIQKESQYIKYLCCDDTRTLNQWVMGIRIAKYGKTLYDNYQRAVAKAGLASRWTNLGTVNAAAPAQPSTGPKTGTTQPNGQIPQATHSVSAVLQEAQRHAETSKDKKPALGNHHDPAVPRAPHAPKSSLPPPPPVRRSSDTSGSPATPLKAKGTGGGGLPAARARARPRPRLRQAAPRGGQEASCAPQEAREPRAPRRSRRRGARFHVRPHESFAKEERQRVLGTGMMSVPEGEASLTPSAGFASRLP

SEQ ID NO: 291163 - DNA, 2001 bp, Artificial Sequence
  derived and/or modified sequence
atgggcgagagcagcgaggacatcgaccagatgttcagcaccctgctgggcgagatggacctgctgacccagagcctgggcgtggacaccctgcccccccccgaccccaacccccccagagccgagttcaactacagcgtgggcttcaaggacctgaacgagagcctgaacgccctggaggaccaggacctggacgccctgatggccgacctggtggccgacatcagcgaggccgagcagagaaccatccaggcccagaaggagagcctgcagaaccagcaccacagcgccagcctgcaggccagcatcttcagcggcgccgccagcctgggctacggcaccaacgtggccgccaccggcatcagccagtacgaggacgacctgccccccccccccgccgaccccgtgctggacctgcccctgcccccccccccccccgagcccctgagccaggaggaggaggaggcccaggccaaggccgacaagatcaagctggccctggagaagctgaaggaggccaaggtgaagaagctggtggtgaaggtgcacatgaacgacaacagcaccaagagcctgatggtggacgagagacagctggccagagacgtgctggacaacctgttcgagaagacccactgcgactgcaacgtggactggtgcctgtacgagatctaccccgagctgcagatcgagagattcttcgaggaccacgagaacgtggtggaggtgctgagcgactggaccagagacaccgagaacaagatcctgttcctggagaaggaggagaagtacgccgtgttcaagaacccccagaacttctacctggacaacagaggcaagaaggagagcaaggagaccaacgagaagatgaacgccaagaacaaggagagcctgctggaggagagcttctgcggcaccagcatcatcgtgcccgagctggagggcgccctgtacctgaaggaggacggcaagaagagctggaagagaagatacttcctgctgagagccagcggcatctactacgtgcccaagggcaagaccaagaccagcagagacctggcctgcttcatccagttcgagaacgtgaacatctactacggcacccagcacaagatgaagtacaaggcccccaccgactactgcttcgtgctgaagcacccccagatccagaaggagagccagtacatcaagtacctgtgctgcgacgacaccagaaccctgaaccagtgggtgatgggcatcagaatcgccaagtacggcaagaccctgtacgacaactaccagagagccgtggccaaggccggcctggccagcagatggaccaacctgggcaccgtgaacgccgccgcccccgcccagcccagcaccggccccaagaccggcaccacccagcccaacggccagatcccccaggccacccacagcgtgagcgccgtgctgcaggaggcccagagacacgccgagaccagcaaggacaagaagcccgccctgggcaaccaccacgaccccgccgtgcccagagccccccacgcccccaagagcagcctgcccccccccccccccgtgagaagaagcagcgacaccagcggcagccccgccacccccctgaaggccaagggcaccggcggcggcggcctgcccgccccccccgacgacttcctgccccccccccccccccccccccccctggacgaccccgagctgcccccccccccccccgacttcatggagcccccccccgacttcgtgcccccccccccccccagctacgccggcatcgccggcagcgagctgccccccccccccccccccccccccgcccccgcccccgcccccgtgcccgacagcgccagacccccccccgccgtggccaagagaccccccgtgccccccaagagacaggagaaccccggccaccccggcggcgccggcggcggcgagcaggacttcatgagcgacctgatgaaggccctgcagaagaagagaggcaacgtgagctag

SEQ ID NO: 291164 - DNA, 1908 bp, Artificial Sequence
  derived and/or modified sequence
atgggcgagagcagcgaggacatcgaccagatgttcagcaccctgctgggcgagatggacctgctgacccagagcctgggcgtggacaccctgcccccccccgaccccaacccccccagagccgagttcaactacagcgtgggcttcaaggacctgaacgagagcctgaacgccctggaggaccaggacctggacgccctgatggccgacctggtggccgacatcagcgaggccgagcagagaaccatccaggcccagaaggagagcctgcagaaccagcaccacagcgccagcctgcaggccagcatcttcagcggcgccgccagcctgggctacggcaccaacgtggccgccaccggcatcagccagtacgaggacgacctgccccccccccccgccgaccccgtgctggacctgcccctgcccccccccccccccgagcccctgagccaggaggaggaggaggcccaggccaaggccgacaagatcaagctggccctggagaagctgaaggaggccaaggtgaagaagctggtggtgaaggtgcacatgaacgacaacagcaccaagagcctgatggtggacgagagacagctggccagagacgtgctggacaacctgttcgagaagacccactgcgactgcaacgtggactggtgcctgtacgagatctaccccgagctgcagatcgagagattcttcgaggaccacgagaacgtggtggaggtgctgagcgactggaccagagacaccgagaacaagatcctgttcctggagaaggaggagaagtacgccgtgttcaagaacccccagaacttctacctggacaacagaggcaagaaggagagcaaggagaccaacgagaagatgaacgccaagaacaaggagagcctgctggaggagagcttctgcggcaccagcatcatcgtgcccgagctggagggcgccctgtacctgaaggaggacggcaagaagagctggaagagaagatacttcctgctgagagccagcggcatctactacgtgcccaagggcaagaccaagaccagcagagacctggcctgcttcatccagttcgagaacgtgaacatctactacggcacccagcacaagatgaagtacaaggcccccaccgactactgcttcgtgctgaagcacccccagatccagaaggagagccagtacatcaagtacctgtgctgcgacgacaccagaaccctgaaccagtgggtgatgggcatcagaatcgccaagtacggcaagaccctgtacgacaactaccagagagccgtggccaaggccggcctggccagcagatggaccaacctgggcaccgtgaacgccgccgcccccgcccagcccagcaccggccccaagaccggcaccacccagcccaacggccagatcccccaggccacccacagcgtgagcgccgtgctgcaggaggcccagagacacgccgagaccagcaaggacaagaagcccgccctgggcaaccaccacgaccccgccgtgcccagagccccccacgcccccaagagcagcctgcccccccccccccccgtgagaagaagcagcgacaccagcggcagccccgccacccccctgaaggccaagggcaccggcggcggcggcctgcccgccgccagagccagagccagacccagacccagactgagacaggccgcccccagaggcggccaggaggccagctgcgccccccaggaggccagagagcccagagcccccagaagaagcagaagaagaggcgccagattccacgtgagaccccacgagagcttcgccaaggaggagagacagagagtgctgggcaccggcatgatgagcgtgcccgagggcgaggccagcctgacccccagcgccggcttcgccagcagactgccctag

SEQ ID NO: 291165 - DNA, 2001 bp, Artificial Sequence
  derived and/or modified sequence
atgggggaaagctccgaggacatcgatcagatgttcagcacgctgctcggcgaaatggatctgctgactcaatcattaggagtagacacgcttcccccaccagaccccaaccctccaagggcagagtttaattatagcgttggattcaaggacctgaacgaaagcctcaacgccctggaggaccaagatctggatgcattgatggctgacctggtggccgacatttctgaggctgaacaacgcactatccaggcacagaaagaatctctgcagaaccaacatcattctgcttcgctgcaagcaagtatcttctcgggtgccgcttcactggggtatggcaccaatgtggctgccactgggatatcccagtacgaggatgacctgcccccccctcccgccgatccagtgttggatcttccgctgcctccgcccccaccagagcccctgtctcaggaggaggaagaagcccaggccaaggcagataaaatcaagctagccctggaaaaattgaaggaagcgaaagtgaagaagctggttgtgaaggtccacatgaatgataatagtacaaagtcactcatggtggatgagagacaactggctagggacgtgctggacaacttgttcgaaaaaacacactgcgattgcaatgtggactggtgcttatatgaaatctatccggaactgcaaatcgagaggtttttcgaagatcacgagaatgtggtggaggttttatccgattggacacgggacactgagaacaaaattctgttccttgaaaaggaagagaagtacgccgtatttaagaacccccagaatttttacctcgataacagagggaagaaagaaagtaaagaaaccaacgagaaaatgaacgctaagaataaagagagccttcttgaggaaagtttttgtgggacttccattatcgtgcctgagcttgagggggccttgtatttgaaagaggatggcaagaaatcctggaaaaggagatatttcctgctcagggcctcaggtatctactacgtgcctaagggaaagacgaaaacaagcagagatcttgcctgctttattcagttcgagaatgtaaatatctattacggaacccagcataagatgaagtacaaggcccccactgactactgctttgtcctcaagcatcctcagattcaaaaagaaagtcaatacattaagtacttgtgttgtgacgatacacgcacattaaaccaatgggttatggggatcaggattgccaaatacggaaaaaccctgtacgacaattaccaaagagccgtggcaaaggcaggactggcgagccgctggactaacttagggaccgtgaatgccgctgctcccgcccaaccaagcacagggcctaaaaccggtacaacacaaccaaatgggcagatacctcaggccactcactcagtgtctgctgtactgcaagaggcacaacgacatgccgaaaccagtaaagataagaaacccgccctgggcaaccatcatgaccccgccgtccccagagctccccacgccccaaagtcttcgcttcccccgcctcccccagtaaggcggagctctgatactagtggcagtccagcaacaccactgaaggccaaagggactggtggaggggggttaccggcccctcctgatgatttcctgccaccccctccgccccctccccccctcgatgatcccgagctgcctccacccccacccgatttcatggaaccccccccggatttcgttccaccgccacccccatcttacgccgggatcgcgggctcagaattacctcccccgccccctccccctcccgcacctgcgccagcacccgtccccgattcagctaggccccctccggctgttgcgaaaagaccaccggtcccaccaaagcgccaggagaatccaggccacccaggaggtgccgggggtggggagcaggacttcatgtcagacctaatgaaggcgctccaaaagaagagagggaatgtgtcttag

SEQ ID NO: 291166 - DNA, 1908 bp, Artificial Sequence
  derived and/or modified sequence
atgggtgagagcagcgaagacatcgaccagatgtttagcacactcctgggtgagatggacctactgacccagagcctgggcgtagatactcttccaccccccgaccccaatcccccacgtgctgaatttaattattcggtgggatttaaggatctgaacgagtctttgaatgctttggaagaccaggacctggatgccttgatggcagatcttgtagccgatatatccgaggcggagcagaggactatacaggctcagaaagagagtttgcagaatcagcaccattctgcgagtctccaggccagtatcttctctggtgctgccagcctcggctatgggaccaatgttgcagcgacaggcatctctcagtacgaagacgacctgcctccaccacccgcagatcctgtgctggatcttccactgccccccccaccccccgagcctctttcccaggaagaggaggaagctcaggccaaggctgataagattaaacttgccctggaaaagctgaaggaagccaaagtcaaaaagctggtagtcaaggtgcacatgaacgacaatagtacaaagagtctcatggttgacgagcgccaactcgcgcgagacgtgctcgacaacctgtttgagaagacccactgtgattgcaacgtggactggtgtctgtatgagatctatccggagctgcaaattgagaggttctttgaggatcatgaaaacgtagttgaggttctcagtgactggactagagatacagagaacaaaatccttttcttagagaaggaagagaagtatgccgtgttcaaaaacccacagaatttttacctcgataaccggggcaagaaggagtcaaaagaaacgaacgagaagatgaacgctaagaacaaggaatcactgctggaggaatctttttgtggcacctctattatcgtcccagagctcgagggcgcactgtatcttaaagaagatggaaagaagtcctggaagaggagatacttcttgctgcgcgcaagcgggatatactacgtgccaaaaggaaaaaccaagacctcaagggacttagcttgcttcattcagtttgaaaacgtcaacatctactatggcacgcagcataaaatgaagtataaggcacccacagattattgctttgtgctcaagcacccgcagatacagaaagaaagccagtatatcaaatatctatgctgtgacgacacacgcaccctcaatcaatgggttatgggaattaggatcgcaaagtacggcaagaccttatatgacaattatcagagagccgtggccaaggcagggctcgcctcaaggtggacaaatctgggcactgttaatgccgctgctccagctcagcctagcacaggtccgaaaacagggactacccaaccaaacggccagatcccgcaggctacccactccgtgtctgcagtcttgcaggaggcacagaggcatgctgagacaagcaaagacaaaaagccagcccttggtaatcaccatgatccggccgtgcctcgcgcgcctcatgcgcctaagtcctcacttcctcctcccccccccgtgaggcggtcttctgacacttctggctctcccgcaactccgcttaaggcaaagggcactggaggcggcgggcttcctgctgcccgagcacgggccaggccaagaccaagattgcggcaagctgcgcccagaggcggccaggaggcaagctgtgccccccaggaggctcgggaacccagagcacctaggaggtctcggcggcggggggcccggttccacgtgagaccgcacgaaagcttcgcaaaggaagagagacagcgcgtgctcggcacaggcatgatgtccgtcccagaaggcgaggcgtctctgaccccatcggctggcttcgcgagtcggctgccctag

SEQ ID NO: 291167 - DNA, 2001 bp, Artificial Sequence
  derived and/or modified sequence
atgggagagagcagcgaggacatcgaccagatgttcagcaccctgctgggggagatggacctgctgacccagagcctgggcgtggacaccctgcccccaccagaccccaacccccccagggctgagttcaactacagcgtgggcttcaaggacctgaatgaaagcctgaatgccctggaggaccaggacctggatgccctgatggctgacctggtggccgacatcagcgaggccgagcagaggaccatccaggcccagaaggagagcctgcagaaccagcaccacagcgccagcctgcaggccagcatcttctctggagctgccagcctgggctacggcaccaacgtggccgccaccggcatcagccagtatgaagatgacctgcccccacctcctgctgaccctgtgctggacctgcccctgcccccacctcctcctgagcccctgagccaggaggaggaggaggcccaggccaaggctgacaagatcaagctggccctggagaagctgaaggaggccaaggtgaagaagctggtggtgaaggtgcacatgaatgacaacagcaccaagagcctgatggtggatgagcggcagctggccagagatgtgctggacaacctgtttgagaagacccactgtgactgcaatgtggactggtgcctgtatgagatctacccagagctgcagatcgagcgcttctttgaagatcatgaaaatgtggtggaggtgctgagtgactggacccgggacacagagaacaagatcctcttcctggagaaggaggagaagtatgctgtgttcaagaacccccagaacttctacctggacaacagaggcaagaaggagagcaaggagaccaatgagaagatgaatgccaagaacaaggagagcctgctggaggagagcttctgtggcaccagcatcatcgtgcctgagctggagggcgccctgtacctgaaggaggatggcaagaagtcctggaagaggcgctacttcctgctgcgggccagcggcatctactacgtgcccaagggcaagaccaagaccagccgggacctggcctgcttcatccagtttgaaaatgtgaacatctactacggcacccagcacaagatgaagtacaaggcccccacagactactgctttgtgctgaagcacccccagatccagaaggagagccagtacatcaagtacctgtgctgtgatgacaccaggaccctgaaccagtgggtgatgggcatccgcatcgccaagtatggcaagaccctgtatgacaactaccagagagctgtggccaaggccggcctggccagccgctggaccaacctgggcaccgtgaatgctgctgccccagcccagcccagcacaggccccaagacaggcaccacccagcccaacggccagatcccccaggccacccacagcgtgtctgctgtgctgcaggaggcccagagacatgctgagaccagcaaggacaagaagccagccctgggcaaccaccacgaccctgctgtgccccgggccccccacgcccccaagagcagcctgcccccacctcctcctgtgagaagaagcagtgacaccagcggcagccctgccacccccctgaaggccaagggcactggaggcggcggcctgcctgcccccccagatgacttcctgcccccacctcctcctcctccacccctggatgatcctgagctgcccccacctcctccagacttcatggagcccccaccagactttgtgcccccacctcctccttcctatgccggcattgctggcagcgagctgcccccacctcctcctcctcctccagccccagccccagcccctgtgcctgacagcgcccggcccccacctgctgtggccaagaggcctcctgtgccccccaagaggcaggagaaccctggccaccctgggggcgccggcggcggggagcaggacttcatgtctgacctgatgaaggccctgcagaagaagagaggaaatgtgtcctag

SEQ ID NO: 291168 - DNA, 1908 bp, Artificial Sequence
  derived and/or modified sequence
atgggagagagcagcgaggacatcgaccagatgttcagcaccctgctgggggagatggacctgctgacccagagcctgggcgtggacaccctgcccccaccagaccccaacccccccagggctgagttcaactacagcgtgggcttcaaggacctgaatgaaagcctgaatgccctggaggaccaggacctggatgccctgatggctgacctggtggccgacatcagcgaggccgagcagaggaccatccaggcccagaaggagagcctgcagaaccagcaccacagcgccagcctgcaggccagcatcttctctggagctgccagcctgggctacggcaccaacgtggccgccaccggcatcagccagtatgaagatgacctgcccccacctcctgctgaccctgtgctggacctgcccctgcccccacctcctcctgagcccctgagccaggaggaggaggaggcccaggccaaggctgacaagatcaagctggccctggagaagctgaaggaggccaaggtgaagaagctggtggtgaaggtgcacatgaatgacaacagcaccaagagcctgatggtggatgagcggcagctggccagagatgtgctggacaacctgtttgagaagacccactgtgactgcaatgtggactggtgcctgtatgagatctacccagagctgcagatcgagcgcttctttgaagatcatgaaaatgtggtggaggtgctgagtgactggacccgggacacagagaacaagatcctcttcctggagaaggaggagaagtatgctgtgttcaagaacccccagaacttctacctggacaacagaggcaagaaggagagcaaggagaccaatgagaagatgaatgccaagaacaaggagagcctgctggaggagagcttctgtggcaccagcatcatcgtgcctgagctggagggcgccctgtacctgaaggaggatggcaagaagtcctggaagaggcgctacttcctgctgcgggccagcggcatctactacgtgcccaagggcaagaccaagaccagccgggacctggcctgcttcatccagtttgaaaatgtgaacatctactacggcacccagcacaagatgaagtacaaggcccccacagactactgctttgtgctgaagcacccccagatccagaaggagagccagtacatcaagtacctgtgctgtgatgacaccaggaccctgaaccagtgggtgatgggcatccgcatcgccaagtatggcaagaccctgtatgacaactaccagagagctgtggccaaggccggcctggccagccgctggaccaacctgggcaccgtgaatgctgctgccccagcccagcccagcacaggccccaagacaggcaccacccagcccaacggccagatcccccaggccacccacagcgtgtctgctgtgctgcaggaggcccagagacatgctgagaccagcaaggacaagaagccagccctgggcaaccaccacgaccctgctgtgccccgggccccccacgcccccaagagcagcctgcccccacctcctcctgtgagaagaagcagtgacaccagcggcagccctgccacccccctgaaggccaagggcactggaggcggcggcctgcctgctgcccgggcccgggcccggccccggccccggctgcggcaggccgccccccggggcggccaggaggccagctgtgccccccaggaggcccgggagccccgggccccccggcgcagcagaagaagaggagcccgcttccacgtgcggccccatgagagctttgccaaggaggagcggcagagggtgctgggcaccggcatgatgtctgtgcctgagggggaggccagcctgaccccatctgctggctttgccagccggctgccctag

SEQ ID NO: 291169 - DNA, 2771 bp, Artificial Sequence
  derived and/or modified sequence
agtccagccctgcaccgcgtcccctgagggcgggctgcaggcggccgggaagccttgcacaaccggcccaaaagaggaagcccagaaagtgctgaagtaaacactttgggagaccgttgcaacataaagcggcctctcagtctttggtggaaccatcactaggccccaatcccttagtccctcttgcgtcgaggctgcaaaatggttccattcgccaggagacgctcctgagagaagggcgcgcgcggcacaggggccttccttgcacctcggagcaaagcagctcggatagcgccacacgtctgcgcgctgcgtgggaagggcagggctgacagcacttcctccccggggcagcgacctggagcccgggtgcggcagtctgcaccgcgcgtcgctttcccggccggagtctcgccgccttcccgcgccccgcagcgccccgcagagcagtcgagatgggtgagtcaagtgaagacatagaccaaatgttcagcactttgctgggagagatggatcttctgactcagagtttaggagttgacactctccctcctcctgaccctaatccacccagagctgaatttaactacagtgtggggtttaaagatttaaatgagtccttaaatgcactggaagaccaagatttagatgctctcatggcagatctggtagcagacataagtgaggctgagcagaggacaatccaggcacagaaagagtccttgcagaatcaacatcattcagcatctctacaagcatcaattttcagtggtgcagcctctcttggttatggaacaaatgttgctgccactggtatcagccaatatgaggatgacttaccacctccaccagccgatcctgtgttagaccttccactgccaccaccacctcctgaacctctctctcaggaagaggaagaagcccaagccaaggctgataaaattaagctggcgctggaaaaactgaaggaggccaaggttaagaagctcgtcgtcaaggtgcacatgaatgataacagcacaaagtcactgatggtggatgagcggcagctggcccgagatgttctggacaaccttttcgagaaaactcattgtgactgcaatgtagactggtgtctttatgaaatctacccggaactacaaattgagaggttttttgaagaccatgaaaatgttgttgaagtcttatcagactggacaagagacacagaaaataaaatactatttttggagaaagaggagaaatatgctgtatttaaaaacccccagaatttctacttggataacagaggaaaaaaagaaagcaaggaaactaatgagaaaatgaatgctaagaacaaggaatccttacttgaggaaagtttctgtggaacatctatcattgtaccagaactggaaggagctctttatttgaaagaagatggaaagaaatcctggaaaaggcgctattttcttttacgggcttctggaatttattatgtacccaaaggaaagactaagacatctcgagatctggcgtgttttatacagtttgaaaatgtcaacatttactatgggactcagcataaaatgaaatataaagcgcccactgactattgctttgttttaaagcacccccaaattcagaaggagtcccagtatatcaagtatctctgctgtgatgacacaagaacccttaaccagtgggtcatgggaatacggatagccaagtatgggaagactctctatgataactaccagcgggctgtggcaaaggctggacttgcctctcggtggacaaacttggggacagtcaatgcagctgcaccagctcagccatctacaggacctaaaacaggcaccacccagcccaatggacagattccccaggctacacattctgtcagtgctgttctccaagaggcccagagacatgctgaaacatcgaaggataagaagccagccctcgggaaccaccacgacccggcagtgccccgggccccgcacgcccccaagtccagcctgcccccgccccctccggtgcggaggtcctccgacaccagcggcagtcccgccacgcccctcaaggccaagggcacaggcggcgggggcttgcccgccccacccgacgacttcctgccgccgccgccaccgccgccgcccctcgatgaccctgagctcccgccgccgcccccggacttcatggagccgcccccagacttcgtgcccccgcccccgccgtcgtacgcagggatcgcgggctcagagctgcccccgccgccgccgccgccgcccgcgcccgcgcccgcccccgtccccgactccgccaggccgccccccgcggtggccaagaggcctcctgtgccccccaagaggcaagagaacccagggcaccccggcggagcaggaggcggggagcaagatttcatgtcagacctcatgaaagctttgcaaaagaagagaggcaacgtgtcctagggacgggcatgatgagtgttccagagggagaagcatcgctgaccccgagcgcaggttttgctagcagattgccctgacatcttgttcatttcagataaaatgtgatgggaaacttctcactgatgtgctcaagtacaggcataaccattaacccagtagagttcagaatatctgcccaaatgtacatatcgttcccatgtattttaacctaaatggaatgtatcttcccttccaagctgcctaaagcgctgttttaggttcatttattttattatgttcagaagcatcaaataaaagttaaacgtttttccggaa

SEQ ID NO: 291170 - DNA, 2789 bp, Artificial Sequence
  derived and/or modified sequence
agcgactttctctcaggaaactccactcccaactgacaggtgctatttccagccagtcctatgctgttgcaaatagtgagtccatgaatgccctctgccgtgtgcattacttattttcatcagcagatcttcgtaacacactcctggaagtgggatgacggggtcaaaaggcgaatccatacataagttaaatagatattgctcaattctcttccacggggttcagaccattttggatttctacgagcaatgaagacagtgctattcctctacaccctggccggccaactgagcgtggttaaacgtggggagggaggagggtgaggttaccaacctgatggttgagaaagggcctccgcccagcgcgcccttcctccacccccacccgagagacagctgaactccggccgggacgcgcgtgttgccagtccagccctgcaccgcgtcccctgagggcgggctgcaggcggccgggaagccttgcacaaccggcccaaaagaggaagcccagaaagtgctgaagtaaacactttgggagaccgttgcaacataaagcggcctctcagtctttggtggaaccatcactaggccccaatcccttagtccctcttgcgtcgaggctgcaaaatggttccattcgccaggagacgctcctgagagaagggcgcgcgcggcacaggggccttccttgcacctcggagcaaagcagctcggatagcgccacacgtctgcgcgctgcgtgggaagggcagggctgacagcacttcctccccggggcagcgacctggagcccgggtgcggcagtctgcaccgcgcgtcgctttcccggccggagtctcgccgccttcccgcgccccgcagcgccccgcagagcagtcgagatgggtgagtcaagtgaagacatagaccaaatgttcagcactttgctgggagagatggatcttctgactcagagtttaggagttgacactctccctcctcctgaccctaatccacccagagctgaatttaactacagtgtggggtttaaagatttaaatgagtccttaaatgcactggaagaccaagatttagatgctctcatggcagatctggtagcagacataagtgaggctgagcagaggacaatccaggcacagaaagagtccttgcagaatcaacatcattcagcatctctacaagcatcaattttcagtggtgcagcctctcttggttatggaacaaatgttgctgccactggtatcagccaatatgaggatgacttaccacctccaccagccgatcctgtgttagaccttccactgccaccaccacctcctgaacctctctctcaggaagaggaagaagcccaagccaaggctgataaaattaagctggcgctggaaaaactgaaggaggccaaggttaagaagctcgtcgtcaaggtgcacatgaatgataacagcacaaagtcactgatggtggatgagcggcagctggcccgagatgttctggacaaccttttcgagaaaactcattgtgactgcaatgtagactggtgtctttatgaaatctacccggaactacaaattgagaggttttttgaagaccatgaaaatgttgttgaagtcttatcagactggacaagagacacagaaaataaaatactatttttggagaaagaggagaaatatgctgtatttaaaaacccccagaatttctacttggataacagaggaaaaaaagaaagcaaggaaactaatgagaaaatgaatgctaagaacaaggaatccttacttgaggaaagtttctgtggaacatctatcattgtaccagaactggaaggagctctttatttgaaagaagatggaaagaaatcctggaaaaggcgctattttcttttacgggcttctggaatttattatgtacccaaaggaaagactaagacatctcgagatctggcgtgttttatacagtttgaaaatgtcaacatttactatgggactcagcataaaatgaaatataaagcgcccactgactattgctttgttttaaagcacccccaaattcagaaggagtcccagtatatcaagtatctctgctgtgatgacacaagaacccttaaccagtgggtcatgggaatacggatagccaagtatgggaagactctctatgataactaccagcgggctgtggcaaaggctggacttgcctctcggtggacaaacttggggacagtcaatgcagctgcaccagctcagccatctacaggacctaaaacaggcaccacccagcccaatggacagattccccaggctacacattctgtcagtgctgttctccaagaggcccagagacatgctgaaacatcgaaggataagaagccagccctcgggaaccaccacgacccggcagtgccccgggccccgcacgcccccaagtccagcctgcccccgccccctccggtgcggaggtcctccgacaccagcggcagtcccgccacgcccctcaaggccaagggcacaggcggcgggggcttgcccgccgcccgcgcccgcgcccgcccccgtccccgactccgccaggccgccccccgcggtggccaagaggcctcctgtgccccccaagaggcaagagaacccagggcaccccggcggagcaggaggcggggagcaagatttcatgtcagacctcatgaaagctttgcaaaagaagagaggcaacgtgtcctagggacgggcatgatgagtgttccagagggagaagcatcgctgaccccgagcgcaggttttgctagcagattgccctga

SEQ ID NO: 291171 - DNA, 2001 bp, Artificial Sequence
  derived and/or modified sequence
atgggcgagagcagcgaggacatcgaccagatgttcagcaccctgctgggcgagatggatttactgacccagtctctcggagtcgacacccttccgcctcctgatcccaatcctccgagggctgaattcaattattccgtaggtttcaaagacttgaacgagagcctgaacgctctggaagatcaagacttagatgccctcatggcagaccttgttgccgacatctcggaggcagagcagaggactatccaggcccagaaggagtcactgcagaaccagcaccactctgcaagcctgcaggcgagtatcttcagcggagcagcatccctgggctacgggaccaacgtggccgccacaggcatctcacagtatgaggatgatctgcccccaccccccgcagaccccgtgctagatttgcccctgcctccaccaccacctgagcctctgtctcaagaggaagaggaagcccaagcaaaggctgataagatcaaattagcactggagaagctcaaagaggctaaggtaaagaagctggttgtcaaggtgcatatgaacgacaattcaactaagtccctcatggtcgacgagaggcaattagctagagacgtactcgacaacctattcgaaaaaacccattgcgactgtaacgttgattggtgcttgtacgaaatttatcccgagctccagatcgagaggttttttgaggatcatgaaaatgttgtggaagtcttatccgactggaccagggacaccgaaaacaaaatactgtttctggagaaggaggagaagtacgccgtgtttaaaaatcctcagaatttttacttagacaacagaggcaagaaagagtcgaaggaaacaaacgaaaaaatgaacgctaagaataaggaatcacttctggaggaaagcttttgtgggacatccataattgtccccgaactggagggtgctctgtatctgaaggaagacggaaaaaaaagttggaagcgccgttatttcttacttcgagctagcgggatctattatgtccccaaagggaaaaccaagacctcccgggacctcgcctgctttattcagtttgagaatgttaatatctattatggcacccagcataaaatgaaatacaaagcccccaccgactattgcttcgttctcaagcacccccagatccagaaggagagccagtacatcaagtacctatgctgcgacgacactcgaacattaaatcaatgggtgatggggataaggattgccaagtacggaaaaacactctatgataactaccagcgggctgtcgcgaaggctggtctggcctctcgctggacgaatctgggaaccgtgaatgccgcagccccagctcagccatctacgggcccgaaaaccgggactacccagcccaacggccaaatcccacaggccacccacagcgtttccgcagtcctgcaggaagcgcagcgacatgcagagacctctaaggataagaagccggctctggggaatcaccacgatcctgcagtccctagagctcctcacgctcctaaaagctctctgcccccgcccccccccgtgcgccgcagtagtgatacatcagggtcacctgcaaccccactaaaggcaaagggcactggcggggggggattgcctgctccacccgatgacttccttcctccccctcctccgcctcccccactggacgacccagagctgccgccgcctcccccagattttatggaacctccccccgacttcgtccccccaccaccccccagctacgccggcattgcaggaagcgaattaccaccaccaccacctccaccaccagctccagcacctgcaccagtcccggattccgccagacccccgccagctgtggctaaacgtccacctgtgcctccgaagcgccaggagaaccccggtcaccctgggggcgcaggcggcggggagcaggattttatgagtgacctcatgaaagcgctgcagaagaagcgagggaatgtttcctag

SEQ ID NO: 291172 - DNA, 1908 bp, Artificial Sequence
  derived and/or modified sequence
atgggcgagagcagcgaggacatcgaccagatgttcagcaccctgctgggagaaatggacttactcactcagtcccttggtgtggacacgctcccgccacccgatccgaatccaccgagggccgagtttaactactcggtggggttcaaggatctgaatgagagcctgaatgcactggaggaccaggatttagatgctttgatggccgatctggtcgccgacatcagcgaggccgagcagagaactatacaggcacagaaggaatcccttcagaaccagcatcacagtgcgtctctacaagcgtcaatcttttcaggtgcagcatcattgggctacggaacaaatgttgccgccactggaatcagccagtacgaggacgacctacctcctcccccagcagatcccgtcttggatctcccccttcctcccccccctccagagcccctatctcaggaagaagaagaggctcaggccaaggcagataagatcaaattggcactggagaagctgaaagaagcaaaagttaaaaagctagtcgtaaaagtccacatgaacgataacagcaccaagagtctcatggtcgacgagcgccagcttgctcgcgacgtgttggacaatttgttcgaaaagacccactgcgactgcaacgtggattggtgtctgtatgagatttacccggagctacaaattgaaaggtttttcgaggaccacgagaatgtggtggaggtgctctctgactggacccgggatactgaaaacaagatattgtttctggagaaggaggagaagtacgcggtttttaaaaacccacagaatttttacctggacaacagaggaaaaaaagagtctaaagaaaccaacgaaaaaatgaatgctaaaaataaggaaagcctgctggaggaatctttctgcggtacaagcattattgtaccagaattagagggggctctgtatctgaaagaggacggtaaaaagtcttggaaacggagatattttctgctgcgtgctagcggaatttactacgtgcctaagggcaagaccaagaccagccgagaccttgcttgctttatccagtttgaaaacgtgaatatctactacggcacgcagcataaaatgaagtataaggccccaacagactattgctttgtgcttaagcatccccagatccaaaaagagtcccaatatattaaatacctctgttgtgacgacactagaacattaaatcagtgggttatgggcataagaatcgccaagtacggtaagaccctatatgataactatcaacgcgcagttgccaaagccgggttggcttcccgctggacgaatctgggcacagtgaacgccgctgcccctgctcagcccagtacaggccccaaaactggcacgactcagcctaacggtcaaataccccaagccacccatagtgtcagcgctgtgctccaggaggcccagaggcacgctgagacttccaaagacaaaaagccagcattggggaaccatcacgaccccgcagtccccagggctccacacgcgccaaagtcctcgctacctcctccacccccggttcgccggtcttcagacacaagcggatctcccgccactcctctgaaagccaaggggacaggcggaggaggactgcccgcagctcgcgcccgcgccagacctcgcccccggctacgtcaggcagctccgagaggcgggcaagaggcgtcttgcgcgccccaagaagctcgagagccacgggccccaagaaggtcccgccggaggggtgccaggttccatgtgcggccccatgagtcgtttgccaaagaagagagacagcgagtgcttggaacaggaatgatgtctgtgccagaaggcgaggctagcctgactcctagtgcgggctttgctagccgccttccatag

SEQ ID NO: 291173 - DNA, 2001 bp, Artificial Sequence
  derived and/or modified sequence
atgggggaatcgtcagaagacatcgaccagatgttttcaactctccttggtgagatggacttgttgacccaaagtctgggtgtcgacactctcccaccacctgatcccaatcccccacgggctgagtttaactacagtgttggcttcaaggaccttaacgaatccctaaacgctttagaagatcaggatctggacgcactgatggctgacctcgtggccgatattagtgaagcagagcagcgtactatacaagctcaaaaagagagcctccaaaaccagcatcatagcgcgtctctgcaggcctccattttctcgggagccgcatccttggggtatggcaccaatgtagcagctaccggcatctcccaatacgaggacgacttgccgccaccaccagcggatcccgtccttgaccttccactgcccccacctcccccagagccactgtcacaggaggaggaagaggcccaggcaaaggccgacaagatcaagctagccctcgaaaagttgaaggaagctaaggtgaaaaagctggtggttaaggtgcatatgaatgacaacagcactaaaagcctgatggtagatgaacgacagttagccagggatgtgcttgataacctgttcgagaagacccactgtgattgtaacgtggactggtgtctttacgaaatttacccagaactgcagatcgaacgtttctttgaagatcacgagaatgtggttgaagtcctgtcggactggacacgtgacaccgagaacaaaatcttattcctggagaaggaagaaaagtacgccgtgttcaagaatccgcaaaacttttacctggacaacaggggcaaaaaggagtccaaagaaaccaatgagaagatgaatgccaagaacaaggagtctcttcttgaagaaagcttctgtggaacctcgatcatcgtacccgagctggagggtgctctgtacctaaaagaagatggcaagaaatcgtggaaaaggcgctattttctgttgcgagcctcaggcatttactacgtgcccaaggggaaaaccaagacaagcagggacctggcctgttttatacagttcgagaacgtgaacatctactacgggacacaacataaaatgaaatacaaagctcctacagattattgcttcgtgctgaaacatcctcagatccaaaaggagtcccagtacatcaaatacctgtgctgcgacgacacacggactttaaatcagtgggtgatgggtatacgcattgccaagtacggcaagacactttacgacaattaccagagggctgtggctaaggcgggtctagccagccgatggaccaatctgggaaccgtcaacgcagctgcccctgcacagccttcaaccggcccaaagaccggtacgacgcagcccaacggccagattccacaggcaacccactccgtgagcgcagtcctgcaagaagcccaaagacatgccgaaaccagcaaggataagaagcctgcactgggcaatcatcacgaccccgctgtgcccagggcccctcatgcgcctaagtcaagtttgcctccccctccacccgtcaggaggtcatccgacacgagcggatcgccagccacacctttgaaggcaaaggggacagggggagggggtctgccagcccctcctgatgactttctgccccctcccccaccgcctcccccactggacgatcccgaactccccccaccaccacctgattttatggagccacctcctgacttcgtcccacctcctcctcccagctacgccggtattgccggaagtgaactgccaccaccccctcccccacctcctgctccagcacccgcacccgtgcctgatagcgcacgccctcctcctgctgtcgcaaaaaggccacccgtcccacctaaacgccaggaaaatcctggacacccgggtggagccggaggcggtgaacaggattttatgtcagacctgatgaaggcccttcagaagaagcggggaaacgtcagttag

SEQ ID NO: 291174 - DNA, 1908 bp, Artificial Sequence
  derived and/or modified sequence
atgggagagtctagcgaggacatcgaccagatgtttagtacactcctcggagagatggacctgctgacccagagcctgggtgtggacactcttcctcccccagatcctaacccacccagggccgagttcaactactcagtggggttcaaagatctgaacgagagcctgaatgccttagaggaccaagatttggatgccctgatggccgacttggtcgcagacatatccgaagctgagcagaggaccatacaggcccaaaaagaaagtctgcaaaatcaacaccatagcgccagcctgcaggcctctatcttctccggggcagcgtccctgggctacgggacaaacgtggcagctaccggtatctcccaatatgaagacgatctgccccctccacctgccgacccggttttagacttgccattacccccaccaccccctgagcccctgtcacaggaagaagaagaagcccaagccaaggcagacaaaatcaagcttgccctcgagaagctgaaggaggctaaggtgaaaaagctcgtggtgaaagtgcatatgaatgataactcaacaaagtctcttatggtggatgagagacaacttgccagggatgtgctggataatctattcgaaaaaacccactgcgattgcaacgtcgattggtgtctatatgaaatttaccccgaactccagattgagcgcttcttcgaagaccacgagaacgtcgtcgaggttttgtccgattggaccagggataccgagaataagattctgtttttggaaaaggaagagaagtatgccgtgtttaaaaacccccagaacttttacctggacaatagaggaaaaaaggaatctaaagaaacaaatgagaaaatgaacgccaagaacaaagagtccctgcttgaggagagtttctgcggtacgagcattatcgtgccagagcttgaaggcgctttgtatctgaaagaagatggtaaaaaatcttggaaaagacgatacttccttctgagagcgtcaggtatttattacgtacccaaaggcaagacaaaaaccagccgagatctggcctgctttatacagttcgagaatgtgaacatttattatggaacccagcacaaaatgaagtacaaagcaccaacagattactgtttcgtgctgaagcacccacagatacagaaggagtcgcagtatatcaaatacctgtgctgtgatgatacacgaactctgaatcagtgggttatgggaattaggatagctaagtatggaaagacactctatgataactatcaacgtgcagttgccaaggctgggctggcttccaggtggaccaatctgggtaccgtgaatgccgcagctcccgctcaaccaagtaccgggcctaaaaccggtaccacgcagcccaatggccaaatcccccaggctacccactctgtatccgccgtgttacaggaggcccagaggcacgccgaaacctctaaagacaagaaaccggcactcgggaatcaccacgatccagccgtgccccgtgctccacatgctcctaaaagtagccttcccccaccgcctcccgtgcgcaggagttccgacactagcgggagtccggcaacccccctgaaggccaaaggcactggcggagggggattgccggctgctcgcgcaagggctcggccaaggcctcggctgcgccaggccgcacctagaggtggccaagaggcttcatgtgctcctcaggaggcccgagagccaagggctccacgaaggtctagacgccgtggcgctaggttccatgtgagaccccacgagagctttgctaaggaggaaaggcagagggtcttaggtaccggaatgatgagtgtgcccgagggagaggcctctctcactcctagtgcaggattcgcctcgagactgccttag

SEQ ID NO: 291175 - DNA, 2121 bp, Artificial Sequence
  derived and/or modified sequence
atgtcacctttcctgaggattggcctgtcgaatttcgactgcggctcctgtcagagttgtcaaggtgaagcagtgaacccttactgcgcggtgctggtgaaagagtacgtggaaagtgagaatggacagatgtatatacagaagaagcccaccatgtatcccccctgggattcgactttcgacgcacacatcaacaaaggccgggttatgcaaatcatcgttaaaggaaaaaacgtggacctaataagtgagacaactgtggaattgtatagcttagctgaacgttgcaggaagaataacggtaaaacagaaatctggctggaactgaaacctcaaggcaggatgctgatgaatgcccgatattttctggagatgtccgatacgaaagatatgaatgaattcgaaacagagggcttctttgcactgcaccagcggcgcggcgccattaaacaagcaaaggttcatcacgtcaagtgtcatgagttcactgccacattttttccacagcccactttctgcagtgtctgccacgaattcgtctggggcctcaataagcagggatatcaatgccgacagtgtaatgccgccatacataagaagtgcattgataaggttatcgctaaatgcaccggaagtgctattaattctagagagactatgttccacaaggagcgcttcaagatagatatgccgcatcgattcaaggtgtacaactacaaaagtccaactttttgtgagcactgcgggaccttgctgtggggcctcgcccgccagggcttgaagtgcgatgcatgcgggatgaatgtgcaccatagatgccagacaaaagttgccaacctctgtggcattaaccagaagctgatggccgaagcactggccatgattgagtccacccagcaagcacgatgcctgcgggacacagagcagatctttcgggaggggcccgttgaaatcgggcttccttgcagcatcaagaacgaggcacgacccccctgcttacccacccctggaaagcgggagccccagggaatctcatgggagtctccccttgacgaggtggacaagatgtgtcaccttcctgagccagagctgaataaggaacggcccagtctgcaaattaaactgaagatcgaagactttattctccataagatgctaggcaaggggagctttggaaaggtttttcttgccgagttcaaaaaaacgaatcagttctttgccattaaggccctgaaaaaagacgtggttctgatggatgatgatgttgagtgtactatggttgaaaaaagggttctgtctctagcctgggagcacccctttctcactcatatgttctgcacgtttcagaccaaggaaaaccttttctttgtgatggagtacctaaacggcggtgatctgatgtatcatattcaatcatgccataaattcgacttgtcccgagctacattttacgccgcagagattattttgggtcttcagttccttcactctaagggcatcgtgtatagggacttgaaactggataacattctgctcgataaggacggccacataaaaatcgccgacttcggtatgtgcaaagagaatatgctgggcgacgccaaaactaacaccttctgcggcactcccgactacatcgccccagaaattctattaggccagaagtataatcactcggtagactggtggtccttcggcgtgctgttgtacgagatgttgattggacaaagccccttccatggccaggatgaagaagagctcttccacagcatccgtatggataatcccttttatccgaggtggcttgagaaagaagctaaagatctgcttgtcaagctgtttgttcgtgagcctgaaaaacgcctgggcgtgcgtggtgacatcagacagcaccccctctttagagaaataaattgggaggaactcgaaaggaaagaaatcgaccctcctttcaggccaaaggtcaaaagtccattcgactgtagcaatttcgataaggaatttctgaacgaaaagcctcgcctgagtttcgctgatagagcgcttattaattccatggaccaaaacatgttccgaaacttcagtttcatgaatcctgggatggagaggttgatcagctag

SEQ ID NO: 291176 - DNA, 2121 bp, Artificial Sequence
  derived and/or modified sequence
atgagccccttcctgagaattggcctgagcaactttgactgtggcagctgccagagctgccagggcgaggccgtgaacccctactgtgctgtgctggtgaaggagtatgtggagagtgaaaatggccagatgtacatccagaagaagcccaccatgtacccaccctgggacagcacctttgatgcccacatcaacaagggccgggtgatgcagatcatcgtgaagggcaagaatgtggacctgatcagcgagaccaccgtggagctgtacagcctggccgagcgctgcaggaagaacaacgggaagacagagatctggctggagctgaagccccagggccgcatgctgatgaatgcccgctacttcctggagatgtctgacaccaaggacatgaatgaatttgaaacagagggcttctttgccctgcaccagaggagaggagccatcaagcaggccaaggtgcaccacgtgaagtgccacgagttcaccgccaccttcttcccccagcccaccttctgcagcgtgtgccatgaatttgtgtggggcctgaacaagcagggctaccagtgccggcagtgcaatgctgccatccacaagaagtgcatcgacaaggtgattgccaagtgcaccggcagcgccatcaacagccgggagaccatgttccacaaggagcgcttcaagattgacatgccccaccgcttcaaggtgtacaactacaagagccccaccttctgtgagcactgcggcaccctgctgtggggcctggcccggcagggcctgaagtgtgatgcctgtggcatgaatgtgcaccaccgctgccagaccaaggtggccaacctgtgtggcatcaaccagaagctgatggccgaggccctggccatgattgagagcacccagcaggcccgctgcctgcgggacacagagcagatcttccgggagggccctgtggagatcggcctgccctgcagcatcaagaatgaggcccggcccccctgcctgcccacccctgggaagcgggagccccagggcatctcctgggagagccccctggatgaggtggacaagatgtgccacctgcctgagcctgagctgaacaaggagcggcccagcctgcagatcaagctgaagattgaggacttcatcctgcacaagatgctgggcaagggcagctttgggaaggtgttcctggccgagttcaagaagaccaaccagttctttgccatcaaggccctgaagaaggatgtggtgctgatggatgatgatgtggagtgcaccatggtggagaagagggtgctgagcctggcctgggagcaccccttcctgacccacatgttctgcaccttccagaccaaggagaacctcttctttgtgatggagtacctgaatggaggagacctgatgtaccacatccagagctgccacaagtttgacctgagccgggccaccttctatgctgctgagatcatcctgggcctgcagttcctgcacagcaagggcatcgtgtacagagacctgaagctggacaacatcctgctggacaaggatggccacatcaagattgctgactttggcatgtgcaaggagaacatgctgggagatgccaagaccaacaccttctgtggcaccccagactacatcgcccctgagatcctgctgggccagaagtacaaccacagcgtggactggtggagctttggagtgctgctgtatgagatgctgattggccagagccccttccacggccaggatgaggaggagctgttccacagcatccgcatggacaaccccttctacccccgctggctggagaaggaggccaaggacctgctggtgaagctgtttgtgcgggagcctgagaagaggctgggcgtgcggggggacatccggcagcaccccctcttccgggagatcaactgggaggagctggagaggaaggagattgatcctcccttccggcccaaggtgaagagcccctttgactgcagcaactttgacaaggagttcctgaatgagaagccccggctgagctttgctgaccgggccctgatcaacagcatggaccagaacatgttcaggaacttctccttcatgaaccctggcatggagcggctcatctcctag

SEQ ID NO: 291177 - DNA, 2121 bp, Artificial Sequence
  derived and/or modified sequence
atgagccccttcctgcggatcggcctgagcaacttcgactgcggctcctgccagtcatgccagggcgaggctgtgaacccttactgcgccgtgctcgtgaaggagtacgttgagagcgagaatggccagatgtacattcagaagaaacctaccatgtacccgccatgggacagcacctttgatgcccacatcaataaagggagggtcatgcaaatcatcgtgaaagggaagaatgtggatctcatatctgaaacaacggtcgagctgtactcattagccgagcggtgccgaaaaaataacgggaagacagagatatggctcgagctgaaaccccaggggcgcatgctgatgaatgctagatactttctagaaatgtccgatacaaaagacatgaacgagtttgagaccgagggtttctttgccctgcaccagcgtaggggagctatcaagcaggctaaggttcaccatgttaagtgtcacgagtttactgccacatttttccctcaacctactttctgctctgtctgtcatgagtttgtttggggattgaacaagcagggttaccagtgtagacagtgcaacgccgcaattcataagaagtgtatcgataaagtcatagctaagtgcacagggagcgctataaatagccgggagaccatgttccataaggagagatttaagatcgacatgccgcacagatttaaggtgtacaactacaaatcccccacgttttgcgagcattgcggaacgctgttgtggggtctggccaggcaagggctgaagtgtgacgcttgcggcatgaatgtgcaccacagatgtcaaactaaggtggccaacctgtgtggtataaaccagaaactaatggcggaagccttggctatgatcgaaagcacgcagcaagcaaggtgcctgcgtgacaccgaacagattttccgagaaggccccgtggagatcgggctgccctgctctatcaagaacgaagctaggccaccttgtctgcctacacctggaaagcgggagccccaggggatttcctgggaatctcccctggacgaggtggacaagatgtgtcaccttccagaacccgaattaaacaaggaacgcccaagtctgcagattaagctcaagatcgaggattttatattgcataaaatgctggggaaggggtccttcggcaaagtgttcctggcggagttcaaaaagaccaaccagttttttgccattaaagctctcaagaaagacgtggtgttgatggatgacgacgtggaatgtacaatggttgaaaagcgtgtgctgtccctggcatgggaacacccattcttaacgcatatgttctgcacctttcagaccaaggaaaatctatttttcgtgatggaatacctgaatggcggggatttaatgtaccatattcagtcctgccataaatttgatctcagccgggcaactttctacgctgccgaaatcattctcgggctgcaattcctccattctaagggcatcgtgtatcgggacctcaaactggataacatcctgctcgataaagacggccacatcaagatcgcagatttcgggatgtgcaaggaaaacatgctgggggacgccaaaactaatacgttctgtggaactcctgattacatagctccagagatcctgcttgggcaaaagtacaatcattccgttgattggtggagctttggggtcttgttatacgagatgctcattggccagagcccatttcatggccaggatgaggaggagctattccatagtatccgcatggacaacccgttttacccgagatggctcgaaaaagaagcaaaggacctgctggtaaagctctttgtgcgggaacccgaaaaacgcctgggcgtgagaggagacattcggcaacatcctctctttcgagagataaactgggaggagctggaacggaaagaaattgaccccccatttcggcctaaggtcaagagcccttttgactgtagcaatttcgacaaagaatttttgaatgaaaagccaagactctcatttgcagaccgggctcttatcaatagcatggaccagaatatgtttagaaatttcagcttcatgaatcccggtatggaacgattgatttcatag

SEQ ID NO: 291178 - DNA, 2121 bp, Artificial Sequence
  derived and/or modified sequence
atgtccccatttttgagaattggcctaagcaatttcgattgtggcagttgccagtcttgtcagggcgaagccgtgaatccttactgcgccgttctggttaaggagtacgtagagtccgagaatgggcaaatgtacatccagaagaaacccacaatgtatccgccatgggacagtacttttgatgcccatattaacaagggcagggtgatgcaaattatcgtcaaaggaaagaacgtcgatctgatttctgagactaccgtggagctctattcacttgctgagcgctgtcgcaaaaacaacggcaagacagagatttggctggagcttaagccacagggaagaatgttgatgaacgctcggtatttccttgaaatgagcgacactaaggacatgaacgagtttgagacagaagggttttttgccctgcaccaacgaaggggcgcaattaagcaggctaaggtccatcatgtgaaatgccacgagtttactgctacgttctttccacagcccacattctgttccgtctgtcacgagtttgtgtggggcctgaacaaacagggttatcagtgcaggcagtgtaacgccgctatccataagaagtgcattgacaaggtaatcgccaagtgtaccggaagcgcgatcaacagcagagagaccatgttccataaggagagatttaaaatcgacatgcctcatcgctttaaagtatataactataagagccccaccttttgtgaacattgtggcacattgctgtgggggcttgcccgtcagggcctgaagtgcgatgcctgcggcatgaacgttcaccacaggtgtcagactaaagttgctaacctgtgcgggatcaatcagaagctgatggccgaagcgctggccatgatagagtcaacacagcaagcgagatgtctgcgagatacggagcagatttttcgggaaggcccagttgagattggcttgccctgttcaattaaaaatgaggcacgaccaccttgcctccccacccccggtaagcgagagccccagggcattagctgggagtctcctctggacgaggtcgataaaatgtgccatcttccggaacccgaactcaataaggagcgaccaagcctgcaaatcaaactgaaaatcgaggattttatcctgcataaaatgctgggtaaaggcagcttcggcaaggtatttctggcggagttcaaaaaaacaaaccagttcttcgccataaaggctcttaagaaggatgtggtgctgatggatgacgatgttgagtgtaccatggtcgagaaaagagttctaagtctggcttgggaacacccgttcttgactcatatgttctgcacctttcagaccaaggagaatctgtttttcgtgatggaatatttgaacggtggcgacttaatgtaccacattcagagctgccacaaattcgacctcagcagagcaacattctatgctgcagagatcatcctgggacttcagtttctacactccaagggcattgtttaccgggatctgaaactggataacatcttactcgataaggacggccacattaagatagccgactttggcatgtgcaaggagaacatgttgggagatgccaagaccaatacattttgcggaactcccgattatatcgccccagagatcctgctaggccaaaaatacaaccatagcgtcgattggtggagcttcggcgtgctgctgtacgagatgctgatcgggcagtctcccttccatggccaggacgaggaggagctgtttcacagtatcaggatggataatcccttttatcctaggtggctagagaaagaggcaaaagacctgctggtgaagttattcgtcagagaacctgaaaagagattaggcgttcggggagatatcaggcagcaccccctgtttagggagatcaattgggaggaacttgagagaaaggaaattgaccctcctttcaggccaaaagttaaaagccctttcgattgtagcaactttgataaggagtttttaaatgaaaaaccccgtctgtcttttgcagaccgagcgctcataaactctatggaccagaacatgttccggaattttagctttatgaacccaggcatggagcggctgatctcttag

SEQ ID NO: 291179 - DNA, 2121 bp, Artificial Sequence
  derived and/or modified sequence
atgagccccttcctgagaatcggcctgagcaacttcgactgcggcagctgccagagctgccagggcgaggccgtgaacccctactgcgccgtgctggtgaaggagtacgtggagagcgagaacggccagatgtacatccagaagaagcccaccatgtaccccccctgggacagcaccttcgacgcccacatcaacaagggcagagtgatgcagatcatcgtgaagggcaagaacgtggacctgatcagcgagaccaccgtggagctgtacagcctggccgagagatgcagaaagaacaacggcaagaccgagatctggctggagctgaagccccagggcagaatgctgatgaacgccagatacttcctggagatgagcgacaccaaggacatgaacgagttcgagaccgagggcttcttcgccctgcaccagagaagaggcgccatcaagcaggccaaggtgcaccacgtgaagtgccacgagttcaccgccaccttcttcccccagcccaccttctgcagcgtgtgccacgagttcgtgtggggcctgaacaagcagggctaccagtgcagacagtgcaacgccgccatccacaagaagtgcatcgacaaggtgatcgccaagtgcaccggcagcgccatcaacagcagagagaccatgttccacaaggagagattcaagatcgacatgccccacagattcaaggtgtacaactacaagagccccaccttctgcgagcactgcggcaccctgctgtggggcctggccagacagggcctgaagtgcgacgcctgcggcatgaacgtgcaccacagatgccagaccaaggtggccaacctgtgcggcatcaaccagaagctgatggccgaggccctggccatgatcgagagcacccagcaggccagatgcctgagagacaccgagcagatcttcagagagggccccgtggagatcggcctgccctgcagcatcaagaacgaggccagacccccctgcctgcccacccccggcaagagagagccccagggcatcagctgggagagccccctggacgaggtggacaagatgtgccacctgcccgagcccgagctgaacaaggagagacccagcctgcagatcaagctgaagatcgaggacttcatcctgcacaagatgctgggcaagggcagcttcggcaaggtgttcctggccgagttcaagaagaccaaccagttcttcgccatcaaggccctgaagaaggacgtggtgctgatggacgacgacgtggagtgcaccatggtggagaagagagtgctgagcctggcctgggagcaccccttcctgacccacatgttctgcaccttccagaccaaggagaacctgttcttcgtgatggagtacctgaacggcggcgacctgatgtaccacatccagagctgccacaagttcgacctgagcagagccaccttctacgccgccgagatcatcctgggcctgcagttcctgcacagcaagggcatcgtgtacagagacctgaagctggacaacatcctgctggacaaggacggccacatcaagatcgccgacttcggcatgtgcaaggagaacatgctgggcgacgccaagaccaacaccttctgcggcacccccgactacatcgcccccgagatcctgctgggccagaagtacaaccacagcgtggactggtggagcttcggcgtgctgctgtacgagatgctgatcggccagagccccttccacggccaggacgaggaggagctgttccacagcatcagaatggacaaccccttctaccccagatggctggagaaggaggccaaggacctgctggtgaagctgttcgtgagagagcccgagaagagactgggcgtgagaggcgacatcagacagcaccccctgttcagagagatcaactgggaggagctggagagaaaggagatcgacccccccttcagacccaaggtgaagagccccttcgactgcagcaacttcgacaaggagttcctgaacgagaagcccagactgagcttcgccgacagagccctgatcaacagcatggaccagaacatgttcagaaacttcagcttcatgaaccccggcatggagagactgatcagctag

SEQ ID NO: 291180 - protein, 150 aa, Artificial Sequence
  derived and/or modified sequence
MALVAPEAPSEQARRVFQTYDPEDNGFIPDSLLEDVMKALDLVSDPEYINLMKNKLDPEGLGIILLGPFLQEFFPDQGSSGPESFTVYHYNGLKQSNYNEKVMYVEGTAVVMGFEDPMLQTDDTPIKRCLQTKWPYIELLWTTDRSPSLN

SEQ ID NO: 291181 - protein, 704 aa, Artificial Sequence
  derived and/or modified sequence
MERGLPLLCAVLALVLAPAGAFRNDKCGDTIKIESPGYLTSPGYPHSYHPSEKCEWLIQAPDPYQRIMINFNPHFDLEDRDCKYDYVEVFDGENENGHFRGKFCGKIAPPPVVSSGPFLFIKFVSDYETHGAGFSIRYEIFKRGPECSQNYTTPSGVIKSPGFPEKYPNSLECTYIVFVPKMSEIILEFESFDLEPDSNPPGGMFCRYDRLEIWDGFPDVGPHIGRYCGQKTPGRIRSSSGILSMVFYTDSAIAKEGFSANYSVLQSSVSEDFKCMEALGMESGEIHSDQITASSQYSTNWSAERSRLNYPENGWTPGEDSYREWIQVDLGLLRFVTAVGTQGAISKETKKKYYVKTYKIDVSSNGEDWITIKEGNKPVLFQGNTNPTDVVVAVFPKPLITRFVRIKPATWETGISMRFEVYGCKITDYPCSGMLGMVSGLISDSQITSSNQGDRNWMPENIRLVTSRSGWALPPAPHSYINEWLQIDLGEEKIVRGIIIQGGKHRENKVFMRKFKIGYSNNGSDWKMIMDDSKRKAKSFEGNNNYDTPELRTFPALSTRFIRIYPERATHGGLGLRMELLGCEVEAPTAGPTTPNGNLVDECDDDQANCHSGTGDDFQLTGAETIFIPLLYHFSSCLSWDQLTPVCVLVTPHGRELPRNRSCLARTRASSFPHVIWIDELFLIATTICNNNLSHFESQRLGLS

SEQ ID NO: 291182 - protein, 906 aa, Artificial Sequence
  derived and/or modified sequence
MERGLPLLCAVLALVLAPAGAFRNDKCGDTIKIESPGYLTSPGYPHSYHPSEKCEWLIQAPDPYQRIMINFNPHFDLEDRDCKYDYVEVFDGENENGHFRGKFCGKIAPPPVVSSGPFLFIKFVSDYETHGAGFSIRYEIFKRGPECSQNYTTPSGVIKSPGFPEKYPNSLECTYIVFVPKMSEIILEFESFDLEPDSNPPGGMFCRYDRLEIWDGFPDVGPHIGRYCGQKTPGRIRSSSGILSMVFYTDSAIAKEGFSANYSVLQSSVSEDFKCMEALGMESGEIHSDQITASSQYSTNWSAERSRLNYPENGWTPGEDSYREWIQVDLGLLRFVTAVGTQGAISKETKKKYYVKTYKIDVSSNGEDWITIKEGNKPVLFQGNTNPTDVVVAVFPKPLITRFVRIKPATWETGISMRFEVYGCKITDYPCSGMLGMVSGLISDSQITSSNQGDRNWMPENIRLVTSRSGWALPPAPHSYINEWLQIDLGEEKIVRGIIIQGGKHRENKVFMRKFKIGYSNNGSDWKMIMDDSKRKAKSFEGNNNYDTPELRTFPALSTRFIRIYPERATHGGLGLRMELLGCEVEAPTAGPTTPNGNLVDECDDDQANCHSGTGDDFQLTGGTTVLATEKPTVIDSTIQSEFPTYGFNCEFGWGSHKTFCHWEHDNHVQLKWSVLTSKTGPIQDHTGDGNFIYSQADENQKGKVARLVSPVVYSQNSAHCMTFWYHMSGSHVGTLRVKLRYQKPEEYDQLVWMAIGHQGDHWKEGRVLLHKSLKLYQVIFEGEIGKGNLGGIAVDDISINNHISQEDCARSTPGYEGEGEGDKNISRKPGNVLKTLDPILITIIAMSALGVLLGAVCGVVLYCACWHNGMSERNLSALENYNFELVDGVKLKKDKLNTQSTYSEA

SEQ ID NO: 291183 - protein, 105 aa, Artificial Sequence
  derived and/or modified sequence
NHISQEDCARSTPGYEGEGEGDKNISRKPGNVLKTLDPILITIIAMSALGVLLGAVCGVVLYCACWHNGMSERNLSALENYNFELVDGVKLKKDKLNTQSTYSEA

SEQ ID NO: 291184 - DNA, 2721 bp, Artificial Sequence
  derived and/or modified sequence
atggagagaggcctgcccctgctgtgcgccgtgctggccctggtgctggcccccgccggcgccttcagaaacgacaagtgcggcgacaccatcaagatcgagagccccggctacctgaccagccccggctacccccacagctaccaccccagcgagaagtgcgagtggctgatccaggcccccgacccctaccagagaatcatgatcaacttcaacccccacttcgacctggaggacagagactgcaagtacgactacgtggaggtgttcgacggcgagaacgagaacggccacttcagaggcaagttctgcggcaagatcgcccccccccccgtggtgagcagcggccccttcctgttcatcaagttcgtgagcgactacgagacccacggcgccggcttcagcatcagatacgagatcttcaagagaggccccgagtgcagccagaactacaccacccccagcggcgtgatcaagagccccggcttccccgagaagtaccccaacagcctggagtgcacctacatcgtgttcgtgcccaagatgagcgagatcatcctggagttcgagagcttcgacctggagcccgacagcaacccccccggcggcatgttctgcagatacgacagactggagatctgggacggcttccccgacgtgggcccccacatcggcagatactgcggccagaagacccccggcagaatcagaagcagcagcggcatcctgagcatggtgttctacaccgacagcgccatcgccaaggagggcttcagcgccaactacagcgtgctgcagagcagcgtgagcgaggacttcaagtgcatggaggccctgggcatggagagcggcgagatccacagcgaccagatcaccgccagcagccagtacagcaccaactggagcgccgagagaagcagactgaactaccccgagaacggctggacccccggcgaggacagctacagagagtggatccaggtggacctgggcctgctgagattcgtgaccgccgtgggcacccagggcgccatcagcaaggagaccaagaagaagtactacgtgaagacctacaagatcgacgtgagcagcaacggcgaggactggatcaccatcaaggagggcaacaagcccgtgctgttccagggcaacaccaaccccaccgacgtggtggtggccgtgttccccaagcccctgatcaccagattcgtgagaatcaagcccgccacctgggagaccggcatcagcatgagattcgaggtgtacggctgcaagatcaccgactacccctgcagcggcatgctgggcatggtgagcggcctgatcagcgacagccagatcaccagcagcaaccagggcgacagaaactggatgcccgagaacatcagactggtgaccagcagaagcggctgggccctgccccccgccccccacagctacatcaacgagtggctgcagatcgacctgggcgaggagaagatcgtgagaggcatcatcatccagggcggcaagcacagagagaacaaggtgttcatgagaaagttcaagatcggctacagcaacaacggcagcgactggaagatgatcatggacgacagcaagagaaaggccaagagcttcgagggcaacaacaactacgacacccccgagctgagaaccttccccgccctgagcaccagattcatcagaatctaccccgagagagccacccacggcggcctgggcctgagaatggagctgctgggctgcgaggtggaggcccccaccgccggccccaccacccccaacggcaacctggtggacgagtgcgacgacgaccaggccaactgccacagcggcaccggcgacgacttccagctgaccggcggcaccaccgtgctggccaccgagaagcccaccgtgatcgacagcaccatccagagcgagttccccacctacggcttcaactgcgagttcggctggggcagccacaagaccttctgccactgggagcacgacaaccacgtgcagctgaagtggagcgtgctgaccagcaagaccggccccatccaggaccacaccggcgacggcaacttcatctacagccaggccgacgagaaccagaagggcaaggtggccagactggtgagccccgtggtgtacagccagaacagcgcccactgcatgaccttctggtaccacatgagcggcagccacgtgggcaccctgagagtgaagctgagataccagaagcccgaggagtacgaccagctggtgtggatggccatcggccaccagggcgaccactggaaggagggcagagtgctgctgcacaagagcctgaagctgtaccaggtgatcttcgagggcgagatcggcaagggcaacctgggcggcatcgccgtggacgacatcagcatcaacaaccacatcagccaggaggactgcgccagaagcacccccggctacgagggcgagggcgagggcgacaagaacatcagcagaaagcccggcaacgtgctgaagaccctggaccccatcctgatcaccatcatcgccatgagcgccctgggcgtgctgctgggcgccgtgtgcggcgtggtgctgtactgcgcctgctggcacaacggcatgagcgagagaaacctgagcgccctggagaactacaacttcgagctggtggacggcgtgaagctgaagaaggacaagctgaacacccagagcacctacagcgaggcctag

SEQ ID NO: 291185 - DNA, 318 bp, Artificial Sequence
  derived and/or modified sequence
aaccacatcagccaggaggactgcgccagaagcacccccggctacgagggcgagggcgagggcgacaagaacatcagcagaaagcccggcaacgtgctgaagaccctggaccccatcctgatcaccatcatcgccatgagcgccctgggcgtgctgctgggcgccgtgtgcggcgtggtgctgtactgcgcctgctggcacaacggcatgagcgagagaaacctgagcgccctggagaactacaacttcgagctggtggacggcgtgaagctgaagaaggacaagctgaacacccagagcacctacagcgaggcctag

SEQ ID NO: 291186 - DNA, 2721 bp, Artificial Sequence
  derived and/or modified sequence
atggagcgagggctgcccctcctgtgtgccgtgttagccctggtacttgcgcccgccggtgcatttaggaatgacaagtgtggcgatacgatcaaaatcgagtcaccaggctatttaaccagccctgggtacccacactcatatcacccatccgagaaatgcgaatggctgattcaagcaccagacccttatcaaagaatcatgatcaatttcaacccccacttcgacctggaagatagagactgcaaatatgactatgttgaagtgtttgacggggaaaacgagaacgggcatttccgggggaagttttgcggaaagatcgcccctcccccagttgtgagcagcgggccttttttattcattaaattcgtgagcgactacgaaacccacggtgccggatttagtattaggtacgagatttttaaacgcgggcccgagtgctctcaaaactacacaacgcctagcggcgtcatcaagtccccagggttccccgagaaataccccaactcgctggaatgtacgtacattgtgtttgttcctaaaatgtccgaaataatcctggagttcgagtctttcgacttggaacccgattcaaatcctcccgggggtatgttctgccggtacgatcgccttgagatctgggatggcttcccggatgtaggccctcatattgggagatattgcggtcagaaaacccccggcaggattcgatcctcctctgggattttgagtatggtgttttataccgatagtgctattgcaaaagaagggttctctgccaattactctgtacttcaaagcagcgtctctgaagattttaaatgcatggaggcccttgggatggaatctggagagatacacagtgatcagattacggcctcttctcaatactccaccaactggtccgccgagaggtcgagactcaactatccagagaacgggtggacccccggagaggactcttaccgggagtggattcaggtggatcttggcctactccgttttgtgactgctgtgggtactcagggtgctatatcgaaggaaactaaaaagaagtattatgtgaaaacatataaaatcgacgtttcttctaatggcgaggactggattactatcaaggaaggaaacaaaccggtgctttttcaggggaacacaaatccaacggacgtggtagtggctgtgttccccaaacccctaatcactcggtttgttcggatcaagcccgctacctgggaaaccggcattagtatgcggttcgaagtatatggttgcaaaatcactgattacccttgctccgggatgttgggcatggtgtcggggctgatcagtgattcacagatcacttcctctaaccagggggataggaattggatgcctgaaaatatccgcctagtcacctcaaggtctggctgggccttgcctcctgcccctcactcatatatcaatgagtggctgcagattgatctaggcgaagaaaaaattgtccggggcattataattcagggggggaaacatcgggaaaataaggtgtttatgagaaagttcaaaattggctactctaacaacggttccgattggaaaatgatcatggacgactccaagcgcaaggccaagagctttgaaggtaacaacaactacgatacccccgagcttcggacttttccggctctgtcgaccagattcatccgcatctatccagagcgcgccactcacggtggcctcgggttgcgcatggaactgcttgggtgcgaggtcgaggcgccaacggccgggcctacaacacctaatggcaacctcgtggatgagtgcgacgacgaccaggcaaactgtcattccggcacgggcgacgatttccagctgaccggagggactaccgtcctcgcgacggaaaagccaacggtgatcgactccacgatccagagcgagttccccacctacggatttaactgtgaattcggatggggaagccacaagactttttgtcactgggaacacgacaaccatgttcagctgaagtggtcagtgctcactagcaagacagggccaatccaggaccacaccggtgacggcaactttatctacagtcaggcagacgagaaccagaaagggaaggtggccaggcttgtatcaccagtcgtttattcccagaactctgctcactgtatgacattctggtatcacatgtctggatctcatgtcggcacgctccgggtaaagctaagataccagaaaccagaggaatacgatcaattagtgtggatggcgattggacatcagggggaccattggaaggaagggagggtgctcctgcacaaatcgttaaagctttatcaggttattttcgagggtgaaataggcaaggggaacttgggtggaatcgctgttgatgatatttctatcaacaatcacatcagccaggaggactgcgccaggagcactcccggatatgagggcgagggcgaaggagacaagaatatctcaagaaaacccggcaacgttctgaaaaccctcgatccaattcttatcactataatcgccatgagcgccttgggggtcttactgggcgccgtgtgcggagtcgtgctgtattgcgcatgctggcacaacggcatgtccgaacggaatctgtccgccctagaaaattataactttgagcttgtcgacggcgttaagctcaaaaaggataaactgaacacccagtccacttactcagaagcgtag

SEQ ID NO: 291187 - DNA, 318 bp, Artificial Sequence
  derived and/or modified sequence
aaccacatcagtcaggaagactgtgcacggtcaactcccggctacgagggagaaggcgaaggcgataaaaatataagccgtaagccaggtaatgttctgaagacattggatcccatactgatcacaattatcgcaatgagtgccttaggtgtgctcctgggagccgtctgtggagttgtgctgtactgtgcatgctggcataacggaatgtctgagcgcaatctgagcgctctcgaaaactataacttcgaactagtagacggagtgaagctcaagaaagacaaactcaatacccaatccacctactctgaagcatag

SEQ ID NO: 291188 - DNA, 2721 bp, Artificial Sequence
  derived and/or modified sequence
atggagcggggcctgcccctgctgtgtgctgtgctggccctggtgctggccccagctggggccttcagaaatgacaagtgtggggacaccatcaagattgagagccctggctacctgaccagccctggctacccccacagctaccaccccagcgagaagtgtgagtggctgatccaggccccagacccctaccagaggatcatgatcaacttcaacccccactttgacctggaggaccgggactgcaagtatgactatgtggaggtgtttgatggagaaaatgaaaatggccacttccggggcaagttctgtgggaagatcgcccctcctcctgtggtgagcagcggccccttcctgttcatcaagtttgtgtctgactatgagacccacggggccggcttcagcatccgctatgagatcttcaagaggggccctgagtgcagccagaactacaccaccccatctggagtcatcaagagccctggcttccctgagaagtaccccaacagcctggagtgcacctacatcgtgtttgtgcccaagatgtctgagatcatcctggagtttgagagctttgacctggagccagacagcaaccccccaggcggcatgttctgccgctatgaccggctggagatctgggatggcttcccagatgtgggcccccacatcggccgctactgcggccagaagaccccaggccgcatccgcagcagcagcggcatcctgtccatggtgttctacacagattctgccatcgccaaggagggcttcagcgccaactacagcgtgctgcagagctctgtgtctgaggacttcaagtgcatggaggccctgggcatggagagcggggagatccacagcgaccagatcacagccagcagccagtacagcaccaactggagcgctgagaggagccggctgaactacccagaaaatggctggaccccaggagaagattcctaccgggagtggatccaggtggacctgggcctgctgcgctttgtgacagctgtgggcacccagggcgccatcagcaaggagaccaagaagaagtactacgtgaagacctacaagattgatgtgagcagcaatggagaggactggatcaccatcaaggagggcaacaagcctgtgctcttccagggcaacaccaaccccacagatgtggtggtggccgtgttccccaagcccctcatcaccaggtttgtgcgcatcaagccagccacctgggagaccggcatctccatgagatttgaggtgtatggctgcaagatcacagactacccctgcagcggcatgctgggcatggtgtctggcctcatcagtgacagccagatcaccagcagcaaccagggcgacaggaactggatgcctgagaacatccggctggtgaccagccgcagcggctgggccctgcccccagccccccacagctacatcaatgagtggctgcagattgacctgggggaggagaagatcgtgcggggcatcatcatccagggcggcaagcaccgggagaacaaggtgttcatgaggaagttcaagattggctacagcaacaacggcagtgactggaagatgatcatggatgacagcaagaggaaggccaagagctttgagggcaacaacaactatgacaccccagagctgcggaccttccctgccctgagcacccgcttcatccgcatctacccagagcgggccacccatggaggcctgggcctgaggatggagctgctgggctgtgaggtggaggcccccacagctggccccaccacccccaacggcaacctggtggatgaatgtgatgatgaccaggccaactgccacagcggcactggagatgacttccagctgactggaggcaccaccgtgctggccacagagaagcccaccgtgattgacagcaccatccagagcgagttccccacctacggcttcaactgtgaatttggctggggcagccacaagaccttctgccactgggagcatgacaaccacgtgcagctgaagtggagcgtgctgaccagcaagacaggccccatccaggaccacactggagatggcaacttcatctacagccaggctgatgagaaccagaagggcaaggtggcccggctggtgtcccctgtggtgtacagccagaacagcgcccactgcatgaccttctggtaccacatgagcggcagccacgtgggcaccctgcgggtgaagctgcgctaccagaagccagaggagtatgaccagctggtgtggatggccatcggccaccagggcgaccactggaaggagggccgggtgctgctgcacaagagcctgaagctgtaccaggtgatctttgaaggagaaattggaaaaggaaacctgggcggcattgctgtggatgacatcagcatcaacaaccacatcagccaggaggactgtgcccggagcaccccaggctatgaaggagagggggagggggacaagaacatcagcaggaagccaggaaatgtgctgaagaccctggaccccatcctgatcaccatcatcgccatgtctgccctgggcgtgctgctgggcgctgtgtgtggggtggtgctgtactgtgcctgctggcacaacggcatgtctgagaggaacctgagcgccctggagaactacaactttgagctggtggatggagtgaagctgaagaaggacaagctgaacacccagagcacctacagcgaggcctag

SEQ ID NO: 291189 - DNA, 318 bp, Artificial Sequence
  derived and/or modified sequence
aaccacatcagccaggaggactgtgcccggagcaccccaggctatgaaggagagggggagggggacaagaacatcagcaggaagccaggaaatgtgctgaagaccctggaccccatcctgatcaccatcatcgccatgtctgccctgggcgtgctgctgggcgctgtgtgtggggtggtgctgtactgtgcctgctggcacaacggcatgtctgaaagaaacctgagcgccctggagaactacaactttgagctggtggatggagtgaagctgaagaaggacaagctgaacacccagagcacctacagcgaggcctag

SEQ ID NO: 291190 - DNA, 2721 bp, Artificial Sequence
  derived and/or modified sequence
atggagcggggcctgcccctgctgtgcgccgtgctggccctggtgctagctccagcgggggcgttcaggaatgataaatgtggggacacaatcaaaatagagtcgccgggctacctgactagtcctggttatccccacagttaccatccctcagagaagtgtgagtggctgatccaggcgcctgatccttaccagcgtatcatgatcaatttcaatccacacttcgatttggaggatcgcgactgcaagtatgattacgtggaggtgttcgatggtgagaacgagaatggtcactttcgcggaaagttctgcgggaagatagctcccccaccggtggtctcatcaggtcctttcctgttcataaagttcgtgagcgactatgaaactcacggcgccggcttcagtataagatatgaaattttcaagagagggccagagtgcagtcagaattataccacccccagtggcgtcatcaaatcgccgggtttccctgaaaaatacccgaattctcttgaatgcacgtatattgtcttcgtgcctaagatgtcagaaatcatcctagagttcgagagctttgacctggagccagatagcaatcccccaggaggcatgttctgcaggtatgatcgactggagatttgggatgggtttccagatgtgggtccccacatagggcggtactgcgggcaaaagactcccggtaggatccgatcatcctccggaatcctgtccatggtcttttacacagattccgcaattgccaaagagggttttagtgctaattattcagtccttcagtcttccgtgtccgaggactttaagtgcatggaggccttaggtatggaatccggggagattcacagtgaccagatcactgcatcttcacaatattccactaactggagtgcagagaggtctaggctgaactaccctgaaaacgggtggacccccggtgaagatagttatagagaatggattcaagtcgacttgggcttgcttcgctttgttactgcagtgggtacccagggagctatctctaaagagaccaagaagaagtattatgtgaaaacatacaagatcgacgtgtcttccaatggggaagactggatcaccatcaaagagggaaacaagccagtgctgtttcaaggtaacacaaacccgactgacgtcgtggtggctgtgtttcctaaaccactaatcactcggtttgtgcgcatcaagcctgcgacgtgggaaacaggcatttccatgcgtttcgaagtctatggatgcaagatcacggactacccctgcagtggcatgttaggaatggtgtctggtctcatcagtgattcccagattacctcatccaatcagggcgaccggaattggatgcctgaaaacattagacttgtgacctcccggagtgggtgggccctccctcccgctcctcattcctatatcaatgaatggcttcagatcgacttgggcgaggagaagattgtgagaggaatcattattcaaggcggaaaacatcgtgaaaataaggtgtttatgaggaagtttaagattggttactccaacaacggcagcgattggaaaatgatcatggatgattcaaaaaggaaagcaaagagctttgaagggaataataattacgacacccccgagctgaggacttttcccgccctctctacgcgtttcatccgcatttacccagagagggcaactcatggcgggctgggtttgcggatggagctacttggatgcgaggttgaggcacccacagctggacctactacccccaacggcaatctggtggacgaatgtgatgatgatcaagccaactgtcacagcggcaccggcgatgattttcagcttaccggagggacaacagttctcgccactgagaaacccactgttatcgactcaacaatccagagtgaatttcccacatacggatttaactgcgagttcggttggggtagccacaagacgttttgtcactgggaacacgacaaccatgtgcagttaaaatggtcagtgttgacctctaagactggccccatacaggatcacaccggcgacgggaacttcatttacagccaggctgacgagaatcagaaagggaaagtggctaggctcgtgtcccccgtggtttactctcagaacagcgcccattgtatgaccttctggtaccacatgtcgggtagccatgtgggtactctgcgagttaagctgaggtatcagaaacccgaagaatatgatcagttagtatggatggccatcggacaccagggcgatcactggaaagagggccgcgttctcctgcataagagtctaaagttatatcaggttattttcgagggtgagatcgggaaaggaaatctcggaggcatcgctgtggatgacataagcattaataaccacatatcccaggaagattgtgctagatcaacgcctggttatgagggggaaggcgagggcgacaagaatatttccaggaaacccggcaacgttcttaaaactcttgacccgatactaataactatcatcgctatgtctgctctaggagtgctgctaggggccgtgtgcggcgtcgtcctctattgcgcctgctggcacaatgggatgtcggaacgcaacttgagcgctctcgagaactacaattttgaactggtagacggcgtgaagctaaagaaggataagctcaatacccagtccacgtatagcgaggcctag

SEQ ID NO: 291191 - DNA, 318 bp, Artificial Sequence
  derived and/or modified sequence
aaccacatcagccaggaggactgcgcccggagcacccccggctacgagggggagggcgaaggggacaagaacatcagcaggaaacctggcaacgtgctcaagacattggaccctattctgatcaccattatcgctatgagcgccttgggcgtcctgttgggcgcggtgtgcggcgttgtgttgtactgtgcatgctggcacaacggcatgtccgaacggaacttgagtgctttggagaactacaattttgagctcgtagacggagtcaagctgaaaaaagataaactgaatactcagagcacgtactcggaagcttag

SEQ ID NO: 291192 - DNA, 2721 bp, Artificial Sequence
  derived and/or modified sequence
atggagagggggctgccgctcctctgcgccgtgctcgccctcgtcctcgccccggccggcgcttttcgcaacgataaatgtggcgatactataaaaattgaaagccccgggtaccttacatctcctggttatcctcattcttatcacccaagtgaaaaatgcgaatggctgattcaggctccggacccataccagagaattatgatcaacttcaaccctcacttcgatttggaggacagagactgcaagtatgactacgtggaagtcttcgatggagaaaatgaaaatggacattttaggggaaagttctgtggaaagatagcccctcctcctgttgtgtcttcagggccatttctttttatcaaatttgtctctgactacgaaacacatggtgcaggattttccatacgttatgaaattttcaagagaggtcctgaatgttcccagaactacacaacacctagtggagtgataaagtcccccggattccctgaaaaatatcccaacagccttgaatgcacttatattgtctttgtgccaaagatgtcagagattatcctggaatttgaaagctttgacctggagcctgactcaaatcctccaggggggatgttctgtcgctacgaccggctagaaatctgggatggattccctgatgttggccctcacattgggcgttactgtggacagaaaacaccaggtcgaatccgatcctcatcgggcattctctccatggttttttacaccgacagcgcgatagcaaaagaaggtttctcagcaaactacagtgtcttgcagagcagtgtctcagaagatttcaaatgtatggaagctctgggcatggaatcaggagaaattcattctgaccagatcacagcttcttcccagtatagcaccaactggtctgcagagcgctcccgcctgaactaccctgagaatgggtggactcccggagaggattcctaccgagagtggatacaggtagacttgggccttctgcgctttgtcacggctgtcgggacacagggcgccatttcaaaagaaaccaagaagaaatattatgtcaagacttacaagatcgacgttagctccaacggggaagactggatcaccataaaagaaggaaacaaacctgttctctttcagggaaacaccaaccccacagatgttgtggttgcagtattccccaaaccactgataactcgatttgtccgaatcaagcctgcaacttgggaaactggcatatctatgagatttgaagtatacggttgcaagataacagattatccttgctctggaatgttgggtatggtgtctggacttatttctgactcccagatcacatcatccaaccaaggggacagaaactggatgcctgaaaacatccgcctggtaaccagtcgctctggctgggcacttccacccgcacctcattcctacatcaatgagtggctccaaatagacctgggggaggagaagatcgtgaggggcatcatcattcagggtgggaagcaccgagagaacaaggtgttcatgaggaagttcaagatcgggtacagcaacaacggctcggactggaagatgatcatggatgacagcaaacgcaaggcgaagtcttttgagggcaacaacaactatgatacacctgagctgcggacttttccagctctctccacgcgattcatcaggatctaccccgagagagccactcatggcggactggggctcagaatggagctgctgggctgtgaagtggaagcccctacagctggaccgaccactcccaacgggaacttggtggatgaatgtgatgacgaccaggccaactgccacagtggaacaggtgatgacttccagctcacaggtggcaccactgtgctggccacagaaaagcccacggtcatagacagcaccatacaatcagagtttccaacatatggttttaactgtgaatttggctggggctctcacaagaccttctgccactgggaacatgacaatcacgtgcagctcaagtggagtgtgttgaccagcaagacgggacccattcaggatcacacaggagatggcaacttcatctattcccaagctgacgaaaatcagaagggcaaagtggctcgcctggtgagccctgtggtttattcccagaactctgcccactgcatgaccttctggtatcacatgtctgggtcccacgtcggcacactcagggtcaaactgcgctaccagaagccagaggagtacgatcagctggtctggatggccattggacaccaaggtgaccactggaaggaagggcgtgtcttgctccacaagtctctgaaactttatcaggtgattttcgagggcgaaatcggaaaaggaaaccttggtgggattgctgtggatgacattagtattaataaccacatttcacaagaagattgtgcaaggagcacgccaggatacgaaggtgaaggagaaggtgacaagaacatctccaggaagccaggcaatgtgttgaagaccttagaccccatcctcatcaccatcatagccatgagtgccctgggggtcctcctgggggctgtctgtggggtcgtgctgtactgtgcctgttggcataatgggatgtcagaaagaaacttgtctgccctggagaactataactttgaacttgtggatggtgtgaagttgaaaaaagacaaactgaatacacagagtacttattcggaggcatga

SEQ ID NO: 291193 - DNA, 497 bp, Artificial Sequence
  derived and/or modified sequence
aaccacatttcacaagaagattgtgcaaggagcacgccaggatacgaaggtgaaggagaaggtgacaagaacatctccaggaagccaggcaatgtgttgaagaccttagaccccatcctcatcaccatcatagccatgagtgccctgggggtcctcctgggggctgtctgtggggtcgtgctgtactgtgcctgttggcataatgggatgtcagaaagaaacttgtctgccctggagaactataactttgaacttgtggatggtgtgaagttgaaaaaagacaaactgaatacacagagtacttattcggaggcatgaaggcagacagagatgaaaagacagtcaaaggacggaagtggaaggacgggagtgagctggggagctgttgatctttcactatacaggctgggaagtgtgttgatgaccactgagccaggcttttctcaggagcttcaatgagtatggccgacagacatggacaaggagctgtgttcacc

SEQ ID NO: 291194 - DNA, 2721 bp, Artificial Sequence
  derived and/or modified sequence
atggagagaggtttaccgctgctgtgtgcggtcctggctctcgtgctggccccagcaggggcattccggaacgacaagtgcggggatacaattaaaattgagtcccctggttatctgactagtccaggctacccccactcttaccacccttcagagaagtgcgaatggcttattcaagctcccgacccataccaaagaattatgataaatttcaatccacactttgacctggaagatagagattgcaagtatgactatgtggaggtcttcgacggcgagaacgagaatggacacttcagaggcaagttctgtggtaagatcgctccacctcctgttgtcagcagcggccctttcctctttatcaagttcgtatccgactatgaaacccacggtgcgggattcagcatccggtacgaaattttcaagaggggacccgagtgcagccagaattatacaacaccgagcggtgtgataaaaagtccagggttcccggaaaagtatccgaacagtctggagtgcacctatatcgtcttcgtccccaaaatgtccgagatcatactcgagttcgaatcttttgacctcgagcccgattcgaacccgcctggcggaatgttctgtcgatatgatagattagaaatttgggatggtttccctgacgtgggaccgcatatcggcagatattgcggtcagaagacccctggtagaatacgctcctcctcgggaatcctgtcaatggttttctacactgatagcgccatcgctaaggaggggttttccgctaactactctgtcctgcagtcttctgtgtctgaggacttcaaatgcatggaagcgctcggaatggaaagcggcgaaatccatagtgatcaaattactgccagctctcaatactcaactaactggagcgccgagagaagccgactgaattatcccgagaatggatggactcctggagaagacagctatcgggagtggatacaagtggacctgggcctgctgagatttgtaaccgctgtaggaactcagggggctataagcaaagaaacaaaaaagaagtactacgtcaagacctacaagattgatgtctcttccaacggcgaagattggatcacaattaaggaagggaataagcccgtgctctttcagggcaacactaaccccactgacgttgttgtcgcagttttccccaaacctctgatcacccggttcgtcagaattaagccagctacctgggagacaggcatctcaatgagattcgaagtgtacggatgcaagattacagattacccttgctccggaatgttggggatggtaagcggacttataagtgattctcaaataacctctagcaatcagggagaccggaactggatgcccgagaacatccgtctggtgacttctcgcagcggatgggccttgcccccagctccccactcgtacatcaatgagtggttgcagatcgaccttggggaggagaagatcgtgaggggaataatcatacagggaggaaaacacagagagaacaaggtcttcatgcggaagtttaagattggctacagcaataatggctcggactggaagatgatcatggacgactcaaagcgcaaagccaaatcatttgaggggaataataattacgatacaccggagctccgcacatttccagcactcagcactcggtttatcagaatttacccggaaagggctacccacggagggctgggcctccgaatggaacttctgggctgtgaggtagaggcccctactgcagggccaaccacgcccaatggaaacctggtggacgaatgcgatgacgatcaggccaactgccacagtgggacaggagacgattttcagttgaccgggggaaccacagtactggccaccgaaaaacccacagtgatcgacagtacaattcagtctgagttcccaacttacgggttcaactgtgagtttggttggggcagtcacaaaactttctgtcactgggagcatgacaaccatgtacaattgaagtggagcgtcctgacatctaagacaggaccaattcaggatcacactggagacggcaattttatctatagtcaggccgacgagaatcagaaaggcaaggtagcacgcctggtgagtccagtggtctatagccagaattcagcccactgtatgactttttggtaccacatgagcggttcacacgtcgggaccctgcgcgttaaactgcgatatcagaaacccgaggagtacgaccaactagtgtggatggctattggacaccagggagatcattggaaggaaggcagggttctcctccataagtccctgaaattgtaccaggttatcttcgagggagaaattgggaagggaaatctgggtggcatcgccgttgacgatatctccatcaacaatcacatatctcaggaggattgcgcaaggagcaccccgggttacgagggagagggtgaaggggataaaaatatatccaggaaacctgggaacgtcctgaaaacacttgaccctatcctcattacgatcatcgctatgtcagcactcggagtcctgttgggagccgtctgcggtgtagtgctctattgtgcctgttggcataacggcatgtcagagagaaacctcagcgcacttgagaactacaatttcgagctggtggacggtgtgaagttgaagaaagataaactgaatactcagagtacctactcagaagcctag

SEQ ID NO: 291195 - DNA, 318 bp, Artificial Sequence
  derived and/or modified sequence
aaccacatttcccaggaagattgcgcaaggtctacgccaggctacgaaggcgagggtgaaggggataaaaacatctctcggaagcccggaaatgtgctgaaaactctggacccaattttgattactattatcgctatgagcgccctcggcgtgctgctgggggcagtttgtggagtggtcctgtactgcgcctgctggcataatggcatgagtgaacgaaacctgagtgccctcgagaactacaatttcgaattggtggatggcgtgaaactcaaaaaagacaaactcaatacccagagtacgtactccgaggcctag

SEQ ID NO: 291196 - protein, 641 aa, Artificial Sequence
  derived and/or modified sequence
MERGLPLLCAVLALVLAPAGAFRNDKCGDTIKIESPGYLTSPGYPHSYHPSEKCEWLIQAPDPYQRIMINFNPHFDLEDRDCKYDYVEVFDGENENGHFRGKFCGKIAPPPVVSSGPFLFIKFVSDYETHGAGFSIRYEIFKRGPECSQNYTTPSGVIKSPGFPEKYPNSLECTYIVFVPKMSEIILEFESFDLEPDSNPPGGMFCRYDRLEIWDGFPDVGPHIGRYCGQKTPGRIRSSSGILSMVFYTDSAIAKEGFSANYSVLQSSVSEDFKCMEALGMESGEIHSDQITASSQYSTNWSAERSRLNYPENGWTPGEDSYREWIQVDLGLLRFVTAVGTQGAISKETKKKYYVKTYKIDVSSNGEDWITIKEGNKPVLFQGNTNPTDVVVAVFPKPLITRFVRIKPATWETGISMRFEVYGCKITDYPCSGMLGMVSGLISDSQITSSNQGDRNWMPENIRLVTSRSGWALPPAPHSYINEWLQIDLGEEKIVRGIIIQGGKHRENKVFMRKFKIGYSNNGSDWKMIMDDSKRKAKSFEGNNNYDTPELRTFPALSTRFIRIYPERATHGGLGLRMELLGCEVEGTINTDQECPCARALAKDAKKKKRWADSTHCRCVRSIHGEMWSSGKGVCSLDANL

SEQ ID NO: 291197 - protein, 86 aa, Artificial Sequence
  derived and/or modified sequence
MELLGCEVEAPTAGPTTPNGNLVDECDDDQANCHSGTGDDFQLTGGTTVLATEKPTVIDSTIQSARLEVSTLNLSLHNPPQQKALI

SEQ ID NO: 291198 - protein, 77 aa, Artificial Sequence
  derived and/or modified sequence
  misc_feature (1)..(1): Xaa can be any naturally occurring amino acid
XPTAGPTTPNGNLVDECDDDQANCHSGTGDDFQLTGGTTVLATEKPTVIDSTIQSARLEVSTLNLSLHNPPQQKALI

SEQ ID NO: 291199 - DNA, 2115 bp, Artificial Sequence
  derived and/or modified sequence
atggagagaggcctgcccctgctgtgcgccgtgctggccctggtgctggcccccgccggcgccttcagaaacgacaagtgcggcgacaccatcaagatcgagagccccggctacctgaccagccccggctacccccacagctaccaccccagcgagaagtgcgagtggctgatccaggcccccgacccctaccagagaatcatgatcaacttcaacccccacttcgacctggaggacagagactgcaagtacgactacgtggaggtgttcgacggcgagaacgagaacggccacttcagaggcaagttctgcggcaagatcgcccccccccccgtggtgagcagcggccccttcctgttcatcaagttcgtgagcgactacgagacccacggcgccggcttcagcatcagatacgagatcttcaagagaggccccgagtgcagccagaactacaccacccccagcggcgtgatcaagagccccggcttccccgagaagtaccccaacagcctggagtgcacctacatcgtgttcgtgcccaagatgagcgagatcatcctggagttcgagagcttcgacctggagcccgacagcaacccccccggcggcatgttctgcagatacgacagactggagatctgggacggcttccccgacgtgggcccccacatcggcagatactgcggccagaagacccccggcagaatcagaagcagcagcggcatcctgagcatggtgttctacaccgacagcgccatcgccaaggagggcttcagcgccaactacagcgtgctgcagagcagcgtgagcgaggacttcaagtgcatggaggccctgggcatggagagcggcgagatccacagcgaccagatcaccgccagcagccagtacagcaccaactggagcgccgagagaagcagactgaactaccccgagaacggctggacccccggcgaggacagctacagagagtggatccaggtggacctgggcctgctgagattcgtgaccgccgtgggcacccagggcgccatcagcaaggagaccaagaagaagtactacgtgaagacctacaagatcgacgtgagcagcaacggcgaggactggatcaccatcaaggagggcaacaagcccgtgctgttccagggcaacaccaaccccaccgacgtggtggtggccgtgttccccaagcccctgatcaccagattcgtgagaatcaagcccgccacctgggagaccggcatcagcatgagattcgaggtgtacggctgcaagatcaccgactacccctgcagcggcatgctgggcatggtgagcggcctgatcagcgacagccagatcaccagcagcaaccagggcgacagaaactggatgcccgagaacatcagactggtgaccagcagaagcggctgggccctgccccccgccccccacagctacatcaacgagtggctgcagatcgacctgggcgaggagaagatcgtgagaggcatcatcatccagggcggcaagcacagagagaacaaggtgttcatgagaaagttcaagatcggctacagcaacaacggcagcgactggaagatgatcatggacgacagcaagagaaaggccaagagcttcgagggcaacaacaactacgacacccccgagctgagaaccttccccgccctgagcaccagattcatcagaatctaccccgagagagccacccacggcggcctgggcctgagaatggagctgctgggctgcgaggtggaggcccccaccgccggccccaccacccccaacggcaacctggtggacgagtgcgacgacgaccaggccaactgccacagcggcaccggcgacgacttccagctgaccggcgccgagaccatcttcatccccctgctgtaccacttcagcagctgcctgagctgggaccagctgacccccgtgtgcgtgctggtgaccccccacggcagagagctgcccagaaacagaagctgcctggccagaaccagagccagcagcttcccccacgtgatctggatcgacgagctgttcctgatcgccaccaccatctgcaacaacaacctgagccacttcgagagccagagactgggcctgagctag

SEQ ID NO: 291200 - DNA, 261 bp, Artificial Sequence
  derived and/or modified sequence
atggagctgctgggctgcgaggtggaggcccccaccgccggccccaccacccccaacggcaacctggtggacgagtgcgacgacgaccaggccaactgccacagcggcaccggcgacgacttccagctgaccggcggcaccaccgtgctggccaccgagaagcccaccgtgatcgacagcaccatccagagcgccagactggaggtgagcaccctgaacctgagcctgcacaaccccccccagcagaaggccctgatctag

SEQ ID NO: 291201 - DNA, 234 bp, Artificial Sequence
  derived and/or modified sequence
tgacccaccgccggccccaccacccccaacggcaacctggtggacgagtgcgacgacgaccaggccaactgccacagcggcaccggcgacgacttccagctgaccggcggcaccaccgtgctggccaccgagaagcccaccgtgatcgacagcaccatccagagcgccagactggaggtgagcaccctgaacctgagcctgcacaaccccccccagcagaaggccctgatctag

SEQ ID NO: 291202 - DNA, 2115 bp, Artificial Sequence
  derived and/or modified sequence
atggagagaggacttccgctgttatgcgccgtgttagcgctggtcctggctcctgcaggagctttccgaaacgacaaatgtggcgatacgatcaaaatcgaatcgccaggctacctgacctcccccggctacccacactcctatcacccatcagagaagtgcgaatggctgatccaggcccctgacccgtaccaaagaattatgatcaatttcaatccacactttgacctggaggatagagattgtaagtacgactacgttgaggtattcgatggcgagaacgaaaacggccacttcagaggaaaattctgcgggaaaatagctccccccccggtggtctctagcggccccttccttttcattaagtttgtcagtgattacgagactcacggggcgggctttagcatcagatacgaaatatttaagagaggccctgagtgctcccagaattacacaactcccagtggagttataaaatcacccggctttcccgagaaatatccaaattccctggaatgtacttatattgttttcgttcccaagatgtcagaaatcattctggaattcgagagttttgacctggagccagattccaaccccccgggcggtatgttctgtcgatatgatcggctcgagatctgggacgggttccctgatgtcggtccccatataggacgatattgtggtcagaagacccccggacggatacggtctagcagcggcatcctgtctatggtgttctacaccgacagcgccatagccaaagaaggcttttctgccaattactcagtgctccagtcatccgtctccgaggacttcaaatgtatggaagctcttggcatggagtccggtgaaatccattccgatcagatcactgcctcgtcccagtactccactaactggagcgctgagcgctctcggctcaactatccagaaaacgggtggacccccggcgaagatagctatcgtgaatggatccaggtggacctcgggctgttgagatttgtgaccgcagtaggaacgcagggtgctatttctaaggaaactaaaaagaaatactatgtaaagacatataaaattgatgtgagctctaatggagaagattggatcaccattaaggagggcaataagcccgtattatttcaggggaacaccaatcctacagatgttgtcgtggcagtcttccctaagccactgataaccaggtttgtgcggattaaaccagccacctgggagactgggataagcatgcgctttgaggtgtatggttgcaagattactgattacccatgcagcggcatgttaggaatggtcagtggcttgatttctgactcacagatcacgtcttccaaccaaggagacagaaattggatgcctgaaaatatcagactggtcacgtcacggtcaggctgggctttgccgcctgcaccacattcctatatcaatgagtggctgcagatagacctgggagaggagaagatcgttcgcggcatcatcattcagggcggcaagcaccgcgaaaataaggtttttatgcgcaagttcaagattggatactccaataacggtagcgactggaagatgattatggatgatagcaagagaaaggcgaagtcattcgagggaaacaataactacgatacccctgaattgagaacattccccgccctctctacacgcttcattaggatctacccagaaagggcaacccatggtggtttagggctgcgaatggagttgctgggatgtgaggtcgaagcacctaccgccggtcccacaaccccaaatggcaatttagtggacgaatgtgacgatgaccaggcaaactgtcatagcggcacgggggacgatttccagctcactggtgccgagactatctttatccccctgctctatcatttttcaagttgtctcagttgggatcaactcaccccagtgtgtgtgctagttacaccgcacggcagagaacttccgagaaataggtcttgcttggcccggacaagagcaagttccttcccccacgtcatatggattgacgaactcttcctcattgcaaccacgatttgtaacaataacctcagccattttgaatcccagcgcctgggcctgtcatag

SEQ ID NO: 291203 - DNA, 261 bp, Artificial Sequence
  derived and/or modified sequence
atggagttattgggatgtgaagtggaagctccgactgcaggtcctacaacgccaaacggaaacctcgtcgacgaatgtgacgatgaccaagcaaactgccacagcggtacgggcgatgactttcagctcaccggaggcaccactgtcctcgccactgaaaagccgactgtcatcgattctaccattcagtcagctcggctcgaggtctctactctgaatctgtccctgcacaacccaccccagcagaaagcattgatttag

SEQ ID NO: 291204 - DNA, 234 bp, Artificial Sequence
  derived and/or modified sequence
tgacctactgccggacccacaacccccaatggaaacctggtggacgagtgcgacgacgaccaggctaattgtcactctgggactggtgatgacttccagctcactggcgggactactgtactggctaccgagaagccaacagttatcgatagcaccatccagtccgctaggctcgaggtgagcactctgaacttgagccttcataatccaccccagcagaaagccctcatttag

SEQ ID NO: 291205 - DNA, 2115 bp, Artificial Sequence
  derived and/or modified sequence
atggagcggggcctgcccctgctgtgtgctgtgctggccctggtgctggccccagctggggccttcagaaatgacaagtgtggggacaccatcaagattgagagccctggctacctgaccagccctggctacccccacagctaccaccccagcgagaagtgtgagtggctgatccaggccccagacccctaccagaggatcatgatcaacttcaacccccactttgacctggaggaccgggactgcaagtatgactatgtggaggtgtttgatggagaaaatgaaaatggccacttccggggcaagttctgtgggaagatcgcccctcctcctgtggtgagcagcggccccttcctgttcatcaagtttgtgtctgactatgagacccacggggccggcttcagcatccgctatgagatcttcaagaggggccctgagtgcagccagaactacaccaccccatctggagtcatcaagagccctggcttccctgagaagtaccccaacagcctggagtgcacctacatcgtgtttgtgcccaagatgtctgagatcatcctggagtttgagagctttgacctggagccagacagcaaccccccaggcggcatgttctgccgctatgaccggctggagatctgggatggcttcccagatgtgggcccccacatcggccgctactgcggccagaagaccccaggccgcatccgcagcagcagcggcatcctgtccatggtgttctacacagattctgccatcgccaaggagggcttcagcgccaactacagcgtgctgcagagctctgtgtctgaggacttcaagtgcatggaggccctgggcatggagagcggggagatccacagcgaccagatcacagccagcagccagtacagcaccaactggagcgctgagaggagccggctgaactacccagaaaatggctggaccccaggagaagattcctaccgggagtggatccaggtggacctgggcctgctgcgctttgtgacagctgtgggcacccagggcgccatcagcaaggagaccaagaagaagtactacgtgaagacctacaagattgatgtgagcagcaatggagaggactggatcaccatcaaggagggcaacaagcctgtgctcttccagggcaacaccaaccccacagatgtggtggtggccgtgttccccaagcccctcatcaccaggtttgtgcgcatcaagccagccacctgggagaccggcatctccatgagatttgaggtgtatggctgcaagatcacagactacccctgcagcggcatgctgggcatggtgtctggcctcatcagtgacagccagatcaccagcagcaaccagggcgacaggaactggatgcctgagaacatccggctggtgaccagccgcagcggctgggccctgcccccagccccccacagctacatcaatgagtggctgcagattgacctgggggaggagaagatcgtgcggggcatcatcatccagggcggcaagcaccgggagaacaaggtgttcatgaggaagttcaagattggctacagcaacaacggcagtgactggaagatgatcatggatgacagcaagaggaaggccaagagctttgagggcaacaacaactatgacaccccagagctgcggaccttccctgccctgagcacccgcttcatccgcatctacccagagcgggccacccatggaggcctgggcctgaggatggagctgctgggctgtgaggtggaggcccccacagctggccccaccacccccaacggcaacctggtggatgaatgtgatgatgaccaggccaactgccacagcggcactggagatgacttccagctgactggagctgagaccatcttcatccccctgctgtaccacttcagcagctgcctgtcctgggaccagctgacccctgtgtgtgtgctggtgacccctcatggccgggagctgcccaggaacagaagctgcctggcccggacccgggccagcagcttcccccacgtgatctggattgatgagctgttcctgattgccaccaccatctgcaacaacaacctgagccactttgagagccagaggctgggcctgtcctag

SEQ ID NO: 291206 - DNA, 261 bp, Artificial Sequence
  derived and/or modified sequence
atggagctgctgggctgtgaggtggaggcccccacagctggccccaccaccccaaatggaaacctggtggatgaatgtgatgatgaccaggccaactgccacagcggcactggagatgacttccagctgaccggcggcaccaccgtgctggccacagagaagcccaccgtcatcgacagcaccatccagagcgcccggctggaggtgtccaccctgaacctgagcctgcacaaccccccccagcagaaggccctgatctag

SEQ ID NO: 291207 - DNA, 234 bp, Artificial Sequence
  derived and/or modified sequence
tgacccacagctggccccaccacccccaacggcaacctggtggatgaatgtgatgatgaccaggccaactgccacagcggcactggagatgacttccagctgactggaggcaccaccgtgctggccacagagaagcccaccgtgattgacagcaccatccagagcgcccggctggaggtgtccaccctgaacctgagcctgcacaaccccccccagcagaaggccctgatctag

SEQ ID NO: 291208 - DNA, 2115 bp, Artificial Sequence
  derived and/or modified sequence
atggagcggggcctgcccctgctgtgcgccgtgctggccctggtgctggcccctgccggcgccttccgcaatgacaaatgtggggacacgatcaagatcgaaagtcctggatacttaacttctcctggatatccccattcttaccaccccagcgagaagtgtgagtggctgatacaggctccggacccctaccaaagaatcatgataaacttcaatccgcattttgatttggaggacagggactgtaagtacgattatgtcgaagtcttcgacggcgaaaatgaaaacggtcacttccgcggaaagttctgtgggaaaatcgcaccaccgcccgttgtctctagtggtcccttccttttcatcaagttcgtcagcgattatgagactcacggagccgggttctctattcgttacgaaatatttaagcggggacccgagtgttcgcagaattacacaaccccatctggcgtgattaaatcgcctgggttcccggaaaagtacccgaacagcctggagtgtacatatattgttttcgtgcctaagatgagtgaaatcattctggaattcgaatcatttgatctcgaacctgattctaatcctcccggtgggatgttttgcaggtacgaccgccttgaaatctgggacggatttcctgacgtgggcccacacataggacgctattgcggccaaaaaacacctggccgaattcgaagcagtagcggcatcctgtccatggtcttctacaccgactctgctatcgctaaggaaggattttccgctaactattcagtgctgcagtccagtgtctcagaagactttaaatgtatggaggctctcggtatggagagcggagaaatacattcagaccaaatcaccgccagtagtcagtactcaaccaactggagtgccgagcgatcccggctcaactatcccgaaaacggctggactcccggtgaggatagttaccgagaatggatacaggtcgacctgggccttctgaggttcgtaactgccgtgggaactcagggggcaatcagtaaggagactaagaaaaaatattatgtgaagacctacaagatcgacgttagctcaaacggtgaggactggatcactataaaggagggtaataaacccgtgctgttccagggaaacactaatccaaccgacgtcgttgtggctgtgtttccaaagcctctgatcacgcggttcgtccgtataaagcccgctacctgggaaacaggcatctccatgcgctttgaggtatatggatgcaaaatcactgattatccgtgctcagggatgctgggtatggttagtggcctcatcagcgattcacagatcacttctagcaatcaaggggacaggaactggatgcctgaaaatatcaggctcgtgacgtcacgcagtggctgggcactccccccagcacctcacagctacatcaatgagtggctgcaaatcgatctgggagaagaaaaaatcgtccgtggcattattatacagggtggtaagcaccgcgaaaacaaagtctttatgaggaagttcaagatagggtacagcaacaatggtagtgactggaaaatgattatggacgactccaagcggaaggcgaaatccttcgaaggaaataacaactacgatacccctgagctgcgtacttttcccgcactgagtacccgcttcatacggatctatccagagcgggcgacccacggcggtttgggcctgaggatggagctcctgggctgcgaggtggaggcacctactgctggcccaacaacccccaatggtaaccttgtggacgaatgcgatgatgaccaggccaactgccattccggcaccggagacgactttcagcttaccggagccgagacaatattcattcccttgttatatcatttttccagttgcttgagctgggaccagcttacgcccgtgtgcgtgcttgtcaccccacacggccgggaactccctaggaaccggtcctgcttagctcggacccgcgcatcatcattcccccatgtcatatggattgatgagcttttccttatcgccaccaccatctgcaataacaacctctcccactttgaatcgcagcggctcgggttatcctag

SEQ ID NO: 291209 - DNA, 261 bp, Artificial Sequence
  derived and/or modified sequence
atggagctgctgggctgcgaggtggaggcccccaccgccggccccaccaccccgaatggcaacctagtggacgagtgcgacgatgaccaagctaactgtcactccggtactggtgacgactttcaattgaccggcgggaccacagtgctggctaccgagaaaccaacagtgattgactctactatccaaagtgcccggttagaggtatcaacactaaacctatctttgcataatccccctcagcagaaggccctgatatag

SEQ ID NO: 291210 - DNA, 234 bp, Artificial Sequence
  derived and/or modified sequence
tgacccaccgccggccccaccacccccaacggcaacctggtggacgagtgcgatgatgaccaggccaactgtcacagcggaaccggggatgattttcagttaaccggcggcactacagtcttagcaacagagaaaccgaccgtgatcgattccaccattcagtccgcccgactggaggtgagcaccctcaacctgtctctccacaacccacctcagcaaaaggcactgatctag

SEQ ID NO: 291211 - DNA, 3737 bp, Artificial Sequence
  derived and/or modified sequence
atggagagggggctgccgctcctctgcgccgtgctcgccctcgtcctcgccccggccggcgcttttcgcaacgataaatgtggcgatactataaaaattgaaagccccgggtaccttacatctcctggttatcctcattcttatcacccaagtgaaaaatgcgaatggctgattcaggctccggacccataccagagaattatgatcaacttcaaccctcacttcgatttggaggacagagactgcaagtatgactacgtggaagtcttcgatggagaaaatgaaaatggacattttaggggaaagttctgtggaaagatagcccctcctcctgttgtgtcttcagggccatttctttttatcaaatttgtctctgactacgaaacacatggtgcaggattttccatacgttatgaaattttcaagagaggtcctgaatgttcccagaactacacaacacctagtggagtgataaagtcccccggattccctgaaaaatatcccaacagccttgaatgcacttatattgtctttgtgccaaagatgtcagagattatcctggaatttgaaagctttgacctggagcctgactcaaatcctccaggggggatgttctgtcgctacgaccggctagaaatctgggatggattccctgatgttggccctcacattgggcgttactgtggacagaaaacaccaggtcgaatccgatcctcatcgggcattctctccatggttttttacaccgacagcgcgatagcaaaagaaggtttctcagcaaactacagtgtcttgcagagcagtgtctcagaagatttcaaatgtatggaagctctgggcatggaatcaggagaaattcattctgaccagatcacagcttcttcccagtatagcaccaactggtctgcagagcgctcccgcctgaactaccctgagaatgggtggactcccggagaggattcctaccgagagtggatacaggtagacttgggccttctgcgctttgtcacggctgtcgggacacagggcgccatttcaaaagaaaccaagaagaaatattatgtcaagacttacaagatcgacgttagctccaacggggaagactggatcaccataaaagaaggaaacaaacctgttctctttcagggaaacaccaaccccacagatgttgtggttgcagtattccccaaaccactgataactcgatttgtccgaatcaagcctgcaacttgggaaactggcatatctatgagatttgaagtatacggttgcaagataacagattatccttgctctggaatgttgggtatggtgtctggacttatttctgactcccagatcacatcatccaaccaaggggacagaaactggatgcctgaaaacatccgcctggtaaccagtcgctctggctgggcacttccacccgcacctcattcctacatcaatgagtggctccaaatagacctgggggaggagaagatcgtgaggggcatcatcattcagggtgggaagcaccgagagaacaaggtgttcatgaggaagttcaagatcgggtacagcaacaacggctcggactggaagatgatcatggatgacagcaaacgcaaggcgaagtcttttgagggcaacaacaactatgatacacctgagctgcggacttttccagctctctccacgcgattcatcaggatctaccccgagagagccactcatggcggactggggctcagaatggagctgctgggctgtgaagtggaagcccctacagctggaccgaccactcccaacgggaacttggtggatgaatgtgatgacgaccaggccaactgccacagtggaacaggtgatgacttccagctcacaggtgcagaaaccatcttcatcccattgctgtaccatttcagttcatgtcttagttgggaccagctaacgcctgtgtgtgtgcttgtaactccgcatggcagagagctgcccaggaatagaagctgccttgccagaacacgtgcatcttcatttcctcatgtcatctggatagatgagttgttcttaatagccacaaccatttgtaacaataatttgagccatttcgagagccaaaggctaggattatcttaattgaataagaatttccccatggctaaatgtactaaaccgatccttattttcattattttcagacccccccccaataacacgtgcaccacccctacgtaaccacacacttcagaatgtttattttcattttctaatgaggacaagtttttttgagtggatcctttatccaacaaatggataaagttaggcttatatttgaagtgcggcttttaagttgggatttggtaaatcattgtacattaacatttacaaaggcagaattagctgctatttcacatcaccaccgaccagcaaatgcatcagagatgttgtgtgccaaatgtctcactaattaatctagagtattactctctaatctcctaaaaccctaaaagctaggaaatgaccttctcttccacttggaatggcagaggaaatattaggcaagtggagaaatgggattataccatttggaaattggccaaggcactagggttttcaccctgtggttgcaaaaggtatcgtgggacttttactgctccctgggtcaaaacgcagtttcaatagcatctgactctcatttgagattaaacatgagcttttgaatgcaggtctgcatttttacccagaagggactcggagagcccacataattaatttccatgggcaaaactgaaggcgttaccatgtaacttcataataaagccatgttattggctaatgcattcgtacaaaatctggaaggaagtgtcctagagtacatttccaattatttcaaaagctctcctctgaaggagtgagagggctctgcactctaagatggaataaagagtaaaagaaagaaaaaaaaattgaaaatctgtcccagaaatttagtactgtgaactgagtttacatttaaatcccacctcctaaagctgtctctctccaaatttccaggataatcatttacattcatatggccaataaatgtcacattgctatgagcttttgaatgcaaatcttgtatacaagcagccacaagccacaaaacttagattaattaatgcagagacattttctgtgtaacatgtcaagttcaagttgaaaactcaaccactgatataaaaaacagagtactattccatgaaccaagtcctctggaagcttcccggggttgcctgtaaacactctgccacaaacctcaggctttttacagaccccgtcacacatccatagtgaaatttctcataaaaaaggaatgattgcaggatcccagtgtgccctttcaattgccctcttgtggaaggggttcttttcttcataaaccctaaagtggtcagttaatattgattagaaacaaagcctcagatttactcctcatatcagaacaaccagccttctcatttttgcattagttcatgactgaatcaattgaaactgaaggctttgaatgaaatagggcgagtatgttagcctggagcaaattgtgtatggcagcgagttacaaaccacagaaaatgggtcatttatagtggaaacactgacaacctttcaaaactataaggttttgctttacctacagtgtttcaattatttctttggtagatagaagaaagttcattctgattttttctttttacatattagcatggtgaaaaaaa

SEQ ID NO: 291212 - DNA, 2252 bp, Artificial Sequence
  derived and/or modified sequence
ggaagaggaacaagtgtgggaaaagggagaggaagccggagctaaatgacaggatgcaggcgacttgagacacaaaaagagaagcgttcctctcggatccaggcattgcctcgctgctttcttttctccaagacgggctgaggattgtacagctctaggcggagttggggctcttcggatcgcttagattctcctctttgctgcatttccccccacgtcctcgttctcccgcgtctgcctgcggacccggagaagggagaatggagagggggctgccgctcctctgcgccgtgctcgccctcgtcctcgccccggccggcgcttttcgcaacgataaatgtggcgatactataaaaattgaaagccccgggtaccttacatctcctggttatcctcattcttatcacccaagtgaaaaatgcgaatggctgattcaggctccggacccataccagagaattatgatcaacttcaaccctcacttcgatttggaggacagagactgcaagtatgactacgtggaagtcttcgatggagaaaatgaaaatggacattttaggggaaagttctgtggaaagatagcccctcctcctgttgtgtcttcagggccatttctttttatcaaatttgtctctgactacgaaacacatggtgcaggattttccatacgttatgaaattttcaagagaggtcctgaatgttcccagaactacacaacacctagtggagtgataaagtcccccggattccctgaaaaatatcccaacagccttgaatgcacttatattgtctttgtgccaaagatgtcagagattatcctggaatttgaaagctttgacctggagcctgactcaaatcctccaggggggatgttctgtcgctacgaccggctagaaatctgggatggattccctgatgttggccctcacattgggcgttactgtggacagaaaacaccaggtcgaatccgatcctcatcgggcattctctccatggttttttacaccgacagcgcgatagcaaaagaaggtttctcagcaaactacagtgtcttgcagagcagtgtctcagaagatttcaaatgtatggaagctctgggcatggaatcaggagaaattcattctgaccagatcacagcttcttcccagtatagcaccaactggtctgcagagcgctcccgcctgaactaccctgagaatgggtggactcccggagaggattcctaccgagagtggatacaggtagacttgggccttctgcgctttgtcacggctgtcgggacacagggcgccatttcaaaagaaaccaagaagaaatattatgtcaagacttacaagatcgacgttagctccaacggggaagactggatcaccataaaagaaggaaacaaacctgttctctttcagggaaacaccaaccccacagatgttgtggttgcagtattccccaaaccactgataactcgatttgtccgaatcaagcctgcaacttgggaaactggcatatctatgagatttgaagtatacggttgcaagataacagattatccttgctctggaatgttgggtatggtgtctggacttatttctgactcccagatcacatcatccaaccaaggggacagaaactggatgcctgaaaacatccgcctggtaaccagtcgctctggctgggcacttccacccgcacctcattcctacatcaatgagtggctccaaatagacctgggggaggagaagatcgtgaggggcatcatcattcagggtgggaagcaccgagagaacaaggtgttcatgaggaagttcaagatcgggtacagcaacaacggctcggactggaagatgatcatggatgacagcaaacgcaaggcgaagtcttttgagggcaacaacaactatgatacacctgagctgcggacttttccagctctctccacgcgattcatcaggatctaccccgagagagccactcatggcggactggggctcagaatggagctgctgggctgtgaagtggaagcccctacagctggaccgaccactcccaacgggaacttggtggatgaatgtgatgacgaccaggccaactgccacagtggaacaggtgatgacttccagctcacaggtggcaccactgtgctggccacagaaaagcccacggtcatagacagcaccatacaatcagccaggctggaagtttccacattgaacctctcactccataaccctccccaacaaaaggcattgatctaa

SEQ ID NO: 291213 - DNA, 574 bp, Artificial Sequence
  derived and/or modified sequence
cccctacagctggaccgaccactcccaacgggaacttggtggatgaatgtgatgacgaccaggccaactgccacagtggaacaggtgatgacttccagctcacaggtggcaccactgtgctggccacagaaaagcccacggtcatagacagcaccatacaatcagccaggctggaagtttccacattgaacctctcactccataaccctccccaacaaaaggcattgatctaaaaacatatcctttaaataaccaaattgccacaagttacatgatcaagacaagaagataaaagagcagtaaaatacaaaaacttagagcggttcacctggttaaatgtacaggatggggaaggacattggaaggtaaaggcagactgtcattctctgaagcgagaagtgcctgaaacattttttcaggcaaagcggttccatgtcctggtcatttcaaaaatatccaagttcctacattttatggtatcatcagaatatgaagagccaaaagaatggatgatgtcattttctgttctataaacaataaatgtaatgtattaacaaagtaaatacaggcagaa

SEQ ID NO: 291214 - DNA, 2115 bp, Artificial Sequence
  derived and/or modified sequence
atggagagaggactccctcttctgtgtgcagtattggctcttgtgctggcgcctgcaggagcctttagaaacgataagtgcggagacactataaaaatcgagtccccaggatatctgactagccctgggtatccacactcgtatcacccctcagaaaaatgcgagtggttgattcaagcccctgacccatatcagagaatcatgatcaacttcaacccacacttcgacctcgaggatagggactgtaagtacgactacgtcgaggtatttgatggagagaatgagaatggacatttccgtggaaagttctgcggcaagattgccccaccgcctgtcgtctccagcggccctttcttgtttatcaagtttgtttccgattatgagacacatggtgcgggattttcgatcaggtatgaaatcttcaagcggggaccagagtgtagccaaaattacactacaccctctggcgtgattaagtcccccggttttcctgaaaagtatcctaactccctggagtgtacgtatatcgtgtttgtgccaaagatgagcgagatcatacttgagtttgaatcttttgatctcgagcccgatagtaatcctccgggaggtatgttctgcaggtatgataggttggagatttgggatggcttcccagacgtgggaccacatattggtcgctattgcggacaaaagacccctggaaggattcggtcctcaagcggaattttgagcatggtgttttatactgatagcgcaatagccaaggaaggcttcagcgctaattatagcgttctccagtcctccgtcagcgaagactttaagtgcatggaagcactcggcatggaatccggagaaatacattccgaccaaataaccgcatctagccagtattcaaccaactggtcagcagagaggtcccggttgaactatcccgagaatggctggactcccggtgaggattcatatcgcgaatggattcaggtcgatctgggactcttgcgcttcgttaccgctgtagggacccaaggtgcaataagcaaagagacaaagaaaaaatactatgtgaaaacctacaagattgacgtgtcaagtaacggggaggactggattaccatcaaagaaggtaacaaacctgtactcttccaaggcaatacgaaccctaccgacgttgtcgtggctgtgttccccaaacctctgatcacgcggttcgtgaggattaagcccgctacctgggaaaccggcatctccatgcggttcgaagtctacggatgtaagataaccgactacccttgcagtgggatgttagggatggtttcagggttaatttccgactctcaaatcacgagctcgaatcaaggagatcgaaactggatgccagagaatatacggctggtcaccagtagaagcggatgggccttgccacctgcacctcattcttacattaacgagtggcttcagatcgacttgggtgaagaaaaaatagttcggggaatcattattcagggcggtaagcaccgggagaataaagtcttcatgaggaagtttaagattggctattcaaacaacggcagcgactggaagatgattatggacgattcaaagcggaaagcaaagagtttcgaaggcaataacaactacgatacacctgaactgagaacttttcccgcactgtctacaagattcattcgaatctaccccgagcgagctactcatggagggctgggattgcgaatggaacttttgggatgcgaggttgaggccccaacagccggacccaccacacccaatggcaatctagtggatgagtgcgatgacgaccaggctaattgtcattcggggactggcgatgactttcagctgaccggagccgagacaatctttatccccctactgtaccactttagttcttgcttgagctgggaccagctcactcctgtatgcgtgttagttacccctcatggacgggaactgcctagaaatcggtcctgcctcgcccgtacacgggcatcctccttccctcacgttatatggattgacgagttatttctgatagctacgaccatctgtaacaataacctgagccacttcgaatcccagcgattgggtttgtcttag

SEQ ID NO: 291215 - DNA, 261 bp, Artificial Sequence
  derived and/or modified sequence
atggagctgctggggtgtgaggttgaagcacctactgctggccctaccactccaaatgggaacttggtagacgaatgtgacgatgatcaggcaaattgtcactctggaacaggcgatgatttccagttaactggtgggacgaccgttcttgctacggaaaaacctacggtaatcgatagcaccatacagtcagcgaggcttgaagtatctactctgaatctaagcctccacaaccctcctcagcagaaggccctaatttag

SEQ ID NO: 291216 - DNA, 234 bp, Artificial Sequence
  derived and/or modified sequence
tagccaaccgctggtcctacgaccccaaacggcaacttggtagacgaatgcgacgatgaccaggccaattgccactccgggaccggcgatgacttccaattgaccggtggaaccaccgtgctagccaccgagaaaccaacagtaatagatagcactattcaatccgccagacttgaggtttcgactctgaacctgagtctccataacccaccccagcagaaagcgctcatctag

SEQ ID NO: 291217 - protein, 294 aa, Artificial Sequence
  derived and/or modified sequence
MPGPPLSSARHALPLGSWESWCCCCLIPADRPWDRGQHWQLEMADTRSVHETRFEAAVKVIQSLPKNGSFQPTNEMMLKFYSFYKQATEGPCKLSRPGFWDPIGRYKWDAWSSLGDMTKEEAMIAYVEEMKKIIETMPMTEKVEELLRVIGPFYEIVEDKKSGRSSDITSVRLEKISKCLEDLGNVLTSTPNAKTVNGKAESSDSGAESEEEEAQEEVKGAEQSDNDKKMMKKSADHKNLEVIVTNGYDKDGFVQDIQNDIHASSSLNGRSTEEVKPIDENLGQTGKSAVCIHQ

SEQ ID NO: 291218 - DNA, 885 bp, Artificial Sequence
  derived and/or modified sequence
atgcccggcccccccctgagcagcgccagacacgccctgcccctgggcagctgggagagctggtgctgctgctgcctgatccccgccgacagaccctgggacagaggccagcactggcagctggagatggccgacaccagaagcgtgcacgagaccagattcgaggccgccgtgaaggtgatccagagcctgcccaagaacggcagcttccagcccaccaacgagatgatgctgaagttctacagcttctacaagcaggccaccgagggcccctgcaagctgagcagacccggcttctgggaccccatcggcagatacaagtgggacgcctggagcagcctgggcgacatgaccaaggaggaggccatgatcgcctacgtggaggagatgaagaagatcatcgagaccatgcccatgaccgagaaggtggaggagctgctgagagtgatcggccccttctacgagatcgtggaggacaagaagagcggcagaagcagcgacatcaccagcgtgagactggagaagatcagcaagtgcctggaggacctgggcaacgtgctgaccagcacccccaacgccaagaccgtgaacggcaaggccgagagcagcgacagcggcgccgagagcgaggaggaggaggcccaggaggaggtgaagggcgccgagcagagcgacaacgacaagaagatgatgaagaagagcgccgaccacaagaacctggaggtgatcgtgaccaacggctacgacaaggacggcttcgtgcaggacatccagaacgacatccacgccagcagcagcctgaacggcagaagcaccgaggaggtgaagcccatcgacgagaacctgggccagaccggcaagagcgccgtgtgcatccaccagtag

SEQ ID NO: 291219 - DNA, 885 bp, Artificial Sequence
  derived and/or modified sequence
atgcctggccctccactgtctagcgcccgccatgccttacctcttgggtcctgggaatcttggtgttgttgttgcttgatccctgcagaccgcccatgggatcgcggtcagcactggcagctcgaaatggccgatacaagaagcgttcacgagacgcggtttgaggccgcagtgaaagtcatacagtcgctccccaagaacggcagtttccaacccaccaatgaaatgatgctgaagttttattcgttctataaacaggcaactgagggtccctgcaaactgtcacgaccagggttctgggatccaattggtagatacaagtgggatgcttggtcgtcgcttggggacatgaccaaggaggaggcaatgattgcttacgtcgaagaaatgaagaaaattatcgaaaccatgccgatgactgagaaggtggaggagctgctgcgggttatcggacccttttatgaaatcgttgaggataagaagagtggtcgcagcagcgacatcacttcggtccggctggagaaaatcagtaagtgcctggaggatctgggaaacgttctgacatcgactccaaatgcaaagaccgtaaatggtaaagcggaatcaagcgactccggcgccgagtcggaggaggaagaggcccaggaagaggtcaaaggggccgaacagagcgacaacgataagaaaatgatgaaaaaaagcgccgatcataagaatctcgaagtgatcgtgacaaacggttacgataaggacggatttgtccaagacatacaaaatgacatccacgcctcctcatccctgaacggccgatcaacagaggaggtgaagccaattgatgagaatcttggccagactgggaagagcgcggtgtgcattcaccaatag

SEQ ID NO: 291220 - DNA, 1014 bp, Artificial Sequence
  derived and/or modified sequence
agtgggtcctccggtgactctggggcggggctgtggggagggcacggactgacagacggactccggcggaatggggggtgtggctgctccgccagggtccccagggtgggagagcggctccgcggccaccgatgcccggaccccctctgtcttctgctagacatgctcttcctctcggctcttgggaaagctggtgctgctgctgcctgattcccgccgacagaccttgggaccggggccaacactggcagctggagatggcggacacgagatccgtgcacgagactaggtttgaggcggccgtgaaggtgatccagagtttgccgaagaatggttcattccagccaacaaatgaaatgatgcttaaattttatagcttctataagcaggcaactgaaggaccctgtaaactttcaaggcctggattttgggatcctattggaagatataaatgggatgcttggagttcactgggtgatatgaccaaagaggaagccatgattgcatatgttgaagaaatgaaaaagattattgaaactatgccaatgactgagaaagttgaagaattgctgcgtgtcataggtccattttatgaaattgtcgaggacaaaaagagtggcaggagttctgatataacctcagtccgactggagaaaatctctaaatgtttagaagatcttggtaatgttctcacttctactccaaacgccaaaaccgttaatggtaaagctgaaagcagtgacagtggagccgagtctgaggaagaagaggcccaagaagaagtgaaaggagcagaacaaagtgataatgataagaaaatgatgaagaagtcagcagaccataagaatttggaagtcattgtcactaatggctatgataaagatggctttgttcaggatatacagaatgacattcatgccagttcttccctgaatggcagaagcactgaagaagtaaagcccattgatgaaaacttggggcaaactggaaaatctgctgtttgcattcaccaag

SEQ ID NO: 291221 - DNA, 885 bp, Artificial Sequence
  derived and/or modified sequence
atgcctggcccccccctgagcagcgcccggcatgccctgcccctgggctcctgggagagctggtgctgctgctgcctgatcccagctgaccggccctgggaccggggccagcactggcagctggagatggctgacaccaggtctgtgcatgagaccaggtttgaggccgctgtgaaggtgatccagagcctgcccaagaatggcagcttccagcccaccaatgagatgatgctgaagttctacagcttctacaagcaggccacagagggcccctgcaagctgagcaggcctggcttctgggaccccatcggccgctacaagtgggatgcctggagcagcctgggggacatgaccaaggaggaggccatgattgcctacgtggaggagatgaagaagatcatcgagaccatgcccatgacagagaaggtggaggagctgctgcgggtcatcggccccttctatgagatcgtggaggacaagaagagcggccgcagcagtgacatcacctctgtgcggctggagaagatcagcaagtgcctggaggacctgggcaatgtgctgaccagcaccccaaatgccaagacagtgaatggcaaggccgagagcagtgacagcggggctgagagcgaggaggaggaggcccaggaggaggtgaagggagctgagcagagcgacaatgacaagaagatgatgaagaagtctgctgaccacaagaacctggaggtgattgtgaccaacggctatgacaaggatggctttgtgcaggacatccagaatgacatccacgccagcagcagcctgaatggccgcagcacagaggaggtgaagcccattgatgagaacctgggccagacaggcaagtctgctgtgtgcatccaccagtag

SEQ ID NO: 291222 - DNA, 885 bp, Artificial Sequence
  derived and/or modified sequence
atgcccggcccccccctgagcagcgcccggcacgccctgcccctgggatcctgggagagttggtgctgctgctgtttaatacctgccgatagaccttgggatcgtggccagcactggcagctggagatggcagataccaggagtgttcacgaaaccaggttcgaggccgccgtgaaggttatccagtctctccctaaaaacggttccttccagcccaccaatgaaatgatgctgaaattttactccttctacaagcaggccaccgaaggaccatgtaaactgtctagaccaggtttttgggatccaatcggccgctacaaatgggacgcttggtcttccctgggagacatgaccaaagaagaagccatgattgcctatgttgaagaaatgaaaaagatcatcgagacaatgccaatgactgagaaggtggaagaactgctgcgggttataggacccttctacgaaatcgtggaggacaaaaaatccggcaggtcctcggatattacctccgtgaggcttgaaaagatttccaagtgtctggaggatctggggaacgttcttactagtactcctaatgccaaaactgtgaacggcaaagccgagagctcagattccggcgctgagtctgaagaagaggaggctcaggaagaggtcaaaggagcggagcagtccgacaacgataagaagatgatgaagaagagcgcagaccacaagaacctcgaagtcatagttacgaatggatatgataaagacggttttgtacaggacattcaaaacgacattcacgcctcatccagtctcaacggacggagtacagaggaggtgaagcccatcgacgagaatctgggacagaccggtaagtctgccgtgtgtattcatcagtag

SEQ ID NO: 291223 - DNA, 885 bp, Artificial Sequence
  derived and/or modified sequence
atgcctgggcctcctctgtccagcgctagacacgcgttacctcttggatcctgggagtcctggtgttgttgctgcctgattcctgccgaccgaccttgggatagaggacagcactggcagcttgagatggcagacactcgttctgtgcacgagactaggtttgaggccgcagtgaaggtgatacagtctctgccaaaaaacggttcatttcaacctactaatgagatgatgctgaaattttactcattttacaaacaggccacagagggcccttgcaagttgtctcgaccaggtttctgggaccccattggcaggtacaagtgggatgcgtggtctagtcttggggatatgaccaaggaagaggccatgatagcatatgtggaggaaatgaaaaagataatcgaaactatgcctatgacggaaaaggtggaagaattacttagggtcattggcccattttacgagattgtagaggataagaagtctggtaggagtagtgacatcacatccgtccgtctcgagaaaataagtaaatgcctggaggacctggggaatgtcctcactagcaccccaaatgccaagaccgtgaatggcaaggcagaaagctcagattcaggcgcagaaagtgaagaagaagaagcgcaagaagaggtgaaaggggcagagcaatccgacaacgataagaaaatgatgaaaaagagcgccgaccataaaaatctggaagtaattgttaccaatggctatgacaaggacggattcgtacaggatattcagaacgatatccatgcatcatctagcctgaacggcagatccacagaggaagtaaagcctattgacgagaatctgggacaaactggaaagagcgccgtctgcattcatcagtag

SEQ ID NO: 291224 - protein, 534 aa, Artificial Sequence
  derived and/or modified sequence
MFQFHAGSWESWCCCCLIPADRPWDRGQHWQLEMADTRSVHETRFEAAVKVIQSLPKNGSFQPTNEMMLKFYSFYKQATEGPCKLSRPGFWDPIGRYKWDAWSSLGDMTKEEAMIAYVEEMKKIIETMPMTEKVEELLRVIGPFYEIVEDKKSGRSSDITSVRLEKISKCLEDLGNVLTSTPNAKTVNGKAESSDSGAESEEEEAQEEVKGAEQSDNDKKMMKKSADHKNLEVIVTNGYDKDGFVQDIQNDIHASSSLNGRSTEEVKPIDENLGQTGKSAVCIHQDINDDHVEDVTGIQHLTSDSDSEVYCDSMEQFGQEESLDSFTSNNGPFQYYLGGHSSQPMENSGFREDIQVPPGNGNIGNMQVVAVEGKGEVKHGGEDGRNNSGAPHREKRGGETDEFSNVRRGRGHRMQHLSEGTKGRQVGSGGDGERWGSDRGSRGSLNEQIALVLMRLQEDMQNVLQRLQKLETLTALQAKSSTSTLQTAPQPTSQRPSWWPFEMSPGVLTFAIIWPFIAQWLVYLYYQRRRRKLN

SEQ ID NO: 291225 - protein, 531 aa, Artificial Sequence
  derived and/or modified sequence
FHAGSWESWCCCCLIPADRPWDRGQHWQLEMADTRSVHETRFEAAVKVIQSLPKNGSFQPTNEMMLKFYSFYKQATEGPCKLSRPGFWDPIGRYKWDAWSSLGDMTKEEAMIAYVEEMKKIIETMPMTEKVEELLRVIGPFYEIVEDKKSGRSSDITSVRLEKISKCLEDLGNVLTSTPNAKTVNGKAESSDSGAESEEEEAQEEVKGAEQSDNDKKMMKKSADHKNLEVIVTNGYDKDGFVQDIQNDIHASSSLNGRSTEEVKPIDENLGQTGKSAVCIHQDINDDHVEDVTGIQHLTSDSDSEVYCDSMEQFGQEESLDSFTSNNGPFQYYLGGHSSQPMENSGFREDIQVPPGNGNIGNMQVVAVEGKGEVKHGGEDGRNNSGAPHREKRGGETDEFSNVRRGRGHRMQHLSEGTKGRQVGSGGDGERWGSDRGSRGSLNEQIALVLMRLQEDMQNVLQRLQKLETLTALQAKSSTSTLQTAPQPTSQRPSWWPFEMSPGVLTFAIIWPFIAQWLVYLYYQRRRRKLN

SEQ ID NO: 291226 - DNA, 1605 bp, Artificial Sequence
  derived and/or modified sequence
atgttccagttccacgccggcagctgggagagctggtgctgctgctgcctgatccccgccgacagaccctgggacagaggccagcactggcagctggagatggccgacaccagaagcgtgcacgagaccagattcgaggccgccgtgaaggtgatccagagcctgcccaagaacggcagcttccagcccaccaacgagatgatgctgaagttctacagcttctacaagcaggccaccgagggcccctgcaagctgagcagacccggcttctgggaccccatcggcagatacaagtgggacgcctggagcagcctgggcgacatgaccaaggaggaggccatgatcgcctacgtggaggagatgaagaagatcatcgagaccatgcccatgaccgagaaggtggaggagctgctgagagtgatcggccccttctacgagatcgtggaggacaagaagagcggcagaagcagcgacatcaccagcgtgagactggagaagatcagcaagtgcctggaggacctgggcaacgtgctgaccagcacccccaacgccaagaccgtgaacggcaaggccgagagcagcgacagcggcgccgagagcgaggaggaggaggcccaggaggaggtgaagggcgccgagcagagcgacaacgacaagaagatgatgaagaagagcgccgaccacaagaacctggaggtgatcgtgaccaacggctacgacaaggacggcttcgtgcaggacatccagaacgacatccacgccagcagcagcctgaacggcagaagcaccgaggaggtgaagcccatcgacgagaacctgggccagaccggcaagagcgccgtgtgcatccaccaggacatcaacgacgaccacgtggaggacgtgaccggcatccagcacctgaccagcgacagcgacagcgaggtgtactgcgacagcatggagcagttcggccaggaggagagcctggacagcttcaccagcaacaacggccccttccagtactacctgggcggccacagcagccagcccatggagaacagcggcttcagagaggacatccaggtgccccccggcaacggcaacatcggcaacatgcaggtggtggccgtggagggcaagggcgaggtgaagcacggcggcgaggacggcagaaacaacagcggcgccccccacagagagaagagaggcggcgagaccgacgagttcagcaacgtgagaagaggcagaggccacagaatgcagcacctgagcgagggcaccaagggcagacaggtgggcagcggcggcgacggcgagagatggggcagcgacagaggcagcagaggcagcctgaacgagcagatcgccctggtgctgatgagactgcaggaggacatgcagaacgtgctgcagagactgcagaagctggagaccctgaccgccctgcaggccaagagcagcaccagcaccctgcagaccgccccccagcccaccagccagagacccagctggtggcccttcgagatgagccccggcgtgctgaccttcgccatcatctggcccttcatcgcccagtggctggtgtacctgtactaccagagaagaagaagaaagctgaactag

SEQ ID NO: 291227 - DNA, 1596 bp, Artificial Sequence
  derived and/or modified sequence
ttccacgccggcagctgggagagctggtgctgctgctgcctgatccccgccgacagaccctgggacagaggccagcactggcagctggagatggccgacaccagaagcgtgcacgagaccagattcgaggccgccgtgaaggtgatccagagcctgcccaagaacggcagcttccagcccaccaacgagatgatgctgaagttctacagcttctacaagcaggccaccgagggcccctgcaagctgagcagacccggcttctgggaccccatcggcagatacaagtgggacgcctggagcagcctgggcgacatgaccaaggaggaggccatgatcgcctacgtggaggagatgaagaagatcatcgagaccatgcccatgaccgagaaggtggaggagctgctgagagtgatcggccccttctacgagatcgtggaggacaagaagagcggcagaagcagcgacatcaccagcgtgagactggagaagatcagcaagtgcctggaggacctgggcaacgtgctgaccagcacccccaacgccaagaccgtgaacggcaaggccgagagcagcgacagcggcgccgagagcgaggaggaggaggcccaggaggaggtgaagggcgccgagcagagcgacaacgacaagaagatgatgaagaagagcgccgaccacaagaacctggaggtgatcgtgaccaacggctacgacaaggacggcttcgtgcaggacatccagaacgacatccacgccagcagcagcctgaacggcagaagcaccgaggaggtgaagcccatcgacgagaacctgggccagaccggcaagagcgccgtgtgcatccaccaggacatcaacgacgaccacgtggaggacgtgaccggcatccagcacctgaccagcgacagcgacagcgaggtgtactgcgacagcatggagcagttcggccaggaggagagcctggacagcttcaccagcaacaacggccccttccagtactacctgggcggccacagcagccagcccatggagaacagcggcttcagagaggacatccaggtgccccccggcaacggcaacatcggcaacatgcaggtggtggccgtggagggcaagggcgaggtgaagcacggcggcgaggacggcagaaacaacagcggcgccccccacagagagaagagaggcggcgagaccgacgagttcagcaacgtgagaagaggcagaggccacagaatgcagcacctgagcgagggcaccaagggcagacaggtgggcagcggcggcgacggcgagagatggggcagcgacagaggcagcagaggcagcctgaacgagcagatcgccctggtgctgatgagactgcaggaggacatgcagaacgtgctgcagagactgcagaagctggagaccctgaccgccctgcaggccaagagcagcaccagcaccctgcagaccgccccccagcccaccagccagagacccagctggtggcccttcgagatgagccccggcgtgctgaccttcgccatcatctggcccttcatcgcccagtggctggtgtacctgtactaccagagaagaagaagaaagctgaactag

SEQ ID NO: 291228 - DNA, 1747 bp, Artificial Sequence
  derived and/or modified sequence
ggaactgacccgcttcgctcccgggcctcctccttttggggcatgttgatccgcggctgcgctccatgttccagtttcatgcaggctcttgggaaagctggtgctgctgctgcctgattcccgccgacagaccttgggaccggggccaacactggcagctggagatggcggacacgagatccgtgcacgagactaggtttgaggcggccgtgaaggtgatccagagtttgccgaagaatggttcattccagccaacaaatgaaatgatgcttaaattttatagcttctataagcaggcaactgaaggaccctgtaaactttcaaggcctggattttgggatcctattggaagatataaatgggatgcttggagttcactgggtgatatgaccaaagaggaagccatgattgcatatgttgaagaaatgaaaaagattattgaaactatgccaatgactgagaaagttgaagaattgctgcgtgtcataggtccattttatgaaattgtcgaggacaaaaagagtggcaggagttctgatataacctcagtccgactggagaaaatctctaaatgtttagaagatcttggtaatgttctcacttctactccaaacgccaaaaccgttaatggtaaagctgaaagcagtgacagtggagccgagtctgaggaagaagaggcccaagaagaagtgaaaggagcagaacaaagtgataatgataagaaaatgatgaagaagtcagcagaccataagaatttggaagtcattgtcactaatggctatgataaagatggctttgttcaggatatacagaatgacattcatgccagttcttccctgaatggcagaagcactgaagaagtaaagcccattgatgaaaacttggggcaaactggaaaatctgctgtttgcattcaccaagatataaatgatgatcatgttgaagatgttacaggaattcagcatttgacaagcgattcagacagtgaagtttactgtgattctatggaacaatttggacaagaagagtctttagacagctttacgtccaacaatggaccatttcagtattacttgggtggtcattccagtcaacccatggaaaattctggatttcgtgaagatattcaagtacctcctggaaatggcaacattgggaatatgcaggtggttgcagttgaaggaaaaggtgaagtcaagcatggaggagaagatggcaggaataacagcggagcaccacaccgggagaagcgaggcggagaaactgacgaattctctaatgttagaagaggaagaggacataggatgcaacacttgagcgaaggaaccaagggccggcaggtgggaagtggaggtgatggggagcgctggggctccgacagagggtcccgaggcagcctcaatgagcagatcgccctcgtgctgatgagactgcaggaggacatgcagaatgtccttcagagactgcagaaactggaaacgctgactgctttgcaggcaaaatcatcaacatcaacattgcagactgctcctcagcccacctcacagagaccatcttggtggcccttcgagatgtctcctggtgtgctaacgtttgccatcatatggccttttattgcacagtggttggtgtatttatactatcaaagaaggagaagaaaactgaactgaggaaaatggtgttttcctcaagaagactactggaactggatgacctcagaatgaactggattgtggtgttcacaaga

SEQ ID NO: 291229 - DNA, 3892 bp, Artificial Sequence
  derived and/or modified sequence
catttcccataagcccgcggggcagggcgaggggcgggcgtcggggacattaccggacaggccttgtccggcaataccaagtttcatgcaggctcttgggaaagctggtgctgctgctgcctgattcccgccgacagaccttgggaccggggccaacactggcagctggagatggcggacacgagatccgtgcacgagactaggtttgaggcggccgtgaaggtgatccagagtttgccgaagaatggttcattccagccaacaaatgaaatgatgcttaaattttatagcttctataagcaggcaactgaaggaccctgtaaactttcaaggcctggattttgggatcctattggaagatataaatgggatgcttggagttcactgggtgatatgaccaaagaggaagccatgattgcatatgttgaagaaatgaaaaagattattgaaactatgccaatgactgagaaagttgaagaattgctgcgtgtcataggtccattttatgaaattgtcgaggacaaaaagagtggcaggagttctgatataacctcagtccgactggagaaaatctctaaatgtttagaagatcttggtaatgttctcacttctactccaaacgccaaaaccgttaatggtaaagctgaaagcagtgacagtggagccgagtctgaggaagaagaggcccaagaagaagtgaaaggagcagaacaaagtgataatgataagaaaatgatgaagaagtcagcagaccataagaatttggaagtcattgtcactaatggctatgataaagatggctttgttcaggatatacagaatgacattcatgccagttcttccctgaatggcagaagcactgaagaagtaaagcccattgatgaaaacttggggcaaactggaaaatctgctgtttgcattcaccaagatataaatgatgatcatgttgaagatgttacaggaattcagcatttgacaagcgattcagacagtgaagtttactgtgattctatggaacaatttggacaagaagagtctttagacagctttacgtccaacaatggaccatttcagtattacttgggtggtcattccagtcaacccatggaaaattctggatttcgtgaagatattcaagtacctcctggaaatggcaacattgggaatatgcaggtggttgcagttgaaggaaaaggtgaagtcaagcatggaggagaagatggcaggaataacagcggagcaccacaccgggagaagcgaggcggagaaactgacgaattctctaatgttagaagaggaagaggacataggatgcaacacttgagcgaaggaaccaagggccggcaggtgggaagtggaggtgatggggagcgctggggctccgacagagggtcccgaggcagcctcaatgagcagatcgccctcgtgctgatgagactgcaggaggacatgcagaatgtccttcagagactgcagaaactggaaacgctgactgctttgcaggcaaaatcatcaacatcaacattgcagactgctcctcagcccacctcacagagaccatcttggtggcccttcgagatgtctcctggtgtgctaacgtttgccatcatatggccttttattgcacagtggttggtgtatttatactatcaaagaaggagaagaaaactgaactgaggaaaatggtgttttcctcaagaagactactggaactggatgacctcagaatgaactggattgtggtgttcacaagaaaatcttagtttgtgatgattacattgctttttgttgtccagtagtttagtttgtgtacatatatacacatatatattttgcactacacaaacgataacattttaaggactaatattgctgatacttgaataatcaatctctactaggttataagtagtatacacagatttaccctgcccttgaacttgaaggacattaaattattaatgatcatttggtaacatgtttacctgattatcttccatagagtaacataagctgcttttcaaaggtaccattgtgataatgagatcaaatttataagttattatttttaattttctaaattaaataaaagaaagaatgcaaaccaggagtgaatttcaaatgagatgtaatcgactttatatcttagtcacggagttgccatggcatgtagtagaaaaccacaggaagaatggtcatattcactttgtgggctgcccataatctttcttgggcattcacaactcttgagtttggtgttcaggcatcattattaaaaagtggagtcctatgtaccagactgagtttttacaaatgatttgcaggctagacataacccactgatggaaatggtgaagaatgagcttcatgtaggtttaaaagtgtattctgagcctgtagatgattaatcaggtttttattcaatcatataaatgtattcctttgtaatcatttttgtttaactgaggatatctagtgtctgcttcatagggtgctttgaaatataaaatgaaaacttatttatactgtttttacaacagtcaaaaaggaaacacacgaaaatcacttttctgcaactgatgaactatatagactggactcttaacctcttagtgcctcagtttttccttcggggtatactattttagatacacctacttcacaggagtactggagggatttgcaagctaacgggccaaatgcttccataggaataaggcatgcccagctaacagaaatttaagtccctcttccccacctctctcatctagaccaaaaagaagactacaatttagatccttggagacttttcctgtatgccttccaaaacttcctgctcacttagatgtaccttgtgctttgaagatttctttgatgcagtctttgtaacaaataatttttttttttaaatggagtttctctcttgttgcccaggctggagggcaatggcgtgatcttggctcactgcaacttccacctcctgggttcaagtgattctcctgcctcactcccaagtagctgggattacaggcatgcaccaccatgcctggctaattttgtatttttagtagagacggggtttctccatgttggtaaggctgatctcaaactcccaacctcaggtgatctgcctgcctcggcctcccaaagtgctgggattagaggcgtgagccactgcacctggcctgtagcaaataatttttaagcattctcaagatgtatgatgttgggtttaacatcatatgttcacagtgttttaaataagaaataatctgtctttagtatacagaatggttctttgtttgcctgaaaagtataagaatacaatttacttttcccaaactctttttccttatttttttctttcaaataactttaattatttaatcccatactgattaaaatatgtctgtctaaagggatctactactatttgcttttaaaaaagtgttccctatttatttaggaaaaagtgaagcaagcaactgaatttatatgtaaaaataacatttagacctgtggatcaaagattattttcaaaaatgagatatcaatttggtatcagtaaaaagtgtcttttctcttagtatataaataaataaaatgcaaattaagagtgtaagcagttgtgaatcattacaagcagtctgggataactaactcctagggataaccatttctatcctgttccaaagtcttattttatagtttgaaaagcactttgcacacagttcttgtatataaaagtaaagatgtaattataggatatagtgttcctgctttgtttaataagaacctcatttaaacttgacagctatggtatttttttaatgataacttcttttctgtttattgtaaaactaagttaaaaataaaaggttaatgagaaatg

SEQ ID NO: 291230 - DNA, 1605 bp, Artificial Sequence
  derived and/or modified sequence
atgttccagttccacgctggctcttgggagagttggtgctgttgctgccttatccccgccgaccggccatgggaccgtggacagcattggcagctggaaatggccgacacccggtccgtgcacgaaacccgcttcgaagcagcagtcaaggtgatccagagcctccctaaaaatggctccttccagccgactaatgaaatgatgttaaaattttactccttctataaacaggcgacagaaggcccctgtaaactcagtcggccaggcttctgggatcctatcggaaggtacaaatgggacgcatggagttctctcggagatatgacaaaagaggaagcaatgatagcctatgtggaggagatgaagaagataattgagactatgcctatgactgagaaagtggaggaactgctgagggttattggtccattttacgagattgtggaagacaagaaatctggacggtcgtcagatatcaccagcgtccgacttgagaagatatctaaatgcctcgaggatctcggcaacgtactgacgtctactccgaatgcgaagacagtaaacggaaaggccgagtcctccgattctggggccgaatctgaggaagaggaagcccaggaagaagtgaagggcgccgaacagagcgacaatgataagaaaatgatgaaaaaatcagccgaccacaagaatctggaggtcatcgtgacgaatggctacgacaaggacggattcgtccaggacatccagaacgatatccatgcctcctctagcttaaatggaagatccacagaggaagtcaagccaatcgatgagaatttaggccagactgggaaatcagctgtatgcatccatcaagacatcaacgatgatcacgtcgaagacgttaccggcattcagcacttgaccagtgattcagattcagaagtctattgcgatagtatggagcaattcggccaagaggagtcgctcgactccttcactagcaataatggtccctttcagtattatttgggtggtcattcctcacagcccatggaaaactccggattcagagaggatatacaagtgccccccggcaatggaaacattggaaacatgcaggtcgtcgctgtggagggcaaaggtgaagtgaaacacggcggggaagacggacgcaataacagtggggctcctcaccgggagaagaggggtggcgaaactgacgagttctcaaatgtccgtaggggaagagggcaccgcatgcagcatctttccgagggtaccaaggggaggcaggtcggtagtggcggcgatggcgaaagatggggaagcgataggggttcgagaggttcactcaatgagcaaatcgcgctggtactgatgaggttgcaggaggacatgcagaatgtcctgcaacgactccagaagctggagacactgactgccctgcaagcgaaaagcagcacttctacactgcagacggctccccagcctacatcccagcgccccagttggtggccattcgaaatgtctccaggagtcctgacctttgcaattatctggccattcatcgcccaatggctggtttatctttactatcagcggagaaggagaaagctcaattag

SEQ ID NO: 291231 - DNA, 876 bp, Artificial Sequence
  derived and/or modified sequence
ttaccggacaggccttgtccggcaataccaagtttcatgcaggctcttgggaaagctggtgctgctgctgcctgattcccgccgacagaccttgggaccggggccaacactggcagctggagatggcggacacgagatccgtgcacgagactaggtttgaggcggccgtgaaggtgatccagagtttgccgaagaatggttcattccagccaacaaatgaaatgatgcttaaattttatagcttctataagcaggcaactgaaggaccctgtaaactttcaaggcctggattttgggatcctattggaagatataaatgggatgcttggagttcactgggtgatatgaccaaagaggaagccatgattgcatatgttgaagaaatgaaaaagattattgaaactatgccaatgactgagaaagttgaagaattgctgcgtgtcataggtccattttatgaaattgtcgaggacaaaaagagtggcaggagttctgatataacctcagtccgactggagaaaatctctaaatgtttagaagatcttggtaatgttctcacttctactccaaacgccaaaaccgttaatggtaaagctgaaagcagtgacagtggagccgagtctgaggaagaagaggcccaagaagaagtgaaaggagcagaacaaagtgataatgataagaaaatgatgaagaagtcagcagaccataagaatttggaagtcattgtcactaatggctatgataaagatggctttgttcaggatatacagaatgacattcatgccagttcttccctgaatggcagaagcactgaagaagtaaagcccattgatgaaaacttggggcaaactggaaaatctgctgtttgcattcacc

SEQ ID NO: 291232 - DNA, 1596 bp, Artificial Sequence
  derived and/or modified sequence
tttcacgccggctcttgggaaagctggtgctgttgttgcctgatcccagccgatcgcccctgggacaggggacagcattggcaactcgaaatggcagatacacgctcagttcacgaaacacggttcgaggccgctgtgaaagttattcaaagtctgcctaagaacggtagttttcagccgactaatgagatgatgctgaagttttactctttctacaaacaggccaccgaaggtccctgcaaactctcccgccccggtttctgggaccccattggccgatacaaatgggatgcatggtccagcctgggagacatgactaaggaggaggcaatgatcgcttacgtcgaggagatgaagaagattattgagactatgcctatgactgaaaaggtcgaggaactcctgcgagtgatcgggcccttttacgagatcgtggaagataagaagtccggtcgctcaagcgacatcacctctgtaaggctggagaagatctccaagtgtctcgaagacctcggcaacgtgttgacaagtacgccaaacgcaaagaccgtgaacggtaaggccgaatcctctgacagcggcgctgagagtgaagaggaagaggcgcaggaggaggtcaagggggcagaacagtcagacaacgacaagaaaatgatgaagaaatctgctgatcacaaaaacctggaggtgatagtcacaaacggatacgataaggatgggttcgtgcaagatattcaaaacgacatccatgcctcttcatccttaaacgggcggagcacagaggaagtcaaaccaattgatgaaaacctcggtcagacggggaagagcgctgtttgcattcaccaggacatcaatgatgaccatgtcgaagacgtgactggaatccagcacttgacctctgactctgactcagaggtatattgtgactccatggaacagtttggtcaggaggagagtctagactctttcacgtccaacaatggcccctttcaatattaccttggcggccactcgtcccagcccatggaaaattcagggttccgcgaagatatccaggttccccctggaaatggaaacatcggtaacatgcaggtggtcgcggttgaagggaaaggggaggtgaagcatggtggcgaagatggtcggaacaatagcggggccccacacagagaaaagcgaggtggggagacagacgaattcagtaatgtaagacggggaaggggccacaggatgcagcacctcagcgagggtactaagggtcgccaagtcggcagtggaggcgacggagaaaggtggggaagtgaccgcggttcccggggttctctgaatgagcagatcgccctggtgcttatgcgcctacaggaggacatgcagaatgtgctgcaacggctgcagaaattagaaactctcacagccctccaggcaaagtcatctaccagcacattgcagaccgcgccccagcctactagccaacgtccaagctggtggcccttcgaaatgtccccaggggtattaacctttgccatcatctggccgttcattgctcagtggctggtttatctctattaccaacgacggagacgaaaactgaattag

SEQ ID NO: 291233 - DNA, 1605 bp, Artificial Sequence
  derived and/or modified sequence
atgttccagttccacgccggctcctgggagagctggtgctgctgctgcctgatcccagctgaccggccctgggaccggggccagcactggcagctggagatggctgacaccaggtctgtgcatgagaccaggtttgaagctgctgtgaaggtgatccagagcctgcccaagaatggcagcttccagcccaccaatgagatgatgctgaagttctacagcttctacaagcaggccacagagggcccctgcaagctgagccggcccggcttctgggaccccatcggccgctacaagtgggatgcctggagcagcctgggggacatgaccaaggaggaggccatgattgcctacgtggaggagatgaagaagatcatcgagaccatgcccatgacagagaaggtggaggagctgctgcgggtgattggccccttctatgaaattgtggaggacaagaagagcggccgcagcagtgacatcacctctgtgcggctggagaagatcagcaagtgcctggaggacctgggcaatgtgctgaccagcaccccaaatgccaagacagtgaatggcaaggccgagagcagtgacagcggggctgagagcgaggaggaggaggcccaggaggaggtgaagggagctgagcagagcgacaatgacaagaagatgatgaagaagtctgctgaccacaagaacctggaggtgattgtgaccaacggctatgacaaggatggctttgtgcaggacatccagaatgacatccacgccagcagcagcctgaatggccgcagcacagaggaggtgaagcccattgatgagaacctgggccagacaggcaagtctgctgtgtgcatccaccaggacatcaatgatgaccacgtggaggatgtgacaggcatccagcacctgaccagtgacagcgacagcgaggtgtactgtgacagcatggagcagtttggccaggaggagagcctggacagcttcaccagcaacaacggccccttccagtactacctgggcggccacagcagccagcccatggagaacagcggcttccgggaggacatccaggtgcccccaggaaatggaaatattggcaacatgcaggtggtggccgtggagggcaagggggaggtgaagcatggaggagaagatggaagaaacaacagcggggccccccaccgggagaagagaggaggagaaacagatgagttcagcaatgtgagaagaggccggggccacaggatgcagcacctgtctgagggcaccaagggccggcaggtgggcagcggaggagatggagagcgctggggcagtgaccggggcagccggggcagcctgaatgagcagatcgccctggtgctgatgaggctgcaggaggacatgcagaatgtgctgcagaggctgcagaagctggagaccctgacagccctgcaggccaagagcagcaccagcaccctgcagacagccccccagcccaccagccagaggcccagctggtggccctttgagatgagccctggggtgctgacctttgccatcatctggcccttcatcgcccagtggctggtgtacctgtactaccagaggagaagaaggaagctgaactag

SEQ ID NO: 291234 - DNA, 1596 bp, Artificial Sequence
  derived and/or modified sequence
ttccacgccggctcctgggagagctggtgctgctgctgcctgatcccagctgaccggccctgggaccggggccagcactggcagctggagatggctgacaccaggtctgtgcatgagaccaggtttgaggccgctgtgaaggtgatccagagcctgcccaagaatggcagcttccagcccaccaatgagatgatgctgaagttctacagcttctacaagcaggccacagagggcccctgcaagctgagcaggcctggcttctgggaccccatcggccgctacaagtgggatgcctggagcagcctgggggacatgaccaaggaggaggccatgattgcctacgtggaggagatgaagaagatcatcgagaccatgcccatgacagagaaggtggaggagctgctgcgggtcatcggccccttctatgagatcgtggaggacaagaagagcggccgcagcagtgacatcacctctgtgcggctggagaagatcagcaagtgcctggaggacctgggcaatgtgctgaccagcaccccaaatgccaagacagtgaatggcaaggccgagagcagtgacagcggggctgagagcgaggaggaggaggcccaggaggaggtgaagggagctgagcagagcgacaatgacaagaagatgatgaagaagtctgctgaccacaagaacctggaggtgattgtgaccaacggctatgacaaggatggctttgtgcaggacatccagaatgacatccacgccagcagcagcctgaatggccgcagcacagaggaggtgaagcccattgatgagaacctgggccagacaggcaagtctgctgtgtgcatccaccaggacatcaatgatgaccacgtggaggatgtgacaggcatccagcacctgaccagtgacagcgacagcgaggtgtactgtgacagcatggagcagtttggccaggaggagagcctggacagcttcaccagcaacaacggccccttccagtactacctgggcggccacagcagccagcccatggagaacagcggcttccgggaggacatccaggtgcccccaggaaatggaaacatcggcaacatgcaggtggtggccgtggagggcaaaggagaggtgaagcacggcggagaagatggcaggaacaacagcggggccccccaccgggagaagaggggcggggagacagatgagttcagcaatgtgcggcggggccggggccacaggatgcagcacctgtctgagggcaccaagggccggcaggtgggcagcggaggagatggagagcgctggggcagtgaccggggcagccggggcagcctgaatgagcagatcgccctggtgctgatgaggctgcaggaggacatgcagaatgtgctgcagaggctgcagaagctggagaccctgacagccctgcaggccaagagcagcaccagcaccctgcagacagccccccagcccaccagccagaggcccagctggtggccctttgagatgagccctggggtgctgacctttgccatcatctggcccttcatcgcccagtggctggtgtacctgtactaccagaggagaagaaggaagctgaactag

SEQ ID NO: 291235 - DNA, 1605 bp, Artificial Sequence
  derived and/or modified sequence
atgttccagttccacgccggcagctgggagagctggtgctgctgctgtctaatacccgccgatcgcccatgggatcgtggacagcactggcagttggaaatggctgatacccggtcagttcacgagaccagatttgaagccgccgtgaaagtgatccagtccctgcccaagaatggttcctttcaacccacaaatgaaatgatgcttaagttctattccttttataaacaggcgactgagggcccctgtaaacttagtagacctggcttctgggatcccattgggagatataagtgggatgcctggtcttcccttggagacatgacgaaggaggaggccatgatcgcatacgtcgaggaaatgaagaaaatcatcgagaccatgcccatgaccgaaaaagtcgaggaattgctcagagtaatcggacccttctacgaaatcgtagaggataagaaatctggtagatcatcggatattacctctgtgaggcttgaaaaaatatctaaatgtctggaagacctgggcaacgtcctgacctcaacacctaacgccaaaaccgtcaatggaaaagccgagagttcagattccggtgccgagtcagaagaggaggaggcacaagaggaggtcaaaggcgctgaacaaagtgacaacgacaaaaaaatgatgaaaaagtctgcagaccacaagaatctggaagtcatcgtaacaaacggctatgacaaagatggcttcgtgcaagatatccagaatgacattcatgctagctcatcgctgaacggacggtctaccgaagaggtgaaaccaattgacgagaatctcggccagactggaaaatcggctgtttgcatccaccaggatatcaacgatgatcacgtcgaagacgtcactggtattcagcatttaacttcagactctgattccgaggtttactgcgacagcatggagcaattcggtcaggaagaatcactcgattccttcaccagtaataacggaccgtttcaatattatctcgggggccactcttcacagccaatggagaactccggtttcagagaggacatccaggtacctcctggcaacggcaatataggcaatatgcaggtagtagctgttgaaggcaagggggaagtaaagcacgggggggaagacggccggaacaatagcggcgctccccatcgcgaaaagcgaggaggagagaccgatgaattcagcaatgttagacgcggcaggggacaccgcatgcaacacctatctgagggcaccaagggcagacaggtaggttccggaggggacggagagcgatggggctccgaccgcggcagcaggggtagcctgaacgagcagatcgcactggtgctaatgaggctgcaggaggacatgcagaatgtgcttcagcggctgcagaagctcgaaactctaaccgcactccaggccaagtctagtacatctaccctccagactgcacctcagccaacttcacaacgtcctagctggtggcctttcgaaatgagtcccggtgtgctaaccttcgccatcatctggccattcatcgcacagtggctggtctatttgtactatcaaaggcgaaggagaaaactgaattag

SEQ ID NO: 291236 - DNA, 1596 bp, Artificial Sequence
  derived and/or modified sequence
ttccacgccggcagctgggagagctggtgctgctgctgcctgatccccgccgaccgtccgtgggacaggggccagcactggcagctagaaatggctgatactaggtccgtacacgaaacacgattcgaagcggctgtgaaagtgatccagtccctgccaaaaaatgggtcttttcaaccaaccaatgaaatgatgctgaaattttatagtttttacaaacaggccacagagggcccctgtaagttgtcaagaccaggcttctgggaccctatcgggcggtacaaatgggatgcatggtcaagtctcggagatatgacaaaagaggaggccatgatcgcctacgttgaagagatgaaaaagataattgagactatgcccatgacagagaaagtggaagagctcctgcgggtaattgggccgttctatgagatagtggaagacaaaaagtccggacgcagtagcgatatcacctcagtgcgacttgagaagatctcgaagtgtctggaagatttaggaaatgtgctcacctccaccccgaacgcgaagacagtgaatggaaaggccgaaagtagcgattccggagccgaaagtgaagaggaggaggcccaagaagaagtgaaaggagcagaacaaagtgacaatgataagaagatgatgaagaaaagtgctgaccataagaacttggaggtgattgtgaccaacggatacgataaggacggatttgtccaggacatccagaatgatatccacgcctctagttccctgaatggaaggtcgaccgaggaagtgaagcctatcgacgagaacctggggcaaaccgggaagagtgccgtttgtattcaccaggatatcaacgacgatcacgtagaagatgtgacaggaattcagcatttaacgagcgactccgactccgaggtgtactgtgactccatggagcagttcggccaagaagagagtttagattcctttacgtctaataatggccccttccagtattatctgggcggacacagttcacagcctatggaaaatagcggattcagagaagacatccaggttccacctgggaacggcaatatagggaatatgcaggtggtggcggtagagggcaaaggcgaagtgaagcacggaggagaagacggtcgcaacaattccggtgccccacatagggagaaaagaggtggtgagacagatgagttttcgaacgtccgacgcgggcggggtcatcgaatgcagcacttatccgagggcactaaggggcgccaggtcggtagtggcggagacggtgaaagatgggggtctgaccggggctctaggggttctttgaacgagcagatcgccctggtactcatgcgcctccaggaggatatgcagaacgtgctgcaaaggctgcagaaactggagaccctcacagctctccaggcaaagtcgtctacttctacacttcagactgcaccccagcccacgtcccagcgccccagctggtggccgtttgagatgtcccctggagttctcaccttcgcaatcatctggccattcatcgcccagtggcttgtgtacttatattaccagaggcgccgccggaaactaaactag

SEQ ID NO: 291237 - DNA, 1605 bp, Artificial Sequence
  derived and/or modified sequence
atgtttcaatttcatgctggatcatgggaaagttggtgctgctgttgtctcatccccgctgatcgcccatgggacaggggccagcactggcaattggagatggcggatactcgctctgtccatgagacacgctttgaggccgctgttaaagtgatacagtcactgccgaaaaatggcagtttccagccgaccaatgaaatgatgcttaaattttactccttctacaagcaggcaaccgaaggtccgtgcaaactgtcccgccctggcttttgggacccgatcggacgctataagtgggacgcgtggagttcactgggcgatatgaccaaggaagaagcaatgatcgcctacgtggaggagatgaaaaagattattgagaccatgccaatgaccgagaaggttgaagaactgttgcgtgtcatcggacctttctatgaaattgttgaggataagaaatcaggccgtagctctgatataactagtgtgaggctcgagaagatttctaagtgtctggaggatttggggaacgtcctgacctccacacctaatgcaaagacagtgaatgggaaagccgagtcatctgattctggcgcagagtccgaagaggaagaagcccaggaagaggtgaagggcgctgagcaatctgacaatgataagaagatgatgaagaagtcagccgatcacaagaacttagaggtcattgttaccaatggctacgataaagacgggtttgttcaggatattcaaaacgatattcatgcctccagcagccttaacggcagaagcacggaggaagtgaaaccaattgatgagaatctgggtcagacgggtaagtcagccgtttgtatccaccaggatataaatgatgaccacgttgaggacgtcacggggatccaacacctgacctctgattcagattctgaagtgtattgcgacagcatggagcagttcggtcaagaagaaagccttgactcattcacttctaacaatgggcctttccaatactatctcggcggacactcatctcagccaatggaaaattcgggattcagggaagacatccaggtgcctcctggaaatgggaatattggtaacatgcaggtggttgccgtggagggaaagggcgaagtgaagcatggaggagaggatggcagaaacaatagcggcgcacctcatagagagaaacgcggaggtgagacagatgagttttctaatgtcagaaggggcagaggacatcgcatgcagcacctgtccgaagggacaaaaggcaggcaggtaggctcaggcggtgacggcgagcgctgggggtcagacagagggagccgagggtccctgaacgagcaaatcgccctggtgctcatgcggctccaggaggatatgcagaatgtgctgcagcggctccagaagctcgaaacactgactgccctgcaggccaagtcttcaacctctaccctgcagactgcacctcagccaacttcgcaacgccctagttggtggcctttcgaaatgtcacctggcgttcttacatttgcaataatctggccattcattgcccagtggctagtatacctttactaccaacgcagacgccgaaaactgaattag

SEQ ID NO: 291238 - DNA, 1596 bp, Artificial Sequence
  derived and/or modified sequence
ttccacgctggctcgtgggaatcttggtgctgctgttgtctaatcccggcagataggccttgggatcggggtcagcattggcagcttgagatggccgacacccgctccgtccatgagacccgtttcgaagcagcagttaaggtgattcaaagtttgcctaaaaatggcagcttccagcccacgaacgaaatgatgctcaagttctatagcttttacaaacaagctactgaggggccatgcaagctctcccgcccagggttttgggaccctattggacgctacaagtgggacgcctggagcagcctcggggacatgacaaaggaggaggccatgatcgcatacgtggaggagatgaagaagatcatcgagaccatgccaatgaccgaaaaagtggaggaactgttgcgcgtcataggacccttttatgaaatcgtagaagacaagaaaagtggaagatcttccgatatcacttccgtgagactggagaagatatccaagtgtctagaggaccttgggaatgtgctgaccagtacacccaatgccaagactgtcaatggtaaagcagagagtagcgactcgggcgctgagagtgaggaggaagaggcccaagaagaagtgaagggagccgagcagtctgacaacgataaaaagatgatgaagaagagcgcggaccataaaaatttggaggtgattgtaacaaacggatatgataaagatggattcgtgcaggacatccagaacgatatccacgcctcatcttcactcaatggtagatcaacagaggaagtgaaacctatagacgaaaatttgggacagacaggaaagtcagctgtgtgcatacaccaggacatcaacgatgaccacgtcgaggatgtgacaggcatccagcatctgactagcgattctgattccgaggtctactgtgactcaatggaacagtttggccaggaggaatccctggacagttttacctctaacaatggtccctttcagtactacctcggcggtcacagcagccagcccatggagaactccggttttcgggaagatatacaggtgcctcctggcaacggaaacatcggtaacatgcaggttgtagcggtggagggcaagggagaggtcaagcacgggggtgaagacgggagaaacaacagcggagcaccacacagagagaagcgaggaggggaaacggatgagttctccaacgtccgcagaggcaggggtcaccgcatgcagcatctgagcgaaggcactaaggggagacaggtgggttctggtggtgatggagagaggtggggctccgacaggggatcacggggttcgctcaatgagcagattgccttggtgttaatgaggctccaagaagacatgcagaacgtgctgcagcgactccagaagcttgagactcttacggccctgcaggccaagtcctccacctcgacactgcagaccgctcctcagccaaccagccagcgtcccagttggtggccctttgagatgagccctggtgtcctgaccttcgcaatcatctggccgtttattgcacaatggctggtctacttgtactaccaaagacgcaggcgcaaattgaactag

SEQ ID NO: 291239 - protein, 251 aa, Artificial Sequence
  derived and/or modified sequence
MADTRSVHETRFEAAVKVIQSLPKNGSFQPTNEMMLKFYSFYKQATEGPCKLSRPGFWDPIGRYKWDAWSSLGDMTKEEAMIAYVEEMKKIIETMPMTEKVEELLRVIGPFYEIVEDKKSGRSSDITSVRLEKISKCLEDLGNVLTSTPNAKTVNGKAESSDSGAESEEEEAQEEVKGAEQSDNDKKMMKKSADHKNLEVIVTNGYDKDGFVQDIQNDIHASSSLNGRSTEEVKPIDENLGQTGKSAVCIH

SEQ ID NO: 291240 - DNA, 756 bp, Artificial Sequence
  derived and/or modified sequence
atggccgacaccagaagcgtgcacgagaccagattcgaggccgccgtgaaggtgatccagagcctgcccaagaacggcagcttccagcccaccaacgagatgatgctgaagttctacagcttctacaagcaggccaccgagggcccctgcaagctgagcagacccggcttctgggaccccatcggcagatacaagtgggacgcctggagcagcctgggcgacatgaccaaggaggaggccatgatcgcctacgtggaggagatgaagaagatcatcgagaccatgcccatgaccgagaaggtggaggagctgctgagagtgatcggccccttctacgagatcgtggaggacaagaagagcggcagaagcagcgacatcaccagcgtgagactggagaagatcagcaagtgcctggaggacctgggcaacgtgctgaccagcacccccaacgccaagaccgtgaacggcaaggccgagagcagcgacagcggcgccgagagcgaggaggaggaggcccaggaggaggtgaagggcgccgagcagagcgacaacgacaagaagatgatgaagaagagcgccgaccacaagaacctggaggtgatcgtgaccaacggctacgacaaggacggcttcgtgcaggacatccagaacgacatccacgccagcagcagcctgaacggcagaagcaccgaggaggtgaagcccatcgacgagaacctgggccagaccggcaagagcgccgtgtgcatccactag

SEQ ID NO: 291241 - DNA, 756 bp, Artificial Sequence
  derived and/or modified sequence
atggctgatacccgctcagtccacgagaccaggtttgaggcggcagtgaaagttatacagtctctgcctaagaatggttccttccaacctacaaacgaaatgatgcttaaattttacagcttctataaacaggcaacggagggcccctgtaaactttctaggcccggcttctgggacccgatcggacggtacaagtgggatgcatggtccagtttaggcgacatgacaaaagaagaggctatgattgcctacgtggaggagatgaaaaagatcatcgaaactatgccaatgacagaaaaggtggaagagctactcagagtgatcggaccattttacgaaatcgtggaagacaaaaaaagcggccggtcaagcgacataacatccgtgaggctggagaagatcagcaagtgcttggaagatctcgggaatgtcctcacgtcaacccctaatgctaaaacagtgaatgggaaggccgaaagctcggattcgggggccgagtccgaggaggaggaagctcaggaggaggtaaagggagccgaacagagcgataacgataagaagatgatgaagaaatccgctgatcacaagaatcttgaagtgatcgtgacaaatgggtacgacaaagacggattcgtgcaagacattcagaacgacattcatgctagctcttcgctgaatggtcgcagcacagaggaagtgaagccaattgacgagaatcttggccagaccggcaaaagcgcagtgtgcatccactag

SEQ ID NO: 291242 - DNA, 756 bp, Artificial Sequence
  derived and/or modified sequence
atggctgacaccaggtctgtgcatgagaccaggtttgaggccgctgtgaaggtgatccagagcctgcccaagaatggcagcttccagcccaccaatgagatgatgctgaagttctacagcttctacaagcaggccacagagggcccctgcaagctgagcaggcctggcttctgggaccccatcggccgctacaagtgggatgcctggagcagcctgggggacatgaccaaggaggaggccatgattgcctacgtggaggagatgaagaagatcatcgagaccatgcccatgacagagaaggtggaggagctgctgcgggtcatcggccccttctatgagatcgtggaggacaagaagagcggccgcagcagtgacatcacctctgtgcggctggagaagatcagcaagtgcctggaggacctgggcaatgtgctgaccagcaccccaaatgccaagacagtgaatggcaaggccgagagcagtgacagcggggctgagagcgaggaggaggaggcccaggaggaggtgaagggagctgagcagagcgacaatgacaagaagatgatgaagaagtctgctgaccacaagaacctggaggtgattgtgaccaacggctatgacaaggatggctttgtgcaggacatccagaatgacatccacgccagcagcagcctgaatggccgcagcacagaggaggtgaagcccattgatgagaacctgggccagacaggcaagtctgctgtgtgcatccactag

SEQ ID NO: 291243 - DNA, 756 bp, Artificial Sequence
  derived and/or modified sequence
atggccgacacccggagcgtgcacgagacccggttcgaggccgccgtgaaagttatacagtctttaccaaagaatgggtccttccaacccacaaatgaaatgatgcttaagttttacagtttttacaagcaggcaacggagggtccctgcaagctcagtcggccaggattctgggatcctatcggccggtacaagtgggacgcttggtcctctctgggcgatatgacaaaggaagaagctatgattgcctacgttgaagaaatgaaaaagatcattgaaactatgccaatgaccgaaaaggtagaagaactactgcgggtgataggacccttctatgaaattgttgaagacaagaagtccggcaggtcatccgatatcactagcgtcaggcttgaaaagatctccaaatgcctggaggaccttggaaacgtgcttacaagtacccccaacgcaaaaacagtgaacgggaaagccgaatcatctgactcaggcgccgaatccgaggaggaagaagctcaggaagaagtaaagggagccgaacaaagcgataacgacaaaaagatgatgaagaagagtgccgaccataaaaacctcgaggtcatcgtcacgaacggatacgataaggatggcttcgttcaagacatccaaaacgatattcacgctagctcttcgttaaatggccggagtacagaagaggtgaagcccatcgacgaaaatcttggtcagaccggtaaatctgccgtgtgcatacactag

SEQ ID NO: 291244 - DNA, 756 bp, Artificial Sequence
  derived and/or modified sequence
atggctgatacacggagcgtgcatgagaccagattcgaggctgctgtaaaagtgatccaatcgctgcctaagaacggctctttccagccaacaaacgagatgatgttgaaattttattcgttctacaaacaggccacagaaggtccatgcaaactctcacggccaggattctgggacccaatcggacgctacaaatgggacgcttggtcctccctgggagacatgactaaagaagaggcaatgatcgcttatgtggaagaaatgaaaaaaatcatcgagactatgccaatgactgaaaaagtggaggaacttctaagagtgataggacctttctatgaaatcgtggaagataagaagagtgggcgttcgagtgacatcacctcggtgcgactagagaagatctccaagtgtcttgaggatctggggaatgtcctcacatcaacgcctaacgccaagacggtcaatggaaaggccgaatcttccgatagcggcgctgagtccgaagaggaagaggcccaggaggaagttaaaggagcagagcagtcagacaatgataagaagatgatgaagaagtctgcagatcacaaaaaccttgaggtcatcgtgactaatggctacgacaaagatggattcgtacaggacatacaaaacgacattcacgcgtcttcatctctgaatggcaggagtacggaggaagtaaaacccattgatgagaatctggggcagacaggaaagagcgccgtatgtatacactag

SEQ ID NO: 291245 - DNA, 234 bp, Artificial Sequence
  derived and/or modified sequence
atgtccgacgccctgatcctggccaaatcgaagggatttgatgtgttcaacgcccttgatcttatggagaataaaaccttcctcgagaaactgaagtttggaattggcgacggaaatttacagtattatctctataactggaggtgtcctggtactgatagtgagaagggcagcggaaattttgtgaatgctaatggtaaattattgcctgacgtttgccgcagacctccctag

SEQ ID NO: 291246 - DNA, 234 bp, Artificial Sequence
  derived and/or modified sequence
atgtctgatgccctgatcctggccaagagcaaaggatttgatgtgttcaatgccctggacctgatggagaacaagaccttcctggagaagctgaagtttggaattggagatggcaacctgcagtactacctgtacaactggcgctgccccggcacagacagcgagaagggcagcggcaactttgtgaatgccaacgggaagctgctgcctgatgtgtgccggcggcccccatag

SEQ ID NO: 291247 - DNA, 234 bp, Artificial Sequence
  derived and/or modified sequence
atgagcgacgccctgatcctggccaagagcaagggcttcgacgtgtttaatgcgcttgacctgatggagaacaagactttcctcgaaaagcttaagtttggtattggagacgggaatctgcagtactacttatacaattggcgatgccccggtaccgattctgaaaaaggatccgggaactttgtcaacgccaacgggaaacttttacctgacgtctgtcggcgtcccccttag

SEQ ID NO: 291248 - DNA, 234 bp, Artificial Sequence
  derived and/or modified sequence
atgtccgatgcactaatcctggctaaatccaaaggatttgatgtgttcaacgcccttgacctcatggagaataaaacctttctcgaaaagctgaagtttggcatcggagatgggaacctccagtactacctctacaattggaggtgtcccggaacagacagtgaaaagggtagcggtaattttgtcaatgccaacgggaagctgctgcctgacgtgtgtcgccgaccgccatag

SEQ ID NO: 291249 - DNA, 234 bp, Artificial Sequence
  derived and/or modified sequence
atgagcgacgccctgatcctggccaagagcaagggcttcgacgtgttcaacgccctggacctgatggagaacaagaccttcctggagaagctgaagttcggcatcggcgacggcaacctgcagtactacctgtacaactggagatgccccggcaccgacagcgagaagggcagcggcaacttcgtgaacgccaacggcaagctgctgcccgacgtgtgcagaagacccccctag

SEQ ID NO: 291250 - protein, 2861 aa, Artificial Sequence
  derived and/or modified sequence
QRTLSAQTPRSAQPPGNSQNIKRKQQDTPGSPDHRDASSIGSVGLGGFCTASESSASLDPCLVSPEVTEPRKDPQGARGPEGSLLPSPPPSQEREHPSSSMPFAECPPEGCLASPAAAPEDGPQTQSPRREPAPNAPGDIAAAFPAERDSSTPYQEIAAVPSAGRERQPKEEGQKSSFSFSSGIDQSPGMSPVPLREPMKAPLCGEGDQPGGFESQEKEAAGGFPPAESRQGVASVQVTPEAPAAAQQGTESSAVLEKSPLKPMAPIPQDPAPRASDRERGQGEAPPQYLTDDLEFLRACHLPRSNSGAAPEAEVNAASQESCQQPVGAYLPHAELPWGLPSPALVPEAGGSGKEALDTIDVQGHPQTGMRGTKPNQVVCVAAGGQPEGGLPVSPEPSLLTPTEEAHPASSLASFPAAQIPIAVEEPGSSSRESVSKAGMPVSADAAKEVVDAGLVGLERQVSDLGSKGEHPEGDPGEVPAPSPQERGEHLNTEQSHEVQPGVPPPPLPKEQSHEVQPGAPPPPLPKAPSESARGPPGPTDGAKVHEDSTSPAVAKEGSRSPGDSPGGKEEAPEPPDGGDPGNLQGEDSQAFSSKRDPEVGKDELSKPSSDAESRDHPSSHSAQPPRKGGAGHTDGPHSQTAEADASGLPHKLGEEDPVLPPVPDGAGEPTVPEGAIWEGSGLQPKCPDTLQSREGLGRMESFLTLESEKSDFPPTPVAEVAPKAQEGESTLEIRKMGSCDGEGLLTSPDQPRGPACDASRQEFHAGVPHPPQGENLAADLGLTALILDQDQQGIPSCPGEGWIRGAASEWPLLSSEKHLQPSQAQPETSIFDVLKEQAQPPENGKETSPSHPGFKDQGADSSQIHVPVEPQEDNNLPTHGGQEQALGSELQSQLPKGTLSDTPTSSPTDMVWESSLTEESELSAPTRQKLPALGEKRPEGACGDGQSSRVSPPAADVLKDFSLAGNFSRKETCCTGQGPNKSQQALADALEEGSQHEEACQRHPGASEAADGCSPLWGLSKREMASGNTGEAPPCQPDSVALLDAVPCLPALAPASPGVTPTQDAPETEACDETQEGRQQPVPAPQQKMECWATSDAESPKLLASFPSAGEQGGEAGAAETGGSAGAGDPGKQQAPEKPGEATLSCGLLQTEHCLTSGEEASTSALRESCQAEHPMASCQDALLPARELGGIPRSTMDFSTHQAVPDPKELLLSGPPEVAAPDTPYLHVDSAAQRGAEDSGVKAVSSADPRAPGESPCPVGEPPLALENAASLKLFAGSLAPLLQPGAAGGEIPAVQASSGSPKARTTEGPVDSMPCLDRMPLLAKGKQATGEEKAATAPGAGAKASGEGMAGDAAGETEGSMERMGEPSQDPKQGTSGGVDTSSEQIATLTGFPDFREHIAKIFEKPVLGALATPGEKAGAGRSAVGKDLTRPLGPEKLLDGPPGVDVTLLPAPPARLQVEKKQQLAGEAEISHLALQDPASDKLLGPAGLTWERNLPGAGVGKEMAGVPPTLREDERPEGPGAAWPGLEGQAYSQLERSRQELASGLPSPAATQELPVERAAAFQVAPHSHGEEAVAQDRIPSGKQHQETSACDSPHGEDGPGDFAHTGVPGHVPRSTCAPSPQREVLTVPEANSEPWTLDTLGGERRPGVTAGILEMRNALGNQSTPAPPTGEVADTPLEPGKVAGAAGEAEGDITLSTAETQACASGDLPEAGTTRTFSVVAGDLVLPGSCQDPACSDKAPGMEGTAALHGDSPARPQQAKEQPGPERPIPAGDGKVCVSSPPEPDETHDPKLQHLAPEELHTDRESPRPGPSMLPSVPKKDAPRVMDKVTSDETRGAEGTESSPVADDIIQPAAPADLESPTLAASSYHGDVVGQVSTDLIAQSISPAAAHAGLPPSAAEHIVSPSAPAGDRVEASTPSCPDPAKDLSRSSDSEEAFETPESTTPVKAPPAPPPPPPEVIPEPEVSTQPPPEEPGCGSETVPVPDGPRSDSVEGSPFRPPSHSFSAVFDEDKPIASSGTYNLDFDNIELVDTFQTLEPRASDAKNQEGKVNTRRKSTDSVPISKSTLSRSLSLQASDFDGASSSGNPEAVALAPDAYSTGSSSASSTLKRTKKPRPPSLKKKQTTKKPTETPPVKETQQEPDEESLVPSGENLASETKTESAKTEGPSPALLEETPLEPAVGPKAACPLDSESAEGVVPPASGGGRVQNSPPVGRKTLPLTTAPEAGEVTPSDSGGQEDSPAKGLSVRLEFDYSEDKSSWDNQQENPPPTKKIGKKPVAKMPLRRPKMKKTPEKLDNTPASPPRSPAEPNDIPIAKGTYTFDIDKWDDPNFNPFSSTSKMQESPKLPQQSYNFDPDTCDESVDPFKTSSKTPSSPSKSPASFEIPASAMEANGVDGDGLNKPAKKKKTPLKTDTFRVKKSPKRSPLSDPPSQDPTPAATPETPPVISAVVHATDEEKLAVTNQKWTCMTVDLEADKQDYPQPSDLSTFVNETKFSSPTEELDYRNSYEIEYMEKIGSSLPQDDDAPKKQALYLMFDTSQESPVKSSPVRMSESPTPCSGSSFEETEALVNTAAKNQHPVPRGLAPNQESHLQVPEKSSQKELEAMGLGTPSEAIEIREAAHPTDVSISKTALYSRIGTAEVEKPAGLLFQQPDLDSALQIARAEIITKEREVSEWKDKYEESRREVMEMRKIVAEYEKTIAQMIEDEQREKSVSHQTVQQLVLEKEQALADLNSVEKSLADLFRRYEKMKEVLEGFRKNEEVLKRCAQEYLSRVKKEEQRYQALKVHAEEKLDRANAEIAQVRGKAQQEQAAHQASLRKEQLRVDALERTLEQKNKEIEELTKICDELIAKMGKS

SEQ ID NO: 291251 - DNA, 8586 bp, Artificial Sequence
  derived and/or modified sequence
cagagaaccctgagcgcccagacccccagaagcgcccagccccccggcaacagccagaacatcaagagaaagcagcaggacacccccggcagccccgaccacagagacgccagcagcatcggcagcgtgggcctgggcggcttctgcaccgccagcgagagcagcgccagcctggacccctgcctggtgagccccgaggtgaccgagcccagaaaggacccccagggcgccagaggccccgagggcagcctgctgcccagccccccccccagccaggagagagagcaccccagcagcagcatgcccttcgccgagtgcccccccgagggctgcctggccagccccgccgccgcccccgaggacggcccccagacccagagccccagaagagagcccgcccccaacgcccccggcgacatcgccgccgccttccccgccgagagagacagcagcaccccctaccaggagatcgccgccgtgcccagcgccggcagagagagacagcccaaggaggagggccagaagagcagcttcagcttcagcagcggcatcgaccagagccccggcatgagccccgtgcccctgagagagcccatgaaggcccccctgtgcggcgagggcgaccagcccggcggcttcgagagccaggagaaggaggccgccggcggcttcccccccgccgagagcagacagggcgtggccagcgtgcaggtgacccccgaggcccccgccgccgcccagcagggcaccgagagcagcgccgtgctggagaagagccccctgaagcccatggcccccatcccccaggaccccgcccccagagccagcgacagagagagaggccagggcgaggcccccccccagtacctgaccgacgacctggagttcctgagagcctgccacctgcccagaagcaacagcggcgccgcccccgaggccgaggtgaacgccgccagccaggagagctgccagcagcccgtgggcgcctacctgccccacgccgagctgccctggggcctgcccagccccgccctggtgcccgaggccggcggcagcggcaaggaggccctggacaccatcgacgtgcagggccacccccagaccggcatgagaggcaccaagcccaaccaggtggtgtgcgtggccgccggcggccagcccgagggcggcctgcccgtgagccccgagcccagcctgctgacccccaccgaggaggcccaccccgccagcagcctggccagcttccccgccgcccagatccccatcgccgtggaggagcccggcagcagcagcagagagagcgtgagcaaggccggcatgcccgtgagcgccgacgccgccaaggaggtggtggacgccggcctggtgggcctggagagacaggtgagcgacctgggcagcaagggcgagcaccccgagggcgaccccggcgaggtgcccgcccccagcccccaggagagaggcgagcacctgaacaccgagcagagccacgaggtgcagcccggcgtgccccccccccccctgcccaaggagcagagccacgaggtgcagcccggcgccccccccccccccctgcccaaggcccccagcgagagcgccagaggcccccccggccccaccgacggcgccaaggtgcacgaggacagcaccagccccgccgtggccaaggagggcagcagaagccccggcgacagccccggcggcaaggaggaggcccccgagccccccgacggcggcgaccccggcaacctgcagggcgaggacagccaggccttcagcagcaagagagaccccgaggtgggcaaggacgagctgagcaagcccagcagcgacgccgagagcagagaccaccccagcagccacagcgcccagccccccagaaagggcggcgccggccacaccgacggcccccacagccagaccgccgaggccgacgccagcggcctgccccacaagctgggcgaggaggaccccgtgctgccccccgtgcccgacggcgccggcgagcccaccgtgcccgagggcgccatctgggagggcagcggcctgcagcccaagtgccccgacaccctgcagagcagagagggcctgggcagaatggagagcttcctgaccctggagagcgagaagagcgacttcccccccacccccgtggccgaggtggcccccaaggcccaggagggcgagagcaccctggagatcagaaagatgggcagctgcgacggcgagggcctgctgaccagccccgaccagcccagaggccccgcctgcgacgccagcagacaggagttccacgccggcgtgccccaccccccccagggcgagaacctggccgccgacctgggcctgaccgccctgatcctggaccaggaccagcagggcatccccagctgccccggcgagggctggatcagaggcgccgccagcgagtggcccctgctgagcagcgagaagcacctgcagcccagccaggcccagcccgagaccagcatcttcgacgtgctgaaggagcaggcccagccccccgagaacggcaaggagaccagccccagccaccccggcttcaaggaccagggcgccgacagcagccagatccacgtgcccgtggagccccaggaggacaacaacctgcccacccacggcggccaggagcaggccctgggcagcgagctgcagagccagctgcccaagggcaccctgagcgacacccccaccagcagccccaccgacatggtgtgggagagcagcctgaccgaggagagcgagctgagcgcccccaccagacagaagctgcccgccctgggcgagaagagacccgagggcgcctgcggcgacggccagagcagcagagtgagcccccccgccgccgacgtgctgaaggacttcagcctggccggcaacttcagcagaaaggagacctgctgcaccggccagggccccaacaagagccagcaggccctggccgacgccctggaggagggcagccagcacgaggaggcctgccagagacaccccggcgccagcgaggccgccgacggctgcagccccctgtggggcctgagcaagagagagatggccagcggcaacaccggcgaggcccccccctgccagcccgacagcgtggccctgctggacgccgtgccctgcctgcccgccctggcccccgccagccccggcgtgacccccacccaggacgcccccgagaccgaggcctgcgacgagacccaggagggcagacagcagcccgtgcccgccccccagcagaagatggagtgctgggccaccagcgacgccgagagccccaagctgctggccagcttccccagcgccggcgagcagggcggcgaggccggcgccgccgagaccggcggcagcgccggcgccggcgaccccggcaagcagcaggcccccgagaagcccggcgaggccaccctgagctgcggcctgctgcagaccgagcactgcctgaccagcggcgaggaggccagcaccagcgccctgagagagagctgccaggccgagcaccccatggccagctgccaggacgccctgctgcccgccagagagctgggcggcatccccagaagcaccatggacttcagcacccaccaggccgtgcccgaccccaaggagctgctgctgagcggcccccccgaggtggccgcccccgacaccccctacctgcacgtggacagcgccgcccagagaggcgccgaggacagcggcgtgaaggccgtgagcagcgccgaccccagagcccccggcgagagcccctgccccgtgggcgagccccccctggccctggagaacgccgccagcctgaagctgttcgccggcagcctggcccccctgctgcagcccggcgccgccggcggcgagatccccgccgtgcaggccagcagcggcagccccaaggccagaaccaccgagggccccgtggacagcatgccctgcctggacagaatgcccctgctggccaagggcaagcaggccaccggcgaggagaaggccgccaccgcccccggcgccggcgccaaggccagcggcgagggcatggccggcgacgccgccggcgagaccgagggcagcatggagagaatgggcgagcccagccaggaccccaagcagggcaccagcggcggcgtggacaccagcagcgagcagatcgccaccctgaccggcttccccgacttcagagagcacatcgccaagatcttcgagaagcccgtgctgggcgccctggccacccccggcgagaaggccggcgccggcagaagcgccgtgggcaaggacctgaccagacccctgggccccgagaagctgctggacggcccccccggcgtggacgtgaccctgctgcccgccccccccgccagactgcaggtggagaagaagcagcagctggccggcgaggccgagatcagccacctggccctgcaggaccccgccagcgacaagctgctgggccccgccggcctgacctgggagagaaacctgcccggcgccggcgtgggcaaggagatggccggcgtgccccccaccctgagagaggacgagagacccgagggccccggcgccgcctggcccggcctggagggccaggcctacagccagctggagagaagcagacaggagctggccagcggcctgcccagccccgccgccacccaggagctgcccgtggagagagccgccgccttccaggtggccccccacagccacggcgaggaggccgtggcccaggacagaatccccagcggcaagcagcaccaggagaccagcgcctgcgacagcccccacggcgaggacggccccggcgacttcgcccacaccggcgtgcccggccacgtgcccagaagcacctgcgcccccagcccccagagagaggtgctgaccgtgcccgaggccaacagcgagccctggaccctggacaccctgggcggcgagagaagacccggcgtgaccgccggcatcctggagatgagaaacgccctgggcaaccagagcacccccgccccccccaccggcgaggtggccgacacccccctggagcccggcaaggtggccggcgccgccggcgaggccgagggcgacatcaccctgagcaccgccgagacccaggcctgcgccagcggcgacctgcccgaggccggcaccaccagaaccttcagcgtggtggccggcgacctggtgctgcccggcagctgccaggaccccgcctgcagcgacaaggcccccggcatggagggcaccgccgccctgcacggcgacagccccgccagaccccagcaggccaaggagcagcccggccccgagagacccatccccgccggcgacggcaaggtgtgcgtgagcagcccccccgagcccgacgagacccacgaccccaagctgcagcacctggcccccgaggagctgcacaccgacagagagagccccagacccggccccagcatgctgcccagcgtgcccaagaaggacgcccccagagtgatggacaaggtgaccagcgacgagaccagaggcgccgagggcaccgagagcagccccgtggccgacgacatcatccagcccgccgcccccgccgacctggagagccccaccctggccgccagcagctaccacggcgacgtggtgggccaggtgagcaccgacctgatcgcccagagcatcagccccgccgccgcccacgccggcctgccccccagcgccgccgagcacatcgtgagccccagcgcccccgccggcgacagagtggaggccagcacccccagctgccccgaccccgccaaggacctgagcagaagcagcgacagcgaggaggccttcgagacccccgagagcaccacccccgtgaaggccccccccgccccccccccccccccccccgaggtgatccccgagcccgaggtgagcacccagcccccccccgaggagcccggctgcggcagcgagaccgtgcccgtgcccgacggccccagaagcgacagcgtggagggcagccccttcagaccccccagccacagcttcagcgccgtgttcgacgaggacaagcccatcgccagcagcggcacctacaacctggacttcgacaacatcgagctggtggacaccttccagaccctggagcccagagccagcgacgccaagaaccaggagggcaaggtgaacaccagaagaaagagcaccgacagcgtgcccatcagcaagagcaccctgagcagaagcctgagcctgcaggccagcgacttcgacggcgccagcagcagcggcaaccccgaggccgtggccctggcccccgacgcctacagcaccggcagcagcagcgccagcagcaccctgaagagaaccaagaagcccagaccccccagcctgaagaagaagcagaccaccaagaagcccaccgagaccccccccgtgaaggagacccagcaggagcccgacgaggagagcctggtgcccagcggcgagaacctggccagcgagaccaagaccgagagcgccaagaccgagggccccagccccgccctgctggaggagacccccctggagcccgccgtgggccccaaggccgcctgccccctggacagcgagagcgccgagggcgtggtgccccccgccagcggcggcggcagagtgcagaacagcccccccgtgggcagaaagaccctgcccctgaccaccgcccccgaggccggcgaggtgacccccagcgacagcggcggccaggaggacagccccgccaagggcctgagcgtgagactggagttcgactacagcgaggacaagagcagctgggacaaccagcaggagaaccccccccccaccaagaagatcggcaagaagcccgtggccaagatgcccctgagaagacccaagatgaagaagacccccgagaagctggacaacacccccgccagcccccccagaagccccgccgagcccaacgacatccccatcgccaagggcacctacaccttcgacatcgacaagtgggacgaccccaacttcaaccccttcagcagcaccagcaagatgcaggagagccccaagctgccccagcagagctacaacttcgaccccgacacctgcgacgagagcgtggaccccttcaagaccagcagcaagacccccagcagccccagcaagagccccgccagcttcgagatccccgccagcgccatggaggccaacggcgtggacggcgacggcctgaacaagcccgccaagaagaagaagacccccctgaagaccgacaccttcagagtgaagaagagccccaagagaagccccctgagcgacccccccagccaggaccccacccccgccgccacccccgagaccccccccgtgatcagcgccgtggtgcacgccaccgacgaggagaagctggccgtgaccaaccagaagtggacctgcatgaccgtggacctggaggccgacaagcaggactacccccagcccagcgacctgagcaccttcgtgaacgagaccaagttcagcagccccaccgaggagctggactacagaaacagctacgagatcgagtacatggagaagatcggcagcagcctgccccaggacgacgacgcccccaagaagcaggccctgtacctgatgttcgacaccagccaggagagccccgtgaagagcagccccgtgagaatgagcgagagccccaccccctgcagcggcagcagcttcgaggagaccgaggccctggtgaacaccgccgccaagaaccagcaccccgtgcccagaggcctggcccccaaccaggagagccacctgcaggtgcccgagaagagcagccagaaggagctggaggccatgggcctgggcacccccagcgaggccatcgagatcagagaggccgcccaccccaccgacgtgagcatcagcaagaccgccctgtacagcagaatcggcaccgccgaggtggagaagcccgccggcctgctgttccagcagcccgacctggacagcgccctgcagatcgccagagccgagatcatcaccaaggagagagaggtgagcgagtggaaggacaagtacgaggagagcagaagagaggtgatggagatgagaaagatcgtggccgagtacgagaagaccatcgcccagatgatcgaggacgagcagagagagaagagcgtgagccaccagaccgtgcagcagctggtgctggagaaggagcaggccctggccgacctgaacagcgtggagaagagcctggccgacctgttcagaagatacgagaagatgaaggaggtgctggagggcttcagaaagaacgaggaggtgctgaagagatgcgcccaggagtacctgagcagagtgaagaaggaggagcagagataccaggccctgaaggtgcacgccgaggagaagctggacagagccaacgccgagatcgcccaggtgagaggcaaggcccagcaggagcaggccgcccaccaggccagcctgagaaaggagcagctgagagtggacgccctggagagaaccctggagcagaagaacaaggagatcgaggagctgaccaagatctgcgacgagctgatcgccaagatgggcaagagctag

SEQ ID NO: 291252 - DNA, 8586 bp, Artificial Sequence
  derived and/or modified sequence
caacgcaccttgtccgctcagacgccacggagtgcccagccacccggcaattcacagaatatcaagagaaaacagcaagacacccctggatccccggatcatcgtgacgcatcaagtatcgggtcggttggactgggtggcttctgtacagcaagtgagagctccgcctctctggatccgtgtctggttagcccagaggtgaccgagcccagaaaagaccctcagggcgctcgggggcccgaaggcagcctgctaccgtctccaccacctagccaggagagagaacaccctagtagtagcatgccgtttgctgaatgcccacctgagggatgtctcgcttcaccagccgctgcccctgaagatggccctcaaactcaatcacctaggcgcgaacctgctcctaatgctcctggtgatatcgccgctgcgtttccagccgaaagggatagctccacaccttatcaggaaatcgccgcggtgccttcagcagggcgtgagaggcagcctaaggaagaggggcaaaaaagctcattttccttctcatcaggaattgaccagtccccaggcatgtcacctgtcccattgagagagcctatgaaggctccactgtgtggcgagggcgatcaaccaggtggctttgaatctcaggagaaagaggctgcgggaggtttcccaccggcggaatctagacagggcgtggcaagcgtgcaggtgactcccgaagctccagccgctgcccagcagggcaccgaatcctccgctgtcctggagaagagtccccttaagcctatggcccccattccccaagatcccgcgccccgagcaagtgatcgagaacggggccaaggcgaggctccacctcagtacctgacagacgacttggaattcctgagggcctgccaccttcccaggagcaattccggggctgccccagaggccgaggtaaacgccgcctcccaggaatcttgtcaacagcctgtcggtgcctacctgccacacgccgagttgccgtgggggctgccctcacccgccctggtccctgaagccggaggaagcggcaaggaagctctggataccatagatgtgcaggggcacccacagaccgggatgaggggtacaaagccaaaccaggtggtgtgcgtggcagctggcggccagcctgagggggggctgccagtgtcaccggagccgtccttactaactccgacagaggaagcccatcctgcttcctccctcgcatcctttcctgctgcgcaaattcctattgccgtagaagaaccaggatctagttcacgcgagtccgtgagtaaggccggtatgcccgtttctgctgatgcagccaaggaggtcgtggacgctgggctggtggggttagaacgacaggtgtctgatctcggctccaagggtgagcatcccgaaggagatccaggcgaagtgcctgccccctccccacaggaacgaggcgaacatttaaacacagagcagtctcacgaggtgcaaccaggggttcccccgccgcctctgcccaaggagcagtcacatgaggtgcagcctggcgctccacctccccccttgcccaaggcacccagcgaatctgctcggggacctcctggacctacagatggggccaaagtgcatgaggatagcacttctccagcagtggcgaaagagggttcgcggtcacctggggactcgcctggaggaaaagaagaggcccccgagccacccgatggcggcgatcctgggaacttacagggagaagactcacaggcctttagttcaaagcgcgatccggaggtcggaaaggacgaattatcaaagccaagctccgacgccgaatcacgggaccatccctcttctcacagtgcacaaccacctcgcaagggaggggcaggccatacggacggcccacactctcagaccgcggaggcagatgcgagcggactcccacataaactgggcgaagaggaccccgtgctgccacccgtgccagacggtgctggcgagccaactgtcccggagggggcaatatgggagggctcagggcttcaaccaaaatgtccagatacccttcagagcagagagggcctgggccggatggagagttttctaactttagagtcggagaagagcgactttcctcccacaccagtagccgaagtagcaccaaaagcgcaggagggcgagtccacgctggagatccggaagatgggcagctgcgatggagaagggctgctcacgtccccggatcagccgagaggccccgcctgtgacgcctcccggcaggagttccatgccggggtcccccatccccctcagggcgaaaatctggcagcggacttgggcctcactgccctgatcctggatcaggaccaacaagggatccccagttgcccgggcgagggatggatcagaggagctgcatccgagtggcccctgctgtcatcagaaaaacacttgcagccctcccaggcccagccagaaaccagcatcttcgatgtgctgaaggaacaggcccagccgcctgagaatggcaaggaaacttccccaagccaccccggatttaaggaccaaggggcggacagcagtcaaatccacgttccagtcgaaccacaagaggataacaatctgccgacccacggtgggcaggaacaggcactgggctcagagctccagtcgcagctacccaaagggactttgtctgacacccccacttcttcacccaccgacatggtctgggagtcgtctctgaccgaagaatcagagctgtctgcccccactaggcagaagttgcctgcgctgggcgagaagcgacccgagggggcatgcggcgacggacaaagctcgcgtgttagccccccagcagccgatgtcctcaaggacttctcccttgccggcaacttttcccgcaaagaaacctgctgtaccggccagggccctaataagtcccagcaggctctcgcggacgcactggaggaagggagtcaacacgaggaggcatgccagcgacatcctggggcaagcgaggccgctgatggatgctcccccctgtggggtctctctaaaagggaaatggcgtctgggaatactggcgaggccccgccttgtcaaccggatagcgtcgcactactggacgccgtaccctgcctgcccgccttggccccagcctcacccggcgttacccccacacaagacgccccggaaacagaggcctgcgatgaaacccaagaggggcgccagcagccagtccccgccccacagcagaagatggagtgttgggctacctccgacgccgaatctcctaaactcctcgcttccttccccagtgctggagaacagggcggggaggccggggccgcagaaacgggtgggagcgccggtgcgggtgatcctggtaagcagcaggcccccgagaagcctggcgaagccacccttagttgcgggctgctgcagactgaacactgcctgacctcaggagaggaggccagtaccagcgccctgagggagagctgccaagcagagcatcccatggctagttgccaggacgccctgctcccagccagggagctcggcgggattcccagatctaccatggacttctccacccaccaggctgttcctgacccaaaggagctgctgctatctgggccccccgaagtggcagcccctgataccccttaccttcatgtcgactctgctgctcagcgaggcgctgaagatagtggcgttaaagcagtgagcagcgcggaccctagggcacccggcgagtcaccctgcccggtgggagagccgccacttgccctcgagaacgccgcaagccttaaactcttcgctggatccctcgcccccctcttacaacctggagccgcaggaggcgaaattcctgccgtacaggcgagttccggttcccctaaggccaggaccacggagggaccagtagatagcatgccctgcctcgatagaatgcctctgttggccaagggcaagcaagccacgggtgaagaaaaagctgccacagccccaggcgcaggggctaaagcctcaggggaaggcatggcaggagacgctgccggcgagacagaaggctctatggagagaatgggagagccctctcaggatcctaaacagggcaccagcggaggggtagacacatcgagcgagcagattgctaccctgacaggtttcccagatttcagggaacacatcgccaagatcttcgaaaaaccagttctaggagccctggctacaccaggtgagaaggcgggcgccggaaggagcgccgtgggaaaagatttaacaaggccgctgggtcccgaaaagctgttagatggcccccccggcgttgatgtgactttattacccgctccaccagcgaggcttcaagtggagaaaaaacaacaactggccggagaagccgagatctctcaccttgctctgcaggacccagcctccgataagctgttgggccccgccggactgacatgggagcgcaatctccctggcgcaggggttggtaaagagatggcaggtgtgcctccaaccttgcgcgaggacgagcggccagagggtccgggcgctgcttggccaggtctcgagggtcaggcctactcccagctagagcgaagtcgtcaggaactggcaagcgggctgccctcccctgctgcgactcaagaacttcccgtggagcgcgcggcagccttccaggtcgccccccacagccatggagaggaagcggtggcccaagacaggattccaagtggtaaacagcatcaagaaacatccgcttgcgacagccctcacggggaggatgggccaggcgacttcgctcatacaggcgtcccaggccatgtacctagaagtacctgtgcgccctcaccacagagggaggttttgaccgtgcccgaggctaattccgaaccctggaccctcgacacgttgggtggcgaaaggagacccggcgttactgccggcattctggagatgcggaatgctctgggcaatcagtctacacccgcaccacctacaggcgaggttgccgatacaccgttagagccgggtaaggttgccggcgccgccggagaggcggaaggagacatcactctttctaccgcagagacacaggcttgcgccagtggagacttgccggaagctgggaccacccgcaccttctctgttgtggcaggggatctagtactgcccgggagctgccaggaccccgcttgtagtgataaagcccccggaatggaaggtactgctgctctccacggagatagcccggcacggccgcaacaggcaaaggagcagcccggacctgaacgaccaatccccgctggagacggcaaagtttgtgtaagcagccccccagagccagacgagacccacgaccctaaactccagcacctcgccccagaggagctgcatactgacagggagagtccacgccccggcccctcaatgctgccatccgttcccaagaaggacgctccgcgagtcatggacaaagtgacaagcgatgagactcgaggcgccgaaggcacagagagctcccctgtcgccgacgatatcattcaaccggcagcaccagcagacctggaatcccctacactcgcagcgagttcgtatcacggtgatgtcgtcggacaggtttcaacagatctcatcgcccagagcatctccccagcagctgcacacgcgggcttacctccttctgcagcagagcacattgtttcaccaagtgcccccgccggcgaccgcgtggaggccagcaccccttcctgtcctgatccagctaaagacctttcaagaagctctgattccgaggaagcgttcgagacccccgagagtacgacccctgtcaaagcacctcctgcacctcccccgccgccccccgaggtaatccccgaaccggaggtgtctacgcagcctccgcccgaagagcctggctgtgggtccgaaactgtaccagtgccagacggcccaaggtccgactctgttgagggctcaccattcagacccccgtcccactcattttccgccgtctttgacgaggataagccaattgcctcttctgggacatataatctggattttgacaacatcgaattggtagatacattccagactcttgagccacgagcctctgacgcaaagaatcaagaagggaaggtcaatacaaggcgaaagtccactgactctgtgcccatctctaagtcgacgctctcacgatccttgagtctacaggcctctgatttcgacggcgcctcttctagcggcaatccagaagcggtcgcgctggcacccgatgcttatagcacaggcagctcaagcgctagttcaactctgaagcgcactaagaagcccaggcccccatctttgaagaagaaacagacaacaaagaaaccaaccgagacccctcctgtgaaggagacgcagcaggaacctgacgaggagtctcttgtgccttccggggaaaacctggcctcggagactaaaaccgaatccgccaaaaccgaaggcccctccccagcccttctagaggaaaccccactcgagcctgccgtgggccctaaggccgcttgccctttagattcggagagtgctgaaggggtggtgccccccgcctcaggcggagggagggtgcagaactctccccctgttgggagaaaaactcttcccctgaccacggcccccgaagctggagaggtgactccttccgattcgggaggtcaggaggatagcccagctaaggggctgagtgtaaggttggaattcgactattcagaggacaaatccagctgggacaaccagcaggaaaatccgccaccgaccaaaaagatcggtaagaaacccgtagcaaagatgccactccgacgtcctaagatgaagaagaccccggagaaacttgacaatacccccgcatctcctcctagatcccctgccgagccaaatgatatcccgatagccaaggggacatacacgttcgatatcgataaatgggatgatccgaacttcaatcccttcagctcaaccagcaaaatgcaggaatctcctaaattaccacagcagtcgtacaatttcgacccggatacctgtgacgagtctgttgatccttttaagactagctccaaaactccaagctcgcctagcaagagcccggcaagctttgagatccccgcgtccgcaatggaagctaacggagtagacggggatggcctgaataagccagcaaagaagaagaagacacccctgaaaaccgacacattccgggtgaaaaagtctcccaagaggtccccgctgtctgatccaccaagtcaggacccaactccagccgccacaccggaaacccctcccgtaatttccgctgtcgtacacgctactgatgaggagaagttggccgtcacaaaccaaaagtggacatgtatgaccgttgacctggaggcagataaacaggattacccccagcccagcgacctgtccacgtttgtaaatgagactaaattctcaagtccaactgaggaactggactatcgtaattcctacgagatcgagtatatggagaaaatcggctcctctcttcctcaggacgacgacgcacctaagaaacaggcactctacctcatgttcgacacatcacaggaaagccccgtgaagtccagccctgtcagaatgtccgagtctccaacaccctgctccggctcctcattcgaggagactgaggcgctagttaatacggccgccaagaaccagcatcccgttccccgaggcttggctccgaaccaggaatcccacttacaagtacctgaaaagagctctcaaaaggaattggaggcaatggggctcggtaccccaagcgaagccatcgaaatacgggaggcggcacatcccaccgatgtgagcatttctaaaacagccctatatagccgcataggcacagccgaagttgagaaacctgccgggctcctgtttcaacagccagatttagattcagccctgcagatcgctcgtgctgaaatcataaccaaggaacgggaagtcagcgagtggaaagataaatacgaggagtcccgtagagaggtaatggagatgcgcaaaatcgttgcagagtacgaaaaaacaattgcacagatgattgaagatgagcagcgggagaaaagcgtctctcatcagactgtccagcaactggtccttgaaaaggagcaggcactggcagacttgaacagcgtggaaaagtccctggccgatctcttccgacggtatgaaaaaatgaaggaggtcttggagggctttcggaagaacgaggaggtgcttaaaagatgtgcccaggagtatctgagtcgggtgaagaaagaagaacagagatatcaggctttaaaagttcacgcggaggagaagcttgatagagctaatgccgagatagcccaggtaaggggaaaagcccaacaggagcaggccgcacaccaggcctccttgcggaaggagcaactcagggtggacgcactggaaaggacccttgaacagaaaaataaggagatcgaggagcttactaagatctgcgatgaattgatcgcaaagatgggcaaaagttag

SEQ ID NO: 291253 - DNA, 8586 bp, Artificial Sequence
  derived and/or modified sequence
cagaggaccctgagcgcccagacccccaggtctgcccagcccccaggcaacagccagaacatcaagaggaagcagcaggacaccccaggcagcccagaccacagagatgccagcagcatcggctctgtgggcctgggcggcttctgcacagccagcgagagcagcgccagcctggacccctgcctggtgtccccagaggtgacagagcccaggaaggacccccagggcgcccggggccctgagggcagcctgctgcccagccccccacccagccaggagcgggagcaccccagcagctccatgccctttgctgaatgtcctcctgagggctgcctggccagccctgctgctgccccagaagatggcccccagacccagagcccccggcgggagcccgccccaaatgcccctggggacattgctgctgccttccctgctgagcgggacagcagcaccccctaccaggagattgctgctgtgcccagcgctggccgggagcggcagcccaaggaggagggccagaagagcagcttctccttcagcagcggcatcgaccagagccctggcatgagccctgtgcccctgcgggagcccatgaaggcccccctgtgtggggagggggaccagcccggcggctttgagagccaggagaaggaggccgccggcggcttccccccagctgagagccggcagggcgtggcctctgtgcaggtgaccccagaggccccagctgctgcccagcagggcacagagagcagcgctgtgctggagaagagccccctgaagcccatggcccccatcccccaggaccctgccccccgggccagtgaccgggagcggggccagggcgaggccccaccccagtacctgacagatgacctggagttcctgcgggcctgccacctgcccaggagcaacagcggggccgcccctgaggccgaggtgaatgctgccagccaggagagctgccagcagcctgtgggcgcctacctgccccacgccgagctgccctggggcctgcccagccctgccctggtgcctgaggccggcggcagcggcaaggaggccctggacaccattgatgtgcagggccacccccagacaggcatgaggggcaccaagcccaaccaggtggtgtgtgtggccgccggcggccagcctgagggcggcctgcctgtgtccccagagcccagcctgctgacccccacagaggaggcccacccagccagcagcctggccagcttccctgctgcccagatccccatcgctgtggaggagcccggcagcagcagccgggagagcgtgtccaaggccggcatgcctgtgtctgcagatgctgccaaggaggtggtggatgctggcctggtgggcctggagcggcaggtgtctgacctgggcagcaagggggagcaccctgagggggaccccggggaggtgcctgcccccagcccccaggagcggggggagcacctgaacacagagcagagccatgaggtgcagcccggggtgcccccaccacccctgcccaaggagcagagccatgaggtgcagcccggggcccctcctccacccctgcccaaggcccccagcgagagcgcccggggccccccaggccccacagatggagccaaggtgcatgaggacagcaccagccctgctgtggccaaggagggcagccgcagccctggggacagccctgggggcaaggaggaggcccctgagcccccagatggaggagaccccggcaacctgcagggcgaggacagccaggccttcagcagcaagagggaccctgaggtgggcaaggatgagctgagcaagcccagcagtgatgctgagagccgggaccaccccagcagccacagcgcccagccccccaggaagggcggggccggccacacagatggcccccacagccagacagctgaggctgatgccagcggcctgccccacaagctgggggaggaggaccctgtgctgccccctgtgcctgatggagctggggagcccaccgtgcctgagggcgccatctgggagggcagcggcctgcagcccaagtgcccagacaccctgcagagccgggagggcctgggccgcatggagagcttcctgaccctggagagcgagaagagtgacttcccccccacccctgtggccgaggtggcccccaaggcccaggagggggagagcaccctggagatcaggaagatgggcagctgtgatggagagggcctgctgaccagcccagaccagccccggggccctgcctgtgatgccagccggcaggagttccacgccggcgtgccccaccccccccagggcgagaacctggccgctgacctgggcctgacagccctgatcctggaccaggaccagcagggcatccccagctgccctggagagggctggatcagaggagctgccagcgagtggcccctgctgagcagcgagaagcacctgcagcccagccaggcccagcctgagaccagcatctttgatgtgctgaaggagcaggcccagcccccagaaaatggcaaggagaccagccccagccaccctggcttcaaggaccagggcgctgacagcagccagatccacgtgcctgtggagccccaggaggacaacaacctgcccacccacggcggccaggagcaggccctgggcagcgagctgcagagccagctgcccaagggcaccctgagtgacacccccaccagcagccccacagacatggtgtgggagagcagcctgacagaggagagcgagctgagcgcccccacccggcagaagctgcctgccctgggggagaagaggcctgagggcgcctgtggagatggccagagcagccgggtgtccccacctgctgctgatgtgctgaaggacttcagcctggccggcaacttcagcaggaaggagacctgctgcaccggccagggccccaacaagagccagcaggccctggctgatgccctggaggagggcagccagcacgaggaggcctgccagaggcaccctggggccagcgaggccgcagatggctgcagccccctgtggggcctgagcaagcgggagatggccagcggcaacacaggagaggccccaccctgccagcctgacagcgtggccctgctggatgctgtgccctgcctgcctgccctggccccagccagccctggggtgacccccacccaggatgcccctgagacagaggcctgtgatgagacccaggagggccggcagcagcctgtgcctgccccccagcagaagatggagtgctgggccaccagtgatgctgagagccccaagctgctggccagcttccccagcgctggggagcagggcggggaggccggggctgctgagaccggcggcagcgctggggccggggaccccgggaagcagcaggcccctgagaagccaggagaggccaccctgagctgtggcctgctgcagacagagcactgcctgaccagcggggaggaggccagcaccagcgccctgcgggagagctgccaggccgagcaccccatggccagctgccaggatgccctgctgcctgcccgggagctgggcggcatccccaggagcaccatggacttcagcacccaccaggccgtgcctgaccccaaggagctgctgctgagcggccccccagaggtggccgccccagacaccccctacctgcacgtggacagcgctgcccagagaggagcagaagattctggagtgaaggctgtgagcagcgctgacccccgggcccctggagagagcccctgccctgtgggggagccccccctggccctggagaatgctgccagcctgaagctgtttgctggcagcctggcccccctgctgcagcctggagctgctggaggagagatcccagctgtgcaggccagcagcggcagccccaaggcccggaccacagagggccctgtggacagcatgccctgcctggacaggatgcccctgctggccaagggcaagcaggccaccggggaggagaaggccgccacagcccctggagctggggccaaggccagcggggagggcatggctggagatgctgctggggagacagagggctccatggagaggatgggagagcccagccaggaccccaagcagggcaccagcggaggagtggacaccagcagcgagcagatcgccaccctgaccggcttcccagacttccgggagcacatcgccaagatctttgagaagcctgtgctgggcgccctggccaccccaggagagaaggccggggccggccgctctgctgtgggcaaggacctgacccggcccctgggccctgagaagctgctggatggccccccaggagtggatgtgaccctgctgcctgcccccccagcccggctgcaggtggagaagaagcagcagctggccggggaggccgagatcagccacctggccctgcaggaccctgccagtgacaagctgctgggccctgctggcctgacctgggagaggaacctgcccggggccggcgtgggcaaggagatggccggcgtgccccccaccctgagagaagatgagaggcctgagggccctggggccgcctggccaggcctggagggccaggcctacagccagctggagaggagccggcaggagctggccagcggcctgcccagccctgctgccacccaggagctgcctgtggagagagctgctgccttccaggtggccccccacagccacggggaggaggccgtggcccaggaccgcatccccagcggcaagcagcaccaggagaccagcgcctgtgacagcccccacggggaggatggccctggggactttgcccacactggagtgcccggccacgtgcccaggagcacctgtgcccccagcccccagcgggaggtgctgactgtgcctgaggccaacagcgagccctggaccctggacaccctgggcggggagcggcggcctggggtgacagctggcatcctggagatgagaaatgccctgggcaaccagagcaccccagcccccccaactggagaggtggccgacacccccctggagcccgggaaggtggccggggccgccggggaggccgagggggacatcaccctgagcacagctgagacccaggcctgtgccagcggggacctgcctgaggccggcaccaccaggaccttctctgtggtggccggggacctggtgctgcccggcagctgccaggaccctgcctgcagcgacaaggcccctggcatggagggcacagctgccctgcatggagacagccctgcccggccccagcaggccaaggagcagcccggccctgagcggcccatcccagctggagatggcaaggtgtgtgtgagcagccccccagagccagatgagacccatgaccccaagctgcagcacctggcccctgaggagctgcacacagaccgggagagccccaggcctggccccagcatgctgcccagcgtgcccaagaaggatgccccccgggtgatggacaaggtgaccagtgatgagaccagaggagctgagggcacagagagcagccctgtggctgatgacatcatccagcctgctgccccagctgacctggagagccccaccctggccgccagcagctaccatggagatgtggtgggccaggtgtccacagacctgattgcccagagcatcagccctgctgctgcccacgccggcctgcccccatctgctgctgagcacatcgtgagccccagcgccccagctggggacagagtggaggccagcacccccagctgcccagaccctgccaaggacctgagccgcagcagtgacagcgaggaggcctttgagaccccagagagcaccacccctgtgaaggcccccccagcccctcctcctcctcctcctgaggtgattcctgagcctgaggtgtccacccagcccccacctgaggagcccggctgcggcagcgagaccgtgcctgtgcctgatggccccaggagtgacagcgtggagggcagccccttccggccccccagccacagcttctctgctgtgtttgatgaggacaagcccatcgccagcagcggcacctacaacctggactttgacaacatcgagctggtggacaccttccagaccctggagccccgggccagtgatgccaagaaccaggagggcaaggtgaacaccaggaggaagagcacagattctgtgcccatcagcaagagcaccctgagccgcagcctgagcctgcaggccagtgactttgatggagccagcagcagcggcaaccctgaggccgtggccctggccccagatgcctacagcacaggcagcagcagcgccagcagcaccctgaagaggaccaagaagccccggccccccagcctgaagaagaagcagaccaccaagaagcccacagagaccccacctgtgaaggagacccagcaggagccagatgaggagagcctggtgcccagcggggagaacctggccagcgagaccaagacagaaagtgccaagacagagggccccagccctgccctgctggaggagacccccctggagcctgctgtgggccccaaggccgcctgccccctggacagcgagagcgctgagggcgtggtgcccccagccagcggcggcggccgggtgcagaacagcccccctgtgggcaggaagaccctgcccctgaccacagcccctgaggccggggaggtgacccccagcgacagcggcggccaggaggacagccctgccaagggcctgtctgtgcggctggagtttgactacagcgaggacaagagctcctgggacaaccagcaggagaaccccccacccaccaagaagattggcaagaagcctgtggccaagatgcccctgcggcggcccaagatgaagaagaccccagagaagctggacaacaccccagccagcccccccaggagccctgctgagcccaatgacatccccatcgccaagggcacctacacctttgatattgacaagtgggatgaccccaacttcaaccccttcagcagcaccagcaagatgcaggagagccccaagctgccccagcagagctacaactttgatcctgacacctgtgatgaatctgtggaccccttcaagaccagcagcaagacccccagcagccccagcaagagccctgccagctttgagatcccagccagcgccatggaggccaacggggtggatggagatggcctgaacaagccagccaagaagaagaagacccccctgaagacagacaccttccgggtgaagaagagccccaagaggagccccctgagtgacccccccagccaggaccccaccccagctgccaccccagagaccccacctgtgatctctgctgtggtgcacgccacagatgaggagaagctggccgtgaccaaccagaagtggacctgcatgacagtggacctggaggccgacaagcaggactacccccagcccagcgacctgagcacctttgtgaatgagaccaagttcagcagccccacagaggagctggactacagaaacagctatgaaattgagtacatggagaagattggcagcagcctgccccaggatgatgatgcccccaagaagcaggccctgtacctgatgtttgacaccagccaggagagccctgtgaagagcagccctgtgaggatgtctgagagccccaccccctgcagcggcagcagctttgaggagacagaggccctggtgaacacagctgccaagaaccagcaccctgtgccccggggcctggcccccaaccaggagagccacctgcaggtgcctgagaagagcagccagaaggagctggaggccatgggcctgggcaccccatctgaggccatcgagatccgggaggccgcccaccccacagatgtgtccatcagcaagacagccctgtacagccgcatcggcacagctgaggtggagaagccagctggcctgctcttccagcagcctgacctggacagcgccctgcagatcgcccgggcagagatcatcaccaaggagcgggaggtgtctgagtggaaggacaagtatgaggagagcagaagagaggtgatggagatgaggaagatcgtggccgagtatgagaagaccatcgcccagatgattgaagatgagcagcgggagaagtctgtgagccaccagacagtgcagcagctggtgctggagaaggagcaggccctggccgacctgaacagcgtggagaagagcctggccgacctcttccgccgctatgagaagatgaaggaggtgctggagggcttcaggaagaatgaggaggtgctgaagagatgtgcccaggagtacctgagccgggtgaagaaggaggagcagcgctaccaggccctgaaggtgcacgccgaggagaagctggaccgggccaatgctgagatcgcccaggtgcggggcaaggcccagcaggagcaggccgcccaccaggccagcctgaggaaggagcagctgcgggtggatgccctggagaggaccctggagcagaagaacaaggagattgaggagctgaccaagatctgtgatgagctgattgccaagatgggcaagagctag

SEQ ID NO: 291254 - DNA, 8586 bp, Artificial Sequence
  derived and/or modified sequence
cagcggaccctgagcgcccagaccccccggagcgcccagccccccggtaattcgcagaacattaagcgcaagcagcaagacacgccgggctcacccgatcatagagatgcctctagtattggtagcgtgggactgggcgggttttgcaccgccagcgaatctagcgcaagtttggatccttgcctcgtgagccctgaggttaccgaaccccggaaggatccccagggtgcccgaggacccgagggctcgctgctaccctcgcctccacctagtcaagaacgcgagcacccttcttcatctatgcccttcgccgaatgcccacccgagggctgtcttgcctctccagccgccgcaccggaggatggaccacaaactcagtctcccagaagagagcctgccccgaatgcgccaggcgacattgcggcagcgtttccagctgagcgagactcgagcaccccctatcaggagattgccgccgtgcctagcgcgggtagggaacgtcagccgaaggaggagggacaaaagtcaagcttctccttttcaagcggaattgaccagagccctggcatgtctccggttccactaagagagccaatgaaagctccgctctgtggtgaaggtgatcagccaggcggtttcgagtctcaggaaaaggaagcagcaggcggattcccccctgctgagtcacgacagggtgtggcaagcgtgcaagtgacccccgaggccccggccgcagcgcagcagggcaccgagtcgtctgccgttctcgaaaaatcccctctcaagcctatggccccaatcccccaggaccctgcccccagggcctccgacagggagagaggccagggagaagcaccgccccagtacctgaccgacgacctcgagtttctgagagcatgtcacttacccaggagtaattccggggccgcccctgaggccgaagtgaacgcggcctctcaggagagctgccagcagcccgtaggtgcctacctgcctcatgctgagctcccctgggggctgccctcaccagcccttgtccctgaggccggtggtagtggtaaagaggcacttgatacgatagatgtgcaaggccacccacagaccggcatgcgtggcacaaaaccgaaccaggtagtttgcgtagccgccggaggtcaacccgaaggcgggttgcctgtgtctccggagccatcgttgcttaccccaacggaggaagcccatcccgcctcctccctcgcttcattcccagccgcccagatccccatagccgtggaagagcccgggtcatcaagtagggaatcagtgagtaaggctggaatgcccgtttccgctgatgctgcgaaagaagtggttgacgccggattagtcgggctggagaggcaagtcagcgacctgggtagcaagggcgagcaccctgaaggcgatcctggtgaggttccagccccctctcctcaggaacgaggcgagcacttgaatactgagcagtcccacgaagtacaacccggcgtacctccccctccgctaccaaaggaacagtcccacgaggtgcagcccggcgctcctccacccccattacccaaggctccgtccgagtctgctcgcggtcctcctggcccaaccgacggggcaaaggtccatgaagattcaacttctcctgctgttgctaaagaggggagtagaagccctggcgacagtcctggcggaaaagaggaagcccctgaacctccggatggtggggacccaggtaatctgcaaggcgaagattcccaggctttctcttcaaagcgggaccccgaggtcggcaaagacgagttgtccaaaccatccagtgacgctgagtccagggatcacccttcctcgcacagtgctcagccccctaggaaagggggggctgggcacacggacgggccccactcacagacagccgaagctgacgccagcggtctgcctcacaagctcggagaagaggatcccgtcctgccgccagtgccagacggtgccggggagcctacagtccccgagggggccatttgggaaggctcaggcctccaaccaaagtgccccgatacactccaatcccgcgaaggcttgggcagaatggaaagtttcctcaccttagagtcagaaaaatccgactttccccctacacccgtcgccgaggtcgctccgaaggcccaagagggagaatctactctggaaattcggaagatgggatcgtgcgatggagaaggtctcctgacttcaccagaccagccgaggggaccagcatgcgatgctagccggcaggagttccatgctggggtaccgcatcctccccagggcgaaaatctcgcagcagatctgggtctaaccgccttaatactggaccaggatcaacagggcattcccagctgccccggcgagggctggattcgcggagcggcaagtgagtggccactactgagctccgagaaacaccttcagcctagccaggcccagcctgaaaccagcattttcgacgtgctgaaggagcaggctcagccaccagagaacggcaaggagacatcaccttcccacccaggtttcaaggaccagggagctgactccagccagatacacgttccagtggaacctcaggaagacaacaacctgccaacacatggcggacaggaacaggctctaggctctgaacttcagagtcagctgcccaagggaaccctctctgacactccaacatcctcacccaccgacatggtttgggaatcaagcttgaccgaggaatccgaactgagtgctcctacaagacagaagctacccgccctcggtgaaaaacggcccgagggggcttgtggggatggacagtcctccagagtgtcaccacctgccgctgacgtactcaaggatttctcactggccggaaactttagccgtaaggagacatgctgtactggccaaggtcccaataagagtcaacaggccctggccgatgccttggaggaggggtctcagcacgaggaggcgtgtcagcggcatcccggcgcgtctgaagctgcggatggttgttcacccctctggggattgagcaaacgcgagatggcctcagggaatactggcgaagcccccccttgtcagccggattccgtcgcactgcttgacgccgtcccttgtctgcctgccttggctcccgctagcccaggcgtcacacccacacaggatgcgccagagactgaggcttgcgatgagacgcaggaaggtcggcagcagccagttccggctcctcagcagaagatggagtgctgggcaacctctgacgccgaaagccccaagctactggcctcattcccgagtgctggagaacagggaggggaggctggggcagccgagactggcggatcagccggcgcaggcgatcccgggaaacagcaggcacccgagaagcccggagaggcaacattgagttgtggtctactccagactgagcattgcctgacttcaggagaggaagcgtccacttccgctctgcgagagtcctgtcaggccgagcaccctatggcatcctgccaggacgcactgctcccagcccgtgagttggggggaattccccggagcactatggacttttccacccaccaagccgtcccagacccaaaggaactcctcctctccggcccgccggaggtcgctgcccctgacaccccatatctccacgttgacagtgctgcccagcgcggagctgaggacagcggcgtgaaagctgtttcctctgccgatcctcgagcacccggcgagtccccgtgtccagttggggagccgcccttggcgctggagaatgctgcaagtctcaagctgtttgctggaagtctcgcaccccttttacaacctggggccgcgggaggagaaatccctgcggtccaagcttcctccgggtctcctaaagctcgtaccacagaaggaccggtggacagcatgccatgcttggacagaatgccgctgcttgctaaaggcaaacaggctaccggggaggaaaaggccgcaacagctccaggcgcaggggccaaggcctcaggggagggaatggctggcgacgccgccggcgaaactgaaggttcgatggaacgtatgggggagcccagtcaggacccaaaacaaggtacttccggtggggtagatacctcaagtgagcaaattgctactctgaccggtttccccgactttagagagcacattgctaaaatttttgagaagcccgtcctgggcgccctggctacacctggagaaaaggctggggccggccgcagtgctgtcggaaaagacctgacaaggcccctcggaccagagaagctgctggacgggccaccaggagtggatgttactctgcttcctgcccctcctgcacgcctgcaggtggagaagaaacagcagctggcaggggaagccgagatttctcacctagccctgcaggaccctgcttcagataagctgctgggccccgcagggctcacatgggaaagaaatctgcccggcgcaggagtagggaaggaaatggccggcgtccctccaactctacgagaagatgaacgaccggagggtccgggcgccgcctggcctggtctggagggccaggcctattctcagctggagcgatccagacaggaattagcaagtggcctgccctctcccgccgctacccaggagttgcccgtggaaagggcagcagccttccaagtcgcaccacactctcacggagaagaggccgttgcccaggacagaatcccctctggaaaacagcaccaagagacaagcgcctgcgacagccctcacggcgaagatgggccaggcgacttcgcccacacaggcgtgcctgggcatgttcctagatccacatgtgctccctcccctcaacgggaagttcttactgtaccagaggccaatagtgagccttggacactcgatactctgggcggcgagaggcggcctggcgtcactgcaggtatcctggagatgaggaatgccctgggcaatcagtctacacctgccccccccacaggggaggtcgccgataccccccttgagcccggtaaggtggccggagccgctggagaggcagagggcgatattacacttagcacggcggaaacccaagcctgcgctagcggggacttgccggaggccggcacgactcggacctttagcgtggtggccggcgacctcgttttgccagggtcctgccaggaccctgcatgcagcgacaaggcccctgggatggaaggcactgcagcccttcacggggactcccccgccaggccacagcaagctaaggagcagcccggacctgagaggccgatccccgctggagatggaaaagtgtgtgtatcttcccctcccgaaccggacgaaactcacgaccccaaactccagcatcttgcaccagaagagctgcatactgaccgcgagtcgcctaggcccggcccatccatgctgccgagcgtgcctaagaaagacgctcctagggtgatggataaggtaactagcgatgagacccgaggggccgagggtaccgagtcctcgccagtggccgatgacattattcaacctgccgccccagccgatttagagtcacccacgttagcagctagctcgtaccacggggatgtagtaggccaggttagtaccgacctgatcgcacagtcaatttccccagctgcggcccacgcaggcttgcctccgagtgccgccgagcatatagtaagcccatctgccccagccggtgaccgggtggaggcgtccacaccatcttgccccgatcccgccaaggacctctcaagatctagtgactctgaggaagccttcgaaactcctgagagcacaactcccgtgaaagcgccacccgctccccccccacctccgcccgaagtgataccagagccagaggtatccactcagcccccaccagaggaacctgggtgcggctcagaaacagtcccagtccccgatggcccccggagcgattcagtagaggggtcgccttttaggcccccctctcactcattcagcgctgtttttgatgaagacaagcctatagctagttcaggcacatacaacctggatttcgataacatcgagctggtggatactttccaaacacttgaacccagagccagcgatgctaaaaaccaggaaggaaaggtcaacacaaggaggaaatctacagactccgtcccgatctctaaatcaacattatcaaggagtcttagtctgcaagctagcgactttgacggggcttcaagctccgggaatcccgaagcagtcgctctggcccccgacgcctactccactgggtcctcttcagcttctagtaccctaaagaggaccaaaaagcccagacctccaagtttgaaaaaaaaacagacgaccaagaagcctaccgaaacccctcccgtgaaagagacccaacaggaaccagacgaggaatccctggtgcccagcggtgagaacctggcatctgaaacaaaaactgagagtgccaagaccgaaggacccagtcctgctctcctggaagagaccccattagaaccggccgtgggcccaaaggctgcatgtccactggattctgaatcagcagaaggtgttgtcccccctgcatcaggaggcgggcgggtgcagaactccccaccagtcgggcgaaagacacttcccctaactaccgcccctgaggctggagaggtgaccccctctgacagcggaggccaggaggacagccctgccaaaggcctttccgtgcgcctcgaattcgattactccgaagacaagtccagctgggacaaccagcaggagaaccctccccctaccaagaaaattggaaagaagccggtggccaagatgcctctgcgccgcccaaagatgaagaaaacgcccgaaaagttggataatactcccgcgagcccaccacgatcgccagccgagcctaatgacatacccatcgcaaaggggacctatacatttgatattgataagtgggatgatcctaactttaaccccttctcgtcgaccagcaaaatgcaggagagcccaaagctgcctcagcaatcctataactttgaccccgacacgtgcgatgagtcggtggatcccttcaaaacatcctctaagactcctagtagtcctagcaaatccccagcgtcttttgagatccctgctagtgccatggaggcgaatggcgtggatggcgatggcttgaacaaacccgccaaaaagaagaagacaccactcaagacagatacctttcgtgtgaaaaaatccccaaagaggtcacccctttcagatcctccctcacaagaccccactccggctgccaccccagaaacccctcccgtgatctcagcagtggttcatgccacagacgaagaaaaactcgccgtgaccaaccagaaatggacttgcatgactgttgacctggaggccgacaaacaagactatcctcagcccagcgacctgagcacttttgtgaatgaaaccaagttctcctcaccaacagaggaactcgattatcggaatagctatgaaattgaatacatggagaagatcgggagctcccttccccaggatgacgacgctccaaaaaagcaggctctgtatctgatgtttgacacatcgcaggagagccctgtcaagtccagtcccgtcagaatgtcggaaagtcctacaccatgctctggatcttcttttgaggagacagaggccctcgtgaatacagccgcaaagaatcagcatcctgtcccaaggggtttagcacccaaccaggagtctcatcttcaagtccctgagaagtcatcccaaaaggaattagaggcaatgggcttaggtaccccttccgaggccatcgagattagagaggccgcacatcccaccgacgtctccatttcgaaaaccgccctgtatagccggattggtacagcagaagtggagaaaccagccggtcttctttttcagcagccggatcttgactccgccctccaaattgcaagagccgaaatcattaccaaagaacgcgaagtgtctgagtggaaagacaagtacgaggagtcaagacgagaagtgatggagatgcggaaaattgtggcagagtacgaaaagacaattgcccaaatgattgaggatgagcaacgagagaaatcagtgagccaccagaccgtgcaacagctggtgctagagaaggagcaagctcttgccgacctcaatagcgtagagaaaagcctggcggacctgtttagacgttacgagaagatgaaagaggtgctggagggcttccggaagaatgaagaagtgctgaagcgctgcgcccaagaatacctgagtcgagtaaaaaaggaggaacaaagataccaggcattgaaggttcacgctgaagaaaaactcgacagggcaaatgccgagattgctcaggtgcgtggcaaagcccagcaggagcaggccgcccaccaggcctccttgaggaaggagcaactgcgggtggatgcactggaacgcactctggagcaaaaaaataaggaaattgaggagctaaccaagatctgcgacgaattgatagcaaagatgggcaagagttag

SEQ ID NO: 291255 - DNA, 8585 bp, Artificial Sequence
  derived and/or modified sequence
cagcggacactgagcgcgcagacccccaggagcgcccaaccacctggcaattcgcagaacatcaagcgaaagcagcaggacactccgggttcaccagatcatagggatgcctctagcatcgggtctgtgggattgggaggtttttgtacagcctctgaatcatccgctagtcttgatccttgcctcgtatcccccgaagtcaccgagccgaggaaggatcctcagggggcaagagggccagagggatcacttctcccctcgccgccaccatcccaggaacgggaacacccatcctcgtccatgcccttcgctgagtgtcctcctgagggttgcctggcgtcaccggcagccgctcctgaggacgggcctcagactcagtcaccccgacgcgaacccgcacccaatgctccaggtgacattgcggcagcgttcccagccgagagagatagctccactccgtatcaggaaatcgcggcagtgccaagcgccggtagggagaggcagcctaaagaggaggggcagaagtcgagtttttctttttcatctggcatcgaccagtctcctggcatgtcccctgtccccctgagggaaccaatgaaggccccactgtgcggggagggagaccagcctggtgggttcgagagccaggagaaggaagctgctggcggttttccccctgctgagtcacgacagggggtggcaagcgtgcaggtgaccccagaagcgcctgccgctgcacagcaagggactgaatcatccgctgttctggagaagagtcccttaaagccaatggctcccattcctcaggatcccgcaccaagggcctctgatagagagcgcggtcagggggaggccccaccacagtacctcacagatgatctggagttcctgcgcgcttgccatttgccgcgaagcaactccggcgctgcaccggaggcagaggtgaacgctgcaagccaggagagctgtcagcaacccgtaggagcttacctgccgcacgccgaactcccttggggattaccctcccccgctttggtgccggaagcgggtggttccggaaaagaggctttggatactatcgacgttcaggggcatcctcaaactgggatgagaggtactaaacctaatcaggtggtttgcgtcgccgcaggagggcagcccgaaggagggctgcccgtgagtcctgagccgtcccttctgacccctacagaggaggctcaccctgcatccagcctggcttctttccctgcggcacaaattcccatcgcagtcgaagagcccggtagctcctccagggagtccgtgagcaaagccggaatgccagtatctgccgatgccgcaaaggaggtggtcgacgccggactggtcggtctggagagacaggtgtccgacttgggctccaagggcgagcatccagaaggagaccccggtgaagtccctgctccttctccgcaagagcgaggagaacatctaaatacagaacagtctcacgaggtgcaacccggtgtccctccaccaccactgccaaaagagcagtcccatgaggttcagccaggagctcccccacccccactgcccaaagcgccaagtgagagcgcgcgtggcccacccggtcctaccgacggggctaaggttcatgaagactcaacaagcccagccgtagcaaaagagggcagcagatcccccggagacagtccaggagggaaagaagaggcacccgagcctccggatggtggcgaccccggaaatctccagggcgaagattcccaggcctttagttccaaaagggacccagaggtcgggaaagacgagctgtcgaaaccgtcctctgatgcggaatcccgagaccatccctccagccattcagcccagccccctaggaaaggtggggcaggccacactgacgggccacactcccagacagccgaagcagatgcgtcaggactgccccacaaactgggagaagaggacccggtgttgccccctgttccggacggggcaggagagcctactgtgcccgagggggcaatttgggaggggagcggtctccagccaaaatgccctgataccttacagagtcgagagggcctgggcaggatggaatcctttctgaccctcgaatccgagaagtctgacttcccaccaaccccggtggctgaggttgctcccaaagctcaggaaggagaaagtacgctggaaatccgtaagatgggcagttgtgatggagaaggcttgctcacttcacccgatcagcctcggggaccggcttgtgatgcctctcgacaagagttccacgccggagttccccacccccctcagggcgagaatctggcagctgaccttggccttactgccttgattcttgatcaggaccagcaagggatacccagctgtccaggtgagggttggattaggggggctgcatccgaatggcccctgctgtcctccgaaaagcatttacagccctctcaggctcagcccgagacatcaattttcgacgttctgaaggagcaggcgcagccaccagaaaatggcaaagaaacctctccatcccaccccggttttaaggatcagggcgctgactccagtcagatacacgtccccgtggaaccacaggaagataataatttgccgactcacggaggtcaggagcaagcgctgggctccgagctgcagagccagctgcccaaggggactttgagtgatacccccacttcatcgcccacagacatggtatgggagagcagtttaaccgaggaaagtgaacttagcgcgccaaccagacagaagctgcctgccctcggggaaaagagaccagaaggcgcttgcggagatggacagtctagccgagtgtcgccaccagccgcagacgtcctgaaggatttttctctggcgggtaactttagtaggaaggagacttgctgcaccgggcaggggccaaataaatcccagcaggctctggcggacgccttggaggagggatcacagcatgaggaggcctgccagagacacccaggggctagtgaggcggcagacggctgcagcccactttggggactgtcaaagagagagatggctagcgggaacacaggagaagcgcctccatgccagcccgatagtgtggcgcttttagacgcagtgccatgtctgccagcccttgcgcctgcatcgccgggagtgacgcctacgcaagacgcccctgagaccgaggcctgtgatgaaacacaggagggcagacagcagcctgtaccagcgccacagcagaaaatggagtgctgggctactagcgacgctgaaagcccaaagttactagcatccttcccttctgcaggtgagcagggcggagaagccggtgcagcagaaaccggaggctctgctggagcaggcgaccccggaaagcagcaggcacccgagaagcccggagaggcgacacttagttgtggtttgctacaaacagagcactgcctgacttccggggaagaggcgtcaaccagtgcattgcgtgagtcatgtcaggccgagcacccaatggcctcttgccaggacgcactgctcccagccagggagctcggaggaatacctaggtccaccatggatttctcaactcatcaggccgtacctgacccaaaggagctgctcctgtctgggccacccgaggtcgccgcaccagataccccctacttacacgtggatagcgcagcgcagcgcggagccgaggatagcggggtgaaggctgtctcctcagctgatccgcgagcacccggagagagcccatgccctgtgggtgaaccacctctcgcactagaaaatgctgcctctctgaagctgtttgctgggagcttggcccctctgcttcagcctggggcagcaggtggggagatccctgctgttcaggcgtcttcgggatctcccaaagcccgaaccaccgaaggacctgtagactcaatgccatgtctggatagaatgccactactggccaaaggcaaacaggcaacaggcgaggaaaaagctgccacggctccaggcgcaggcgcaaaagccagtggagagggcatggcgggagatgccgctggcgaaacagagggctcgatggagagaatgggtgagccctcccaagatccaaaacagggaacctcagggggagttgacacctctagcgagcaaattgccaccttgacaggttttccagatttccgggagcatatcgccaagatatttgagaagcccgtactaggcgcacttgcaacccctggggagaaagctggcgctgggcgatctgccgtgggaaaggatttgacccgcccactgggcccagagaagctgctggacggtcccccaggcgtggacgtaaccctccttcccgctcccccagctaggttgcaggtagagaaaaagcagcagctagccggtgaggcagagatttcccaccttgcactgcaggacccagcaagtgacaagttgctcgggccagccggtctaacctgggaaagaaatttgcccggagccggagtggggaaggaaatggcaggagttccgcctaccctgagagaggacgagcgccctgaggggcctggcgctgcctggcctggactcgaaggccaagcttactcccagctggaacggagccgacaggagctggcttccgggctgccttctccagcggctacacaggagctgccggtcgagcgggctgcggcattccaggtcgctcctcactcacacggcgaggaggccgtggctcaggacagaattccttctggtaaacagcaccaagaaacctccgcttgcgatagtcctcacggtgaggatggtccgggtgactttgctcacacaggcgtcccaggccacgtgccacgaagcacatgtgccccaagtcctcagcgcgaagtcctgactgtgccagaagccaattctgagccatggacactggataccctcggaggcgagcggcgtcctggcgttaccgcgggaattttggaaatgcgcaatgcactgggaaaccaaagcacacccgcaccgccaacaggcgaagtggccgatacgcccctggagccgggtaaggtggcaggggctgctggtgaagctgagggcgatattaccctgagtactgcagagacccaggcctgcgcctcaggagatttacctgaggcgggaacaacaaggaccttttcagtggtggctggcgaccttgtgctcccgggaagttgccaggatccagcgtgtagcgacaaagcacctgggatggaaggaaccgctgctctacacggcgactcccccgctcgccctcagcaggcaaaggaacagccagggccagaacgtccaattccagccggagacggcaaggtttgcgtaagtagcccgcctgagcccgatgagacacacgatccaaagctgcagcatctggcccctgaagagctccatactgatagggaaagtccaaggcccggacctagcatgctgcccagtgtgccgaagaaagatgccccaagagtgatggacaaagtgactagtgatgagacaaggggtgccgaagggactgaatcaagcccagtcgccgacgacattattcaaccagccgcaccagccgacctggaatcacctaccttagccgctagcagctaccacggagacgttgttggacaggtgtcaacggatctcattgcacagtctatctcccccgctgccgctcacgccggtctgccaccatcagctgccgagcacattgtatccccttcagcccctgctggtgaccgcgtggaagcatcaacaccttcctgcccggaccccgcaaaggatctctccaggtcttctgattcagaggaggcgtttgagactccagagtccaccacccctgtaaaggccccaccggcacctcctccacccccacctgaggtgattcccgaacctgaggtttccacccagcctcctccagaggaaccaggctgcgggtcagagacagtcccagtaccggatggaccacggtcagactctgtcgagggtagcccattcagaccaccatctcattcctttagtgccgtgtttgatgaagataagcccatcgcttcctccggtacgtataacctagactttgataacatcgagctggtagatacctttcagacactggaacccagagcatcagacgctaagaaccaggagggaaaggtcaacacccggcgaaaaagtaccgattctgtcccaataagcaagtctaccctgagccgcagtctctcattacaggccagcgactttgacggtgcctcatcttctggcaaccccgaggcagtcgcccttgccccagatgcttactcaacgggcagctctagcgccagcagcactctgaaacggaccaagaagcctcgtccaccatccctgaagaaaaaacagaccacaaaaaaacccacggaaacaccccctgtgaaggagacccagcaagagcctgacgaagaaagtttggtcccaagtggcgagaacctcgcctctgagacaaagactgaaagtgctaagacagagggtccaagtccggctttgctggaggaaactccgttagagcctgcagtcgggccaaaagccgcatgccccctggatagcgaaagcgccgaaggcgtcgtgccaccggcatccggtggcggacgagttcaaaattctcctccagtgggacgaaaaacactgcccctcacaacagcgcctgaggcaggagaggttaccccgtcagactctggcggacaggaagatagcccagcaaaggggctgtcagtgagacttgaatttgattactcagaggataagagcagttgggataaccagcaagagaatccaccgcctacgaagaaaatagggaaaaagcccgtagcaaaaatgcccctcagacggccaaagatgaaaaaaactcccgagaaactggataacacccccgcaagccccccacggtcccctgctgagcccaatgacattcccatagctaagggaacctatacttttgacattgataaatgggacgacccgaacttcaacccatttagttctacctcaaagatgcaggaatctcccaaactgcctcagcagtcttacaatttcgatccagacacctgcgacgagagtgtagacccgttcaaaacgtcttccaagacaccatcgagccctagtaaaagtcccgcaagctttgaaatcccggcatctgccatggaagccaatggcgtggacggcgacgggctgaataaacccgctaaaaaaaagaaaaccccactcaaaacagacacctttcgcgttaagaagagcccaaagagaagtcctctgagcgaccctccgtctcaggaccccacaccggctgccacgcccgaaaccccaccagtcatctccgccgtggttcacgccacagacgaggagaagctggcagttacaaaccaaaaatggacctgcatgaccgtagatctggaagcagacaaacaagactatccacagccatcagacctgtcaacattcgtgaatgaaacaaagtttagtagtcccaccgaggaactggactaccgaaattcctacgaaatcgagtatatggagaaaatcggcagctcccttcctcaggatgacgacgcccctaaaaagcaggctttgtacctgatgtttgatacttctcaggagtcccccgtgaagagtagccctgtgcggatgagtgaatctcctacgccctgtagtggaagtagcttcgaagaaactgaagcattggttaatactgcagccaagaatcaacatcctgtgcccagagggcttgcccctaatcaggaaagtcacctgcaggtgcccgagaaaagctcccagaaggaactagaagccatgggacttgggactccctcagaggcaatagagatcagagaggctgcgcacccaaccgacgtgtccataagtaagacagctctgtatagtcgaattggcactgctgaggtcgaaaagcccgctggactgctgtttcagcaaccagacttggactcagccctacagatcgcacgtgctgaaattattaccaaggagagagaggtaagtgagtggaaagacaagtacgaggagagtcgcagggaggtgatggagatgcgaaagatagtcgccgaatatgagaaaaccattgctcagatgatagaagacgaacagagggaaaaaagcgtgtcccaccagaccgtgcagcaacttgtgctggagaaagagcaggcactggccgacctgaactctgtcgaaaaatctctggccgacctttttcgaagatacgagaaaatgaaagaggtgttagaggggtttagaaagaacgaagaggttctcaaaagatgcgcccaggaatatctcagccgcgtcaaaaaagaggagcaacggtaccaggctttaaaagttcatgctgaggagaagcttgatcgggctaatgctgaaattgcgcaggtcagaggaaaagcccagcaggagcaggccgctcaccaggccagcctgcgcaaggagcagctccgcgtggacgcgttagagcggacactcgaacagaagaacaaggaaatcgaagaacttactaagatctgtgacgagctcattgctaaaatggggaagagcta

SEQ ID NO: 291256 - DNA, 9070 bp, Artificial Sequence
  derived and/or modified sequence
cagaggactttatcagctcagactccaaggtccgcgcagccacccgggaacagtcagaatataaaaaggaagcagcaggacacgcccggaagccctgaccacagagacgcgtccagcattggcagcgttgggcttggaggcttctgcaccgcttctgagagttctgccagcctggatccatgccttgtgtccccagaggtgactgagccaaggaaggacccacagggagccagggggccagaaggttctttgctgcccagcccaccaccgtcccaggagcgagagcacccctcgtcctccatgccctttgccgagtgtcccccggaaggttgcttggcaagtccagcagcggcacctgaagatggtcctcagactcagtctcccaggagggaacctgccccaaatgccccaggagacatcgcggcggcatttcccgctgagagggacagctctactccataccaagagattgctgccgtccccagtgctggaagagagagacagccgaaggaagaaggacagaagtcctccttctccttctccagtggcatcgaccagtcacctggaatgtcgccagtacccctcagagagccaatgaaggcaccgctgtgtggagagggggaccagcctggtggttttgagtcccaagagaaagaggctgcaggtggctttccccctgcagagtccaggcagggggtggcttctgtgcaagtgacccctgaggcccctgctgcagcccagcagggcacagaaagctcagcggtcttggagaagtcccccctaaaacccatggccccgatcccacaagatccagccccaagagcctcagacagagaaagaggccaaggggaggcgccgcctcagtatttaacagatgacttggaattcctcagggcctgccatctccctaggagcaattcaggggctgccccagaagcagaagtgaatgccgcttcccaggagagctgccagcagccagtgggagcatatctgccgcacgcagagctgccctggggcttgccaagtcctgccctggtgccagaggctgggggctctgggaaggaggctctggacaccattgatgttcagggtcacccacagacagggatgcgaggaaccaagcccaatcaagttgtctgtgtggcagcaggcggccagcccgaagggggtttgcctgtgagccctgaaccttccctgctcactccgactgaggaagcacatccagcttcaagcctcgcttcattcccagctgctcagattcctattgctgtagaagaacctggatcatcatccagggaatcagtttccaaggctgggatgccagtttctgcagatgcagccaaagaggtggtggatgcagggttggtgggactggagaggcaggtgtcagatcttggaagcaagggagagcatccagaaggggaccctggagaggttcctgccccatcaccccaggagaggggagagcacttgaacacggagcaaagccatgaggtccaaccaggagtaccaccccctcctcttcccaaggagcaaagccatgaggtccaaccaggagcaccaccccctcctcttcccaaggcaccaagtgaaagtgccagagggccaccggggccaacggatggagccaaggtccatgaagattccacaagcccagccgtggctaaagaaggaagcagatcacctggtgacagccctggaggaaaggaggaagccccagagccacctgatggtggagacccagggaacctgcaaggagaggactctcaggctttcagcagcaagcgtgatccagaagtaggcaaagatgagctttcaaagccaagcagtgatgcagagagcagagaccatcccagctcacactcagcacagccacccagaaaggggggtgctgggcacacggacgggccccactctcagacagcagaggctgatgcatctggcctaccacacaagctgggtgaggaggaccccgtcctgccccctgtgccagatggagctggtgagcccactgttcccgaaggagccatctgggaggggtcaggattgcagcccaaatgtcctgacacccttcagagcagggaaggattgggaagaatggagtctttcctgactttagaatcagagaaatcagattttccaccaactcctgttgcagaggttgcacccaaagcccaggaaggtgagagcacattggaaataaggaagatgggcagctgtgatggggagggcttgctgacgtccccagatcaaccccgcgggccggcgtgtgatgcgtcgagacaggaatttcatgctggggtgccacatcccccccagggggagaacttggcagcagacctggggctcacggcactcatcctggaccaagatcagcagggaatcccatcctgcccaggggaaggctggataagaggagctgcatccgagtggcccctactatcttctgagaagcatctccagccatcccaggcacaaccagagacatccatctttgacgtgctcaaggagcaggcccagccacctgaaaatgggaaagagacttctccaagccatccaggttttaaggaccagggagcagattcttcccaaatccatgtacctgtggaacctcaggaagataacaacttgcccactcatggaggacaggagcaggctttgggatcagaacttcaaagtcagctccccaaaggcaccctgtctgatactccaacttcatctcccactgacatggtttgggagagttctctgacagaagagtcagaattgtcagcaccaacgagacagaagttgcctgcactaggggagaagcggccagagggagcatgcggtgatggtcagtcctcgagggtctcgcctccagcagcagatgtcttaaaagacttttctcttgcagggaacttcagcagaaaggaaacttgctgcactgggcaggggccaaacaagtctcaacaggcattggctgatgccttggaagaaggcagccagcatgaagaagcatgtcaaaggcatccaggagcttctgaagcagctgatggttgttccccactctggggcttgagtaagagggagatggcaagtggaaacacaggggaggccccaccttgtcagcctgactcagtagctctcctggatgcagttccctgcctgccagccctggcgcccgccagccccggagtcacacccacccaggatgccccagagacagaggcatgtgatgaaacccaggaaggcaggcagcaaccagtgccggccccgcagcagaaaatggagtgctgggccacttcggatgcagagtccccaaagcttcttgcaagtttcccatcagctggggagcaaggtggtgaagccggggctgctgagactggtggcagcgctggtgcaggagacccaggaaagcagcaggctccggagaaacctggagaagctactttgagttgtggcctccttcagactgagcactgccttacctccggggaggaagcttctacctctgccctacgtgagtcctgccaagctgagcaccccatggccagctgccaggatgccttgctgccagccagagagctgggtgggattcccaggagcaccatggatttttctacacaccaggctgtcccagacccaaaggagctcctgctgtctgggccaccagaagtggctgctcctgacaccccttacctgcatgtcgacagtgctgcccagagaggagcagaagacagtggagtgaaagctgtttcctctgcagaccccagagctcctggcgaaagcccctgtcctgtaggggagcccccacttgccttggaaaatgctgcctccttgaagctgtttgctggctccctcgcccccctgttgcaaccaggagctgcaggtggggaaatccctgcagtgcaagccagcagtggtagtcccaaagccagaaccactgagggaccagtggactccatgccatgcctggaccggatgccacttctggccaagggcaagcaggcaacaggggaagagaaagcagcaacagctccaggtgcaggtgccaaggccagtggggagggcatggcaggtgatgcagcaggagagacagagggcagcatggagaggatgggagagccttcccaggacccaaagcagggcacatcaggtggtgtggacacaagctctgagcaaatcgccaccctcactggcttcccagacttcagggagcacatcgccaagatcttcgagaagcctgtgctcggagccctggccacacctggagaaaaggcaggagctgggaggagtgcagtgggtaaagacctcaccaggccattgggcccagagaagcttctagatgggcctccaggagtggatgtcacccttctccctgcacctcctgctcgactccaggtggagaagaagcaacagttggctggagaggctgagatttcccatctggctctgcaagatccagcttcagacaagcttctgggtccagcagggctgacctgggagcggaacttgccaggtgccggtgtggggaaggagatggcaggtgtcccacccacactgagggaagacgagaggccagaggggcctggggcagcctggccaggcctggaaggccaggcttactcacagctggagaggagcaggcaggaattagcttcaggtcttccttcaccagcagctactcaggagctccctgtggagagagctgctgccttccaggtggctccccatagccatggagaagaggccgtggcccaagacagaattccttctggaaagcagcaccaggaaacatctgcctgcgacagtccacatggagaagatggtcccggggactttgctcacacaggggttccaggacatgtgccaaggtccacgtgtgccccttctcctcagagggaggttttgactgtgcctgaggccaacagtgagccctggacccttgacacgcttgggggtgaaaggagacccggagtcactgctggcatcttggaaatgcgaaatgccctgggcaaccagagcacccctgcaccaccaactggagaagtggcagacactcccctggagcctggcaaggtggcaggcgctgctggggaagcagagggtgacatcaccctgagcacagctgagacacaggcatgtgcgtccggtgatctgcctgaagcaggtactacgaggacattctccgttgtggcaggtgacttggtgctgccaggaagctgtcaggacccagcctgctctgacaaggctccggggatggagggtacagctgcccttcatggggacagcccagccaggccccagcaggctaaggagcagccagggcctgagcgccccattccagctggggatgggaaggtgtgcgtctcctcacctccagagcctgacgaaactcacgacccgaagctgcaacatttggctccagaagagctccacactgacagagagagccccaggcctggcccatccatgttaccttcggttcctaagaaggatgctccaagagtcatggataaagtcacttcagatgagaccagaggtgcggaaggaacagaaagttcacctgtggcagatgatatcatccagcccgctgcccccgcagacctggaaagcccaaccttagctgcctcttcctaccacggtgatgttgttggccaggtctctacggatctgatagcccagagcatctccccagctgctgcccatgcgggtcttcctccctcggctgcagaacacatagtttcgccatctgccccagctggtgacagagtagaagcttccactccctcctgcccagatccggccaaggacctcagcaggagttccgattctgaagaggcatttgagaccccggagtcaacgacccctgtcaaagctccgccagctccacccccaccaccccccgaagtcatcccagaacccgaggtcagcacacagccacccccggaagaaccaggatgtggttctgagacagtccctgtccctgatggcccacggagcgactcggtggaaggaagtcccttccgtcccccgtcacactccttctctgccgtcttcgatgaagacaagccgatagccagcagtgggacttacaacttggactttgacaacattgagcttgtggatacctttcagaccttggagcctcgtgcctcagacgctaagaatcaggagggcaaagtgaacacacggaggaagtccacggattccgtccccatctctaagtctacactgtcccggtcgctcagcctgcaagccagtgactttgatggtgcttcttcctcaggcaatcccgaggccgtggcccttgccccagatgcatatagcacgggttccagcagtgcttctagtacccttaagcgaactaaaaaaccgaggccgccttccttaaaaaagaaacagaccaccaagaaacccacagagacccccccagtgaaggagacgcaacaggagccagatgaagagagccttgtccccagtggggagaatctagcatctgagacgaaaacggaatctgccaagacggaaggtcctagcccagccttattggaggagacgccccttgagcccgctgtggggcccaaagctgcctgccctctggactcagagagtgcagaaggggttgtccccccggcttctggaggtggcagagtgcagaactcaccccctgtcgggaggaaaacgctgcctcttaccacggccccggaggcaggggaggtaaccccatcggatagcggggggcaagaggactctccagccaaagggctctccgtaaggctggagtttgactattctgaggacaagagtagttgggacaaccagcaggaaaacccccctcctaccaaaaagataggcaaaaagccagttgccaaaatgcccctgaggaggccaaagatgaaaaagacacccgagaaacttgacaacactcctgcctcacctcccagatcccctgctgaacccaatgacatccccattgctaaaggtacttacacctttgatattgacaagtgggatgaccccaattttaaccctttttcttccacctcaaaaatgcaggagtctcccaaactgccccaacaatcatacaactttgacccagacacctgtgatgagtccgttgacccctttaagacatcctctaagacccccagctcaccttctaaatccccagcctcctttgagatcccagccagtgctatggaagccaatggagtggacggggatgggctaaacaagcccgccaagaagaagaagacgcccctaaagactgacacatttagggtgaaaaagtcgccaaaacggtctcctctctctgatccaccttcccaggaccccaccccagctgctacaccagaaacaccaccagtgatctctgcggtggtccacgccacagatgaggaaaagctggcggtcaccaaccagaagtggacgtgcatgacagtggacctagaggctgacaaacaggactacccgcagccctcggacctgtccacctttgtaaacgagaccaaattcagttcacccactgaggagttggattacagaaactcctatgaaattgaatatatggagaaaattggctcctccttacctcaggacgacgatgccccgaagaagcaggccttgtaccttatgtttgacacttctcaggagagccctgtcaagtcatctcccgtccgcatgtcagagtccccgacgccgtgttcagggtcaagttttgaagagactgaagcccttgtgaacactgctgcgaaaaaccagcatcctgtcccacgaggactggcccctaaccaagagtcacacttgcaggtgccagagaaatcctcccagaaggagctggaggccatgggcttgggcaccccttcagaagcgattgaaattagagaggctgctcacccaacagacgtctccatctccaaaacagccttgtactcccgcatcgggaccgctgaggtggagaaacctgcaggccttctgttccagcagcccgacctggactctgccctccagatcgccagagcagagatcataaccaaggagagagaggtctcagaatggaaagataaatatgaagaaagcaggcgggaagtgatggaaatgaggaaaatagtggccgagtatgagaagaccatcgctcagatgatagaggacgaacagagagagaagtcagtctcccaccagacggtgcagcagctggttctggagaaggagcaagccctggccgacctgaactccgtggagaagtctctggccgacctcttcagaagatatgagaagatgaaggaggtcctagaaggcttccgcaagaatgaagaggtgttgaagagatgtgcgcaggagtacctgtcccgggtgaagaaggaggagcagaggtaccaggccctgaaggtgcacgcggaggagaaactggacagggccaatgctgagattgctcaggttcgaggcaaggcccagcaggagcaagccgcccaccaggccagcctgcggaaggagcagctgcgagtggacgccctggaaaggacgctggagcagaagaataaagaaatagaagaactcaccaagatttgtgacgaactgattgccaaaatggggaaaagctaactctgaaccgaatgttttggacttaactgttgcgtgcaatatgaccgtcggcacactgctgttcctccagttccatggacaggttctgttttcactttttcgtatgcactactgtatttcctttctaaataaaattgatttgattgtatgcagtactaaggagactatcagaatttcttgctattggtttgcattttcctagtataattcatagcaagttgacctcagagttcctgtatcagggagattgtctgattctctaataaaagacacattgctgaccttggccttgccctttgtacacaagttcccagggtgagcagcttttggatttaatatgaacatgtacagcgtgcatagggactcttgccttaaggagtgtaaacttgatctgcatttgctgatttgtttttaaaaaaacaagaaatgcatgtttcaaataaaattctctattgtaaataaaattttttctttggatcttggc

SEQ ID NO: 291257 - protein, 571 aa, Artificial Sequence
  derived and/or modified sequence
MPLRRPKMKKTPEKLDNTPASPPRSPAEPNDIPIAKGTYTFDIDKWDDPNFNPFSSTSKMQESPKLPQQSYNFDPDTCDESVDPFKTSSKTPSSPSKSPASFEIPASAMEANGVDGDGLNKPAKKKKTPLKTVKKSPKRSPLSDPPSQDPTPAATPETPPVISAVVHATDEEKLAVTNQKWTCMTVDLEADKQDYPQPSDLSTFVNETKFSSPTEELDYRNSYEIEYMEKIGSSLPQDDDAPKKQALYLMFDTSQESPVKSSPVRMSESPTPCSGSSFEETEALVNTAAKNQHPVPRGLAPNQESHLQVPEKSSQKELEAMGLGTPSEAIEIREAAHPTDVSISKTALYSRIGTAEVEKPAGLLFQQPDLDSALQIARAEIITKEREVSEWKDKYEESRREVMEMRKIVAEYEKTIAQMIEDEQREKSVSHQTVQQLVLEKEQALADLNSVEKSLADLFRRYEKMKEVLEGFRKNEEVLKRCAQEYLSRVKKEEQRYQALKVHAEEKLDRANAEIAQVRGKAQQEQAAHQASLRKEQLRVDALERTLEQKNKEIEELTKICDELIAKMGKS

SEQ ID NO: 291258 - DNA, 1716 bp, Artificial Sequence
  derived and/or modified sequence
atgcccctgagaagacccaagatgaagaagacccccgagaagctggacaacacccccgccagcccccccagaagccccgccgagcccaacgacatccccatcgccaagggcacctacaccttcgacatcgacaagtgggacgaccccaacttcaaccccttcagcagcaccagcaagatgcaggagagccccaagctgccccagcagagctacaacttcgaccccgacacctgcgacgagagcgtggaccccttcaagaccagcagcaagacccccagcagccccagcaagagccccgccagcttcgagatccccgccagcgccatggaggccaacggcgtggacggcgacggcctgaacaagcccgccaagaagaagaagacccccctgaagaccgtgaagaagagccccaagagaagccccctgagcgacccccccagccaggaccccacccccgccgccacccccgagaccccccccgtgatcagcgccgtggtgcacgccaccgacgaggagaagctggccgtgaccaaccagaagtggacctgcatgaccgtggacctggaggccgacaagcaggactacccccagcccagcgacctgagcaccttcgtgaacgagaccaagttcagcagccccaccgaggagctggactacagaaacagctacgagatcgagtacatggagaagatcggcagcagcctgccccaggacgacgacgcccccaagaagcaggccctgtacctgatgttcgacaccagccaggagagccccgtgaagagcagccccgtgagaatgagcgagagccccaccccctgcagcggcagcagcttcgaggagaccgaggccctggtgaacaccgccgccaagaaccagcaccccgtgcccagaggcctggcccccaaccaggagagccacctgcaggtgcccgagaagagcagccagaaggagctggaggccatgggcctgggcacccccagcgaggccatcgagatcagagaggccgcccaccccaccgacgtgagcatcagcaagaccgccctgtacagcagaatcggcaccgccgaggtggagaagcccgccggcctgctgttccagcagcccgacctggacagcgccctgcagatcgccagagccgagatcatcaccaaggagagagaggtgagcgagtggaaggacaagtacgaggagagcagaagagaggtgatggagatgagaaagatcgtggccgagtacgagaagaccatcgcccagatgatcgaggacgagcagagagagaagagcgtgagccaccagaccgtgcagcagctggtgctggagaaggagcaggccctggccgacctgaacagcgtggagaagagcctggccgacctgttcagaagatacgagaagatgaaggaggtgctggagggcttcagaaagaacgaggaggtgctgaagagatgcgcccaggagtacctgagcagagtgaagaaggaggagcagagataccaggccctgaaggtgcacgccgaggagaagctggacagagccaacgccgagatcgcccaggtgagaggcaaggcccagcaggagcaggccgcccaccaggccagcctgagaaaggagcagctgagagtggacgccctggagagaaccctggagcagaagaacaaggagatcgaggagctgaccaagatctgcgacgagctgatcgccaagatgggcaagagctag

SEQ ID NO: 291259 - DNA, 1716 bp, Artificial Sequence
  derived and/or modified sequence
atgcccttgcgtaggccaaaaatgaaaaaaactccagagaaactagacaacacccctgcctctccccctcggtctccggcagaaccgaatgacatacctatcgccaaaggcacctatactttcgacatagacaagtgggatgaccctaacttcaacccattttcttccacatccaagatgcaggagagcccaaagttgcctcagcagtcttataactttgatccagacacttgcgatgaatctgttgatccattcaagacctcttctaaaactccctctagcccatcaaaaagtccagcaagttttgaaattcccgcttcggcgatggaggctaacggcgtggatggcgatggcctcaacaagcctgcaaaaaaaaaaaaaactccgctcaagaccgtcaagaaaagtcccaaaagatcccctctctccgaccctccaagccaagaccccactcccgccgcaacacccgaaacccccccagtgatatcagctgtcgtgcatgcgacggatgaggaaaagcttgcagtcactaatcagaagtggacttgcatgactgtagacctggaagccgataagcaggattacccacagcccagtgacttatcaaccttcgtgaatgagactaaattctcttctcccaccgaagagctcgattatcggaatagctatgaaatcgaatacatggagaagattggaagctcgttgccccaagatgatgacgcaccaaaaaagcaagccctgtaccttatgtttgacacctcacaggagtcccctgtcaaaagttcccccgtacgaatgtcagaaagcccgactccctgcagtgggagctctttcgaggagaccgaggcacttgttaacaccgccgccaaaaatcagcatccagtcccccggggtctggcccccaatcaggaatcccatctgcaggtgccagagaaatccagtcagaaggaactggaagcaatgggcctgggtaccccaagcgaggctattgaaattcgggaggccgcccatccaacagatgtctctattagcaaaactgccctttatagcaggattggcacagccgaggtggagaagccggccggcttgctgttccagcagccagacctggacagcgcactgcagattgcgcgggccgaaatcataactaaagagagggaagtatccgagtggaaggataaatatgaagagtccagacgcgaagtaatggagatgcgcaagattgtcgcagagtacgagaagaccatcgctcagatgattgaggacgaacagcgggagaaatcagtgagccatcagactgtccagcagctcgtgctggaaaaggaacaagcactggctgacctaaatagcgtggagaaatccctcgccgatttatttcgtcgctatgaaaagatgaaagaggtgttagaaggctttcgaaaaaacgaggaagtattgaaaagatgcgcacaagagtacctgtcaagggtgaagaaggaagagcaacgctaccaggctctgaaggtgcacgccgaagagaagttagatagggccaatgctgagatagcccaggtccgggggaaagcacagcaggaacaggctgcccaccaagcctctcttagaaaggagcaactaagggtcgatgcactggagcgcaccctggaacagaagaacaaggaaattgaggagttgaccaaaatttgcgacgaattaatcgccaagatggggaaaagctag

SEQ ID NO: 291260 - DNA, 1716 bp, Artificial Sequence
  derived and/or modified sequence
atgcccctgcggcggcccaagatgaagaagaccccagagaagctggacaacaccccagccagcccccccaggagccctgctgagcccaatgacatccccatcgccaagggcacctacacctttgatattgacaagtgggatgaccccaacttcaaccccttcagcagcaccagcaagatgcaggagagccccaagctgccccagcagagctacaactttgatcctgacacctgtgatgaatctgtggaccccttcaagaccagcagcaagacccccagcagccccagcaagagccctgccagctttgagatcccagccagcgccatggaggccaacggggtggatggagatggcctgaacaagccagccaagaagaagaagacccccctgaagacagtgaagaagagccccaagaggagccccctgagtgacccccccagccaggaccccaccccagctgccaccccagagaccccacctgtgatctctgctgtggtgcacgccacagatgaggagaagctggccgtgaccaaccagaagtggacctgcatgacagtggacctggaggccgacaagcaggactacccccagcccagcgacctgagcacctttgtgaatgagaccaagttcagcagccccacagaggagctggactacagaaacagctatgaaattgagtacatggagaagattggcagcagcctgccccaggatgatgatgcccccaagaagcaggccctgtacctgatgtttgacaccagccaggagagccctgtgaagagcagccctgtgaggatgtctgagagccccaccccctgcagcggcagcagctttgaggagacagaggccctggtgaacacagctgccaagaaccagcaccctgtgccccggggcctggcccccaaccaggagagccacctgcaggtgcctgagaagagcagccagaaggagctggaggccatgggcctgggcaccccatctgaggccatcgagatccgggaggccgcccaccccacagatgtgtccatcagcaagacagccctgtacagccgcatcggcacagctgaggtggagaagccagctggcctgctcttccagcagcctgacctggacagcgccctgcagatcgcccgggcagagatcatcaccaaggagcgggaggtgtctgagtggaaggacaagtatgaggagagcagaagagaggtgatggagatgaggaagatcgtggccgagtatgagaagaccatcgcccagatgattgaagatgagcagcgggagaagtctgtgagccaccagacagtgcagcagctggtgctggagaaggagcaggccctggccgacctgaacagcgtggagaagagcctggccgacctcttccgccgctatgagaagatgaaggaggtgctggagggcttcaggaagaatgaggaggtgctgaagagatgtgcccaggagtacctgagccgggtgaagaaggaggagcagcgctaccaggccctgaaggtgcacgccgaggagaagctggaccgggccaatgctgagatcgcccaggtgcggggcaaggcccagcaggagcaggccgcccaccaggccagcctgaggaaggagcagctgcgggtggatgccctggagaggaccctggagcagaagaacaaggagattgaggagctgaccaagatctgtgatgagctgattgccaagatgggcaagagctag

SEQ ID NO: 291261 - DNA, 1716 bp, Artificial Sequence
  derived and/or modified sequence
atgcccctgcggcggcccaagatgaagaagacccccgagaagctggacaatacacccgcttctccgcctcggtcccctgctgagcccaatgatattcctattgcaaaaggaacatacaccttcgatatagataagtgggacgaccctaacttcaatcccttcagctccacatcaaaaatgcaagaatccccgaaactgccccagcaatcctacaatttcgatccagatacctgtgatgagtctgtggacccttttaaaactagtagcaaaacccctagcagcccttccaagtcgccagcctcattcgagattcctgccagcgctatggaagcaaacggggtcgacggggacgggctcaataaacccgctaaaaaaaaaaagacgcccttgaagaccgtcaagaagtcaccgaaaagatctcccctctccgaccctccatcccaggaccctacccccgcagcaactcccgaaacgcctcctgtcatctcggctgtggtgcacgctactgatgaagaaaaactcgccgtgaccaatcagaagtggacctgcatgaccgtggatctagaggcggataaacaagattatccacaaccttcagacctctctacatttgtgaacgagacgaaatttagcagtcctaccgaggagctggattatcggaattcatacgagatcgaatacatggagaagattggctccagtctgcctcaggatgacgacgctcccaaaaagcaagccttgtacctgatgttcgacaccagccaggagagccccgtgaaaagctctcccgtgcgaatgtccgagtcaccaacgccctgctcaggatcctcttttgaggagacagaggcgctggtgaacactgccgctaagaaccaacatcctgtccccagggggctcgcccccaaccaggagtctcatctccaagttcccgaaaagtcatcccagaaagagcttgaagcgatgggtcttgggaccccatccgaggctattgaaattagggaggctgcgcaccccaccgacgttagtatctcgaagacagcactgtattcacggattggaacagccgaggtagaaaagccggccggactgctcttccagcaacctgatctcgactctgctttgcagatagcacgagccgaaattattacaaaagaacgggaggtgagcgaatggaaggataagtacgaggagagtcgaagggaagtgatggagatgcgtaaaatcgtggccgaatatgagaaaacaatcgcccaaatgatcgaagacgagcagagggagaagagcgtgtctcaccaaaccgtccagcagctggtgctggaaaaggaacaggctctcgcagatctcaacagcgtggaaaagagcctcgccgacctgtttaggagatacgagaaaatgaaagaagttctggagggcttccgcaagaacgaggaggtgctgaaaagatgtgctcaggaatacctgtcaagagtcaagaaagaggagcagcgctatcaggcactgaaagtgcatgcagaggagaaactcgatcgagccaacgccgaaattgctcaagttagaggtaaagcccagcaggagcaagccgcccaccaggcttcactgcgaaaggagcagttgcgggtggatgctctcgagcgaacactcgagcaaaaaaacaaagaaattgaagaactaaccaaaatctgcgacgaactgatcgccaaaatgggcaaatcctag

SEQ ID NO: 291262 - DNA, 1716 bp, Artificial Sequence
  derived and/or modified sequence
atgcctctgagaaggcctaagatgaaaaaaacgccagaaaaattggataacacaccagccagccctcctaggtcacccgctgagcccaatgacatccctattgctaagggtacatatactttcgacatcgataaatgggacgaccctaactttaatcccttctcatcaacctcaaagatgcaggaatcccccaagctgccacagcaaagttacaattttgaccctgacacttgtgacgaaagcgtggatccgttcaagacgagctcaaaaactccctcgtccccgagcaaatctcctgcttcttttgaaatccctgccagtgccatggaggcaaacggcgttgacggcgatggtctcaacaagcctgctaaaaaaaagaaaactcccctgaagaccgtcaaaaaatcccctaagagatctcccctttcagatccgccatcacaggaccccacaccggcagcaacacccgaaactccacccgtgattagcgccgtcgtgcacgccacagacgaggagaaactcgctgtgaccaaccagaagtggacctgtatgaccgtggatctggaggccgacaagcaagattatccacagccttcagatctgagtacttttgtcaacgagactaagttctcctccccaacagaagaattagattacagaaactcttacgagatcgaatacatggaaaagatcgggagctctctaccccaagatgatgacgccccaaaaaagcaggcactgtatcttatgtttgacacctctcaggagtctcctgtgaaatccagtcctgtacggatgtccgagtcacccacaccctgtagcggcagttccttcgaggagactgaggctcttgtgaataccgcggctaaaaatcagcatcctgtgcctcggggattggcgcctaatcaagagagtcatctgcaggtgccggagaagagttcacaaaaagaactggaggcgatgggcctcgggacgcccagcgaagccatcgaaataagagaagcagcgcatccaacggacgtgtctataagtaagaccgccctctatagcagaataggcacagccgaggttgaaaaacccgcaggcctgctattccagcaacctgaccttgactctgctctccagatcgcccgagccgaaatcatcaccaaagagagggaggtaagcgagtggaaggacaaatacgaagagagtagacgggaagtgatggagatgagaaagattgtggcagaatatgagaagacaatcgctcaaatgattgaggatgagcagagagagaagtcggtatctcatcaaacagtccagcagttagttctcgaaaaggaacaggccttggctgatctgaactcggtagaaaagtcgcttgctgatctttttcgtaggtatgaaaagatgaaggaggtattggaaggattccgtaagaacgaggaagtgcttaagagatgtgcccaggaataccttagtcgggtaaaaaaggaagagcaaagatatcaggctctaaaggtgcacgctgaggagaagctggaccgggctaacgccgagatcgcccaagttcggggaaaagcacagcaagagcaggccgcacatcaggcctctcttcggaaagaacagctgcgagtcgacgcgctagagaggacacttgagcagaagaacaaagaaatcgaggagctgactaagatttgcgacgagctgatagcaaagatggggaaaagctag

SEQ ID NO: 291263 - protein, 1292 aa, Artificial Sequence
  derived and/or modified sequence
MSSECDGGSKAVMNGLAPGSNGQDKATADPLRARSISAVKIIPVKTVKNASGLVLPTDMDLTKICTGKGAVTLRASSSYRETPSSSPASPQETRQHESKPGLEPEPSSADEWRLSSSADANGNAQPSSLAAKGYRSVHPNLPSDKSQDATSSSAAQPEVIVVPLYLVNTDRGQEGTARPPTPLGPLGCVPTIPATASAASPLTFPTLDDFIPPHLQRWPHHSQPARASGSFAPISQTPPSFSPPPPLVPPAPEDLRRVSEPDLTGAVSSTDSSPLLNEVSSSLIGTDSQAFPSVSKPSSAYPSTTIVNPTIVLLQHNREQQKRLSSLSDPVSERRVGEQDSAPTQEKPTSPGKAIEKRAKDDSRRVVKSTQDLSDVSMDEVGIPLRNTERSKDWYKTMFKQIHKLNRDTPEENPYFPTYKFPELPEIQQTSEEDNPYTPTYQFPASTPSPKSEDDDSDLYSPRYSFSEDTKSPLSVPRSKSEMSYIDGEKVVKRSATLPLPARSSSLKSSSERNDWEPPDKKVDTRKYRAEPKSIYEYQPGKSSVLTNEKMSRDISPEEIDLKNEPWYKFFSELEFGKPPPKKIWDYTPGDCSILPREDRKTNLDKDLSLCQTELEADLEKMETLNKAPSANVPQSSAISPTPEISSETPGYIYSSNFHAVKRESDGAPGDLTSLENERQIYKSVLEGGDIPLQGLSGLKRPSSSASTKDSESPRHFIPADYLESTEEFIRRRHDDKEKLLADQRRLKREQEEADIAARRHTGVIPTHHQFITNERFGDLLNIDDTAKRKSGSEMRPARAKFDFKAQTLKELPLQKGDIVYIYKQIDQNWYEGEHHGRVGIFPRTYIELLPPAEKAQPKKLTPVQVLEYGEAIAKFNFNGDTQVEMSFRKGERITLLRQVDENWYEGRIPGTSRQGIFPITYVDVIKRPLVKNPVDYMDLPFSSSPSRSATASPQFSSHSKLITPAPSSLPHSRRALSPEMHAVTSEWISLTVGVPGRRSLALTPPLPPLPEASIYNTDHLALSPRASPSLSLSLPHLSWSDRPTPRSVASPLALPSPHKTYSLAPTSQASLHMNGDGGVHTPSSGIHQDSFLQLPLGSSDSVISQLSDAFSSQSKRQPWREESGQYERKAERGAGERGPGGPKISKKSCLKPSDVVRCLSTEQRLSDLNTPEESRPGKPLGSAFPGSEAEQTERHRGGEQAGRKAARRGGSQQPQAQQRRVTPDRSQTSQDLFSYQALYSYIPQNDDELELRDGDIVDVMEKCDDGWFVGTSRRTKQFGTFPGNYVKPLYL

SEQ ID NO: 291264 - DNA, 3879 bp, Artificial Sequence
  derived and/or modified sequence
atgagcagcgagtgcgacggcggcagcaaggccgtgatgaacggcctggcccccggcagcaacggccaggacaaggccaccgccgaccccctgagagccagaagcatcagcgccgtgaagatcatccccgtgaagaccgtgaagaacgccagcggcctggtgctgcccaccgacatggacctgaccaagatctgcaccggcaagggcgccgtgaccctgagagccagcagcagctacagagagacccccagcagcagccccgccagcccccaggagaccagacagcacgagagcaagcccggcctggagcccgagcccagcagcgccgacgagtggagactgagcagcagcgccgacgccaacggcaacgcccagcccagcagcctggccgccaagggctacagaagcgtgcaccccaacctgcccagcgacaagagccaggacgccaccagcagcagcgccgcccagcccgaggtgatcgtggtgcccctgtacctggtgaacaccgacagaggccaggagggcaccgccagaccccccacccccctgggccccctgggctgcgtgcccaccatccccgccaccgccagcgccgccagccccctgaccttccccaccctggacgacttcatccccccccacctgcagagatggccccaccacagccagcccgccagagccagcggcagcttcgcccccatcagccagaccccccccagcttcagcccccccccccccctggtgccccccgcccccgaggacctgagaagagtgagcgagcccgacctgaccggcgccgtgagcagcaccgacagcagccccctgctgaacgaggtgagcagcagcctgatcggcaccgacagccaggccttccccagcgtgagcaagcccagcagcgcctaccccagcaccaccatcgtgaaccccaccatcgtgctgctgcagcacaacagagagcagcagaagagactgagcagcctgagcgaccccgtgagcgagagaagagtgggcgagcaggacagcgcccccacccaggagaagcccaccagccccggcaaggccatcgagaagagagccaaggacgacagcagaagagtggtgaagagcacccaggacctgagcgacgtgagcatggacgaggtgggcatccccctgagaaacaccgagagaagcaaggactggtacaagaccatgttcaagcagatccacaagctgaacagagacacccccgaggagaacccctacttccccacctacaagttccccgagctgcccgagatccagcagaccagcgaggaggacaacccctacacccccacctaccagttccccgccagcacccccagccccaagagcgaggacgacgacagcgacctgtacagccccagatacagcttcagcgaggacaccaagagccccctgagcgtgcccagaagcaagagcgagatgagctacatcgacggcgagaaggtggtgaagagaagcgccaccctgcccctgcccgccagaagcagcagcctgaagagcagcagcgagagaaacgactgggagccccccgacaagaaggtggacaccagaaagtacagagccgagcccaagagcatctacgagtaccagcccggcaagagcagcgtgctgaccaacgagaagatgagcagagacatcagccccgaggagatcgacctgaagaacgagccctggtacaagttcttcagcgagctggagttcggcaagcccccccccaagaagatctgggactacacccccggcgactgcagcatcctgcccagagaggacagaaagaccaacctggacaaggacctgagcctgtgccagaccgagctggaggccgacctggagaagatggagaccctgaacaaggcccccagcgccaacgtgccccagagcagcgccatcagccccacccccgagatcagcagcgagacccccggctacatctacagcagcaacttccacgccgtgaagagagagagcgacggcgcccccggcgacctgaccagcctggagaacgagagacagatctacaagagcgtgctggagggcggcgacatccccctgcagggcctgagcggcctgaagagacccagcagcagcgccagcaccaaggacagcgagagccccagacacttcatccccgccgactacctggagagcaccgaggagttcatcagaagaagacacgacgacaaggagaagctgctggccgaccagagaagactgaagagagagcaggaggaggccgacatcgccgccagaagacacaccggcgtgatccccacccaccaccagttcatcaccaacgagagattcggcgacctgctgaacatcgacgacaccgccaagagaaagagcggcagcgagatgagacccgccagagccaagttcgacttcaaggcccagaccctgaaggagctgcccctgcagaagggcgacatcgtgtacatctacaagcagatcgaccagaactggtacgagggcgagcaccacggcagagtgggcatcttccccagaacctacatcgagctgctgccccccgccgagaaggcccagcccaagaagctgacccccgtgcaggtgctggagtacggcgaggccatcgccaagttcaacttcaacggcgacacccaggtggagatgagcttcagaaagggcgagagaatcaccctgctgagacaggtggacgagaactggtacgagggcagaatccccggcaccagcagacagggcatcttccccatcacctacgtggacgtgatcaagagacccctggtgaagaaccccgtggactacatggacctgcccttcagcagcagccccagcagaagcgccaccgccagcccccagttcagcagccacagcaagctgatcacccccgcccccagcagcctgccccacagcagaagagccctgagccccgagatgcacgccgtgaccagcgagtggatcagcctgaccgtgggcgtgcccggcagaagaagcctggccctgaccccccccctgccccccctgcccgaggccagcatctacaacaccgaccacctggccctgagccccagagccagccccagcctgagcctgagcctgccccacctgagctggagcgacagacccacccccagaagcgtggccagccccctggccctgcccagcccccacaagacctacagcctggcccccaccagccaggccagcctgcacatgaacggcgacggcggcgtgcacacccccagcagcggcatccaccaggacagcttcctgcagctgcccctgggcagcagcgacagcgtgatcagccagctgagcgacgccttcagcagccagagcaagagacagccctggagagaggagagcggccagtacgagagaaaggccgagagaggcgccggcgagagaggccccggcggccccaagatcagcaagaagagctgcctgaagcccagcgacgtggtgagatgcctgagcaccgagcagagactgagcgacctgaacacccccgaggagagcagacccggcaagcccctgggcagcgccttccccggcagcgaggccgagcagaccgagagacacagaggcggcgagcaggccggcagaaaggccgccagaagaggcggcagccagcagccccaggcccagcagagaagagtgacccccgacagaagccagaccagccaggacctgttcagctaccaggccctgtacagctacatcccccagaacgacgacgagctggagctgagagacggcgacatcgtggacgtgatggagaagtgcgacgacggctggttcgtgggcaccagcagaagaaccaagcagttcggcaccttccccggcaactacgtgaagcccctgtacctgtag

SEQ ID NO: 291265 - DNA, 3879 bp, Artificial Sequence
  derived and/or modified sequence
atgtccagcgaatgcgacggtggctccaaagcagttatgaacgggctggccccaggatctaacggtcaggataaggcaactgccgacccgctgcgcgcgagatccattagtgccgttaaaataatccccgtgaagaccgtgaagaatgctagcggcctcgtcctacccaccgatatggatttgacaaagatctgtacagggaagggcgccgttaccctgcgagccagctcatcttacagggagacccctagcagctcccccgcatccccacaagagacaaggcagcatgagtctaagcctggcctggagcccgagccatcttccgctgatgagtggcggttgagctcttccgctgatgccaacggtaatgcccagccttcttctctggccgcgaaagggtaccggagcgtgcaccccaacctcccctctgataaaagtcaggacgctacttcctccagtgctgcccagccagaagtgattgtcgtcccactttacctagtcaacacagaccgcggtcaagaaggaactgctcggcctcccactccattagggcccctaggttgcgttcctaccatacccgctacagcttcagctgccagccccctgaccttcccaacactggacgacttcatacctccacacctgcaacgatggccacatcattctcaacccgcaagagcctcaggctctttcgctccgatctcacaaaccccaccatcgttctctcctcctcctcccctggttcctccagcccctgaggacttgagaagggtttctgaacctgatctaaccggcgctgtgtcatccaccgattcatcaccgctgctgaacgaggtgtccagttcactgatagggaccgattctcaagcgttccctagtgtctctaagccatcaagtgcttaccccagcaccacaattgtgaacccaactatcgttctgctgcaacacaaccgggagcagcagaagagattatcgtcccttagtgatcccgtgtctgaacgacgtgtcggagaacaagatagcgcgcccacgcaggagaagcccacatcccccggcaaagcgatcgaaaaaagagcaaaagatgactcacgtcgcgtggttaagtctacacaggacctgagcgacgtttctatggatgaagttggcatcccccttcggaatacagagaggagtaaggactggtacaagacaatgttcaaacagatccacaagctcaatagagacacccctgaagagaacccgtacttccctacttataagttcccggagctgccggagattcagcagacttccgaggaggacaacccctataccccaacgtatcaattcccagcgagcacacccagtccaaagtctgaggacgacgacagcgatctgtactccccgcggtatagcttcagcgaggacaccaagtctcctctgagcgtccctagatcaaaaagtgaaatgagttatatagatggtgagaaggtcgtgaaacgctctgccactctgcccctgcctgccaggtcaagcagcctcaaaagctcctcggaacggaacgactgggaaccccctgataagaaagttgatactagaaagtacagggccgagcccaagtccatttatgagtaccagccaggaaaaagcagtgtgctgacaaacgaaaaaatgtcccgcgacatttcccccgaggagatcgacctaaaaaatgagccctggtataaattcttcagcgagctggagtttgggaaacctcctcctaagaagatttgggattatacaccaggggactgttcaattttgccgcgagaagaccggaagacaaacttagacaaggatttgagcttgtgccaaacagagctggaggccgatctcgaaaagatggaaactcttaataaggccccaagtgctaacgtgccccagagctccgcaatctccccaactcccgagatttcgagcgagactccaggttatatttactcaagtaatttccatgccgtcaagcgcgagtctgacggcgccccaggtgacttaacaagcctggagaatgaacgtcagatctacaagagtgttctggaggggggggacattcccctacaagggttatccgggttgaagagacctagctcttcggcttctacgaaagacagcgagagcccccgacatttcataccagctgattacctggaatccacagaggagtttatccgccgacgccacgatgacaaggagaagctgctagcagatcagcgacggctcaagcgcgagcaagaggaagctgatatcgccgctcggcgtcacaccggtgtgatacccacgcaccaccagttcattaccaatgaaaggttcggcgacctgctcaacattgacgatactgcgaagcgaaaaagcggcagtgagatgaggccagcccgggcaaagtttgattttaaggcccaaaccttgaaggagctaccgctgcagaaaggcgacatcgtgtacatctacaaacaaattgaccaaaattggtatgagggtgaacatcatggacgagtgggaattttcccaagaacctacattgagcttctaccgccagctgagaaggcacagccaaagaaactaactccagttcaggtcctggaatacggggaggctatcgctaagttcaacttcaatggtgacacacaggttgaaatgtcattccgcaagggtgaaagaatcaccctgctgaggcaagtggacgagaattggtacgaaggacgaattcccgggacatctagacagggcatttttccgattacctatgtcgacgtgattaagcggcctttggtgaagaaccccgtggactacatggacctgcccttcagctctagtccaagtaggtctgcaaccgcgagcccccaattttcatctcactccaaattgatcaccccagcgccatccagtttgcctcactctcggcgcgccttatcacctgagatgcacgctgtgacttcagagtggatcagcctgacggtcggggttcctggacgtagatccctcgcattaacgccaccacttccaccactgcccgaggcttccatctacaatactgatcatcttgccttgtcaccaagggcaagcccctctttgagtctgtccctccctcacctttcgtggagcgatcggccaacgccacgctcagtagcctctcccctggcgctcccatccccccataagacatacagccttgccccgacatcccaagccagtctccacatgaacggagacggaggcgtgcatacccccagctccggaattcaccaggatagctttcttcaattgccactgggtagcagtgactctgtgatttcacagctctcagacgcctttagctcccaaagcaagcgccagccgtggcgggaggaatcagggcagtacgaacgcaaagctgagcgcggagcgggcgaacgagggcccggcggcccgaagatctcaaagaaatcttgcttgaaaccctccgacgtggtacgatgtttgagcaccgaacagcgactgagcgatcttaacacacccgaagagagccggcctggaaagcccctgggcagtgcatttcctggttccgaggccgaacaaaccgagaggcaccgcggcggcgagcaggccggacgaaaagccgcacgtcgcggaggttcacagcagccccaagcacagcagaggagggtgacgccagatcggagccagacaagtcaggacctgttcagctatcaggccctgtattcttacatcccccaaaacgacgatgaactcgagctcagggacggtgatattgtggatgttatggagaagtgtgatgacggctggttcgttggtacaagccgccggaccaaacagtttggtacattccctggtaattacgtgaagccgctttatctgtag

SEQ ID NO: 291266 - DNA, 3879 bp, Artificial Sequence
  derived and/or modified sequence
atgagttcagagtgcgatggcggcagtaaagccgtgatgaatgggctggcccctggcagtaacggacaggataaagcaacagctgatcccctgagggctcgttctatttctgccgtcaaaataatccccgtaaaaaccgtgaaaaacgcttctggcttggtgctgccaaccgatatggacttgaccaagatctgcactggtaaaggagcggtgactctccgtgcatcttcttcttatcgagaaacaccttctagctcaccagcaagcccgcaggaaactagacaacatgaatcgaagcctggattggagccggaaccgagtagcgcagatgagtggaggctgtcttcatcggccgacgcgaacggcaatgcccagccatcttccctcgccgccaagggttatagatctgtacatccgaaccttccctcagacaagagtcaggacgcaacctcctcatctgccgctcagcccgaagttatcgtcgtgccactttatctcgtcaatacagacagaggccaggaaggtactgccaggccccctaccccgcttggccccctgggatgcgtccccacaatcccagcgactgcttccgcagccagcccactgacgtttccgactttggatgacttcatccctccacacctccaacggtggccacatcactcccagccagcccgggcatccgggtcttttgccccaatttctcaaacaccaccatcctttagtccacccccccccctggtgccaccagcacccgaggatctgaggagggtcagcgaacccgatcttacaggagctgtttcatcaacggattcgagccccctgttaaatgaagtaagctcgtctctgattggtactgattctcaagctttcccgagcgtttcaaaaccaagcagtgcttatcctagcacaaccatcgtgaaccccaccatcgtgctgttgcaacacaatagagaacagcagaaaaggctgagtagtttgagcgacccggttagtgagcgacgtgtcggagagcaagattccgctcctacccaggagaagccaacgtctcccggcaaagccatagagaaaagggccaaagatgactctagacgtgtggtcaaaagcactcaggacttgagcgacgtcagcatggatgaggtcggcatcccactcaggaataccgagaggtccaaggactggtacaaaaccatgtttaaacaaatccacaagctcaatagagatacacccgaggagaacccatatttccctacctacaaattccctgagctgccggaaatacaacagacaagcgaagaggataacccttacacgcctacataccaattccccgcctcaacgcctagccccaaaagtgaggatgatgattccgacctgtactctccgcggtactctttttccgaagacacgaagagccctctgagcgtgcctcgatctaagtctgagatgtcatacatcgacggcgagaaggtagtgaagcgatctgccacgttgcctttgcccgcacgttcttctagccttaagtcttccagtgaacggaatgattgggagccaccagacaagaaggtggacacaaggaagtatagggccgaacctaagagtatttacgaatatcagccgggtaagagttccgtactaaccaatgagaagatgagcagggatattagccctgaggagatcgacctaaagaacgagccatggtacaagttttttagtgagctggaattcggcaagccgccacccaaaaagatctgggattataccccaggtgattgctcaatcctgccccgagaggatcgcaagaccaatctcgataaagacctttctctgtgccagacagagcttgaggcagatctggagaagatggagacactaaataaggctccttccgccaacgtgcctcaatctagcgcaatcagcccaacacctgagattagtagcgaaacccctggttacatttactctagcaactttcatgcagtcaagagagaaagcgatggagcccctggtgacctgacctcactcgagaatgaacggcaaatatacaagtctgttctggaggggggcgatattcccctccagggtctctcaggtctgaagcgacctagttcctctgcatccacaaaggacagtgaatctccaagacatttcattccggcagactacttggagtcgaccgaagagttcatccgccggaggcatgatgacaaagaaaagctcctggccgaccaacgccggctgaaacgtgagcaggaagaggctgacatcgctgctcgccggcacacgggggtaattccaacccatcaccagttcataaccaatgagcgattcggcgacctcctgaacatagacgacaccgctaagcgcaaatcaggaagcgaaatgagaccggcccgggcaaaatttgattttaaggcgcagacactcaaagagctgcccctgcaaaagggtgatatcgtttatatttacaaacagatcgaccagaattggtacgaaggtgagcaccatggccgggtcggcatctttccacgcacctacattgagttactgccccctgctgagaaggcgcagcctaagaaactcaccccagtgcaggtgttggagtatggggaagcaattgcaaagttcaacttcaacggggatacccaggtggagatgagtttcagaaagggtgagaggattacccttctcaggcaagtggacgaaaactggtacgaaggtcgaatacccgggacatctcgacagggcatcttccctatcacctatgtagacgttatcaaacgacctctcgtcaaaaatcccgtggactatatggatctgccattttcttcttctccttcaaggtccgcaacagctagcccccaatttagttcacactcgaaattgatcactcccgccccctccagcctgcctcactccagacgggccctgagcccggaaatgcacgccgtgacatctgagtggatctccctcactgtgggcgtcccagggcgcagaagtctggctctaactccccccttacctcctctacctgaagcctctatttacaacacagaccacctagcactgtccccacgtgccagtcctagtctttctctgagtctgccgcacctctcatggtccgaccggccgacgccccgaagcgtggcttcccctctcgcactcccaagtcctcataagacatacagtctggcgcccacaagccaagcgagtctgcatatgaacggtgacggcggtgtccacacaccgagctctggtatccaccaggactcttttctacagctgcccttaggaagctcggacagcgtgatttcgcaattatctgatgccttttcttctcaaagtaagaggcagccttggagagaggagagcggccagtacgagcggaaggcagagcgtggggcaggcgaaagagggcctgggggacccaagatctcaaaaaagagttgcctgaagcccagtgatgtagttcgatgcctgagcactgaacaacggttgagtgatcttaacacccctgaggaatccagacccggaaagcccctgggttctgcattcccagggtcggaggccgagcaaacggagagacacagggggggcgaacaagccggtcggaaggccgccaggaggggtggtagtcaacaaccgcaggcgcagcaaagaagagtgactcccgaccggtctcaaacttcccaggaccttttttcctatcaggccctgtactcatacataccgcagaacgatgacgaactggaactgcgggacggcgacattgtggatgtgatggagaaatgcgatgatggatggttcgttggcacctcaagacggacgaagcagttcgggaccttcccgggtaattacgtaaagccactgtacttatag

SEQ ID NO: 291267 - DNA, 3879 bp, Artificial Sequence
  derived and/or modified sequence
atgagcagtgaatgtgatggcggcagcaaggctgtgatgaatggcctggcccctggcagcaatggccaggacaaggccacagctgaccccctgcgggcccggagcatctctgctgtgaagatcatccctgtgaagacagtgaagaatgccagcggcctggtgctgcccacagacatggacctgaccaagatctgcacaggaaaaggagctgtgaccctgcgggccagcagcagctaccgggagacccccagcagcagccctgccagcccccaggagacccggcagcacgagagcaagccaggcctggagcctgagcccagcagcgcagatgagtggaggctgagcagcagcgcagatgccaatggaaatgcccagcccagcagcctggccgccaagggctacagatctgtgcaccccaacctgcccagcgacaagagccaggatgccaccagcagcagcgctgcccagcctgaggtgattgtggtgcccctgtacctggtgaacacagaccggggccaggagggcacagcccggccccccacccccctgggccccctgggctgtgtgcccaccatcccagccacagccagcgctgccagccccctgaccttccccaccctggatgacttcatccccccccacctgcagcgctggccccaccacagccagcctgcccgggccagcggcagctttgcccccatcagccagaccccacccagcttcagccccccaccacccctggtgcccccagcccctgaggacctgcggcgggtgtctgagccagacctgaccggggctgtgagcagcacagacagcagccccctgctgaatgaggtgagcagcagcctcatcggcacagacagccaggccttccccagcgtgtccaagcccagcagcgcctaccccagcaccaccatcgtgaaccccaccatcgtgctgctgcagcacaaccgggagcagcagaagaggctgagcagcctgagtgaccctgtgtctgagcggcgggtgggggagcaggacagcgcccccacccaggagaagcccaccagccctgggaaggccatcgagaagagggccaaggatgacagccggcgggtggtgaagagcacccaggacctgagtgatgtgtccatggatgaggtgggcatccccctgaggaacacagagaggagcaaggactggtacaagaccatgttcaagcagatccacaagctgaacagagacaccccagaggagaacccctacttccccacctacaagtttcctgagctgcctgagatccagcagaccagcgaggaggacaacccctacacccccacctaccagtttcctgccagcacccccagccccaagtcagaagatgatgacagcgacctgtacagcccccgctacagcttcagcgaggacaccaagagccccctgtctgtgcccaggagcaagtctgagatgagctacattgatggagagaaggtggtgaagaggtctgccaccctgcccctgcctgcccggagcagcagcctgaagagcagcagcgagagaaatgactgggagcccccagacaagaaggtggacaccaggaagtacagagctgagcccaagagcatctatgagtaccagcccgggaagagctctgtgctgaccaatgagaagatgagccgggacatcagccctgaggagattgacctgaagaatgagccctggtacaagttcttcagcgagctggagtttgggaagcccccacccaagaagatctgggactacacccctggggactgcagcatcctgccccgggaggacaggaagaccaacctggacaaggacctgagcctgtgccagacagagctggaggccgacctggagaagatggagaccctgaacaaggcccccagcgccaacgtgccccagagcagcgccatcagccccaccccagagatcagcagcgagaccccaggctacatctacagcagcaacttccacgctgtgaagcgggagagtgatggagcccctggggacctgaccagcctggagaatgaaaggcagatctacaagtctgtgctggagggcggggacatccccctgcagggcctgagcggcctgaagaggcccagcagcagcgccagcaccaaggacagcgagagccccaggcacttcatcccagctgactacctggagagcacagaggagttcatcagaagaagacatgatgacaaggagaagctgctggccgaccagaggcggctgaagcgggagcaggaggaggccgacattgctgcccggcggcacactggagtcatccccacccaccaccagttcatcaccaatgaaagatttggagacctgctgaacattgatgacacagccaagaggaagagcggcagcgagatgaggcctgcccgggccaagtttgacttcaaggcccagaccctgaaggagctgcccctgcagaagggggacatcgtgtacatctacaagcagattgaccagaactggtatgaaggagagcaccacggccgggtgggcatcttccccaggacctacatcgagctgctgcccccagctgagaaggcccagcccaagaagctgacccctgtgcaggtgctggagtatggagaggccatcgccaagttcaacttcaatggagacacccaggtggagatgtccttcaggaagggggagcgcatcaccctgctgcggcaggtggatgagaactggtatgagggccgcatccctggcaccagccggcagggcatcttccccatcacctacgtggatgtgatcaagaggcccctggtgaagaaccctgtggactacatggacctgcccttcagcagcagccccagccgcagcgccacagccagcccccagttcagcagccacagcaagctgatcaccccagcccccagcagcctgccccacagccggcgggccctgagccctgagatgcatgctgtgaccagcgagtggatcagcctgactgtgggcgtgcccggccgccgcagcctggccctgaccccacccctgccccccctgcctgaggccagcatctacaacacagaccacctggccctgagcccccgggccagccccagcctgagcctgagcctgccccacctgtcctggagcgaccggcccacccccaggtctgtggccagccccctggccctgcccagcccccacaagacctacagcctggcccccaccagccaggccagcctgcacatgaatggagatggaggagtgcacacccccagcagcggcatccaccaggacagcttcctgcagctgcccctgggcagcagtgacagcgtcatcagccagctgagtgatgccttcagcagccagagcaagaggcagccctggagggaggagagcggccagtatgaaaggaaggccgagagaggagctggggagcggggccctgggggccccaagatcagcaagaagagctgcctgaagcccagtgatgtggtgcgctgcctgagcacagagcagaggctgagtgacctgaacaccccagaggagagcaggcctgggaagcccctgggcagcgccttccctggcagcgaggccgagcagacagagcggcaccggggcggggagcaggccggcaggaaggccgcccggcggggcggcagccagcagccccaggcccagcagaggagagtgaccccagacaggagccagaccagccaggacctcttctcctaccaggccctgtacagctacatcccccagaatgatgatgagctggagctgagagatggagacatcgtggatgtgatggagaagtgtgatgatggctggtttgtgggcaccagcaggaggaccaagcagtttggcaccttccctggcaactacgtgaagcccctgtacctgtag

SEQ ID NO: 291268 - DNA, 3879 bp, Artificial Sequence
  derived and/or modified sequence
atgagcagcgagtgcgacggcggcagcaaggccgtgatgaacggcctggcaccaggctccaacggccaggataaagccactgccgatccattgcgagcccgatcaatctcagccgtgaaaattatcccagtcaagaccgtgaaaaatgcatctggattagtgctacccaccgacatggacctcaccaagatctgtactgggaaaggagccgttaccctcagagccagcagtagctaccgcgaaaccccaagcagttccccagcctctccccaagagacccgccagcatgagagcaagcctgggttggaaccagagccaagtagtgcagacgaatggagactgagttccagcgccgacgcaaacggtaacgcccagccttccagtctggccgctaaaggttatcgatctgtccatccgaatctgccatcagataagagccaggatgccacaagttcttctgccgcccagcctgaggtaatcgtcgtccccctgtacttggtgaacacggacagaggacaggaagggaccgctcggcccccaacacccctgggccctttgggctgcgtgcctacgatccccgctacagcctccgctgcttcacccctcacatttcccaccctggacgacttcattccgccacacctacaacgttggccccaccacagccagccggccagggcctccggcagctttgcacccatctcgcaaaccccgccaagtttcagtccccccccccctctggtgccccctgcacccgaagatctgcgaagagtgagcgaaccggatctcaccggggccgtgagttctaccgacagctcccccctcctcaacgaagtgtctagctctttaattggtactgattcccaagcattcccatctgtttctaagccatcctccgcatacccttctaccactatagttaacccaaccatcgtactgctgcaacacaatcgagagcaacagaagcgtctgtcttcactgtctgatcccgtgtcagagaggcgagtaggtgaacaggatagcgccccaacccaagagaagcccacttctccaggcaaggcaattgagaagcgcgcgaaggacgactctcggcgggtggtcaagagtacacaagacctttccgacgtttccatggatgaagtcggcattccattgcgtaacaccgaacgttccaaggactggtacaaaaccatgttcaagcagatccataaacttaacagggatacacccgaagagaatccttattttccaacttacaagttcccagaactgccggaaattcaacagacatcggaagaggacaatccctacacccccacctaccagttcccagcgtccacccccagtcccaaatcagaagatgatgacagcgatctgtactctcctaggtacagtttctctgaggacactaaatctcccctgagcgtaccccgatctaaatcagagatgagttatatagatggtgagaaggttgtcaagaggtccgctaccttacccttgcccgcccgtagctcatccctaaagagttccagtgaacggaatgattgggaacctccagacaagaaagtcgacactcgaaagtatagggctgagccaaaaagcatttacgagtatcaaccggggaaatcatccgtgcttacgaatgaaaaaatgtcaagggatattagccctgaggagattgacttgaaaaacgagccctggtacaaatttttctctgaactggaattcgggaaaccacctccgaaaaagatttgggattatactccaggggactgcagcattcttccacgggaggatcgaaagaccaatttagataaggatctgagcctgtgccaaaccgaactggaggctgatctggagaagatggagactctgaataaggccccgtccgctaatgtaccccagagcagtgccatctcaccaacacccgaaataagttcagaaaccccagggtacatttatagctccaacttccacgcagtaaagcgggaaagtgatggagcccccggagatctcacctccctggaaaacgagcgccagatctataagtcagtgttggaggggggggacattccgttgcagggcctctctggactgaagcggccatcctcgtctgcctctaccaaggactcagagagccccaggcattttatcccagccgattatctggagtcaaccgaggaattcatcagacggcgtcacgacgataaggaaaaactcctggcagaccaaagacgcctcaaaagggagcaggaggaagccgacattgcagcgcgacgccacactggggtgattcccacccaccatcaattcatcaccaacgaaagattcggagatttactgaatatagacgataccgccaaacgtaaatccggatcagagatgaggccagctagagcaaagtttgactttaaggcacagacgctcaaggaactgcctctacagaaaggcgacatcgtctacatttataaacagatcgatcagaattggtatgagggggaacaccacggcagggtgggcatatttcctaggacctatattgaacttttgccccctgctgaaaaagcgcagcccaagaagttgacccctgtgcaggttctcgaatatggagaggctattgcgaagttcaattttaatggtgacacacaagtcgaaatgagcttccgcaaaggagagagaattactctactccgccaggtggacgagaactggtatgagggccgcatcccgggtacttctcggcaaggcatcttccctataacctacgtggacgttatcaaacggcctttggtcaagaaccctgtcgattatatggatttgccattctcgagctctccatcccggtccgccactgccagcccccagtttagctctcatagtaagctaatcactcccgcccccagctcactgcctcattccaggcgagctctcagccccgagatgcacgctgtgacttcggagtggatctctcttacggtcggcgtgccaggacgccgctccctcgcactgaccccaccattgccacccctgcctgaggcatcgatttataacacagatcacttggcactttctccccgggcctcaccttccctctctctctccctgccacatctctcctggtctgaccgaccaacaccacgctcagttgcctctccactcgccctgcccagtcctcataagacttactcattagcgcctaccagccaggcctccctgcacatgaacggcgacggaggggtgcatacacccagttctggcatccaccaggactccttcttacagctcccgctaggcagttcagacagtgtgatttctcagctgtctgatgctttctcaagccagtcaaaaaggcagccgtggcgggaagaaagcggccaatacgagcggaaggcagagcgcggcgctggagaacgcggccccggggggccgaagataagcaagaagagctgtctgaagcccagtgacgttgttagatgcctatccaccgaacagcgcctttccgacctcaacacgcccgaagaaagcagacccggaaagcctctggggagtgcatttccgggctccgaagccgaacagaccgagcggcatcgcggaggagaacaggccggccggaaggcggcacgtcggggcggttctcagcaaccacaggctcagcagcggcgggtgacgccagatcgtagccaaaccagtcaggacctcttttcttatcaagctctatactcttatatcccacagaatgatgacgagctcgagctgcgagacggtgatatcgtggacgtgatggagaagtgtgatgacgggtggtttgtggggacttctcggcggacaaaacaatttggcaccttccccgggaattacgtgaaacctctgtacctctag

SEQ ID NO: 291269 - DNA, 3879 bp, Artificial Sequence
  derived and/or modified sequence
atgagcagcgagtgcgacggcggcagcaaggccgtgatgaacggcctcgctcccggctccaatggtcaggacaaggccactgctgacccactaagagcccggtctatatccgctgtgaaaatcataccagtgaagacggtgaagaacgcttctggactggtgctgcccactgatatggacctgacgaagatttgtacagggaagggggccgttaccctaagggcttccagctcctacagagagacgccctcaagttcacctgcatcaccccaggagacgagacagcatgaaagtaaacctggactcgaaccagagccctcctccgccgatgagtggcgattgtcttcctctgccgacgcaaacgggaacgcccagcccagctccttggcagccaaaggctatcgctctgtccaccctaacctcccatccgacaagagtcaggatgcaacttccagctcggctgctcagcctgaagtcattgtggtccctctgtaccttgttaacacagaccgaggacaggagggcaccgcaaggccacccacgccactgggacccctcggttgtgtgcctacaatcccagctacagcttctgcagcctcaccgctgactttccccacattagatgacttcatccctcctcacctgcagagatggcctcatcattcccagcctgctagggcatcgggttcctttgcacccatttctcagactccacctagcttctctcccccaccccctctcgtgccaccggcccccgaggacctgcggagggtgtctgagcctgacctgaccggggccgtgtcatctacggatagtagccctctgctgaacgaagtctcttccagtttgatcggcactgactcacaggcatttccatcagtctccaaaccgagttctgcttacccgtctaccactattgttaaccctaccatcgttctgctccagcacaacagagaacagcagaaaaggctgtcctcactgagcgacccagtttcggaaaggagggtaggcgagcaggacagcgctccaacccaggagaagccgacaagcccgggaaaagcaatcgagaagagggcaaaagatgattctaggcgagtggtgaagtcgacacaggacctgagcgacgtatccatggacgaagtgggcatcccactgcggaatacagagaggtccaaagattggtataagaccatgtttaagcagattcataagctgaatagagacactccagaggaaaacccctatttccctacctacaaatttccggaactcccagagattcagcaaacgagtgaggaggacaatccttatactccaacatatcagttccccgcaagcacgccaagtccgaaaagcgaggatgacgacagtgacctgtactcacctcggtatagctttagcgaggacaccaaatcacctctgagcgtcccaaggagcaagagtgagatgagctacattgacggggagaaagtcgttaaacgatctgccacacttcctctgcccgctcgttcgtcctctctgaaaagctccagcgagcgcaacgattgggagccgcccgacaaaaaagtggacacaagaaaatacagagccgaacccaaatctatttacgagtaccagccaggcaaaagttctgtcctgactaacgagaagatgagcagggatatcagtcctgaggagatagacctgaaaaacgagccctggtacaaattcttcagtgaactcgagttcggtaagcctccgccaaagaagatttgggactacacacctggggactgctctattctgccccgagaggataggaagaccaatcttgataaagacctgtccctatgccagaccgagctggaggctgatctagagaagatggaaaccctaaataaagccccaagcgccaacgtaccccaatcaagtgccatctcacccacccccgagataagttcagagacccccggatacatatactcctcaaacttccacgctgtaaaaagggagtctgacggagctcccggcgatctgacatcactcgaaaacgagcgccagatttacaagagcgtacttgaaggaggagacatacctcttcagggactgtctgggttaaaaaggccaagctcaagtgcttcaactaaggatagtgaaagcccccgtcatttcatccccgctgactatctggagagtactgaggaatttatacgacggcggcatgatgataaggaaaagttgctggcggaccaacgtcgcctgaaacgtgagcaggaagaagccgacattgcagcaagaaggcataccggcgtaatccctacccaccaccagtttattaccaatgagcgatttggagacctgttgaacatcgatgacacagccaaacggaagagtgggtccgagatgagaccagctcgggcaaaattcgactttaaagctcagaccttaaaagaactgccactacagaaaggtgatattgtgtacatttataagcagatcgatcagaattggtacgaaggcgagcaccacggcagggtcggaatctttccccgcacgtacatagaactgttaccgccagccgaaaaggcccagcccaaaaagttgacccctgtccaagtgttggagtacggcgaagctatcgcgaaattcaattttaatggggacacccaggtggaaatgtcgtttaggaagggcgagaggatcactttactgcgccaagtggacgagaattggtatgaagggaggattcccggcacaagtcgccaaggcatcttcccgatcacctacgtggacgtgataaagcgccccctcgtcaaaaacccagtagactatatggatctaccattctctagtagtccgtcccgtagtgcgacggcctctccacaattttcgtcccactccaaactgataacacctgctcctagctcactcccccacagtaggagggcactatctccagagatgcacgccgtcacaagcgagtggatctcactcaccgtcggtgtacccgggagaagatcgctggcactgacaccccccctgccccctcttcctgaagctagcatctacaatactgatcatcttgctttatccccacgtgcctctccttccctgtccctgtccctgcctcacttgagctggtcagatcgccctactccgagaagcgtggcatcacctcttgcccttccctccccgcacaagacctattccctggcgcctacctcgcaagccagcttgcacatgaatggtgacgggggcgttcacactccatccagcggaatccatcaggactccttcctacagttgccgttagggagttcagacagcgttatctcccagctgtccgatgccttttccagccagtcaaagcggcagccgtggcgagaggaaagtggacagtatgaacgcaaagccgagagaggtgccggggagaggggaccgggggggcctaaaatttctaaaaaatcatgtctcaagccctccgacgtcgtgagatgcctctcaacagagcagcgcctatctgatctgaacacgcccgaagagtcgagacccggaaagcccctgggatctgcctttcccggtagcgaagcagaacagaccgaaagacatcgggggggcgagcaggccgggcgtaaggctgctcgaagaggcgggtcccagcagccccaggctcagcagcgcagggttaccccggacagaagccaaacgagccaggacctcttctcatatcaggctttgtactcatacatcccccagaacgatgatgaactggagttgagagacggggacatcgttgatgtcatggagaaatgtgacgacggatggttcgttggcacgtctcggcgtacaaaacagttcggcactttcccaggaaactatgtgaagccactatacctgtag

SEQ ID NO: 291270 - DNA, 3879 bp, Artificial Sequence
  derived and/or modified sequence
atgtcctccgagtgcgacgggggatcaaaggccgttatgaatggcctggccccaggttcaaatgggcaggataaggccactgccgaccccctgagggccagatcgataagtgctgtgaaaattattcccgtgaagacggttaaaaacgcgtcaggtcttgtactccctacagatatggatcttacaaagatctgtacggggaaaggggctgtgacactgcgtgcatccagcagttatagggagaccccatcttcctcccctgctagtccacaggagacgcggcagcatgagagcaagcccggtttagaaccagaaccctcctcagctgatgagtggcggctgagcagctcagcagatgcgaatggtaacgcccagccctctagcttagctgcgaagggatatcgatccgttcatccaaaccttcctagtgacaaatcacaggacgccactagttccagcgctgcacagcctgaggtgattgtggtgcccctctacttggtgaatacagataggggacaggaaggcactgccagaccacctacgccacttggacctctgggatgtgtgccaaccatccccgctacagcttctgcagcctcccctctgaccttccctaccctggatgactttatccctccacacctacagcgatggccacatcactctcagcctgctcgcgcaagcgggagcttcgcccctataagccagacccccccatctttctcccccccaccgcctctcgtccctccagctcctgaggatttgaggcgcgtgtctgaacccgacctcactggggcagttagttccacagactcatctcctcttctcaatgaagtgtcgtccagcctgatcggcacagatagccaggccttcccatcagtaagcaagccttcttctgcctatcctagtactaccatagttaaccctacaatcgtattgctgcaacataatagggagcagcagaaaaggctgtcctctctgtccgaccccgtctccgaaagaagagttggagaacaggactccgcaccaacccaagaaaaaccaacttcaccaggcaaggctatcgaaaagagagctaaagatgatagtcgtagagtcgtgaagtccactcaggacctttcagacgtgagcatggatgaggtggggattcccctacgaaacaccgagcggtcaaaggattggtataaaactatgttcaagcagatccataaactgaatagggacactcccgaggaaaacccctacttccccacttacaagtttcctgaattgccggaaattcagcagacatctgaagaagataacccatacacaccgacatatcagttccctgcctccaccccctcccccaagtctgaggacgatgattcggatttgtattcgcctcgatactctttctcggaagatacaaagtcacccctttccgtgccacgcagtaagagcgagatgtcttacatcgatggagaaaaagttgtgaagagaagcgccaccctacctctgccagcgagatcctcttctctgaagtcaagttctgagcgcaatgattgggaacctccagacaagaaggtggacactcggaaataccgcgctgaacccaagtccatttatgagtatcaaccgggtaagtcatctgtgttgaccaatgagaagatgagtcgcgatatttctcctgaagagatcgacctgaagaatgaaccttggtacaagtttttcagcgaactcgagttcgggaaaccgccacctaagaaaatatgggattatacccctggagattgctccatcctgccacgcgaggatcggaagactaaccttgataaagacctttccctgtgccagactgagctggaagccgacctggagaaaatggagacactcaataaggcaccaagtgctaacgttcctcagtcctccgctatctcacccacccctgagatttcgtccgagacgcctggctacatctactcaagcaacttccatgccgtgaagcgagagtcagacggcgctcctggcgatctcacctcccttgaaaatgaacgacagatttacaagtcagtgttagaaggaggagacatccctcttcagggactgtccgggctcaagcgcccatccagctcagccagcacaaaggactccgaatcaccacggcatttcatcccagcggactacctggagtctaccgaagagtttatccggcgacgacacgacgataaggaaaaactgctcgctgaccaaaggcggctgaagcgagagcaagaagaggctgatatcgccgcacggagacacacaggcgtgattccaacacaccaccagttcattacaaatgaaagatttggcgatctgctgaacattgatgataccgccaagaggaagtctgggagcgaaatgaggccggctcgcgctaagttcgactttaaagcccagacgttgaaggagctgcctctacaaaagggggacatcgtgtacatctataagcagattgaccaaaactggtacgagggggaacaccacggcagggtgggaatttttccgcgtacctatatcgaacttcttccccctgcagagaaagcacaaccaaagaaactaaccccagttcaggtgttggaatacggggaagcaattgccaagtttaatttcaatggagatacacaagtagaaatgagtttcaggaaaggggagagaatcaccctgcttcgccaagtcgacgaaaattggtacgaaggtcgtatcccagggacttccaggcaaggtatctttcccatcacatacgtggacgttatcaagcggcctttggttaagaacccagtggactacatggatttgccattttcatcgtctccgagcagatccgctactgcttctccacagttttcaagccacagcaaattaatcacccccgctccgtctagcctgcctcacagccgcagagctcttagccctgagatgcacgctgtaacatccgagtggatcagcctcaccgtgggcgtccctgggcgtcgatccctagccctaacccccccactccccccactgcctgaggcctctatttataacaccgatcacttagcgcttagtccacgagcatcccccagcctgagcttgtccctgcctcacctgagctggtcggaccgaccaacgcccagaagcgtcgcctctcccctggcacttccttctccacacaagacatatagcctggctccgacctcacaggcctctttacacatgaacggagatggaggggtccacacaccttcctctggtatccaccaggatagcttcctgcagttgcctctcggctctagcgattctgtgattagccagttgtccgacgcctttagttctcagtccaagcgtcagccatggcgcgaagaatccggccagtacgagcgaaaggccgaacgcggtgctggcgagagaggacccggtggcccaaaaataagcaagaagtcttgtctgaagcctagcgatgtggtaaggtgtctgtccactgagcagaggctcagcgatctgaacactccagaggagagccggccaggaaagcccctgggttctgccttccctggttcagaagccgaacagactgagaggcatagggggggtgagcaggcaggccgaaaagcagcccgacgagggggttctcagcagccccaggcccagcagcgcagggtcacccctgatcgatcccagacttcacaagatctattttcctatcaggctctgtacagctacataccccaaaacgacgatgaactcgagttacgcgatggagacattgtcgacgtcatggagaagtgtgacgatggctggttcgttggaacctctcgaaggacaaagcaatttggcacatttccaggaaactatgtgaagcccctttatctttag

SEQ ID NO: 291271 - DNA, 3879 bp, Artificial Sequence
  derived and/or modified sequence
atgtccagtgagtgcgatggcggatctaaggctgtgatgaacggtttggctcccggatcgaatggccaggataaagctaccgccgaccccctcagggctcgctctatctctgccgtaaagatcattcctgttaaaaccgtgaaaaacgcctccggactggtccttccaaccgacatggatctaacgaaaatttgcaccgggaaaggcgctgtgacactcagagccagctcctcctatcgggagactcctagtagctctcctgcctctcctcaggagacacgccagcatgagtccaagccaggactcgagcctgagccttcttccgcggatgagtggcggctttcttccagtgctgatgccaatggtaacgcccagccttcttcactagcagccaaaggttatcgatcggtgcacccaaacctgcctagcgacaagagccaagacgcgacatcaagttcggctgcacagccagaggtgatcgttgtacccctgtatctggtgaacaccgatagagggcaagagggcaccgcgaggccccctacccctctgggccctttgggatgtgttcccacaatccctgctacggcttcagctgcatcacccctgacattccctacgctggatgacttcattccccctcacctgcagcgctggccccaccactcacagcccgctcgcgcaagcgggtcattcgccccaatatctcaaacacccccttcattcagccccccacccccattagtgccaccagcccctgaggatctgcgcagagtgtccgaacctgacctgaccggcgctgtgagctccacagattcatccccactcctgaacgaagtctcgtctagtttgatcggcaccgatagtcaggcctttccttctgtatccaaacctagtagtgcctacccctccacaacgattgtgaacccaactatagttttactgcagcataatcgagagcagcagaagcgactctcatctctgtccgatcctgtcagtgagagacgggtgggagagcaggattcagctcccactcaggagaagcctacaagtcctggcaaggccattgagaagcgggcaaaagatgactcgcgtagggttgttaagagcacacaggacttgagcgatgtgagcatggatgaggtaggaattccactgcgaaacactgaacgctctaaggattggtacaagacgatgtttaaacagatccacaagttaaaccgcgatacaccagaagaaaacccatattttccaacatacaagtttcctgaactacctgagatccagcagacctccgaagaggataacccgtatacaccaacctaccagtttccggcatctacccctagcccaaagagcgaggatgacgacagcgatctctattctcccagatattcttttagcgaagacacaaaatccccactctcggtgcctaggagcaagagtgaaatgtcatatatcgatggagaaaaggtggtgaagcgctcagcgacactgcccctcccagcacgcagttcttcacttaagagttcatctgagagaaacgactgggagcctccagacaagaaggttgatacgcgcaagtatagggcagaaccgaaatcaatttatgagtatcagccgggaaagtctagcgtgctgaccaacgagaagatgagtcgggacatctcaccagaggagatcgatctcaagaacgagccctggtacaaatttttctctgagctggaattcgggaaacctcccccaaaaaaaatctgggactacacacctggagactgctcaattctccccagggaggaccgtaagacgaacctggacaaagacttatcgctttgccaaacagagctggaagcagacctcgagaaaatggagacgctgaacaaggctccgtccgccaatgtgccccagtcttctgcaatcagtcctacacccgagatcagctccgagacccccggatacatctactcatccaatttccacgctgtgaaaagggagtccgatggggcacccggtgatcttacctccttagaaaatgaaaggcagatctacaagtccgtgcttgaggggggagacatcccattgcaggggttgagtggtctcaaacgaccttcttcatccgcatccacgaaggactctgagagcccgaggcactttatccccgcagactatctggagtctactgaagagtttattcgtcggaggcatgacgacaaagagaaactcctggccgaccagcggaggctcaaaagggagcaggaggaggcagatatagccgctaggaggcacacgggggtcattcccacccatcatcagttcattaccaatgaaaggttcggggatctcctcaacattgatgataccgctaagcgcaaatctgggtccgagatgagacccgcacgggcaaagttcgatttcaaggcacaaaccctgaaggagctcccattgcagaaaggcgatatcgtgtatatatacaagcagattgaccaaaactggtacgagggggagcatcacggacgggtgggaatttttcctagaacttacattgagttgctgccgcctgctgagaaagcacagcctaagaaactgacccccgtgcaggttctcgaatacggcgaagccattgccaagtttaattttaacggagacacccaggtcgagatgtcgttcaggaaaggagaaagaattacacttcttagacaggtcgacgagaactggtacgaaggcaggattcctggaacatctcgacaaggcatatttccaatcacctatgttgacgtgataaagcgtcccttggtgaagaaccctgtcgattacatggacctcccctttagctcgtccccctcaagatcagccacagcttcaccccaatttagctcacatagcaaacttatcacccctgctccgtcttccctgccccactccaggcgtgcactgagcccagagatgcacgccgtcacatccgagtggatcagtctgacggttggggtgccaggcaggcggagcctggcccttaccccccctctgccccctctgcctgaagcctcaatctataatacggaccacctggccctgtcaccacgcgcatctccgtctctttccctatctctgcctcacttgagctggtccgatcggcctacccctaggagtgtggcaagcccactggcccttccatctccccataagacctacagtctggcgccaacaagccaggcatccctgcatatgaatggggacggaggggtccataccccatcttctggtattcaccaggacagcttcctccaactgccactcggcagctccgacagcgttatttcacagcttagcgacgctttctcaagccagtccaagcgccaaccatggcgcgaggaatccggtcagtatgagcggaaagctgagcgaggcgctggcgagcggggacctggcggaccaaaaatcagtaagaaatcatgccttaaaccttccgacgtggtgagatgcctgtctaccgagcagagactatctgacttgaacacccctgaggagtctcgcccaggtaagccccttggctcagcctttccaggttctgaggctgagcagacagagagacacaggggtggggagcaggcaggtagaaaggctgcccgtcgcggaggttcacagcagccccaggcccagcagcgccgagtcacgccagaccgaagccagacaagccaggatctgttctcgtatcaggctctctacagctacattccccaaaatgatgacgagcttgagctcagagacggagatatcgtggatgtaatggaaaagtgcgatgacggctggttcgtggggacgagcaggcgcactaaacagtttggtacatttcccggaaactatgtcaagcccctgtacctctag

SEQ ID NO: 291272 - DNA, 3940 bp, Artificial Sequence
  derived and/or modified sequence
ttgcagacgacttgtcctgccaccaccatgagttctgaatgtgatggtggttccaaagctgtgatgaatggcttggcacctggcagcaatgggcaagacaaagcaactgccgaccctttacgcgcacgctctatttctgctgttaaaatcattcctgtgaagacagtgaaaaacgcctcaggcctagttctccctacagacatggatcttacaaaaatctgcactgggaagggagcggtgactctccgggcctcgtcttcctacagggaaaccccaagcagtagccctgcgagccctcaggaaacccggcaacacgaaagcaaaccaggtctggagccagagccttcttcagcagatgagtggaggctttcttccagtgctgatgccaatggaaatgcccagccctcttcactcgctgccaagggctacagaagtgtgcatcccaaccttccttctgacaagtcccaggatgccacttcctccagtgcagcccagccggaggtaatagttgtccctctctacctggttaatactgacagagggcaagaaggcactgccagacctccaacacctctggggcctcttggctgcgtccccacaatcccagcgactgcctctgccgcctcacctctgaccttcccgactctagatgatttcattccccctcatctgcagaggtggccccaccacagccagccagcccgcgcctctggctcctttgcccccattagccagacgccaccatccttctcaccaccacctccgctggtccctcctgccccggaggacctccgcagagtctcggagcctgacctcacgggagctgtttcgagtaccgattccagtcctctactaaatgaagtttcttcttcccttattggaactgattcccaagcctttccatcagttagcaagccttcatccgcctatccctccacaacgattgtcaatcctactattgtgctcttgcaacacaatcgagaacagcaaaaacgactcagtagcctttcagatcctgtctcagaaagaagagtgggagagcaggactcagcaccaacccaggaaaaacccacctcacctggcaaggctattgaaaaaagagcaaaggatgacagtaggcgggtggtgaagagcactcaggacttaagcgatgtttccatggatgaagtgggcatcccactccggaacactgagagatcaaaagactggtacaagactatgtttaaacagatccacaaactgaacagagacactcctgaagaaaacccttatttccctacgtacaaattccctgaacttcctgaaatccagcaaacttccgaagaggacaatccttacactcccacctaccagtttcctgcatctactcctagtcctaaatctgaagatgatgattcagatctgtactctcccagatactcattttctgaagacacaaaatctcccctttctgtgcctcgctcaaaaagtgagatgagctacattgatggtgagaaggtagtcaagaggtcggccacactacccctcccagcccgctcttcctcactgaagtcaagctcagaaagaaatgactgggaacccccagataagaaagtagacacaagaaaatatcgtgcagagcccaagagcatttacgaatatcagcctggcaagtcttccgttctgaccaacgaaaagatgagtcgggatataagcccagaagagatagatttaaagaatgaaccttggtataaattcttttcggaattggagtttgggaaaccgcctcccaaaaagatatgggattatactcctggagactgctctatccttcctagagaggatagaaagactaatctagacaaagatctcagcctctgccagacagagttagaggcagatttagaaaaaatggagacgcttaataaagcacccagtgcaaacgtgccacagagctcagccatcagccctactccggaaatttcttcagagactcctggatatatatattcttccaacttccatgcagtgaagagggaatcagacggggctcctggggatctcactagcttggagaatgagagacaaatttataaaagtgtcttggaaggtggtgacatccctcttcagggcctgagtgggctcaagcgaccatccagctctgcttccactaaagattcagaatcgccaagacattttataccagctgattacttggaatccacggaagaatttattcgaagacgtcatgatgataaagagaaacttttagcggaccagagacgacttaaacgcgagcaagaagaggctgatattgcagctcgacgccacacaggcgtcattccgacgcaccatcagtttatcactaatgagcgctttggggacctcctcaatatagacgatactgcaaaaaggaaatctgggtcagagatgagacctgccagagccaaatttgactttaaagctcagacactaaaggagcttcctctgcagaagggagatattgtttacatttataagcaaattgatcagaactggtatgaaggagaacaccacggccgggtgggaatcttcccacgcacctacatcgagcttcttcctcctgctgagaaggcacagcccaaaaagttgacaccagtgcaggttttggaatatggagaagctattgctaagtttaactttaatggtgatacacaagtagaaatgtccttcagaaagggtgagaggatcacactgctccggcaggtagatgagaactggtacgaagggaggatcccggggacatcccgacaaggcatcttccccatcacctacgtggatgtgatcaagcgaccactggtgaaaaaccctgtggattacatggacctgcctttctcctcctccccaagtcgcagtgccactgcaagcccacagttttccagtcacagcaagctcatcacgccagccccctcatctctgccccactcccgccgagccctgtcccccgagatgcacgctgtcacctctgagtggatctcactgactgtgggggtcccaggcaggcgttctctggccctgaccccacccttgcctcctctgccagaggcttctatctataacactgaccacctcgccttgtcaccaagggccagtccctccctgtctctcagcctcccccatttgagttggtcagatcgtcccaccccacgatcagtagcttctccactggccctaccttccccacacaaaacctactccctagcacctacttcccaggcctcccttcacatgaatggagacggtggtgtccacacgccatcttcaggcatccaccaagatagcttcttgcagctgccgctggggagctctgatagtgtcatctcccagcttagtgatgcctttagcagccagagcaagaggcagccatggcgcgaagagagtggacaatatgagaggaaagcagagaggggggcaggcgaaagaggccctggtggacccaagatctctaagaagagctgcttgaagccttcagacgtggtcaggtgcctgagtactgaacagagactctcagatctcaacacccctgaggagagccggcccggcaagcccctgggtagcgcttttccaggaagtgaggctgagcagacagagcggcatagaggtggcgagcaggcggggaggaaagctgctcggagaggtgggagccagcaacctcaagcccagcagcgaagagtcacccccgacaggagtcaaacctcacaagatttatttagctatcaagcattatatagctatataccacagaatgatgatgagttggaactccgcgatggagatatcgttgatgtcatggaaaaatgtgacgatggatggtttgttggtacttcaagaaggacaaagcagtttggtacttttccaggcaactatgtaaaacctttgtatctataagaagactgaaaaccatggagattatttttattgg

SEQ ID NO: 291273 - DNA, 7354 bp, Artificial Sequence
  derived and/or modified sequence
gcagcgtgtagtgcgagtggggcggacgcgcgcagcccgcccgcccggcgaccagcaaggagttggcatcctttggaagagttcgtgaaagctttctgcccagagctcctggaccaatgcatcttcccaccaccttaaaccactgagcagttcagagccccagttgcagacgacttgtcctgccaccaccatgagttctgaatgtgatggtggttccaaagctgtgatgaatggcttggcacctggcagcaatgggcaagacaaagcaactgccgaccctttacgcgcacgctctatttctgctgttaaaatcattcctgtgaagacagtgaaaaacgcctcaggcctagttctccctacagacatggatcttacaaaaatctgcactgggaagggagcggtgactctccgggcctcgtcttcctacagggaaaccccaagcagtagccctgcgagccctcaggaaacccggcaacacgaaagcaaaccaggtctggagccagagccttcttcagcagatgagtggaggctttcttccagtgctgatgccaatggaaatgcccagccctcttcactcgctgccaagggctacagaagtgtgcatcccaaccttccttctgacaagtcccaggatgccacttcctccagtgcagcccagccggaggtaatagttgtccctctctacctggttaatactgacagagggcaagaaggcactgccagacctccaacacctctggggcctcttggctgcgtccccacaatcccagcgactgcctctgccgcctcacctctgaccttcccgactctagatgatttcattccccctcatctgcagaggtggccccaccacagccagccagcccgcgcctctggctcctttgcccccattagccagacgccaccatccttctcaccaccacctccgctggtccctcctgccccggaggacctccgcagagtctcggagcctgacctcacgggagctgtttcgagtaccgattccagtcctctactaaatgaagtttcttcttcccttattggaactgattcccaagcctttccatcagttagcaagccttcatccgcctatccctccacaacgattgtcaatcctactattgtgctcttgcaacacaatcgagaacagcaaaaacgactcagtagcctttcagatcctgtctcagaaagaagagtgggagagcaggactcagcaccaacccaggaaaaacccacctcacctggcaaggctattgaaaaaagagcaaaggatgacagtaggcgggtggtgaagagcactcaggacttaagcgatgtttccatggatgaagtgggcatcccactccggaacactgagagatcaaaagactggtacaagactatgtttaaacagatccacaaactgaacagagacactcctgaagaaaacccttatttccctacgtacaaattccctgaacttcctgaaatccagcaaacttccgaagaggacaatccttacactcccacctaccagtttcctgcatctactcctagtcctaaatctgaagatgatgattcagatctgtactctcccagatactcattttctgaagacacaaaatctcccctttctgtgcctcgctcaaaaagtgagatgagctacattgatggtgagaaggtagtcaagaggtcggccacactacccctcccagcccgctcttcctcactgaagtcaagctcagaaagaaatgactgggaacccccagataagaaagtagacacaagaaaatatcgtgcagagcccaagagcatttacgaatatcagcctggcaagtcttccgttctgaccaacgaaaagatgagtcgggatataagcccagaagagatagatttaaagaatgaaccttggtataaattcttttcggaattggagtttgggaaaccgcctcccaaaaagatatgggattatactcctggagactgctctatccttcctagagaggatagaaagactaatctagacaaagatctcagcctctgccagacagagttagaggcagatttagaaaaaatggagacgcttaataaagcacccagtgcaaacgtgccacagagctcagccatcagccctactccggaaatttcttcagagactcctggatatatatattcttccaacttccatgcagtgaagagggaatcagacggggctcctggggatctcactagcttggagaatgagagacaaatttataaaagtgtcttggaaggtggtgacatccctcttcagggcctgagtgggctcaagcgaccatccagctctgcttccactaaagattcagaatcgccaagacattttataccagctgattacttggaatccacggaagaatttattcgaagacgtcatgatgataaagagaaacttttagcggaccagagacgacttaaacgcgagcaagaagaggctgatattgcagctcgacgccacacaggcgtcattccgacgcaccatcagtttatcactaatgagcgctttggggacctcctcaatatagacgatactgcaaaaaggaaatctgggtcagagatgagacctgccagagccaaatttgactttaaagctcagacactaaaggagcttcctctgcagaagggagatattgtttacatttataagcaaattgatcagaactggtatgaaggagaacaccacggccgggtgggaatcttcccacgcacctacatcgagcttcttcctcctgctgagaaggcacagcccaaaaagttgacaccagtgcaggttttggaatatggagaagctattgctaagtttaactttaatggtgatacacaagtagaaatgtccttcagaaagggtgagaggatcacactgctccggcaggtagatgagaactggtacgaagggaggatcccggggacatcccgacaaggcatcttccccatcacctacgtggatgtgatcaagcgaccactggtgaaaaaccctgtggattacatggacctgcctttctcctcctccccaagtcgcagtgccactgcaagcccacagttttccagtcacagcaagctcatcacgccagccccctcatctctgccccactcccgccgagccctgtcccccgagatgcacgctgtcacctctgagtggatctcactgactgtgggggtcccaggcaggcgttctctggccctgaccccacccttgcctcctctgccagaggcttctatctataacactgaccacctcgccttgtcaccaagggccagtccctccctgtctctcagcctcccccatttgagttggtcagatcgtcccaccccacgatcagtagcttctccactggccctaccttccccacacaaaacctactccctagcacctacttcccaggcctcccttcacatgaatggagacggtggtgtccacacgccatcttcaggcatccaccaagatagcttcttgcagctgccgctggggagctctgatagtgtcatctcccagcttagtgatgcctttagcagccagagcaagaggcagccatggcgcgaagagagtggacaatatgagaggaaagcagagaggggggcaggcgaaagaggccctggtggacccaagatctctaagaagagctgcttgaagccttcagacgtggtcaggtgcctgagtactgaacagagactctcagatctcaacacccctgaggagagccggcccggcaagcccctgggtagcgcttttccaggaagtgaggctgagcagacagagcggcatagaggtggcgagcaggcggggaggaaagctgctcggagaggtgggagccagcaacctcaagcccagcagcgaagagtcacccccgacaggagtcaaacctcacaagatttatttagctatcaagcattatatagctatataccacagaatgatgatgagttggaactccgcgatggagatatcgttgatgtcatggaaaaatgtgacgatggatggtttgttggtacttcaagaaggacaaagcagtttggtacttttccaggcaactatgtaaaacctttgtatctataagaagactgaaaaccatggagattatttttattggaggaggaagcatcattcatgaaccgatctttttagttgagtcagtaggaaaattaatacagtggataaagtaagaagcaaaagacagggacagagaagtgttgtgtttaaaacccaagcctgtctaaggttactgtgtattagacagggccgaactagtgtgctgagcaaaaagaattgaagcaaattgtatttacttagccgcttctgggagccacttcagcctttcccctcccctccacttcttgggtaatctgacctgaagcatagtccaggagcagagttagccagaaatgcctcctgctgccccagccttagagagctcccatctcaatcattgagcctgaaggcttcaagcccaagaatgcaacaagacccccagcctacatttctcagctcccctggagccagctgatcctgtaacgctgctggaggtcagtctgagctaccaagactgtccctagacaaaggtggagtcccccacactgcccaagaccaaatccctcactcaacctgctgaggtgtggatggggaaacagaggcaaaactgaggcacctgatgcattcagcctgctgtgcagcagtgccattgactgccctgatgttcagagagaaacgcacacaaggtttgcccatgagaattggggagcagatggccaagcagataggttatgtctgttttctgagtgatgaagtcaggaagccctgtggctctggaggccacttgtggttcattcttttcccatatccttggcttttagaaatggttaccttcaggacagtgcagctgcatttatcagagcactattgctaagttttcttttctggcttgtgtttttctgggacagtttagaattgggaggcctattctcatagaacaccaaaaatgatgttcagtgattcatttaacatacaccaatgtactctggctgctggggggacaaccataagcaagacatgcccagggtttgccgtggctccagatctactccctgtaggagttcaaggatcacacaaacggtagtaaccagggttgtgaatctgagtacaccctggcaaggcttctcttcagactgaagcagcaattctgccactaccagcagcaaccaggacgtctgttctttgtgggggccagatcagaagagagaggcccctgtgacgcccgggctgcttggtcacaactctgtccaattcaaggatgtttatcggcctctcttagatcctgagtgagacaaatacagaaatgacccattccctgcccaccagaaactcagaggtgattggggagactgacacaggaaaatgaacttaatcaagagagactgtgatatgtgctaagaagggtgtgagggagggagagatgaattttccctggagggatcctagaaagcattgtcatattgccatctccattagctcacttttaaacaactagggtgctggaagaacctttgtctgagggtagttcatagctggaaatacttggaatattttccagagtctctaaactctcatcttcccccacagatacacatccaagctcacaaataggagtagcaattctaggtggtagggttgtgtacggaacccctggctgtctgcatatatctcagaattaccccaggaccattgtcccaaagtctagagtctttacaggtaggcaaaatttgttttcaatgcctgtgcctcagctgctgtcacaaatacccatcttaggatcccatcagcttcccatcccccaccagacagccacagtaccctcactttctccctattgttctttcaaatcctgttctcaggaaagaaactgccactaattcattcacactaaggtgtaaatgattgataataggaatgagttacctcttcccacagacatttgtttttaagtatgacagagcagggccttaatcccaagggaaaaggttatggaactggagggggtgagctttctgggtagaaggagacttcctgaatttccttaaaacccagtaagagtaagacctgttgttttggaaggtctgctccaccatctaagagcactgtttttttttttttgttgttgttgttgttttacggtctctgagggaatatagtaaaaatgcatatgcacgtgcaatttgcacggcagcatttcaccgattgtggactgtattggctaatgtgtttcctggtctttagatgcaaaccattaataacactatcttatctcatagttttttcaggggtgcttcttgattagtagggaattttgaacacctctttaaatacagctagaaaataaaaccaatttgtaaagccacatttgcatatgatgccagcctcacgcatttgtatatctccagaaattcaggtatgcctcaccaatttgcccgtctttaataaaatcttgtgttaaaatttgcatcacgtcgccttcctatgtatgacgaaacaagaaacagagatttccaattgctcttttgtcttcagacatttagtaatataaagtacctatttttatgctgaaatgtttatacaggtttattaatagcaagtgcaactaactggcggcatgccttgcaacacattttgatatattagccatgcttccgggtaaaggcaagccccaaactccttatcttttgcagtctctctgggatcagtaaaagaaaaaaaaaataatgtgcttaagaagtgggactgtaaatatgtatatttaactttgtatagcccatgtacctaccttgtatagaaaaataattttaaaaatttgaatggaagggggtaaaggaagtcatgaagtttttttgcatttttatttaaatgaaggaattccaaataactcacctacagatttttagcacaaaaatagccattgtaaagtgttaaaatttacgataagtattctattggggaggaaaggtaactctgatctcagttacagtttttttttcctttttaatttcattattttgggtttttggtttttgcagtcctatttatctgcagtcgtattaagtcctattgctagaataggttactacaaaaaaggttatattctgaaagaaaaataactgacattatatataaccaattaatttaaagtattgccatttaaattacacactgagagcatgtcctatgcagacatagatttttctgttcatttatttttcttcattgcagtggattgatttgataaatagatgtgttgaattactacatttgctgtacatattatttaataaactttattcagaattgcgtggc

SEQ ID NO: 291274 - protein, 1004 aa, Artificial Sequence
  derived and/or modified sequence
MSSECDGGSKAVMNGLAPGSNGQDKATADPLRARSISAVKIIPVKTVKNASGLVLPTDMDLTKICTGKGAVTLRASSSYRETPSSSPASPQETRQHESKPDEWRLSSSADANGNAQPSSLAAKGYRSVHPNLPSDKSQDATSSSAAQPEVIVVPLYLVNTDRGQEGTARPPTPLGPLGCVPTIPATASAASPLTFPTLDDFIPPHLQRWPHHSQPARASGSFAPISQTPPSFSPPPPLVPPAPEDLRRVSEPDLTGAVSSTDSSPLLNEVSSSLIGTDSQAFPSVSKPSSAYPSTTIVNPTIVLLQHNREQQKRLSSLSDPVSERRVGEQDSAPTQEKPTSPGKAIEKRAKDDSRRVVKSTQDLSDVSMDEVGIPLRNTERSKDWYKTMFKQIHKLNRDTPEENPYFPTYKFPELPEIQQTSEDDDSDLYSPRYSFSEDTKSPLSVPRSKSEMSYIDGEKVVKRSATLPLPARSSSLKSSSERNDWEPPDKKVDTRKYRAEPKSIYEYQPGKSSVLTNEKMSRDISPEEIDLKNEPWYKFFSELEFGKPPPKKIWDYTPGDCSILPREDRKTNLDKDLSLCQTELEADLEKMETLNKAPSANVPQSSAISPTPEISSETPGYIYSSNFHAVKRESDGAPGDLTSLENERQIYKSVLEGGDIPLQGLSGLKRPSSSASTKDSESPRHFIPADYLESTEEFIRRRHDDKEKLLADQRRLKREQEEADIAARRHTGVIPTHHQFITNERFGDLLNIDDTAKRKSGSEMRPARAKFDFKAQTLKELPLQKGDIVYIYKQIDQNWYEGEHHGRVGIFPRTYIELLPPAEKAQPKKLTPVQVLEYGEAIAKFNFNGDTQVEMSFRKGERITLLRQVDENWYEGRIPGTSRQGIFPITYVDVIKRPLVKNPVDYMDLPFSSSPSRSATASPQQPQAQQRRVTPDRSQTSQDLFSYQALYSYIPQNDDELELRDGDIVDVMEKCDDGWFVGTSRRTKQFGTFPGNYVKPLYL

SEQ ID NO: 291275 - DNA, 3015 bp, Artificial Sequence
  derived and/or modified sequence
atgagcagcgagtgcgacggcggcagcaaggccgtgatgaacggcctggcccccggcagcaacggccaggacaaggccaccgccgaccccctgagagccagaagcatcagcgccgtgaagatcatccccgtgaagaccgtgaagaacgccagcggcctggtgctgcccaccgacatggacctgaccaagatctgcaccggcaagggcgccgtgaccctgagagccagcagcagctacagagagacccccagcagcagccccgccagcccccaggagaccagacagcacgagagcaagcccgacgagtggagactgagcagcagcgccgacgccaacggcaacgcccagcccagcagcctggccgccaagggctacagaagcgtgcaccccaacctgcccagcgacaagagccaggacgccaccagcagcagcgccgcccagcccgaggtgatcgtggtgcccctgtacctggtgaacaccgacagaggccaggagggcaccgccagaccccccacccccctgggccccctgggctgcgtgcccaccatccccgccaccgccagcgccgccagccccctgaccttccccaccctggacgacttcatccccccccacctgcagagatggccccaccacagccagcccgccagagccagcggcagcttcgcccccatcagccagaccccccccagcttcagcccccccccccccctggtgccccccgcccccgaggacctgagaagagtgagcgagcccgacctgaccggcgccgtgagcagcaccgacagcagccccctgctgaacgaggtgagcagcagcctgatcggcaccgacagccaggccttccccagcgtgagcaagcccagcagcgcctaccccagcaccaccatcgtgaaccccaccatcgtgctgctgcagcacaacagagagcagcagaagagactgagcagcctgagcgaccccgtgagcgagagaagagtgggcgagcaggacagcgcccccacccaggagaagcccaccagccccggcaaggccatcgagaagagagccaaggacgacagcagaagagtggtgaagagcacccaggacctgagcgacgtgagcatggacgaggtgggcatccccctgagaaacaccgagagaagcaaggactggtacaagaccatgttcaagcagatccacaagctgaacagagacacccccgaggagaacccctacttccccacctacaagttccccgagctgcccgagatccagcagaccagcgaggacgacgacagcgacctgtacagccccagatacagcttcagcgaggacaccaagagccccctgagcgtgcccagaagcaagagcgagatgagctacatcgacggcgagaaggtggtgaagagaagcgccaccctgcccctgcccgccagaagcagcagcctgaagagcagcagcgagagaaacgactgggagccccccgacaagaaggtggacaccagaaagtacagagccgagcccaagagcatctacgagtaccagcccggcaagagcagcgtgctgaccaacgagaagatgagcagagacatcagccccgaggagatcgacctgaagaacgagccctggtacaagttcttcagcgagctggagttcggcaagcccccccccaagaagatctgggactacacccccggcgactgcagcatcctgcccagagaggacagaaagaccaacctggacaaggacctgagcctgtgccagaccgagctggaggccgacctggagaagatggagaccctgaacaaggcccccagcgccaacgtgccccagagcagcgccatcagccccacccccgagatcagcagcgagacccccggctacatctacagcagcaacttccacgccgtgaagagagagagcgacggcgcccccggcgacctgaccagcctggagaacgagagacagatctacaagagcgtgctggagggcggcgacatccccctgcagggcctgagcggcctgaagagacccagcagcagcgccagcaccaaggacagcgagagccccagacacttcatccccgccgactacctggagagcaccgaggagttcatcagaagaagacacgacgacaaggagaagctgctggccgaccagagaagactgaagagagagcaggaggaggccgacatcgccgccagaagacacaccggcgtgatccccacccaccaccagttcatcaccaacgagagattcggcgacctgctgaacatcgacgacaccgccaagagaaagagcggcagcgagatgagacccgccagagccaagttcgacttcaaggcccagaccctgaaggagctgcccctgcagaagggcgacatcgtgtacatctacaagcagatcgaccagaactggtacgagggcgagcaccacggcagagtgggcatcttccccagaacctacatcgagctgctgccccccgccgagaaggcccagcccaagaagctgacccccgtgcaggtgctggagtacggcgaggccatcgccaagttcaacttcaacggcgacacccaggtggagatgagcttcagaaagggcgagagaatcaccctgctgagacaggtggacgagaactggtacgagggcagaatccccggcaccagcagacagggcatcttccccatcacctacgtggacgtgatcaagagacccctggtgaagaaccccgtggactacatggacctgcccttcagcagcagccccagcagaagcgccaccgccagcccccagcagccccaggcccagcagagaagagtgacccccgacagaagccagaccagccaggacctgttcagctaccaggccctgtacagctacatcccccagaacgacgacgagctggagctgagagacggcgacatcgtggacgtgatggagaagtgcgacgacggctggttcgtgggcaccagcagaagaaccaagcagttcggcaccttccccggcaactacgtgaagcccctgtacctgtag

SEQ ID NO: 291276 - DNA, 3015 bp, Artificial Sequence
  derived and/or modified sequence
atgagcagcgagtgtgacggtggtagcaaggcagtgatgaacggattggctccgggttccaacggacaggacaaagcaacagccgaccccttgcgagccagatcaattagcgcagtgaagattatccctgtgaagaccgtcaagaacgcctccgggctcgtccttcccacagacatggacttaacgaagatctgtactggtaaaggagcggtcactctgcgagccagcagcagctatagagagaccccaagcagctctccagcatcgccccaggaaactaggcaacatgagtctaagccagatgaatggaggctcagttcctccgctgacgctaacggtaacgcccaaccgagtagcctggccgcgaagggttacagatctgtccaccccaacctgccctctgataagagccaggacgcgacctcctctagcgccgcacaaccagaagtgattgtagtcccactgtatctggtgaacacagacaggggacaggagggtaccgctcggccacctacccctttaggccccctcggctgtgtgcccacaataccggccactgcctcagctgccagcccattgacttttccaacactcgatgattttatcccaccccatctgcaacgttggcctcatcactctcaaccggccagagccagcggcagctttgctcccataagccaaacacccccttcattctctccacctccgccgctggttccacccgcccctgaagatctgcgcagagtgagcgagcccgacctcacaggcgctgtgagctctacggattcaagcccattgctgaacgaagtgtccagttcactgattggaacagatagtcaagcgttccccagcgtatctaaaccttccagcgcctacccctcaactacaattgtgaatcccaccatagtactgttgcagcacaatagggagcaacaaaaacgtctctccagtctgtcggaccctgtctccgagcgcagggttggcgagcaggattccgcgcccacccaggaaaagcctacaagtcccggcaaagcgattgaaaaaagagccaaggatgatagccgaagagtggtgaaatctacccaggacctgtcagacgtgtcaatggatgaggtgggcatccccctcaggaacacagaacgctcaaaggactggtataaaacaatgtttaaacagatccataaactgaatagagatacccctgaggagaacccctacttccccacctacaagttccccgagttgcccgagatccagcagacctccgaggacgatgatagtgatttatactcgccgagatactctttctccgaagatacaaagtcgcccctgtcagttccacgttctaaatctgagatgtcctatatcgatggggaaaaggtggtgaaacgctccgccacactgccactgcctgcacgttcatcttctctcaagtctagttctgaaaggaatgactgggaacctcccgacaagaaagtggacacccggaaatacagagctgagcccaagtccatatacgaatatcagcccggtaaatccagcgtgcttacgaatgagaaaatgagtagggatatcagcccagaggagattgatctgaagaatgagccatggtacaaattctttagtgagcttgagttcggaaagcctccgcccaaaaagatctgggactatacccctggcgactgctcaatactccctagggaagaccgtaagaccaacttggacaaggacctgagcttgtgccaaacggagttggaggccgatttagagaagatggaaacgctgaataaggctccctcagcaaatgtgcctcagtcttccgccatttctccaacacctgaaatttctagcgagacacccggctatatatattccagtaacttccacgccgtgaaacgcgagagtgacggagcaccaggcgacctcacatctcttgagaacgaaaggcagatttataaatccgtgctggaggggggtgacattcctttacagggcctttcgggactgaagagaccttcttcctcggcatcaacaaaagacagcgaaagcccacggcatttcattccagccgactacctggaatcgacggaagaattcatccggaggcggcatgatgataaagaaaaactgctggctgaccagcggcggctgaaacgtgagcaagaggaagctgatattgccgctagacgtcatacaggcgtgatccccactcaccatcagttcattaccaatgagcgcttcggggacttgttgaatatcgacgacaccgccaaacgtaagtcaggtagcgagatgcggccagcccgggctaaattcgactttaaggctcagactcttaaagagctccccctgcagaaaggcgatatcgtctatatctacaagcagatcgaccagaattggtatgagggcgaacatcacgggcgcgtgggaatctttccacgtacttacatagaactgctccctcccgccgagaaagcgcagccaaaaaaactcacccctgtgcaagttttagagtatggggaagctatcgccaaatttaatttcaacggggatacccaagtagagatgtcgttcaggaagggcgagagaatcactttgctgcgccaggtggacgagaattggtatgaggggcggatacctggtacatccaggcagggtatctttcctattacctacgtggatgtcattaagaggccgctcgtgaagaatcctgtagattatatggacctccctttcagctcttctccatcccgcagcgccaccgcctcaccgcagcagccgcaggcccagcagcggagggtcaccccagaccggtcccagactagccaggatttgttctcatatcaagcactgtatagctacataccgcagaacgatgacgagcttgaattaagagatggtgatatagtggatgttatggagaagtgtgacgacgggtggttcgtggggacctcaagacgtaccaagcaattcggcacgtttcccggaaattacgtgaaacccctctacctgtag

SEQ ID NO: 291277 - DNA, 3015 bp, Artificial Sequence
  derived and/or modified sequence
atgagttctgaatgcgacggcggctctaaagccgtcatgaatggactggctcccggttcaaacggtcaggacaaagctaccgccgatccattgagagccagaagcattagcgcggttaaaataattccagtcaaaacagtgaagaatgcaagtgggctcgttctgcccaccgacatggacctcacaaagatctgtactggcaagggagccgttacgctacgggcctcctcgagctaccgcgaaaccccatctagctcccccgctagcccccaggaaaccagacagcacgaaagcaagcccgacgagtggagattatcgtccagtgccgacgcgaatggaaatgcccagccaagtagcctggccgctaaaggctaccgctctgttcacccaaatctcccttctgacaaaagccaggatgctacttcgtcctccgccgcccagcctgaggtaatcgtggtgccactctacttggtcaacactgatagggggcaagagggcactgctagacctcctacccctctcggaccgttgggctgcgtgcctaccattcccgccactgcttccgcagcctcgcctctcacttttccaacccttgatgactttataccacctcacctccagcggtggccccaccactcacagcctgccagagcgtcagggagttttgctcctatttcccagacacccccctcattttcaccccccccccccctagtgccgcctgccccagaagatctcagaagggtatccgagccggacctcacgggcgcagtgtcgagcacagattcaagtccgctactgaatgaagttagttcatcactgattgggaccgattcccaggcctttccgtctgtgtctaagccctcatccgcctatccctccaccacaattgttaatcccacaatcgtgttgctccaacacaaccgggagcagcagaagcgcctcagctctctatccgatccagtttccgaaaggcgggtgggagagcaggattctgcgccaacccaggaaaagcctacctcccctggcaaggcaatcgaaaaaagggccaaggatgattctcggagagtcgtcaagagcacgcaggatcttagcgacgtgtccatggatgaagtgggcattcctcttagaaacacggagcgctctaaggactggtataagacgatgtttaagcagatccacaagctcaatagagatacccctgaggaaaacccttacttcccgacatacaaattccctgaactccctgaaatccagcaaacatcggaggacgacgattccgacctctactccccgaggtactccttcagtgaggatacaaaatcccctctctctgttccccgctctaagtcagaaatgtcttacatagatggcgaaaaggtagtgaaaagaagtgctactctgcccctgccagctcgaagtagttccttaaagtcctcgagcgagcgaaatgattgggaaccacctgataagaaggtcgatactcggaaatacagagccgagcctaaaagtatctacgagtaccagccaggcaaatcaagcgttctcactaatgaaaagatgtcccgggatataagccccgaagagatcgacctcaagaacgagccttggtacaagtttttttctgagctggagtttggaaagccaccccccaaaaaaatctgggattatacaccgggcgactgcagtattctgcctcgcgaagatcggaagacaaatctcgacaaagatctttccctgtgtcagacagagctggaagccgacttagaaaaaatggaaacactgaataaggctccatccgctaatgtgcctcaaagcagcgctattagtcctacacctgaaatcagctcagaaacccccggctatatttactctagcaattttcacgccgtgaagagagagtctgatggagcgccaggcgatttgacctcgttggaaaacgagagacagatctacaaaagcgttctcgaaggaggcgatattcctctgcaggggttgtcagggctaaaacgcccctcaagcagcgcttcaacaaaggattctgagtcccccaggcactttatacccgccgattatttagaaagcaccgaagagtttattaggcgaagacacgatgacaaggaaaagcttcttgcagaccagcggcgcctgaagcgcgagcaggaggaggccgatatagccgcacggcgccacacaggggtgattcctactcaccaccagtttatcacaaacgagagattcggtgatctgctgaacattgatgacactgctaaaaggaaatctggtagtgaaatgaggcccgctagagccaagtttgattttaaagcacagaccctaaaagagctgccccttcagaagggagacattgtctacatctataaacagatagatcaaaattggtatgagggtgagcaccatggccgggtaggtatttttccaagaacctacatcgaattgctgcctccagcagagaaggcccagccgaaaaaattgaccccagtccaggtgctggaatacggagaagctattgctaagtttaacttcaacggcgatacccaggttgaaatgagttttaggaagggcgagcggatcacattgcttagacaggtagatgagaactggtacgaagggaggatacccggaacaagcagacagggaatttttcccatcacttacgttgacgtcatcaagcgccctctcgtaaagaacccagtggactacatggacttaccattctcaagctcgccgtccaggtctgcaaccgcttccccgcagcagccacaggctcagcagaggagagtcactccagacagaagccagacatctcaggatctattttcctaccaggccctttacagctatatacctcagaacgacgatgagctggaactgcgcgatggcgacattgttgatgttatggaaaaatgcgatgacggctggtttgttggaacttcaagacggaccaaacagtttggaaccttccctggcaattacgtgaagcctttgtacctctag

SEQ ID NO: 291278 - DNA, 3015 bp, Artificial Sequence
  derived and/or modified sequence
atgagcagtgaatgtgatggcggcagcaaggctgtgatgaatggcctggcccctggcagcaatggccaggacaaggccacagctgaccccctgcgggcccggagcatctctgctgtgaagatcatccctgtgaagacagtgaagaatgccagcggcctggtgctgcccacagacatggacctgaccaagatctgcacaggaaaaggagctgtgaccctgcgggccagcagcagctaccgggagacccccagcagcagccctgccagcccccaggagacccggcagcacgagagcaagccagatgagtggaggctgagcagcagcgcagatgccaatggaaatgcccagcccagcagcctggccgccaagggctacagatctgtgcaccccaacctgcccagcgacaagagccaggatgccaccagcagcagcgctgcccagcctgaggtgattgtggtgcccctgtacctggtgaacacagaccggggccaggagggcacagcccggccccccacccccctgggccccctgggctgtgtgcccaccatcccagccacagccagcgctgccagccccctgaccttccccaccctggatgacttcatccccccccacctgcagcgctggccccaccacagccagcctgcccgggccagcggcagctttgcccccatcagccagaccccacccagcttcagccccccaccacccctggtgcccccagcccctgaggacctgcggcgggtgtctgagccagacctgactggagctgtgagcagcacagacagcagccccctgctgaatgaggtgagcagcagcctgattggaacagacagccaggccttccccagcgtgtccaagcccagcagcgcctaccccagcaccaccatcgtgaaccccaccatcgtgctgctgcagcacaaccgggagcagcagaagaggctgagcagcctgagtgaccctgtgtctgaaagaagagtgggggagcaggacagcgcccccacccaggagaagcccaccagccctgggaaggccatcgagaagagggccaaggatgacagcagaagagtggtgaagagcacccaggacctgagtgatgtgtccatggatgaggtgggcatccccctgaggaacacagagaggagcaaggactggtacaagaccatgttcaagcagatccacaagctgaacagagacaccccagaggagaacccctacttccccacctacaagtttcctgagctgcctgagatccagcagaccagtgaagatgatgacagcgacctgtacagcccccgctacagcttcagcgaggacaccaagagccccctgtctgtgcccaggagcaagtctgagatgagctacattgatggagagaaggtggtgaagaggtctgccaccctgcccctgcctgcccggagcagcagcctgaagagcagcagcgagagaaatgactgggagcccccagacaagaaggtggacaccaggaagtacagagctgagcccaagagcatctatgagtaccagcccgggaagagctctgtgctgaccaatgagaagatgagccgggacatcagccctgaggagattgacctgaagaatgagccctggtacaagttcttcagcgagctggagtttgggaagcccccacccaagaagatctgggactacacccctggggactgcagcatcctgccccgggaggacaggaagaccaacctggacaaggacctgagcctgtgccagacagagctggaggccgacctggagaagatggagaccctgaacaaggcccccagcgccaacgtgccccagagcagcgccatcagccccaccccagagatcagcagcgagaccccaggctacatctacagcagcaacttccacgctgtgaagcgggagagtgatggagcccctggggacctgaccagcctggagaatgaaaggcagatctacaagtctgtgctggagggcggggacatccccctgcagggcctgagcggcctgaagaggcccagcagcagcgccagcaccaaggacagcgagagccccaggcacttcatcccagctgactacctggagagcacagaggagttcatcagaagaagacatgatgacaaggagaagctgctggccgaccagaggcggctgaagcgggagcaggaggaggccgacattgctgcccggcggcacactggagtcatccccacccaccaccagttcatcaccaatgaaagatttggagacctgctgaacattgatgacacagccaagaggaagagcggcagcgagatgaggcctgcccgggccaagtttgacttcaaggcccagaccctgaaggagctgcccctgcagaagggggacatcgtgtacatctacaagcagattgaccagaactggtatgaaggagagcaccacggccgggtgggcatcttccccaggacctacatcgagctgctgcccccagctgagaaggcccagcccaagaagctgacccctgtgcaggtgctggagtatggagaggccatcgccaagttcaacttcaatggagacacccaggtggagatgtccttcaggaagggggagcgcatcaccctgctgcggcaggtggatgagaactggtatgagggccgcatccctggcaccagccggcagggcatcttccccatcacctacgtggatgtgatcaagaggcccctggtgaagaaccctgtggactacatggacctgcccttcagcagcagccccagccgcagcgccacagccagcccccagcagccccaggcccagcagaggagagtgaccccagacaggagccagaccagccaggacctcttctcctaccaggccctgtacagctacatcccccagaatgatgatgagctggagctgagagatggagacatcgtggatgtgatggagaagtgtgatgatggctggtttgtgggcaccagcaggaggaccaagcagtttggcaccttccctggcaactacgtgaagcccctgtacctgtag

SEQ ID NO: 291279 - DNA, 3015 bp, Artificial Sequence
  derived and/or modified sequence
atgagcagcgagtgcgacggcggcagcaaggccgtgatgaacggcctcgcacccggctccaacgggcaggacaaggccacagcagaccccctccgggccagatccatcagtgccgtgaaaatcatcccggtgaagacagtcaaaaatgccagtggattggttctccctacggatatggacctaacgaaaatctgtactggcaaaggagccgtcactttgagggcttcctctagctacagggaaacccctagtagctctcccgctagcccgcaggagacccgccagcacgagtcaaagccagacgaatggcggctgtccagctcagcagacgcaaatggcaacgctcagcccagtagtttggcagccaaagggtacaggtcagtccaccccaacctccctagcgacaaatcacaggacgccacctcctctagcgccgctcagcccgaggttatcgtggtacccctgtacctagtaaacaccgataggggacaggagggcactgcccgaccaccaacccccttagggccactaggttgcgtgcctactatcccagctaccgcaagcgctgcatccccacttacatttccaaccttggacgatttcatacctccgcacttgcagcggtggccccaccactcacaacccgcccgagcatccggtagcttcgcccccatatcacagactccaccttctttctcccccccgcctcccttggttcccccagcccctgaggacctgagacgagtcagcgagccagacctgacgggggccgtgtcatccaccgattcgtctccactactgaacgaggtgagtagtagcctcatcggaacagattcacaagccttccccagtgtgtcgaagccaagttccgcctacccatccacaacaattgtgaatcccaccattgttctcctccagcataatcgcgaacagcagaagcggttgagttctctttcagatccggtgtcagaacgacgcgtgggcgaacaggattctgcgccgacacaggagaagcccacttcacctggaaaggccatcgagaaaagagccaaagacgacagcaggcgcgttgtgaaatctacgcaggatttgtctgacgtgtccatggacgaagttggtatccctctgaggaacacagaacgtagcaaagactggtacaagacgatgtttaagcagatccacaaactgaacagggatacccctgaagaaaacccttacttccctacctacaagtttcccgagctgcctgagatccaacaaacctctgaggacgatgactcagacctgtattcgcccagatattctttcagcgaggacactaaaagcccattatccgtgcctcggtccaaatctgagatgtcctacatcgatggtgagaaagtggtgaaacggagcgccactctcccccttcctgcgcgaagctcctcccttaaatccagctccgagaggaatgattgggagcctccagacaagaaagtggacacacgcaagtatcgggctgaacccaaatccatttacgagtatcagccaggtaagagctccgtgctgactaatgaaaaaatgtcccgggacatctcccctgaggaaatcgacctcaaaaacgagccatggtacaaatttttttcagagctagaattcggaaagccgccccctaaaaaaatctgggattatacccctggagactgttcaatcctgccacgcgaggataggaagacaaacctggataaggatctgtccctctgtcagactgagctagaagccgatctggagaagatggaaaccctgaacaaagcccccagcgccaatgtcccacagtcctctgctattagtccaacacccgaaataagcagtgagacacccggatatatttatagtagcaacttccacgccgtcaagcgagaaagcgatggcgcccccggcgacctcacttcactggaaaatgagcgccagatctataaaagtgtccttgagggcggggacattcccctccagggcctcagtggactcaagaggcccagctcttctgcctcgacgaaagactctgagtccccccggcacttcatcccagctgattacctggaaagcacagaggagttcattcggaggcgacacgatgataaagaaaagctgctcgccgaccaacgcaggctcaagagggagcaggaggaggcagacattgccgcacgaaggcacacaggtgtgattccaactcaccaccagttcatcaccaacgaaagatttggagacctgctgaacatagacgatacagccaaacggaaatctggttctgaaatgcgcccagcaagagcaaagtttgacttcaaggcccaaaccctaaaggagttgccgctccaaaagggggacattgtctacatttataaacagatagaccagaactggtacgagggcgagcaccacggacgggtgggaatcttcccacggacctacattgagctgttgccacccgccgagaaagcacagcccaaaaagctaacacccgttcaagtcctggaatacggtgaggccatcgctaagttcaatttcaatggtgacactcaggtggagatgtccttccggaagggggagcgtattacactgctgaggcaggtagatgagaactggtacgagggaagaattccaggcacctctcgacaagggatcttcccgattacctatgttgacgtcattaaacgccccctggtgaaaaaccccgtggattatatggacctgcctttctctagcagcccatctagaagcgccactgcatcaccgcagcaacctcaggctcagcagcgtagagttactcccgaccggagccagacaagtcaggatctgttctcatatcaagctctgtactcttacatcccgcagaacgacgacgaactggaacttcgcgacggcgacatagtcgacgttatggaaaagtgcgatgacggctggttcgtgggaacttcccgccggaccaaacagttcggtacatttcctgggaactacgtgaagccattgtacttatag

SEQ ID NO: 291280 - DNA, 3015 bp, Artificial Sequence
  derived and/or modified sequence
atgagcagcgagtgcgacggcggcagcaaggccgtgatgaacggcttagcaccagggagtaacggacaggataaggcgacagccgacccgttgcgggcacgtagtatctctgccgtaaaaattatcccagtcaagactgtgaaaaacgcatcagggttggtgttgccgacggatatggatttgaccaagatttgcacggggaagggcgcggtgacgctcagagcaagctcatcatacagagagactccgagttcatcaccagcctccccccaagaaacccgtcagcatgagtcgaaaccggatgagtggcgactcagttcctccgccgatgccaacggaaacgcccaaccgtcatcactagctgccaagggctaccgatcagttcaccccaacctgccgtctgacaagagccaagacgccacaagctcatccgccgcgcagccagaagttattgtggttcctctgtacctggttaatacagatcgggggcaggaggggactgcccgcccacccacacctctggggccactcgggtgcgtgcccactatcccggcaaccgcatcagcagcatctcctttaactttcccaaccctcgatgattttattccgcctcacctgcagcggtggccacaccatagccaacccgcccgagcaagcgggagctttgcccctatttctcagactccaccatctttcagcccccccccaccgcttgtgccaccggctccagaagatctgcgccgtgtgtccgaaccagacctcaccggcgccgtcagtagcactgacagctccccattgctcaatgaggtatcttcctccctcatcggcacagatagccaggcatttcccagcgtgtctaagccttcctctgcctatccgagcacaacaattgtcaatccgaccatcgtgctgctgcagcataacagagaacagcagaaaaggctttcgagcctgagtgatcccgtttcagaacgcagggttggggagcaggactccgctccaacccaggaaaagcccaccagccctggaaaagcaattgaaaagagggcaaaggacgattcccgcagggtggtgaaatcaacacaggacctgtccgacgtgtctatggacgaggtcggaataccactgcggaacacagagagatccaaggactggtataaaaccatgtttaagcagatccataagctgaaccgagatactccagaggaaaacccttattttccaacctacaaatttccagaactcccagaaattcagcagacgagcgaagacgacgactcagatctttatagtccgcgatactcattcagtgaggataccaagtcacctctttccgtgcctcgaagtaagtcagagatgtcttatatagacggtgaaaaggttgtcaaacgcagcgcaacccttcccctcccagcccgctcctcctccctgaagtctagtagtgaaagaaatgattgggagccgcccgacaaaaaagtggatacaaggaagtatcgcgcagagcccaagtcaatttacgagtatcagcccggcaaatcgagcgtccttaccaatgagaagatgtccagggatatcagccctgaggagattgatctgaagaacgagccctggtataagtttttcagcgagctggagttcggtaaacctccacctaagaaaatttgggactacacacccggagattgttctatcttgccccgcgaggatcggaaaacaaacctggacaaagatttgtccctctgccagacagagctggaggccgacctcgagaagatggaaactctgaacaaagcacctagtgccaacgtccctcaatctagcgccatctcacctaccccggaaatttcttctgaaacaccgggctacatttattcctcaaattttcatgcagtgaagagagaatctgatggcgcgcctggggatctgacgtcactcgaaaatgaaaggcaaatctataaatcagtcctcgaaggcggtgatattcccctccagggactaagtgggctgaagcgcccaagctcaagtgcgtccactaaagactctgaatcaccacgccacttcataccagccgattatcttgagagtaccgaggagttcatccgtaggcggcacgatgacaaagagaagttactagcagatcagcggagactgaagcgggagcaggaggaggctgacattgcagctagaaggcataccggcgtcatccccacacatcaccagttcataacaaacgagagattcggcgatctgctgaacattgatgataccgcaaaacggaaatctggcagtgagatgagacccgcacgcgccaagttcgattttaaggcccagactcttaaagagctgccccttcagaaaggagacattgtgtatatatacaagcagattgaccaaaattggtacgaaggagaacatcatggccgagtgggcatttttccccggacttatattgaacttcttcctccagctgagaaagcccagccaaagaaactcacacctgtccaggtcctcgagtatggcgaggccatagcaaagttcaatttcaatggagatacccaagtcgaaatgagtttccggaaaggtgagcgaattactctgctccggcaggttgacgagaactggtatgaaggtcgcatccctgggacatctaggcaaggcatattcccgataacctatgtggatgttattaaaagacctcttgtcaagaatccagttgattatatggacctgcctttttcctcctctccgtcgagaagcgcgaccgcttctccccaacagcctcaagcccagcagcggcgagtgaccccagaccgatcacagacctctcaggacttgtttagctaccaggctctgtactcatacattcctcaaaatgacgacgaattagaactgcgcgatggggatattgtcgacgtcatggagaaatgcgacgatggatggtttgtgggcacatcacggcggaccaaacaatttggcacgtttcctggtaactacgtcaagccactgtatctttag

SEQ ID NO: 291281 - DNA, 3015 bp, Artificial Sequence
  derived and/or modified sequence
atgagctcggagtgcgacggcggaagcaaggcggttatgaacggtctggcccctggcagcaatggtcaggacaaagcaacagccgatcccctccgtgcccgtagcatcagtgctgttaaaataataccagtcaaaaccgttaagaatgccagcggtctggtgttaccgaccgacatggacctcactaagatctgtacaggaaagggagccgtcacactgcgcgcttctagttcttaccgagagaccccctcctcaagccccgcttcccctcaggagacacggcaacacgaatccaaacctgacgaatggcggctgagctccagcgccgatgcaaatggaaacgcacagcccagttctctggccgctaaggggtacaggtctgtgcaccccaacctgccaagcgacaaatctcaagacgccactagctctagcgccgcacagccagaagttattgtggttcctctctatttagttaacactgatcggggtcaagagggtacagcacgtcctccaaccccacttggccctcttggttgcgtccctactatccctgctacggctagtgcagctagtcccctcacttttcccactcttgacgatttcatccctccacatttacagaggtggccccaccactctcagccagcaagggcgtcaggatcctttgcccctatttctcagacccctccttccttttcaccaccccctcctctcgtccccccagcccctgaagatctgagacgcgtctctgaacccgatcttaccggagccgtctccagtacagactcgtcccctttacttaatgaggtgtctagtagcctgattggtactgattcccaggccttcccctcggtgtctaaaccttcttctgcatatccatctacaacaatcgtcaatcccaccattgtactactgcagcacaatcgagagcaacagaaaaggctgagcagcctctcggacccagtgagtgaacgcagggtcggcgagcaggacagcgccccaacacaggaaaaacctaccagcccaggtaaagcaatagaaaaacgcgctaaggacgactcccgcagagtggttaaatccacccaagatctcagcgacgtgtctatggatgaggtggggattccgctgcgcaatacagaacgttcgaaggactggtacaaaacaatgttcaagcagatacacaagttgaatcgggataccccagaggagaatccttacttcccaacttataagtttcccgagctgcccgagatccagcagacctccgaggatgatgatagcgacttgtattcacctaggtatagcttttccgaagacacaaagagccctctatctgtgcccagatctaagtctgagatgtcttacattgacggcgagaaagtcgtcaaaaggagcgccacattacccctccccgctcggtctagctcactcaaatcaagctccgagcggaacgactgggagcccccagacaagaaggttgatacccggaagtaccgggctgaacccaaatcaatctacgagtaccagcccggtaaatcaagcgtcctgaccaatgagaagatgtcacgagacatctctcccgaagagattgatctcaaaaatgaaccatggtacaagtttttcagcgagctggagtttggcaagccccctcccaagaaaatatgggattacaccccaggggattgctcaattcttcctagggaggaccggaaaaccaatctggataaggaccttagcctctgccagactgagctggaagccgacttggaaaagatggagaccttgaataaagccccaagtgccaacgttccgcagagcagcgccataagccctacacccgagattagttcagaaactcctggatatatctacagtagcaactttcacgccgtcaaaagggagtccgatggggcacccggagacctaacatccctggaaaatgagcggcagatatacaagtctgtcctggaggggggagatatcccattgcagggacttagcggactgaaaaggccatcctcttcagccagtacaaaagactctgaatcacctcgacactttatccctgcagattatttggaatctacagaagagttcattcggagaaggcacgatgacaaggaaaagcttttggcggaccaaaggcgtctgaaacgcgagcaggaagaagcggacatcgccgctcggaggcataccggagtgatacccactcaccatcagtttatcacaaatgagcgctttggggatctgttgaacatcgacgatactgccaaaaggaagtccggcagcgaaatgaggcccgctagagccaagtttgacttcaaagcacagacccttaaggagctgccccttcagaaaggcgacatagtgtacatttataagcagattgatcaaaattggtacgaaggcgagcaccacggtagggtaggtatcttccccaggacctacatcgagctcctgccacctgctgaaaaggctcagcccaagaaattgacccccgtgcaggtactggagtacggcgaggccatagccaagtttaacttcaacggggatacacaggtagaaatgagctttagaaagggtgaaaggatcactctcttgagacaagtggacgaaaactggtacgagggaaggatacccggaacttctcggcagggtatttttcctatcacctacgtggacgtaataaagagaccgcttgtgaagaaccccgtggattacatggacctgccttttagcagttccccgagtagaagtgctaccgcgagtccacaacagccccaggcccagcaacggagggttacacccgatcgcagccagacttcccaagatttgttctcctatcaggctctatactcctacatcccacagaatgatgatgagctggaactccgtgacggcgatatcgtggacgtcatggagaaatgcgatgacggatggttcgtcgggacgagtcgccgaaccaaacaattcggaactttcccaggcaactatgtgaaacccctgtacctgtag

SEQ ID NO: 291282 - DNA, 3015 bp, Artificial Sequence
  derived and/or modified sequence
atgagttctgaatgtgatgggggatctaaggctgtgatgaatggtttagcacccggtagtaacggccaagataaagcgacagcagaccctctacgcgcacgttcaatttccgcagtgaagataattccagtgaaaacagtaaagaacgcatctggtctggtcctacctacagacatggacttaactaagatttgcacaggtaagggggctgtgacactgagggcttccagttcttacagggagactccctctagttccccagcctcaccccaggagacgagacaacacgaaagtaagccggacgaatggaggcttagttcttccgccgatgccaatggcaatgcccaacctagtagcttggccgcaaaggggtaccgtagtgtccatccgaatctgccatccgacaaatctcaggacgccacatcttcttcagctgcccaacctgaagtgattgtcgtgcctctctacttggtgaacacggaccggggacaggagggcaccgcccgtccaccaacgccacttggtcccctgggatgtgtaccgacaattcccgcaaccgcgtccgctgctagcccactcacttttccgaccctggatgatttcatcccaccccacttgcagcgctggccgcaccacagccagccagctagagcttcagggagctttgcacccatcagtcaaaccccaccttctttctctccccctcctccactcgtccccccagcccctgaagacttacggcgagtgtcagagccagacctcacaggagccgtgagttcaactgacagctccccactgctgaatgaggtgagttcttcgttaataggcaccgattctcaagcattccccagtgtgtccaaaccatcctcagcctatccatctacgactattgtgaaccccactattgtattgctccagcataatcgtgagcaacaaaagagactatccagcctgtctgatcctgtcagtgagcggagagtgggggaacaggacagtgcacctactcaagaaaagccgaccagccctggtaaggcaatcgagaaacgcgctaaggacgactccagacgtgttgtcaaaagtacgcaggatctatctgatgtgagtatggatgaggttggaatacccctccggaacacggaacgcagcaaggactggtataagaccatgtttaagcagatccataagttgaatcgggacacaccagaagagaacccatactttccaacgtacaagttcccagaattgcccgaaatccagcagacatccgaggacgacgattcagatctctactcacccaggtactcattttcagaggataccaaaagtcctctgagtgtcccccgttcaaaatcagaaatgtcctacatagatggcgagaaggtcgtaaagcggtcagcgactcttcccttgccagcccgttccagtagcttgaaatctagttctgaacggaatgactgggaacctcctgataagaaagtggatactagaaaataccgggctgagcccaaaagcatctatgaatatcagccagggaaatctagcgtcctgacgaacgaaaaaatgtcaagggacattagtcccgaggagattgatctgaaaaatgagccatggtacaagttcttctccgaattggagttcggaaagcctcctcctaaaaagatctgggactatacccccggtgactgcagtatcttaccacgcgaggataggaagactaacctcgacaaagatctttcgctctgccagacagagcttgaggcagatctggagaagatggagaccctcaacaaggcgccttccgcgaacgttcctcagagcagcgcgatcagcccaacaccagaaataagctcggaaacgcctgggtatatctactcctcaaactttcatgcagtgaagcgcgaatctgatggcgcacccggagatttaactagtcttgaaaacgagaggcagatttacaaatccgtattggagggtggtgacatcccgcttcaaggcctctccggacttaaacgaccctcatcttcagccagcacgaaagacagcgaatccccacgacactttatccctgctgattatttagaatctacggaggaatttatacgtcgcagacacgacgataaagaaaaactcttggcggaccagcgacgactgaagcgagagcaagaggaggccgatattgccgctagaagacacaccggggtgatccctacacatcaccagtttatcactaatgagcgcttcggggatctcctcaatattgatgacaccgctaagagaaagagtgggtcagaaatgagacctgcacgcgcaaagtttgactttaaagctcagaccctgaaggagctccctctgcaaaagggcgatatcgtgtacatttacaaacagatcgaccagaactggtacgaaggcgagcaccacgggagggttggaatttttcctcgaacatatatagagttgctccctcccgctgagaaggcacagcccaagaaacttacgcctgtgcaagtgcttgagtatggcgaggcaatcgccaaatttaacttcaacggagatacacaggtggagatgtccttcaggaagggagagagaatcacactccttcggcaagtggacgaaaattggtatgagggtaggatcccgggtacatcccggcagggaatcttccctatcacttacgtagacgtgatcaaacggcctctggtaaaaaaccccgtggattacatggatctgccattctcgagctctccaagcagatccgccaccgctagtcctcaacagcctcaggcacagcaacggcgagtgacaccggaccgttcacagaccagtcaagacctgttcagttaccaggccctatacagttacattccccaaaatgacgatgaactggaattgcgcgacggtgacatcgtggatgtcatggaaaaatgtgatgatggttggtttgtcggtactagtagacggaccaaacaatttgggactttcccaggaaattatgtcaagcctctttatctgtag

SEQ ID NO: 291283 - DNA, 3015 bp, Artificial Sequence
  derived and/or modified sequence
atgagttctgaatgtgatggtggttccaaagctgtgatgaatggcttggcacctggcagcaatgggcaagacaaagcaactgccgaccctttacgcgcacgctctatttctgctgttaaaatcattcctgtgaagacagtgaaaaacgcctcaggcctagttctccctacagacatggatcttacaaaaatctgcactgggaagggagcggtgactctccgggcctcgtcttcctacagggaaaccccaagcagtagccctgcgagccctcaggaaacccggcaacacgaaagcaaaccagatgagtggaggctttcttccagtgctgatgccaatggaaatgcccagccctcttcactcgctgccaagggctacagaagtgtgcatcccaaccttccttctgacaagtcccaggatgccacttcctccagtgcagcccagccggaggtaatagttgtccctctctacctggttaatactgacagagggcaagaaggcactgccagacctccaacacctctggggcctcttggctgcgtccccacaatcccagcgactgcctctgccgcctcacctctgaccttcccgactctagatgatttcattccccctcatctgcagaggtggccccaccacagccagccagcccgcgcctctggctcctttgcccccattagccagacgccaccatccttctcaccaccacctccgctggtccctcctgccccggaggacctccgcagagtctcggagcctgacctcacgggagctgtttcgagtaccgattccagtcctctactaaatgaagtttcttcttcccttattggaactgattcccaagcctttccatcagttagcaagccttcatccgcctatccctccacaacgattgtcaatcctactattgtgctcttgcaacacaatcgagaacagcaaaaacgactcagtagcctttcagatcctgtctcagaaagaagagtgggagagcaggactcagcaccaacccaggaaaaacccacctcacctggcaaggctattgaaaaaagagcaaaggatgacagtaggcgggtggtgaagagcactcaggacttaagcgatgtttccatggatgaagtgggcatcccactccggaacactgagagatcaaaagactggtacaagactatgtttaaacagatccacaaactgaacagagacactcctgaagaaaacccttatttccctacgtacaaattccctgaacttcctgaaatccagcaaacttccgaagatgatgattcagatctgtactctcccagatactcattttctgaagacacaaaatctcccctttctgtgcctcgctcaaaaagtgagatgagctacattgatggtgagaaggtagtcaagaggtcggccacactacccctcccagcccgctcttcctcactgaagtcaagctcagaaagaaatgactgggaacccccagataagaaagtagacacaagaaaatatcgtgcagagcccaagagcatttacgaatatcagcctggcaagtcttccgttctgaccaacgaaaagatgagtcgggatataagcccagaagagatagatttaaagaatgaaccttggtataaattcttttcggaattggagtttgggaaaccgcctcccaaaaagatatgggattatactcctggagactgctctatccttcctagagaggatagaaagactaatctagacaaagatctcagcctctgccagacagagttagaggcagatttagaaaaaatggagacgcttaataaagcacccagtgcaaacgtgccacagagctcagccatcagccctactccggaaatttcttcagagactcctggatatatatattcttccaacttccatgcagtgaagagggaatcagacggggctcctggggatctcactagcttggagaatgagagacaaatttataaaagtgtcttggaaggtggtgacatccctcttcagggcctgagtgggctcaagcgaccatccagctctgcttccactaaagattcagaatcgccaagacattttataccagctgattacttggaatccacggaagaatttattcgaagacgtcatgatgataaagagaaacttttagcggaccagagacgacttaaacgcgagcaagaagaggctgatattgcagctcgacgccacacaggcgtcattccgacgcaccatcagtttatcactaatgagcgctttggggacctcctcaatatagacgatactgcaaaaaggaaatctgggtcagagatgagacctgccagagccaaatttgactttaaagctcagacactaaaggagcttcctctgcagaagggagatattgtttacatttataagcaaattgatcagaactggtatgaaggagaacaccacggccgggtgggaatcttcccacgcacctacatcgagcttcttcctcctgctgagaaggcacagcccaaaaagttgacaccagtgcaggttttggaatatggagaagctattgctaagtttaactttaatggtgatacacaagtagaaatgtccttcagaaagggtgagaggatcacactgctccggcaggtagatgagaactggtacgaagggaggatcccggggacatcccgacaaggcatcttccccatcacctacgtggatgtgatcaagcgaccactggtgaaaaaccctgtggattacatggacctgcctttctcctcctccccaagtcgcagtgccactgcaagcccacagcaacctcaagcccagcagcgaagagtcacccccgacaggagtcaaacctcacaagatttatttagctatcaagcattatatagctatataccacagaatgatgatgagttggaactccgcgatggagatatcgttgatgtcatggaaaaatgtgacgatggatggtttgttggtacttcaagaaggacaaagcagtttggtacttttccaggcaactatgtaaaacctttgtatctataa

SEQ ID NO: 291284 - DNA, 6490 bp, Artificial Sequence
  derived and/or modified sequence
gcagcgtgtagtgcgagtggggcggacgcgcgcagcccgcccgcccggcgaccagcaaggagttggcatcctttggaagagttcgtgaaagctttctgcccagagctcctggaccaatgcatcttcccaccaccttaaaccactgagcagttcagagccccagttgcagacgacttgtcctgccaccaccatgagttctgaatgtgatggtggttccaaagctgtgatgaatggcttggcacctggcagcaatgggcaagacaaagcaactgccgaccctttacgcgcacgctctatttctgctgttaaaatcattcctgtgaagacagtgaaaaacgcctcaggcctagttctccctacagacatggatcttacaaaaatctgcactgggaagggagcggtgactctccgggcctcgtcttcctacagggaaaccccaagcagtagccctgcgagccctcaggaaacccggcaacacgaaagcaaaccagatgagtggaggctttcttccagtgctgatgccaatggaaatgcccagccctcttcactcgctgccaagggctacagaagtgtgcatcccaaccttccttctgacaagtcccaggatgccacttcctccagtgcagcccagccggaggtaatagttgtccctctctacctggttaatactgacagagggcaagaaggcactgccagacctccaacacctctggggcctcttggctgcgtccccacaatcccagcgactgcctctgccgcctcacctctgaccttcccgactctagatgatttcattccccctcatctgcagaggtggccccaccacagccagccagcccgcgcctctggctcctttgcccccattagccagacgccaccatccttctcaccaccacctccgctggtccctcctgccccggaggacctccgcagagtctcggagcctgacctcacgggagctgtttcgagtaccgattccagtcctctactaaatgaagtttcttcttcccttattggaactgattcccaagcctttccatcagttagcaagccttcatccgcctatccctccacaacgattgtcaatcctactattgtgctcttgcaacacaatcgagaacagcaaaaacgactcagtagcctttcagatcctgtctcagaaagaagagtgggagagcaggactcagcaccaacccaggaaaaacccacctcacctggcaaggctattgaaaaaagagcaaaggatgacagtaggcgggtggtgaagagcactcaggacttaagcgatgtttccatggatgaagtgggcatcccactccggaacactgagagatcaaaagactggtacaagactatgtttaaacagatccacaaactgaacagagacactcctgaagaaaacccttatttccctacgtacaaattccctgaacttcctgaaatccagcaaacttccgaagatgatgattcagatctgtactctcccagatactcattttctgaagacacaaaatctcccctttctgtgcctcgctcaaaaagtgagatgagctacattgatggtgagaaggtagtcaagaggtcggccacactacccctcccagcccgctcttcctcactgaagtcaagctcagaaagaaatgactgggaacccccagataagaaagtagacacaagaaaatatcgtgcagagcccaagagcatttacgaatatcagcctggcaagtcttccgttctgaccaacgaaaagatgagtcgggatataagcccagaagagatagatttaaagaatgaaccttggtataaattcttttcggaattggagtttgggaaaccgcctcccaaaaagatatgggattatactcctggagactgctctatccttcctagagaggatagaaagactaatctagacaaagatctcagcctctgccagacagagttagaggcagatttagaaaaaatggagacgcttaataaagcacccagtgcaaacgtgccacagagctcagccatcagccctactccggaaatttcttcagagactcctggatatatatattcttccaacttccatgcagtgaagagggaatcagacggggctcctggggatctcactagcttggagaatgagagacaaatttataaaagtgtcttggaaggtggtgacatccctcttcagggcctgagtgggctcaagcgaccatccagctctgcttccactaaagattcagaatcgccaagacattttataccagctgattacttggaatccacggaagaatttattcgaagacgtcatgatgataaagagaaacttttagcggaccagagacgacttaaacgcgagcaagaagaggctgatattgcagctcgacgccacacaggcgtcattccgacgcaccatcagtttatcactaatgagcgctttggggacctcctcaatatagacgatactgcaaaaaggaaatctgggtcagagatgagacctgccagagccaaatttgactttaaagctcagacactaaaggagcttcctctgcagaagggagatattgtttacatttataagcaaattgatcagaactggtatgaaggagaacaccacggccgggtgggaatcttcccacgcacctacatcgagcttcttcctcctgctgagaaggcacagcccaaaaagttgacaccagtgcaggttttggaatatggagaagctattgctaagtttaactttaatggtgatacacaagtagaaatgtccttcagaaagggtgagaggatcacactgctccggcaggtagatgagaactggtacgaagggaggatcccggggacatcccgacaaggcatcttccccatcacctacgtggatgtgatcaagcgaccactggtgaaaaaccctgtggattacatggacctgcctttctcctcctccccaagtcgcagtgccactgcaagcccacagcaacctcaagcccagcagcgaagagtcacccccgacaggagtcaaacctcacaagatttatttagctatcaagcattatatagctatataccacagaatgatgatgagttggaactccgcgatggagatatcgttgatgtcatggaaaaatgtgacgatggatggtttgttggtacttcaagaaggacaaagcagtttggtacttttccaggcaactatgtaaaacctttgtatctataagaagactgaaaaccatggagattatttttattggaggaggaagcatcattcatgaaccgatctttttagttgagtcagtaggaaaattaatacagtggataaagtaagaagcaaaagacagggacagagaagtgttgtgtttaaaacccaagcctgtctaaggttactgtgtattagacagggccgaactagtgtgctgagcaaaaagaattgaagcaaattgtatttacttagccgcttctgggagccacttcagcctttcccctcccctccacttcttgggtaatctgacctgaagcatagtccaggagcagagttagccagaaatgcctcctgctgccccagccttagagagctcccatctcaatcattgagcctgaaggcttcaagcccaagaatgcaacaagacccccagcctacatttctcagctcccctggagccagctgatcctgtaacgctgctggaggtcagtctgagctaccaagactgtccctagacaaaggtggagtcccccacactgcccaagaccaaatccctcactcaacctgctgaggtgtggatggggaaacagaggcaaaactgaggcacctgatgcattcagcctgctgtgcagcagtgccattgactgccctgatgttcagagagaaacgcacacaaggtttgcccatgagaattggggagcagatggccaagcagataggttatgtctgttttctgagtgatgaagtcaggaagccctgtggctctggaggccacttgtggttcattcttttcccatatccttggcttttagaaatggttaccttcaggacagtgcagctgcatttatcagagcactattgctaagttttcttttctggcttgtgtttttctgggacagtttagaattgggaggcctattctcatagaacaccaaaaatgatgttcagtgattcatttaacatacaccaatgtactctggctgctggggggacaaccataagcaagacatgcccagggtttgccgtggctccagatctactccctgtaggagttcaaggatcacacaaacggtagtaaccagggttgtgaatctgagtacaccctggcaaggcttctcttcagactgaagcagcaattctgccactaccagcagcaaccaggacgtctgttctttgtgggggccagatcagaagagagaggcccctgtgacgcccgggctgcttggtcacaactctgtccaattcaaggatgtttatcggcctctcttagatcctgagtgagacaaatacagaaatgacccattccctgcccaccagaaactcagaggtgattggggagactgacacaggaaaatgaacttaatcaagagagactgtgatatgtgctaagaagggtgtgagggagggagagatgaattttccctggagggatcctagaaagcattgtcatattgccatctccattagctcacttttaaacaactagggtgctggaagaacctttgtctgagggtagttcatagctggaaatacttggaatattttccagagtctctaaactctcatcttcccccacagatacacatccaagctcacaaataggagtagcaattctaggtggtagggttgtgtacggaacccctggctgtctgcatatatctcagaattaccccaggaccattgtcccaaagtctagagtctttacaggtaggcaaaatttgttttcaatgcctgtgcctcagctgctgtcacaaatacccatcttaggatcccatcagcttcccatcccccaccagacagccacagtaccctcactttctccctattgttctttcaaatcctgttctcaggaaagaaactgccactaattcattcacactaaggtgtaaatgattgataataggaatgagttacctcttcccacagacatttgtttttaagtatgacagagcagggccttaatcccaagggaaaaggttatggaactggagggggtgagctttctgggtagaaggagacttcctgaatttccttaaaacccagtaagagtaagacctgttgttttggaaggtctgctccaccatctaagagcactgtttttttttttttgttgttgttgttgttttacggtctctgagggaatatagtaaaaatgcatatgcacgtgcaatttgcacggcagcatttcaccgattgtggactgtattggctaatgtgtttcctggtctttagatgcaaaccattaataacactatcttatctcatagttttttcaggggtgcttcttgattagtagggaattttgaacacctctttaaatacagctagaaaataaaaccaatttgtaaagccacatttgcatatgatgccagcctcacgcatttgtatatctccagaaattcaggtatgcctcaccaatttgcccgtctttaataaaatcttgtgttaaaatttgcatcacgtcgccttcctatgtatgacgaaacaagaaacagagatttccaattgctcttttgtcttcagacatttagtaatataaagtacctatttttatgctgaaatgtttatacaggtttattaatagcaagtgcaactaactggcggcatgccttgcaacacattttgatatattagccatgcttccgggtaaaggcaagccccaaactccttatcttttgcagtctctctgggatcagtaaaagaaaaaaaaaataatgtgcttaagaagtgggactgtaaatatgtatatttaactttgtatagcccatgtacctaccttgtatagaaaaataattttaaaaatttgaatggaagggggtaaaggaagtcatgaagtttttttgcatttttatttaaatgaaggaattccaaataactcacctacagatttttagcacaaaaatagccattgtaaagtgttaaaatttacgataagtattctattggggaggaaaggtaactctgatctcagttacagtttttttttcctttttaatttcattattttgggtttttggtttttgcagtcctatttatctgcagtcgtattaagtcctattgctagaataggttactacaaaaaaggttatattctgaaagaaaaataactgacattatatataaccaattaatttaaagtattgccatttaaattacacactgagagcatgtcctatgcagacatagatttttctgttcatttatttttcttcattgcagtggattgatttgataaatagatgtgttgaattactacatttgctgtacatattatttaataaactttattcagaattgcgtggc

SEQ ID NO: 291285 - protein, 846 aa, Artificial Sequence
  derived and/or modified sequence
MSSECDGGSKAVMNGLAPGSNGQDKATADPLRARSISAVKIIPVKTVKNASGLVLPTDMDLTKICTGKGAVTLRASSSYRETPSSSPASPQETRQHESKPDEWRLSSSADANGNAQPSSLAAKGYRSVHPNLPSDKSQDSSPLLNEVSSSLIGTDSQAFPSVSKPSSAYPSTTIVNPTIVLLQHNREQQKRLSSLSDPVSERRVGEQDSAPTQEKPTSPGKAIEKRAKDDSRRVVKSTQDLSDVSMDEVGIPLRNTERSKDWYKTMFKQIHKLNRDTPEENPYFPTYKFPELPEIQQTSEEDNPYTPTYQFPASTPSPKSEDDDSDLYSPRYSFSEDTKSPLSVPRSKSEMSYIDGEKVVKRSATLPLPARSSSLKSSSERNDWEPPDKKVDTRKYRAEPKSIYEYQPGKSSVLTNEKMSRDISPEEIDLKNEPWYKFFSELEFGKPSSAISPTPEISSETPGYIYSSNFHAVKRESDGAPGDLTSLENERQIYKSVLEGGDIPLQGLSGLKRPSSSASTKDSESPRHFIPADYLESTEEFIRRRHDDKEKLLADQRRLKREQEEADIAARRHTGVIPTHHQFITNERFGDLLNIDDTAKRKSGSEMRPARAKFDFKAQTLKELPLQKGDIVYIYKQIDQNWYEGEHHGRVGIFPRTYIELLPPAEKAQPKKLTPVQVLEYGEAIAKFNFNGDTQVEMSFRKGERITLLRQVDENWYEGRIPGTSRQGIFPITYVDVIKRPLVKNPVDYMDLPFSSSPSRSATASPQQPQAQQRRVTPDRSQTSQDLFSYQALYSYIPQNDDELELRDGDIVDVMEKCDDGWFVGTSRRTKQFGTFPGNYVKPLYL

SEQ ID NO: 291286 - DNA, 2541 bp, Artificial Sequence
  derived and/or modified sequence
atgagcagcgagtgcgacggcggcagcaaggccgtgatgaacggcctggcccccggcagcaacggccaggacaaggccaccgccgaccccctgagagccagaagcatcagcgccgtgaagatcatccccgtgaagaccgtgaagaacgccagcggcctggtgctgcccaccgacatggacctgaccaagatctgcaccggcaagggcgccgtgaccctgagagccagcagcagctacagagagacccccagcagcagccccgccagcccccaggagaccagacagcacgagagcaagcccgacgagtggagactgagcagcagcgccgacgccaacggcaacgcccagcccagcagcctggccgccaagggctacagaagcgtgcaccccaacctgcccagcgacaagagccaggacagcagccccctgctgaacgaggtgagcagcagcctgatcggcaccgacagccaggccttccccagcgtgagcaagcccagcagcgcctaccccagcaccaccatcgtgaaccccaccatcgtgctgctgcagcacaacagagagcagcagaagagactgagcagcctgagcgaccccgtgagcgagagaagagtgggcgagcaggacagcgcccccacccaggagaagcccaccagccccggcaaggccatcgagaagagagccaaggacgacagcagaagagtggtgaagagcacccaggacctgagcgacgtgagcatggacgaggtgggcatccccctgagaaacaccgagagaagcaaggactggtacaagaccatgttcaagcagatccacaagctgaacagagacacccccgaggagaacccctacttccccacctacaagttccccgagctgcccgagatccagcagaccagcgaggaggacaacccctacacccccacctaccagttccccgccagcacccccagccccaagagcgaggacgacgacagcgacctgtacagccccagatacagcttcagcgaggacaccaagagccccctgagcgtgcccagaagcaagagcgagatgagctacatcgacggcgagaaggtggtgaagagaagcgccaccctgcccctgcccgccagaagcagcagcctgaagagcagcagcgagagaaacgactgggagccccccgacaagaaggtggacaccagaaagtacagagccgagcccaagagcatctacgagtaccagcccggcaagagcagcgtgctgaccaacgagaagatgagcagagacatcagccccgaggagatcgacctgaagaacgagccctggtacaagttcttcagcgagctggagttcggcaagcccagcagcgccatcagccccacccccgagatcagcagcgagacccccggctacatctacagcagcaacttccacgccgtgaagagagagagcgacggcgcccccggcgacctgaccagcctggagaacgagagacagatctacaagagcgtgctggagggcggcgacatccccctgcagggcctgagcggcctgaagagacccagcagcagcgccagcaccaaggacagcgagagccccagacacttcatccccgccgactacctggagagcaccgaggagttcatcagaagaagacacgacgacaaggagaagctgctggccgaccagagaagactgaagagagagcaggaggaggccgacatcgccgccagaagacacaccggcgtgatccccacccaccaccagttcatcaccaacgagagattcggcgacctgctgaacatcgacgacaccgccaagagaaagagcggcagcgagatgagacccgccagagccaagttcgacttcaaggcccagaccctgaaggagctgcccctgcagaagggcgacatcgtgtacatctacaagcagatcgaccagaactggtacgagggcgagcaccacggcagagtgggcatcttccccagaacctacatcgagctgctgccccccgccgagaaggcccagcccaagaagctgacccccgtgcaggtgctggagtacggcgaggccatcgccaagttcaacttcaacggcgacacccaggtggagatgagcttcagaaagggcgagagaatcaccctgctgagacaggtggacgagaactggtacgagggcagaatccccggcaccagcagacagggcatcttccccatcacctacgtggacgtgatcaagagacccctggtgaagaaccccgtggactacatggacctgcccttcagcagcagccccagcagaagcgccaccgccagcccccagcagccccaggcccagcagagaagagtgacccccgacagaagccagaccagccaggacctgttcagctaccaggccctgtacagctacatcccccagaacgacgacgagctggagctgagagacggcgacatcgtggacgtgatggagaagtgcgacgacggctggttcgtgggcaccagcagaagaaccaagcagttcggcaccttccccggcaactacgtgaagcccctgtacctgtag

SEQ ID NO: 291287 - DNA, 2541 bp, Artificial Sequence
  derived and/or modified sequence
atgagttccgaatgcgatggtgggtccaaggccgtgatgaatggactcgcaccggggagtaatggccaagataaagcaacagcagaccccttgcgcgcaaggtcaatcagtgccgtcaagatcatcccagttaagacagtgaaaaacgcatccggcttggtcttgccgaccgatatggacctgacgaagatatgtacgggcaagggtgccgtgacactgagagctagctcttcttacagggagacccctagctccagcccggcctcaccacaggaaacccggcagcacgagagtaagcccgatgaatggaggctgtccagcagtgccgacgccaatggcaatgcccagccctcatctctggcagctaaaggttaccggtcagtgcaccccaacctgcccagtgataagtcccaggattcatctcctctgctaaatgaggtgagcagctctctgataggaaccgacagccaggctttcccctccgtcagcaagccctccagcgcctacccctccaccaccatagtgaatcccacgatcgtattactgcaacataatcgggagcagcagaaaagactgtcgtccctatctgaccccgtcagcgaacgtcgcgtcggggagcaggactccgcgccaactcaagaaaaacccacttcacccggcaaggccattgagaaacgtgcaaaagacgatagccggagagtagtcaagtccactcaggacctgtccgatgtgtctatggatgaagtaggtatccccctgaggaacactgagagaagtaaagattggtacaaaacaatgttcaaacaaatccataaactgaatagagacaccccagaggagaatccctactttcccacgtacaaatttccggagcttccagagatccagcagacatctgaagaagataacccctacaccccaacttaccagttcccagccagcaccccgagccctaaatccgaagatgatgactcggatctgtacagcccccgctactccttcagcgaagacacaaagtcgcctctgagtgtgccccgctctaagagtgagatgtcatacatcgacggagagaaggtggtcaagagatccgccacgctgccattacccgcccgctcaagtagcctcaaatcctcttcagagcggaacgattgggaaccaccagacaagaaggtggacacccggaaatacagggccgaacccaaaagtatctacgagtaccagcccggaaaaagcagcgtgcttacaaacgaaaagatgagtcgcgatatttcacccgaggagattgacctaaaaaacgagccatggtacaaattcttctccgagctggagttcgggaagccgtcttctgcgataagtcctacaccagagatcagttcagagacacctgggtatatatatagttcaaatttccatgcagtcaagcgagaaagcgacggggcgcctggcgatctgacaagccttgaaaatgagcgccagatctataagagtgtgcttgaggggggagacatccctctgcagggtctgagcggcctgaaacgtccctctagcagtgcttccacgaaagatagcgagagccctaggcacttcattcctgccgattatctggaatccactgaggaatttattaggagacgtcatgacgacaaggagaagctcttggccgaccagcgtcgactgaaaagggagcaggaagaggccgacatcgcagcacggcgacataccggagtgataccaacgcaccatcagttcattacaaatgagcgcttcggggatctgttgaatatcgacgatactgctaagcgaaagtcaggctcagagatgagaccggctcgtgcgaagttcgatttcaaggcccagacactgaaagagctacctctgcagaagggcgacattgtatatatttataagcagattgaccaaaactggtatgagggcgagcatcacggcagagttggaattttccccaggacttacattgagttgctgcctcctgccgagaaagcccagcccaagaagctgacgcccgtacaagttcttgagtacggggaagctatcgcaaaattcaacttcaatggcgatacacaagtggagatgagcttccggaaaggagagaggatcaccctccttcggcaggtggacgagaactggtatgaaggccggatcccaggtacttcacgtcagggaatattcccgatcacatatgtggacgtcatcaagcgacccttggtgaagaatccagttgattatatggacctgcccttcagttcctctccttcccgtagtgcaacagcttccccgcagcagccccaagcccaacagagaagagtcaccccagacagatctcagacgtcccaagacctcttctcttatcaagccctctactcatatatcccgcagaacgatgatgagcttgagcttagagacggtgacatcgttgacgtcatggagaaatgtgacgacggatggtttgtgggaacatcaaggcgcactaaacagtttggcacattccctggcaactacgtgaagccactctacctgtag

SEQ ID NO: 291288 - DNA, 2541 bp, Artificial Sequence
  derived and/or modified sequence
atgagcagtgaatgtgatggcggcagcaaggctgtgatgaatggcctggcccctggcagcaatggccaggacaaggccacagctgaccccctgcgggcccggagcatctctgctgtgaagatcatccctgtgaagacagtgaagaatgccagcggcctggtgctgcccacagacatggacctgaccaagatctgcacaggaaaaggagctgtgaccctgcgggccagcagcagctaccgggagacccccagcagcagccctgccagcccccaggagacccggcagcacgagagcaagccagatgagtggaggctgagcagcagcgcagatgccaatggaaatgcccagcccagcagcctggccgccaagggctacagatctgtgcaccccaacctgcccagcgacaagagccaggacagcagccccctgctgaatgaggtgagcagcagcctcatcggcacagacagccaggccttccccagcgtgtccaagcccagcagcgcctaccccagcaccaccatcgtgaaccccaccatcgtgctgctgcagcacaaccgggagcagcagaagaggctgagcagcctgagtgaccctgtgtctgagcggcgggtgggggagcaggacagcgcccccacccaggagaagcccaccagccctgggaaggccatcgagaagagggccaaggatgacagccggcgggtggtgaagagcacccaggacctgagtgatgtgtccatggatgaggtgggcatccccctgaggaacacagagaggagcaaggactggtacaagaccatgttcaagcagatccacaagctgaacagagacaccccagaggagaacccctacttccccacctacaagtttcctgagctgcctgagatccagcagaccagcgaggaggacaacccctacacccccacctaccagtttcctgccagcacccccagccccaagtcagaagatgatgacagcgacctgtacagcccccgctacagcttcagcgaggacaccaagagccccctgtctgtgcccaggagcaagtctgagatgagctacattgatggagagaaggtggtgaagaggtctgccaccctgcccctgcctgcccggagcagcagcctgaagagcagcagcgagagaaatgactgggagcccccagacaagaaggtggacaccaggaagtacagagctgagcccaagagcatctatgagtaccagcccgggaagagctctgtgctgaccaatgagaagatgagccgggacatcagccctgaggagattgacctgaagaatgagccctggtacaagttcttcagcgagctggagtttgggaagcccagcagcgccatcagccccaccccagagatcagcagcgagaccccaggctacatctacagcagcaacttccacgctgtgaagcgggagagtgatggagcccctggggacctgaccagcctggagaatgaaaggcagatctacaagtctgtgctggagggcggggacatccccctgcagggcctgagcggcctgaagaggcccagcagcagcgccagcaccaaggacagcgagagccccaggcacttcatcccagctgactacctggagagcacagaggagttcatcagaagaagacatgatgacaaggagaagctgctggccgaccagaggcggctgaagcgggagcaggaggaggccgacattgctgcccggcggcacactggagtcatccccacccaccaccagttcatcaccaatgaaagatttggagacctgctgaacattgatgacacagccaagaggaagagcggcagcgagatgaggcctgcccgggccaagtttgacttcaaggcccagaccctgaaggagctgcccctgcagaagggggacatcgtgtacatctacaagcagattgaccagaactggtatgaaggagagcaccacggccgggtgggcatcttccccaggacctacatcgagctgctgcccccagctgagaaggcccagcccaagaagctgacccctgtgcaggtgctggagtatggagaggccatcgccaagttcaacttcaatggagacacccaggtggagatgtccttcaggaagggggagcgcatcaccctgctgcggcaggtggatgagaactggtatgagggccgcatccctggcaccagccggcagggcatcttccccatcacctacgtggatgtgatcaagaggcccctggtgaagaaccctgtggactacatggacctgcccttcagcagcagccccagccgcagcgccacagccagcccccagcagccccaggcccagcagaggagagtgaccccagacaggagccagaccagccaggacctcttctcctaccaggccctgtacagctacatcccccagaatgatgatgagctggagctgagagatggagacatcgtggatgtgatggagaagtgtgatgatggctggtttgtgggcaccagcaggaggaccaagcagtttggcaccttccctggcaactacgtgaagcccctgtacctgtag

SEQ ID NO: 291289 - DNA, 2541 bp, Artificial Sequence
  derived and/or modified sequence
atgagcagcgagtgcgacggcggcagcaaggccgtgatgaacggcttggcgcccggcagtaacggacaggacaaggcaacggccgacccacttcgagcacggtccatctccgccgtgaagatcatcccagttaagactgtcaagaacgcctcaggcctggtgctgccgacggatatggatctgacaaagatctgcaccggaaaaggagcggtgactctgagggcctcgagcagttacagagaaacaccctctagctcacctgcttcgccccaggaaactagacagcatgaatctaaacctgatgaatggcgtctctcctcttcagccgatgctaacggtaatgcccaaccctcctcactggccgccaaaggctaccggtcagtgcatcccaatttgcctagcgataagtctcaggactctagtccactgttaaacgaagtttccagctccttaattgggactgattctcaggcttttcctagcgtcagcaaacccagcagcgcgtatcctagcacaacaattgtcaatccgaccattgtgctgttgcagcataatcgggagcagcaaaaaagactgagcagcctttcggatccagtctccgagcggcgagtcggggagcaggactccgctccgacacaggaaaagccaacctcccctgggaaagctatcgagaaacgcgccaaagatgacagtagaagggtcgtaaaaagtacccaagacctgtccgacgtgagcatggacgaagtgggtattccactgagaaatactgagaggtctaaggactggtataagaccatgttcaagcagattcacaagctcaatcgagatacgcccgaggaaaatccgtacttccccacttacaagttcccagaactccctgaaatccagcagacctcggaagaggacaacccatatactcctacttatcaatttccggcctctactccaagccctaaaagcgaggatgacgactccgacctgtacagtcctcgatacagcttctcagaggataccaaatcgccactttctgtgccccggagcaaatcggagatgtcatatatagacggggagaaggtggttaaacggagtgctacccttccacttccagcaaggagctcttctctgaaaagtagttccgagcggaatgattgggagccccctgataagaaagtagacactaggaaatacagggcggagcctaagtcgatatacgagtaccagcctgggaaaagctcggtactgaccaacgaaaagatgagtcgggacatcagccccgaggagatagacctcaaaaacgagccttggtacaaatttttcagcgagcttgaatttggaaaaccctcaagtgccatctctcccacaccagagattagctcagaaaccccaggctatatttattctagcaactttcatgcagttaaaagggagtccgacggtgcccccggggacctgacaagcctggagaacgaaagacagatctacaagtcagtgctggagggcggcgacatacctctgcagggcctgagcgggctgaaaagacctagcagcagcgcaagcaccaaggattcagagtctccacggcattttatccctgcagactacctcgagtcaacagaagaattcatacgccgtcgacatgatgacaaggaaaagctgctggctgaccaacgcaggctcaagagagaacaggaggaggccgacattgcagccagaaggcacaccggggtaatacctactcaccaccagttcattaccaatgaaagattcggcgacttgctcaatatcgacgacacggccaagcgaaaatccggatccgaaatgcggccggccagggcaaagttcgacttcaaggcacaaaccttgaaagaattaccccttcaaaagggcgatatcgtgtacatttacaagcagattgatcagaattggtatgaaggagaacaccatggcagggtgggcatcttccctcgcacctatatcgaacttctccctcctgctgaaaaggcccagcccaagaagcttacgccagtgcaggtgctagagtatggcgaagccattgcaaagtttaacttcaatggcgacacccaagtcgagatgagtttcaggaagggggagaggattacactactgaggcaggttgacgaaaactggtatgaggggcgcatcccgggcacctctcgccagggaatttttccgatcacctatgtagatgtgatcaaacgacctctagtcaaaaaccctgtggactatatggacctgcccttctctagctcaccttcaagaagcgccacagcaagtccccagcagccacaagcccaacagagacgggtcacacccgatcgcagccagacaagccaggacctgttctcatatcaggccctctactcttacattccgcagaatgacgacgaattagaattacgggacggagacatcgtggacgtgatggaaaagtgcgacgatgggtggttcgtggggacaagtagaaggacgaaacagtttggtacatttccaggcaattatgtgaaacctctttatctctag

SEQ ID NO: 291290 - DNA, 2541 bp, Artificial Sequence
  derived and/or modified sequence
atgtcaagcgaatgcgatgggggaagtaaagccgttatgaacgggctggcgccaggtagtaacggtcaggacaaagccacagcagacccacttagagcccgtagcatatcagctgtgaaaatcattcctgtcaaaaccgtgaaaaacgcaagcggtttggttctgcctacagatatggatctcacgaagatctgcaccggcaaaggcgcagtgaccttgcgggctagctctagctatagggaaacacccagctctagtccagcctccccccaggagaccaggcagcacgagagcaagcctgatgaatggaggcttagttccagcgctgacgctaacggcaacgcccagccttcatcacttgctgcaaaaggctacaggtccgtccacccgaacctcccgtcagacaaatcccaggatagctcaccactgctcaatgaggtcagctcaagcttgatcgggaccgactcccaggcgtttccgagtgtatccaagccttcgagcgcctatccgtctacaaccatagtgaaccccaccatcgtgctgctgcaacataatagggagcaacagaaacggctcagttcactcagcgatccagtgagtgaacgacgggtgggggagcaggattctgccccaacccaagagaaacctacttctccaggcaaggcaattgaaaagagggccaaggatgacagccgaagggtggttaagtccacacaggatctgtcggacgtctccatggacgaagttggtatccctctgcgcaataccgaacggagcaaagattggtataagacaatgtttaagcagatccacaaactgaatcgggacactccagaggagaatccatactttccaacatataagttcccagagctcccggagatccagcagacttccgaggaagacaatccttatactcccacctaccagtttccagcatccaccccgtcccctaagtcagaggacgacgattcggatctgtacagccccagatacagtttcagcgaggacaccaagagtcctttgagtgtgcccagatcaaagtctgagatgagctacatcgacggagagaaggtcgttaagcgtagcgcaacactcccccttccagctcggtcttccagtctgaagtctagttccgaacggaacgactgggagccccctgacaagaaggtagataccaggaaatacagagccgagcccaaatccatttatgagtaccagcctggcaagtcgtcggttttaacaaatgaaaaaatgtcgagggacattagccccgaggagatcgacttgaaaaatgagccatggtacaaattcttcagcgagttggaatttggcaagcctagcagtgccatcagccccactcctgagatctcaagcgagacaccaggctatatttatagttctaacttccatgccgtcaaacgggaaagcgacggcgcacctggggatctgacctccttggagaacgaacggcagatctataagtccgtcctggagggcggagacatccccctccagggtttgtctgggcttaagcgaccgtcatcctcagctagcacaaaagatagcgaatcccctagacactttataccagccgattatttagaatccacagaggaatttatccgtcgacggcatgacgacaaagaaaaactcctggccgaccagcgtcgactgaagcgagaacaggaggaagccgacatcgctgccaggagacatactggcgtcatccctacccatcatcagttcatcaccaatgagaggttcggggacctgctgaatatcgacgatacagccaaacggaagtcaggatcagagatgcgcccagcacgcgcaaaatttgacttcaaggcccaaacgctcaaggagcttcccttacaaaaaggggatatagtctacatttacaagcagatcgaccagaactggtatgaaggggaacatcacggtagggtgggcatcttcccaaggacctatattgaattgttgcctccagcggagaaggcccagcccaaaaagttgacccccgtgcaggtactcgagtacggcgaagccatcgccaagttcaattttaatggcgacacccaggttgagatgtccttccggaagggcgagcgaatcaccctgctgagacaggtggatgagaattggtacgaggggcgtattcctgggacaagccgacagggtatttttcccatcacttacgtagacgttatcaagaggccactcgtaaaaaatccagtagattatatggacctgccattctctagttccccctccaggtccgctacagccagccctcagcagccccaggcccagcagcgacgcgtgacacctgatagatcacagaccagccaggacctctttagctatcaagcgctatatagctacattccacagaacgatgacgaattggaactccgcgatggagatatagtggacgttatggaaaagtgcgacgatggatggttcgtgggtacttcgagacgcaccaaacagttcggaacttttcccggaaactacgtgaaacctctctacctgtag

SEQ ID NO: 291291 - DNA, 6016 bp, Artificial Sequence
  derived and/or modified sequence
gcagcgtgtagtgcgagtggggcggacgcgcgcagcccgcccgcccggcgaccagcaaggagttggcatcctttggaagagttcgtgaaagctttctgcccagagctcctggaccaatgcatcttcccaccaccttaaaccactgagcagttcagagccccagttgcagacgacttgtcctgccaccaccatgagttctgaatgtgatggtggttccaaagctgtgatgaatggcttggcacctggcagcaatgggcaagacaaagcaactgccgaccctttacgcgcacgctctatttctgctgttaaaatcattcctgtgaagacagtgaaaaacgcctcaggcctagttctccctacagacatggatcttacaaaaatctgcactgggaagggagcggtgactctccgggcctcgtcttcctacagggaaaccccaagcagtagccctgcgagccctcaggaaacccggcaacacgaaagcaaaccagatgagtggaggctttcttccagtgctgatgccaatggaaatgcccagccctcttcactcgctgccaagggctacagaagtgtgcatcccaaccttccttctgacaagtcccaggattccagtcctctactaaatgaagtttcttcttcccttattggaactgattcccaagcctttccatcagttagcaagccttcatccgcctatccctccacaacgattgtcaatcctactattgtgctcttgcaacacaatcgagaacagcaaaaacgactcagtagcctttcagatcctgtctcagaaagaagagtgggagagcaggactcagcaccaacccaggaaaaacccacctcacctggcaaggctattgaaaaaagagcaaaggatgacagtaggcgggtggtgaagagcactcaggacttaagcgatgtttccatggatgaagtgggcatcccactccggaacactgagagatcaaaagactggtacaagactatgtttaaacagatccacaaactgaacagagacactcctgaagaaaacccttatttccctacgtacaaattccctgaacttcctgaaatccagcaaacttccgaagaggacaatccttacactcccacctaccagtttcctgcatctactcctagtcctaaatctgaagatgatgattcagatctgtactctcccagatactcattttctgaagacacaaaatctcccctttctgtgcctcgctcaaaaagtgagatgagctacattgatggtgagaaggtagtcaagaggtcggccacactacccctcccagcccgctcttcctcactgaagtcaagctcagaaagaaatgactgggaacccccagataagaaagtagacacaagaaaatatcgtgcagagcccaagagcatttacgaatatcagcctggcaagtcttccgttctgaccaacgaaaagatgagtcgggatataagcccagaagagatagatttaaagaatgaaccttggtataaattcttttcggaattggagtttgggaaaccgagctcagccatcagccctactccggaaatttcttcagagactcctggatatatatattcttccaacttccatgcagtgaagagggaatcagacggggctcctggggatctcactagcttggagaatgagagacaaatttataaaagtgtcttggaaggtggtgacatccctcttcagggcctgagtgggctcaagcgaccatccagctctgcttccactaaagattcagaatcgccaagacattttataccagctgattacttggaatccacggaagaatttattcgaagacgtcatgatgataaagagaaacttttagcggaccagagacgacttaaacgcgagcaagaagaggctgatattgcagctcgacgccacacaggcgtcattccgacgcaccatcagtttatcactaatgagcgctttggggacctcctcaatatagacgatactgcaaaaaggaaatctgggtcagagatgagacctgccagagccaaatttgactttaaagctcagacactaaaggagcttcctctgcagaagggagatattgtttacatttataagcaaattgatcagaactggtatgaaggagaacaccacggccgggtgggaatcttcccacgcacctacatcgagcttcttcctcctgctgagaaggcacagcccaaaaagttgacaccagtgcaggttttggaatatggagaagctattgctaagtttaactttaatggtgatacacaagtagaaatgtccttcagaaagggtgagaggatcacactgctccggcaggtagatgagaactggtacgaagggaggatcccggggacatcccgacaaggcatcttccccatcacctacgtggatgtgatcaagcgaccactggtgaaaaaccctgtggattacatggacctgcctttctcctcctccccaagtcgcagtgccactgcaagcccacagcaacctcaagcccagcagcgaagagtcacccccgacaggagtcaaacctcacaagatttatttagctatcaagcattatatagctatataccacagaatgatgatgagttggaactccgcgatggagatatcgttgatgtcatggaaaaatgtgacgatggatggtttgttggtacttcaagaaggacaaagcagtttggtacttttccaggcaactatgtaaaacctttgtatctataagaagactgaaaaccatggagattatttttattggaggaggaagcatcattcatgaaccgatctttttagttgagtcagtaggaaaattaatacagtggataaagtaagaagcaaaagacagggacagagaagtgttgtgtttaaaacccaagcctgtctaaggttactgtgtattagacagggccgaactagtgtgctgagcaaaaagaattgaagcaaattgtatttacttagccgcttctgggagccacttcagcctttcccctcccctccacttcttgggtaatctgacctgaagcatagtccaggagcagagttagccagaaatgcctcctgctgccccagccttagagagctcccatctcaatcattgagcctgaaggcttcaagcccaagaatgcaacaagacccccagcctacatttctcagctcccctggagccagctgatcctgtaacgctgctggaggtcagtctgagctaccaagactgtccctagacaaaggtggagtcccccacactgcccaagaccaaatccctcactcaacctgctgaggtgtggatggggaaacagaggcaaaactgaggcacctgatgcattcagcctgctgtgcagcagtgccattgactgccctgatgttcagagagaaacgcacacaaggtttgcccatgagaattggggagcagatggccaagcagataggttatgtctgttttctgagtgatgaagtcaggaagccctgtggctctggaggccacttgtggttcattcttttcccatatccttggcttttagaaatggttaccttcaggacagtgcagctgcatttatcagagcactattgctaagttttcttttctggcttgtgtttttctgggacagtttagaattgggaggcctattctcatagaacaccaaaaatgatgttcagtgattcatttaacatacaccaatgtactctggctgctggggggacaaccataagcaagacatgcccagggtttgccgtggctccagatctactccctgtaggagttcaaggatcacacaaacggtagtaaccagggttgtgaatctgagtacaccctggcaaggcttctcttcagactgaagcagcaattctgccactaccagcagcaaccaggacgtctgttctttgtgggggccagatcagaagagagaggcccctgtgacgcccgggctgcttggtcacaactctgtccaattcaaggatgtttatcggcctctcttagatcctgagtgagacaaatacagaaatgacccattccctgcccaccagaaactcagaggtgattggggagactgacacaggaaaatgaacttaatcaagagagactgtgatatgtgctaagaagggtgtgagggagggagagatgaattttccctggagggatcctagaaagcattgtcatattgccatctccattagctcacttttaaacaactagggtgctggaagaacctttgtctgagggtagttcatagctggaaatacttggaatattttccagagtctctaaactctcatcttcccccacagatacacatccaagctcacaaataggagtagcaattctaggtggtagggttgtgtacggaacccctggctgtctgcatatatctcagaattaccccaggaccattgtcccaaagtctagagtctttacaggtaggcaaaatttgttttcaatgcctgtgcctcagctgctgtcacaaatacccatcttaggatcccatcagcttcccatcccccaccagacagccacagtaccctcactttctccctattgttctttcaaatcctgttctcaggaaagaaactgccactaattcattcacactaaggtgtaaatgattgataataggaatgagttacctcttcccacagacatttgtttttaagtatgacagagcagggccttaatcccaagggaaaaggttatggaactggagggggtgagctttctgggtagaaggagacttcctgaatttccttaaaacccagtaagagtaagacctgttgttttggaaggtctgctccaccatctaagagcactgtttttttttttttgttgttgttgttgttttacggtctctgagggaatatagtaaaaatgcatatgcacgtgcaatttgcacggcagcatttcaccgattgtggactgtattggctaatgtgtttcctggtctttagatgcaaaccattaataacactatcttatctcatagttttttcaggggtgcttcttgattagtagggaattttgaacacctctttaaatacagctagaaaataaaaccaatttgtaaagccacatttgcatatgatgccagcctcacgcatttgtatatctccagaaattcaggtatgcctcaccaatttgcccgtctttaataaaatcttgtgttaaaatttgcatcacgtcgccttcctatgtatgacgaaacaagaaacagagatttccaattgctcttttgtcttcagacatttagtaatataaagtacctatttttatgctgaaatgtttatacaggtttattaatagcaagtgcaactaactggcggcatgccttgcaacacattttgatatattagccatgcttccgggtaaaggcaagccccaaactccttatcttttgcagtctctctgggatcagtaaaagaaaaaaaaaataatgtgcttaagaagtgggactgtaaatatgtatatttaactttgtatagcccatgtacctaccttgtatagaaaaataattttaaaaatttgaatggaagggggtaaaggaagtcatgaagtttttttgcatttttatttaaatgaaggaattccaaataactcacctacagatttttagcacaaaaatagccattgtaaagtgttaaaatttacgataagtattctattggggaggaaaggtaactctgatctcagttacagtttttttttcctttttaatttcattattttgggtttttggtttttgcagtcctatttatctgcagtcgtattaagtcctattgctagaataggttactacaaaaaaggttatattctgaaagaaaaataactgacattatatataaccaattaatttaaagtattgccatttaaattacacactgagagcatgtcctatgcagacatagatttttctgttcatttatttttcttcattgcagtggattgatttgataaatagatgtgttgaattactacatttgctgtacatattatttaataaactttattcagaattgcgtggc

SEQ ID NO: 291292 - protein, 684 aa, Artificial Sequence
  derived and/or modified sequence
MSSECDGGSKAVMNGLAPGSNGQDKDMDLTKICTGKGAVTLRASSSYRETPSSSPASPQETRQHESKPDEWRLSSSADANGNAQPSSLAAKGYRSVHPNLPSDKSQDSSPLLNEVSSSLIGTDSQAFPSVSKPSSAYPSTTIVNPTIVLLQHNREQQKRLSSLSDPVSERRVGEQDSAPTQEKPTSPGKAIEKRAKDDSRRVVKSTQDLSDVSMDEVGIPLRNTERSKDWYKTMFKQIHKLNRDDDSDLYSPRYSFSEDTKSPLSVPRSKSEMSYIDGEKVVKRSATLPLPARSSSLKSSSERNDWEPPDKKVDTRKYRAEPKSIYEYQPGKSSVLTNEKMSSAISPTPEISSETPGYIYSSNFHAVKRESDGAPGDLTSLENERQIYKSVLEGGDIPLQGLSGLKRPSSSASTKDSESPRHFIPADYLESTEEFIRRRHDDKEMRPARAKFDFKAQTLKELPLQKGDIVYIYKQIDQNWYEGEHHGRVGIFPRTYIELLPPAEKAQPKKLTPVQVLEYGEAIAKFNFNGDTQVEMSFRKGERITLLRQVDENWYEGRIPGTSRQGIFPITYVDVIKRPLVKNPVDYMDLPFSSSPSRSATASPQQPQAQQRRVTPDRSQTSQDLFSYQALYSYIPQNDDELELRDGDIVDVMEKCDDGWFVGTSRRTKQFGTFPGNYVKPLYL

SEQ ID NO: 291293 - DNA, 2055 bp, Artificial Sequence
  derived and/or modified sequence
atgagcagcgagtgcgacggcggcagcaaggccgtgatgaacggcctggcccccggcagcaacggccaggacaaggacatggacctgaccaagatctgcaccggcaagggcgccgtgaccctgagagccagcagcagctacagagagacccccagcagcagccccgccagcccccaggagaccagacagcacgagagcaagcccgacgagtggagactgagcagcagcgccgacgccaacggcaacgcccagcccagcagcctggccgccaagggctacagaagcgtgcaccccaacctgcccagcgacaagagccaggacagcagccccctgctgaacgaggtgagcagcagcctgatcggcaccgacagccaggccttccccagcgtgagcaagcccagcagcgcctaccccagcaccaccatcgtgaaccccaccatcgtgctgctgcagcacaacagagagcagcagaagagactgagcagcctgagcgaccccgtgagcgagagaagagtgggcgagcaggacagcgcccccacccaggagaagcccaccagccccggcaaggccatcgagaagagagccaaggacgacagcagaagagtggtgaagagcacccaggacctgagcgacgtgagcatggacgaggtgggcatccccctgagaaacaccgagagaagcaaggactggtacaagaccatgttcaagcagatccacaagctgaacagagacgacgacagcgacctgtacagccccagatacagcttcagcgaggacaccaagagccccctgagcgtgcccagaagcaagagcgagatgagctacatcgacggcgagaaggtggtgaagagaagcgccaccctgcccctgcccgccagaagcagcagcctgaagagcagcagcgagagaaacgactgggagccccccgacaagaaggtggacaccagaaagtacagagccgagcccaagagcatctacgagtaccagcccggcaagagcagcgtgctgaccaacgagaagatgagcagcgccatcagccccacccccgagatcagcagcgagacccccggctacatctacagcagcaacttccacgccgtgaagagagagagcgacggcgcccccggcgacctgaccagcctggagaacgagagacagatctacaagagcgtgctggagggcggcgacatccccctgcagggcctgagcggcctgaagagacccagcagcagcgccagcaccaaggacagcgagagccccagacacttcatccccgccgactacctggagagcaccgaggagttcatcagaagaagacacgacgacaaggagatgagacccgccagagccaagttcgacttcaaggcccagaccctgaaggagctgcccctgcagaagggcgacatcgtgtacatctacaagcagatcgaccagaactggtacgagggcgagcaccacggcagagtgggcatcttccccagaacctacatcgagctgctgccccccgccgagaaggcccagcccaagaagctgacccccgtgcaggtgctggagtacggcgaggccatcgccaagttcaacttcaacggcgacacccaggtggagatgagcttcagaaagggcgagagaatcaccctgctgagacaggtggacgagaactggtacgagggcagaatccccggcaccagcagacagggcatcttccccatcacctacgtggacgtgatcaagagacccctggtgaagaaccccgtggactacatggacctgcccttcagcagcagccccagcagaagcgccaccgccagcccccagcagccccaggcccagcagagaagagtgacccccgacagaagccagaccagccaggacctgttcagctaccaggccctgtacagctacatcccccagaacgacgacgagctggagctgagagacggcgacatcgtggacgtgatggagaagtgcgacgacggctggttcgtgggcaccagcagaagaaccaagcagttcggcaccttccccggcaactacgtgaagcccctgtacctgtag

SEQ ID NO: 291294 - DNA, 2055 bp, Artificial Sequence
  derived and/or modified sequence
atgagctccgagtgcgacggcggatcaaaggctgtgatgaatggtctggctccgggcagtaatggccaagataaagatatggatctgaccaaaatctgtaccgggaaaggcgctgtgacattacgcgcttccagttcctaccgagagaccccctcatccagcccggcatccccccaggagactaggcagcacgaatccaaaccggacgaatggaggctgagctcaagtgcagacgcaaacggaaacgcccagccatcttctctcgcggcaaagggctatcgatcagtccatcctaatttgcctagtgacaaatcacaggatagttcacccctgctgaacgaagtgtcaagttcgctgattggcacagattctcaggcgtttccaagtgtgtccaagcctagttctgcttacccatctactactatcgtgaatcccaccatagttctgctccagcacaaccgggagcaacagaaaaggttaagcagtctttccgacccagtgtctgagcgtcgagtgggggagcaggatagcgcccccacccaggaaaagccaactagcccaggcaaagccattgagaagcgtgcaaaagatgattccagacgggtggttaagtccacacaagatttaagtgacgtgagtatggatgaggtgggcattcctctgcgcaacaccgagcggtctaaggattggtataaaaccatgttcaaacagattcataagctcaaccgagatgacgattccgatctctattccccccggtactccttctcagaggacaccaagagccccctatcggtcccccggtctaagagcgagatgagttacatagatggtgagaaagtggttaagaggtcggcaactctgcctctgccagccagatcatcaagcctaaagtcttctagtgaaagaaacgattgggagcccccagataagaaggtcgatactcgcaagtaccgcgcagagcctaaatccatttacgagtaccaaccgggcaagtcgagtgtgctcacaaatgagaagatgtctagcgctatcagtccaacgccagagatcagcagcgagactcccggctacatatattctagcaacttccacgccgttaagagagaatctgacggcgcgcccggagatttgacctctctagaaaacgagagacaaatctataaatctgtgctcgaaggtggcgatatcccacttcagggtcttagcgggctcaagaggccttcttcatctgcatcaacaaaggacagcgaaagtccgaggcacttcattccagctgattacctcgaatccacagaagaatttatacgacgccgccacgacgataaggagatgcgccctgcgagagcaaaattcgattttaaagcccagacattaaaggaactgcccctacagaaaggagacattgtgtacatctacaagcagattgatcaaaattggtacgaaggcgaacaccacgggcgagtgggcattttcccccgaacctacatagagctgctgccaccagcggaaaaagcacagccgaaaaagctcacacctgttcaggtcctggagtacggtgaggcaatcgccaagtttaactttaatggggacacacaggtagaaatgtcatttcgaaaaggcgagcgtataaccttgctgagacaggtggatgagaattggtacgagggtaggatacctggcaccagcagacaaggcatctttccaattacctacgtggatgtaattaagcgcccattggtgaaaaaccccgtggattacatggacctaccatttagctctagcccgtcacgtagcgcaaccgcatctccccagcagccccaagcccagcaacggcgggtgactccggataggagccagacttctcaggatctgttcagttaccaggctttatattcttatattccgcagaatgacgatgaattggaattacgagatggtgatatcgtcgacgttatggagaaatgtgacgacgggtggttcgtgggcacaagtaggagaacaaagcagttcggaaccttccccggcaactacgtcaaaccattatacctgtag

SEQ ID NO: 291295 - DNA, 2055 bp, Artificial Sequence
  derived and/or modified sequence
atgagcagtgaatgtgatggcggcagcaaggctgtgatgaatggcctggcccctggcagcaatggccaggacaaggacatggacctgaccaagatctgcacaggaaaaggagctgtgaccctgcgggccagcagcagctaccgggagacccccagcagcagccctgccagcccccaggagacccggcagcacgagagcaagccagatgagtggaggctgagcagcagcgcagatgccaatggaaatgcccagcccagcagcctggccgccaagggctacagatctgtgcaccccaacctgcccagcgacaagagccaggacagcagccccctgctgaatgaggtgagcagcagcctcatcggcacagacagccaggccttccccagcgtgtccaagcccagcagcgcctaccccagcaccaccatcgtgaaccccaccatcgtgctgctgcagcacaaccgggagcagcagaagaggctgagcagcctgagtgaccctgtgtctgagcggcgggtgggggagcaggacagcgcccccacccaggagaagcccaccagccctgggaaggccatcgagaagagggccaaggatgacagccggcgggtggtgaagagcacccaggacctgagtgatgtgtccatggatgaggtgggcatccccctgaggaacacagagaggagcaaggactggtacaagaccatgttcaagcagatccacaagctgaacagagatgatgacagcgacctgtacagcccccgctacagcttcagcgaggacaccaagagccccctgtctgtgcccaggagcaagtctgagatgagctacattgatggagagaaggtggtgaagaggtctgccaccctgcccctgcctgcccggagcagcagcctgaagagcagcagcgagagaaatgactgggagcccccagacaagaaggtggacaccaggaagtacagagctgagcccaagagcatctatgagtaccagcccgggaagagctctgtgctgaccaatgagaagatgagcagcgccatcagccccaccccagagatcagcagcgagaccccaggctacatctacagcagcaacttccacgctgtgaagcgggagagtgatggagcccctggggacctgaccagcctggagaatgaaaggcagatctacaagtctgtgctggagggcggggacatccccctgcagggcctgagcggcctgaagaggcccagcagcagcgccagcaccaaggacagcgagagccccaggcacttcatcccagctgactacctggagagcacagaggagttcatcagaagaagacatgatgacaaggagatgaggcctgcccgggccaagtttgacttcaaggcccagaccctgaaggagctgcccctgcagaagggggacatcgtgtacatctacaagcagattgaccagaactggtatgaaggagagcaccacggccgggtgggcatcttccccaggacctacatcgagctgctgcccccagctgagaaggcccagcccaagaagctgacccctgtgcaggtgctggagtatggagaggccatcgccaagttcaacttcaatggagacacccaggtggagatgtccttcaggaagggggagcgcatcaccctgctgcggcaggtggatgagaactggtatgagggccgcatccctggcaccagccggcagggcatcttccccatcacctacgtggatgtgatcaagaggcccctggtgaagaaccctgtggactacatggacctgcccttcagcagcagccccagccgcagcgccacagccagcccccagcagccccaggcccagcagaggagagtgaccccagacaggagccagaccagccaggacctcttctcctaccaggccctgtacagctacatcccccagaatgatgatgagctggagctgagagatggagacatcgtggatgtgatggagaagtgtgatgatggctggtttgtgggcaccagcaggaggaccaagcagtttggcaccttccctggcaactacgtgaagcccctgtacctgtag

SEQ ID NO: 291296 - DNA, 2055 bp, Artificial Sequence
  derived and/or modified sequence
atgagcagcgagtgcgacggcggcagcaaggccgtgatgaacggcctcgcacctggatccaatggtcaagataaggatatggatctaactaagatttgtactgggaagggcgcagtgactctgagagcctcttctagctatcgagaaaccccttcctcaagccccgcctcaccccaggagacaaggcagcacgaaagcaaacctgacgaatggcgcctgagttctagcgcagacgctaacggcaatgcgcagccttcttctctagcggcaaaaggatatcggagcgtgcaccctaatctgcccagtgataagtcccaggacagttcccccctactgaacgaggtctcaagttccctgatcggcaccgactctcaggccttcccgagtgtatctaaacccagcagcgcgtatcctagcaccacgatagttaatcctaccatcgtcttgctgcagcacaaccgcgaacaacagaagagactgtcatcccttagcgatccggtgagcgaaagacgcgtgggcgagcaggattccgctccaacccaggagaagcctacgtcccctgggaaagctatagaaaaacgagcaaaggatgattctaggcgagtggttaaaagtacacaagatctttctgacgttagcatggatgaagtgggcattcccttacgcaacacagagaggtctaaggactggtataagactatgttcaaacagatccacaaactcaatcgggacgatgatagcgacctctattctccacggtactcattcagcgaagatacaaaatctccgctatccgttccaaggagcaagtctgagatgtcatacatcgacggggaaaaggtagtcaagcggagcgccaccttgccactgcctgcaagaagttcctcccttaaatccagcagcgaaagaaatgactgggagcctcccgataaaaaggtggatacccggaaatacagggccgagccaaaatcaatttacgagtatcaaccaggaaaatcttccgtgctgactaacgaaaaaatgagctctgccatctccccaacacctgagatttccagcgaaactccgggctatatctattcctccaactttcatgctgtcaaacgggagagcgatggcgcccccggcgacttgacttctctggagaatgaaagacaaatctacaaatctgttctggagggcggcgatatccccttacaggggctgtccggactgaagcggcctagcagctctgcatctaccaaggactcggagagtccccggcatttcattcccgccgactacctggagagtaccgaggaattcatcaggcggcgccatgatgacaaagagatgcggcctgctagagccaaattcgatttcaaggcccaaactctcaaagaactgccactgcagaagggggatattgtgtacatttataagcaaatagatcagaattggtatgagggtgaacatcatggacgtgtgggcatttttcctaggacatacattgagcttctgccccccgctgagaaggcacagccaaaaaaactgacaccagttcaggtcttggagtacggggaggctatagccaaatttaacttcaatggagatacacaagtggaaatgagctttaggaagggcgaacggatcacgcttctccgccaggttgacgagaattggtacgagggacgtatcccagggacatcacggcagggaatattccccatcacatatgtcgacgtcattaaaaggccactggttaaaaaccccgtggactacatggatctgccattctctagctccccaagccgaagcgccacagccagtccacaacagccgcaggctcagcagcgtcgcgtgactcccgatagatcccagaccagccaggatttattctcataccaggcgctgtattcttacatcccacagaacgatgacgagctagagttgcgtgatggggacattgtggatgtcatggaaaaatgcgacgatggttggtttgttggcacctctcgtagaaccaaacaattcggaacatttcccggaaactacgtgaaacctctatacttgtag

SEQ ID NO: 291297 - DNA, 2055 bp, Artificial Sequence
  derived and/or modified sequence
atgagttccgaatgtgacggtgggtcaaaggcagtgatgaatggcctggccccaggctctaacggccaagataaagacatggacctgactaaaatctgcacaggcaaaggggctgtgactctaagagcatcttccagttatcgagagaccccgtcatctagtcccgcttctcctcaggagacgaggcagcatgaatccaagcccgacgaatggcggctgagcagctccgctgatgctaacggaaacgcccagccatccagcctggctgccaagggctataggagcgtacatcctaacctaccctctgacaaatcacaggactcctcaccactcctgaatgaagtgtcttcaagtctgatagggaccgactctcaggcgttcccaagtgtctctaagcccagtagtgcatatcccagcaccactatcgtgaaccccaccatagtgttgctgcagcataacagggagcaacagaaaaggttgtcaagcctaagcgatccagtaagcgagaggcgggtgggagagcaggattctgctcccacacaggaaaaacccacaagccctggaaaggccatagagaagagggctaaggatgacagcaggcgagtggtcaagagcacccaggatttgtcagatgtttcaatggacgaagtgggaatacctctgagaaatacagagcgctcaaaggactggtataagacaatgtttaagcaaattcacaagcttaacagagacgacgactctgacctatacagtccgagatactccttttccgaagacaccaaaagccctctctccgttccaaggagcaaaagcgagatgtcctacatcgacggggagaaggttgtaaagagatctgccactctgccattgcctgctagatctagctccttaaagtcttccagtgaaaggaacgactgggaaccacccgacaaaaaagtggacacacgcaaataccgggctgagcccaaatctatctacgagtatcaaccagggaagagttcagtgttgacgaatgagaaaatgtcctccgctatcagccctacccctgaaatttccagcgagactccagggtacatttactcgtccaatttccatgccgtcaaaagggaatcagacggggcaccaggagacctgacgtcactagaaaatgagcgtcagatttataagtcagtgttggaggggggagacattccattgcagggactgagcggtcttaaacggccaagctctagcgcctcaacaaaagatagcgagtctccaagacacttcattcctgccgattatctggagtcaaccgaagaattcattaggcgcagacacgacgacaaggagatgaggccggctagggcaaagtttgattttaaagctcaaaccttaaaagagctaccattacagaaaggggacattgtatacatctacaagcagattgatcagaactggtacgagggggagcaccacggcagggtgggcatttttcctagaacctatattgaattgctccctcccgcagagaaagcccagcctaaaaaactgacaccagtgcaagttctggagtacggtgaggctattgctaagttcaacttcaacggagatacacaggtagaaatgtcattccgaaaaggcgagcgaatcactttgttgcgtcaagtggacgagaactggtacgaggggagaatcccaggtacaagccggcagggaattttccccattacctacgtggatgtgataaagagacctttggttaagaacccagtggactacatggacctgcctttctcctcctcccccagcaggtctgcgacagccagtccccagcaacctcaggcgcagcagagacgggtgactcccgaccggtcccaaacgagtcaagacttgttctcatatcaggctctatacagttacattccccagaatgacgacgaactggagttaagggatggcgacattgtggatgttatggaaaaatgtgacgacggttggttcgtaggaacaagcaggagaaccaaacagtttgggacttttcccggtaactacgtgaagcctctgtatctgtag

SEQ ID NO: 291298 - DNA, 2055 bp, Artificial Sequence
  derived and/or modified sequence
atgagttctgaatgtgatggtggttccaaagctgtgatgaatggcttggcacctggcagcaatgggcaagacaaagacatggatcttacaaaaatctgcactgggaagggagcggtgactctccgggcctcgtcttcctacagggaaaccccaagcagtagccctgcgagccctcaggaaacccggcaacacgaaagcaaaccagatgagtggaggctttcttccagtgctgatgccaatggaaatgcccagccctcttcactcgctgccaagggctacagaagtgtgcatcccaaccttccttctgacaagtcccaggattccagtcctctactaaatgaagtttcttcttcccttattggaactgattcccaagcctttccatcagttagcaagccttcatccgcctatccctccacaacgattgtcaatcctactattgtgctcttgcaacacaatcgagaacagcaaaaacgactcagtagcctttcagatcctgtctcagaaagaagagtgggagagcaggactcagcaccaacccaggaaaaacccacctcacctggcaaggctattgaaaaaagagcaaaggatgacagtaggcgggtggtgaagagcactcaggacttaagcgatgtttccatggatgaagtgggcatcccactccggaacactgagagatcaaaagactggtacaagactatgtttaaacagatccacaaactgaacagagatgatgattcagatctgtactctcccagatactcattttctgaagacacaaaatctcccctttctgtgcctcgctcaaaaagtgagatgagctacattgatggtgagaaggtagtcaagaggtcggccacactacccctcccagcccgctcttcctcactgaagtcaagctcagaaagaaatgactgggaacccccagataagaaagtagacacaagaaaatatcgtgcagagcccaagagcatttacgaatatcagcctggcaagtcttccgttctgaccaacgaaaagatgagctcagccatcagccctactccggaaatttcttcagagactcctggatatatatattcttccaacttccatgcagtgaagagggaatcagacggggctcctggggatctcactagcttggagaatgagagacaaatttataaaagtgtcttggaaggtggtgacatccctcttcagggcctgagtgggctcaagcgaccatccagctctgcttccactaaagattcagaatcgccaagacattttataccagctgattacttggaatccacggaagaatttattcgaagacgtcatgatgataaagagatgagacctgccagagccaaatttgactttaaagctcagacactaaaggagcttcctctgcagaagggagatattgtttacatttataagcaaattgatcagaactggtatgaaggagaacaccacggccgggtgggaatcttcccacgcacctacatcgagcttcttcctcctgctgagaaggcacagcccaaaaagttgacaccagtgcaggttttggaatatggagaagctattgctaagtttaactttaatggtgatacacaagtagaaatgtccttcagaaagggtgagaggatcacactgctccggcaggtagatgagaactggtacgaagggaggatcccggggacatcccgacaaggcatcttccccatcacctacgtggatgtgatcaagcgaccactggtgaaaaaccctgtggattacatggacctgcctttctcctcctccccaagtcgcagtgccactgcaagcccacagcaacctcaagcccagcagcgaagagtcacccccgacaggagtcaaacctcacaagatttatttagctatcaagcattatatagctatataccacagaatgatgatgagttggaactccgcgatggagatatcgttgatgtcatggaaaaatgtgacgatggatggtttgttggtacttcaagaaggacaaagcagtttggtacttttccaggcaactatgtaaaacctttgtatctataa

SEQ ID NO: 291299 - DNA, 882 bp, Artificial Sequence
  derived and/or modified sequence
atgctggaaaagttttgtaactccacattctggaattcatcgttcctcgactccccagaagccgacctgcccctctgcttcgagcaaacagtgctggtgtggatcccactgggatatctctggctattggccccatggcagctgctgcacgtgtacaagtcaagaaccaagcgatcttccaccactaaactgtacctcgcaaagcaagtttttgtgggattcctcctcatcctggccgccattgaactggcccttgtgctgactgaggactccgggcaggctactgtacccgccgtcagatataccaaccctagtctctaccttggtacctggctccttgtgcttctcatacagtacagtaggcaatggtgtgttcagaagaactcttggttcctctctctgttttggatactttcaatcctttgtgggaccttccagtttcagactttgattcggacactcctccagggagacaactcaaaccttgcatattcgtgcctatttttcatttcttacggatttcaaatcctcatcttaatttttagcgcgtttagcgagaacaatgagtcatccaataacccctcttctatcgcgagctttctctcttcaataacctacagctggtatgattccatcattctaaaaggatacaaacggcctctgaccctcgaggacgtgtgggaggtcgatgaggagatgaaaactaaaaccttagtgtctaaattcgagacccacatgaaaagagaactccagaaggcccgccgtgccctgcagaggcgacaggaaaagagcagtcagcagaactccggcgcccgcctgccaggacttaacaaaaatcagagtcagagccaggacgcacttgtgctcgtcacatttccgtag

SEQ ID NO: 291300 - DNA, 882 bp, Artificial Sequence
  derived and/or modified sequence
atgctggagaagttctgcaacagcaccttctggaacagcagcttcctggacagccctgaggccgacctgcccctgtgctttgagcagacagtgctggtgtggatccccctgggctacctgtggctgctggccccctggcagctgctgcacgtgtacaagagcaggaccaagaggagcagcaccaccaagctgtacctggccaagcaggtgtttgtgggcttcctgctgatcctggccgccatcgagctggccctggtgctgacagaagattctggccaggccaccgtgcctgctgtgcgctacaccaaccccagcctgtacctgggcacctggctgctggtgctgctgatccagtacagccggcagtggtgtgtgcagaagaacagctggttcctgagcctcttctggatcctgagcatcctgtgtggcaccttccagttccagaccctcatccgcaccctgctgcagggcgacaacagcaacctggcctacagctgcctcttcttcatctcctatggcttccagatcctgatcctgatcttcagcgccttcagcgagaacaatgaaagcagcaacaaccccagcagcatcgccagcttcctgagcagcatcacctacagctggtatgacagcatcatcctgaagggctacaagaggcccctgaccctggaggatgtgtgggaggtggatgaggagatgaagaccaagaccctggtgtccaagtttgagacccacatgaagcgggagctgcagaaggcccggcgggccctgcagaggcggcaggagaagagcagccagcagaacagcggggcccggctgcccggcctgaacaagaaccagagccagagccaggatgccctggtgctggtgaccttcccctag

SEQ ID NO: 291301 - DNA, 882 bp, Artificial Sequence
  derived and/or modified sequence
atgctggagaagttctgcaacagcaccttctggaacagcagcttccttgattcccctgaggctgacctgcccctttgtttcgagcagaccgtcttggtgtggattcccctaggatatctgtggctgttagccccatggcaattattgcatgtttacaaatcccgcacgaaaagatcctcaacaactaagctatacctagcaaagcaggtctttgtcggcttccttctgattcttgcagccatagaacttgccctggtactcacagaggatagcggccaggccaccgtccccgctgtccggtatactaatccaagcctttatcttggaacatggctgttagtcttgctcatccagtattccaggcaatggtgtgtccagaaaaattcttggtttcttagtttgttttggattctctctattttgtgtggtactttccaatttcagaccctgattcggacacttctccaaggtgataactcaaatctggcatactcatgcttgttctttattagctacgggtttcagatcctgatactgattttctcagcattctctgagaacaatgaaagttccaataacccgtcctctatcgcttcgtttctgtcgagtatcacatatagctggtatgattcaataattctgaagggatacaagcgccccctgacactggaggatgtgtgggaggtggacgaagagatgaaaacgaagactctggttagtaaattcgagactcacatgaaacgggaactgcaaaaagcgcggagggcacttcagcgccgccaggaaaagtcgtctcagcagaacagcggggcgaggttacccggacttaacaaaaatcagtcccagagtcaagacgcgctggtacttgttaccttcccctag

SEQ ID NO: 291302 - DNA, 882 bp, Artificial Sequence
  derived and/or modified sequence
atgctggagaagttttgcaatagtaccttttggaacagctcatttttagattcccctgaggctgatctgcccttgtgcttcgaacagactgtgctggtgtggattcccctgggatacttatggctgctcgctccctggcagctgctgcatgtgtacaaatcccgaaccaaaaggtctagtaccaccaaactataccttgctaagcaggtgtttgtgggattcctactgattctggcagccattgagctggctctggtcctgacagaggacagcggtcaggccacggtccctgcagtcagatatacaaatccttccctctatcttgggacctggctgttggtacttctgatccaatattcaaggcagtggtgtgtgcagaaaaacagctggtttctgtcattattctggatcctgagcattctgtgtgggacattccagtttcagacgctgattcgcacattgctccagggtgataactccaatctggcgtactcctgtctgtttttcatctcctatggcttccaaatcttgattctgatattttccgccttcagtgagaataatgagagtagcaataacccctcctctatcgcctcttttctgtcctcaattacctatagctggtacgattctattatcctgaagggatataaacgtccgcttacacttgaggatgtctgggaggtggatgaggagatgaagaccaaaactctggtttcaaagttcgagacgcatatgaaaagagagttgcaaaaggcaaggcgtgccctgcagagaaggcaggaaaaatcatctcagcagaatagcggagctcgcttaccaggactgaacaaaaatcagtcccaatctcaggacgcgctagtgctggtgaccttcccgtag

SEQ ID NO: 291303 - DNA, 1714 bp, Artificial Sequence
  derived and/or modified sequence
tttctttgatgaaacaagtaaagaagaaacaacacaatcatattaatagaagagtcttcgttccagacgcagtccaggaatcatgctggagaagttctgcaactctactttttggaattcctcattcctggacagtccggaggcagacctgccactttgttttgagcaaactgttctggtgtggattcccttgggctacctatggctcctggccccctggcagcttctccacgtgtataaatccaggaccaagagatcctctaccaccaaactctatcttgctaagcaggtattcgttggttttcttcttattctagcagccatagagctggcccttgtactcacagaagactctggacaagccacagtccctgctgttcgatataccaatccaagcctctacctaggcacatggctcctggttttgctgatccaatacagcagacaatggtgtgtacagaaaaactcctggttcctgtccctattctggattctctcgatactctgtggcactttccaatttcagactctgatccggacactcttacagggtgacaattctaatctagcctactcctgcctgttcttcatctcctacggattccagatcctgatcctgatcttttcagcattttcagaaaataatgagtcatcaaataatccatcatccatagcttcattcctgagtagcattacctacagctggtatgacagcatcattctgaaaggctacaagcgtcctctgacactcgaggatgtctgggaagttgatgaagagatgaaaaccaagacattagtgagcaagtttgaaacgcacatgaagagagagctgcagaaagccaggcgggcactccagagacggcaggagaagagctcccagcagaactctggagccaggctgcctggcttgaacaagaatcagagtcaaagccaagatgcccttgtcctggtaactttcccttgagtgtctgtgtgagcgcgctgcatgtttcaggcaagggtacatcagcatcatggcgattctgtccttacatttttatagcacttcatacttctcagtgcacttcatattattaatggtattcacaatactgatactaccttagtgatggatacatggcgtgtaatgtactgttctctttcctttggggtacttttgaaattttccagaatgaaacgtggttttgaaaaaaataataccttagcatttctagattttgcaccttggtacaaattagcataagcaggcaatttgttgattcattcacttgaaaatatttattgagcacaactgtgtgtcagtgaccattctgggcactaaaagattgctcatcttttgtgagctagaaaatatgtagtaagcccatacataggttactctttgaaagtaataatagctattaagaaaataaaacaatagtgtatttggagtgaagtgcgacttgagacagggtaacaggggaagcttctcagaggagatgacatctgaacagacactcaaatgatgagatcaggccctctgagggacagtcagagggaagtgtgttccagtcagaaggagcaggcatgcgaggctgagaggggaacacatttggcttgctcagggaatggcaagaagatccaggacagggtgcgcatggggtgagatgggctcaaggaagtggacagggattaagctatgtggacccctgtgggccacaataaggaatctgga

SEQ ID NO: 291304 - DNA, 882 bp, Artificial Sequence
  derived and/or modified sequence
atgctggagaagttctgcaacagcaccttctggaacagcagcttcctggacagccccgaggccgacctgcccctgtgcttcgagcagaccgtgctggtgtggatccccctgggctacctgtggctgctggccccctggcagctgctgcacgtgtacaagagcagaaccaagagaagcagcaccaccaagctgtacctggccaagcaggtgttcgtgggcttcctgctgatcctggccgccatcgagctggccctggtgctgaccgaggacagcggccaggccaccgtgcccgccgtgagatacaccaaccccagcctgtacctgggcacctggctgctggtgctgctgatccagtacagcagacagtggtgcgtgcagaagaacagctggttcctgagcctgttctggatcctgagcatcctgtgcggcaccttccagttccagaccctgatcagaaccctgctgcagggcgacaacagcaacctggcctacagctgcctgttcttcatcagctacggcttccagatcctgatcctgatcttcagcgccttcagcgagaacaacgagagcagcaacaaccccagcagcatcgccagcttcctgagcagcatcacctacagctggtacgacagcatcatcctgaagggctacaagagacccctgaccctggaggacgtgtgggaggtggacgaggagatgaagaccaagaccctggtgagcaagttcgagacccacatgaagagagagctgcagaaggccagaagagccctgcagagaagacaggagaagagcagccagcagaacagcggcgccagactgcccggcctgaacaagaaccagagccagagccaggacgccctggtgctggtgaccttcccctag

SEQ ID NO: 291305 - protein, 1060 aa, Artificial Sequence
  derived and/or modified sequence
MEQLNELELLMEKSFWEEAELPAELFQKKVVASFPRTVLSTGMDNRYLVLAVNTVQNKEGNCEKRLVITASQSLENKELCILRNDWCSVPVEPGDIIHLEGDCTSDTWIIDKDFGYLILYPDMLISGTSIASSIRCMRRAVLSETFRSSDPATRQMLIGTVLHEVFQKAINNSFAPEKLQELAFQTIQEIRHLKEMYRLNLSQDEIKQEVEDYLPSFCKWAGDFMHKNTSTDFPQMQLSLPSDNSKDNSTCNIEVVKPMDIEESIWSPRFGLKGKIDVTVGVKIHRGYKTKYKIMPLELKTGKESNSIEHRSQVVLYTLLSQERRADPEAGLLLYLKTGQMYPVPANHLDKRELLKLRNQMAFSLFHRISKSATRQKTQLASLPQIIEEEKTCKYCSQIGNCALYSRAVEQQMDCSSVPIVMLPKIEEETQHLKQTHLEYFSLWCLMLTLESQSKDNKKNHQNIWLMPASEMEKSGSCIGNLIRMEHVKIVCDGQYLHNFQCKHGAIPVTNLMAGDRVIVSGEERSLFALSRGYVKEINMTTVTCLLDRNLSVLPESTLFRLDQEEKNCDIDTPLGNLSKLMENTFVSKKLRDLIIDFREPQFISYLSSVLPHDAKDTVACILKGLNKPQRQAMKKVLLSKDYTLIVGMPGTGKTTTICTLVRILYACGFSVLLTSYTHSAVDNILLKLAKFKIGFLRLGQIQKVHPAIQQFTEQEICRSKSIKSLALLEELYNSQLIVATTCMGINHPIFSRKIFDFCIVDEASQISQPICLGPLFFSRRFVLVGDHQQLPPLVLNREARALGMSESLFKRLEQNKSAVVQLTVQYRMNSKIMSLSNKLTYEGKLECGSDKVANAVINLRHFKDVKLELEFYADYSDNPWLMGVFEPNNPVCFLNTDKVPAPEQVEKGGVSNVTEAKLIVFLTSIFVKAGCSPSDIGIIAPYRQQLKIINDLLARSIGMVEVNTVDKYQGRDKSIVLVSFVRSNKDGTVGELLKDWRRLNVAITRAKHKLILLGCVPSLNCYPPLEKLLNHLNSEKLIIDLPSREHESLCHILGDFQRE

SEQ ID NO: 291306 - protein, 1146 aa, Artificial Sequence
  derived and/or modified sequence
MKTPCIPSPKQGSKGRGQSPAAQVRGPTWNAPAREGRPGAGHLGHLRVGACARGAQARAFFPFLSFLCYPRFRCLFCLQFAIPASRMEQLNELELLMEKSFWEEAELPAELFQKKVVASFPRTVLSTGMDNRYLVLAVNTVQNKEGNCEKRLVITASQSLENKELCILRNDWCSVPVEPGDIIHLEGDCTSDTWIIDKDFGYLILYPDMLISGTSIASSIRCMRRAVLSETFRSSDPATRQMLIGTVLHEVFQKAINNSFAPEKLQELAFQTIQEIRHLKEMYRLNLSQDEIKQEVEDYLPSFCKWAGDFMHKNTSTDFPQMQLSLPSDNSKDNSTCNIEVVKPMDIEESIWSPRFGLKGKIDVTVGVKIHRGYKTKYKIMPLELKTGKESNSIEHRSQVVLYTLLSQERRADPEAGLLLYLKTGQMYPVPANHLDKRELLKLRNQMAFSLFHRISKSATRQKTQLASLPQIIEEEKTCKYCSQIGNCALYSRAVEQQMDCSSVPIVMLPKIEEETQHLKQTHLEYFSLWCLMLTLESQSKDNKKNHQNIWLMPASEMEKSGSCIGNLIRMEHVKIVCDGQYLHNFQCKHGAIPVTNLMAGDRVIVSGEERSLFALSRGYVKEINMTTVTCLLDRNLSVLPESTLFRLDQEEKNCDIDTPLGNLSKLMENTFVSKKLRDLIIDFREPQFISYLSSVLPHDAKDTVACILKGLNKPQRQAMKKVLLSKDYTLIVGMPGTGKTTTICTLVRILYACGFSVLLTSYTHSAVDNILLKLAKFKIGFLRLGQIQKVHPAIQQFTEQEICRSKSIKSLALLEELYNSQLIVATTCMGINHPIFSRKIFDFCIVDEASQISQPICLGPLFFSRRFVLVGDHQQLPPLVLNREARALGMSESLFKRLEQNKSAVVQLTVQYRMNSKIMSLSNKLTYEGKLECGSDKVANAVINLRHFKDVKLELEFYADYSDNPWLMGVFEPNNPVCFLNTDKVPAPEQVEKGGVSNVTEAKLIVFLTSIFVKAGCSPSDIGIIAPYRQQLKIINDLLARSIGMVEVNTVDKYQGRDKSIVLVSFVRSNKDGTVGELLKDWRRLNVAITRAKHKLILLGCVPSLNCYPPLEKLLNHLNSEKLIIDLPSREHESLCHILGDFQRE

SEQ ID NO: 291307 - DNA, 3441 bp, Artificial Sequence
  derived and/or modified sequence
atgaaaaccccctgtattccgagtccaaaacagggcagtaagggccggggacagagcccagcggctcaggtccgcggccctacgtggaacgctcccgcgcgggaggggcggccaggagcagggcacctggggcatctccgcgtgggagcttgtgcccggggggcgcaggcgcgcgctttctttccatttctttccttcctatgctatccgcgttttagatgtctcttctgtttgcagttcgcgatacctgcttcccgtatggaacagctgaacgagctagagcttctcatggagaagagcttttgggaggaggccgagctcccagccgagctctttcagaagaaagttgtggcctctttcccaaggaccgtgctgagtaccggcatggataatcgctatttggttctggctgtcaatacagtgcagaataaggaaggaaactgcgagaaaagactagtcatcaccgccagccagtccctggagaacaaggaactgtgtatacttcggaacgactggtgctccgtgcccgtcgaacctggggacataattcacttagagggcgattgcacctcggacacctggattatcgataaagattttggatacctcatcctctaccccgacatgctgataagcgggactagcatcgcgtccagtatccggtgcatgaggcgagcagtgctcagcgagaccttccgcagctcagacccagccactcgtcagatgctgattggtactgtcctccacgaggtcttccagaaggccattaacaacagtttcgccccagagaagttgcaagagctggctttccaaaccatccaggaaatccgccacttgaaggagatgtaccgcctgaatttgtcccaagacgaaattaagcaggaggtggaggattacctaccatctttttgcaagtgggctggagacttcatgcataagaatacctctactgacttcccgcagatgcaattgtctctcccttccgacaattccaaagataattccacctgtaacatcgaggtggtcaagcctatggatatcgaggagtcaatctggtctccacgatttggactcaaggggaaaattgatgtgaccgtgggggtgaagatccacaggggatacaaaactaagtataaaattatgcctctggaactgaaaacaggaaaggagagcaactctattgagcatagatctcaagtcgtcctgtacactctgctctcccaggagcgccgcgcagaccccgaagcaggcctactgctctacttgaagacaggacaaatgtaccccgtacccgctaaccaccttgacaagagggaactgctgaagcttcggaaccaaatggcattttcacttttccaccggatcagtaagtcggccactaggcagaaaacacagctggcatctctcccccaaattatagaagaagaaaagacctgtaagtactgcagtcagatcggaaactgcgccctctatagccgagccgtggagcagcagatggactgctcctccgttcccatagtgatgttgcctaagatagaggaagagacccagcatttgaaacagacccacctggagtatttctccttatggtgcttaatgttgactctcgagtcacagtcaaaggataacaaaaagaaccatcagaacatctggctgatgcctgcgagcgagatggaaaagagtggaagctgcattggaaatctgattcggatggagcacgtaaaaattgtctgcgatgggcaataccttcataattttcagtgcaaacacggggccattccagtaacaaatctgatggccggcgacagggtcatcgtgtccggcgaagaacgatctttattcgcattatcccgggggtacgtgaaagagattaatatgacaaccgttacctgtttactcgacagaaatctctccgttctgccagagtctactctgtttcgtttggaccaagaggagaagaactgtgatattgatacgcctctcggaaatctttctaagctgatggagaacacatttgtcagcaaaaagttaagggatctaatcatcgacttcagggagccgcaatttatttcttacttatcgagcgttctgcctcacgacgccaaagatacagtggcatgtattctgaaaggcctaaacaaacctcaacggcaggccatgaaaaaagtcttgctaagcaaggactataccttgattgttggcatgcccggcacagggaagactacaacaatttgtacactggtgagaattctttacgcctgcgggttctccgtgcttttaacctcatacacccacagcgcggtggacaacatcttacttaaactcgccaaatttaagatagggttcttacgccttgggcagattcaaaaggtgcatccggccatccagcagtttactgaacaggagatttgccgatccaaatctatcaaatccttggcacttcttgaggaactgtacaatagccagctcatcgtggcaacaacttgcatgggcatcaaccatcctattttctctaggaaaatttttgatttctgcatagtcgacgaggcttctcagatctcccagcccatttgtctgggacctctatttttttctcggaggtttgtactggtgggagatcaccagcagctgccgcccctggttctcaacagggaggcccgagcactaggaatgagcgaaagtctctttaagaggttggaacagaacaagagcgctgtggttcaacttacagttcagtatcggatgaattcaaaaatcatgagtctgtccaataagttgacatacgaaggtaaattggagtgcggcagcgataaggtggcaaatgcagtcatcaatctgcgccactttaaagacgtgaagctggagctcgagttctatgcagattacagtgacaatccgtggctgatgggagtgtttgaaccgaacaatccagtttgctttttaaacaccgacaaagtgcctgcccccgaacaagtggagaaaggaggcgtaagtaacgtcacagaagccaaactgatcgtgtttcttacgagcatcttcgttaaagcaggctgcagcccctccgatatcgggataattgctccctatcgacaacagttaaagattatcaacgacctgctcgcccggtcaatcggaatggtggaagtgaataccgtggataagtatcaaggcagggacaagtcaatcgtactggtgtcctttgtgcggtcgaacaaggatgggacagttggtgaactccttaaggattggaggcgacttaacgtagccattactagggctaagcacaagcttattcttctgggatgtgttcccagcttaaattgttaccctcctttggaaaagctccttaaccaccttaattctgaaaaactaattattgaccttccctcacgcgagcatgaatccctttgccatatcctaggagacttccaacgagagtag

SEQ ID NO: 291308 - DNA, 3441 bp, Artificial Sequence
  derived and/or modified sequence
atgaagaccccctgcatccccagccccaagcagggcagcaagggccggggccagagccctgctgcccaggtgcggggccccacctggaatgccccagcccgggagggccggcctggggccggccacctgggccacctgcgggtgggcgcctgtgcccggggggcccaggcccgggccttcttccccttcctgtccttcctgtgctacccccgcttccgctgcctcttctgcctgcagtttgccatcccagccagcaggatggagcagctgaatgagctggagctgctgatggagaagagcttctgggaggaggccgagctgcctgctgagctgttccagaagaaggtggtggccagcttccccaggacagtgctgagcacaggcatggacaaccgctacctggtgctggccgtgaacacagtgcagaacaaggagggcaactgtgagaagaggctggtgatcacagccagccagagcctggagaacaaggagctgtgcatcctgagaaatgactggtgcagcgtgcctgtggagcccggggacatcatccacctggagggggactgcaccagtgacacctggatcatcgacaaggactttggctacctgatcctgtacccagacatgctgatcagcggcaccagcatcgccagcagcatccgctgcatgagaagagctgtgctgtctgagaccttccgcagcagtgaccctgccacccggcagatgctgattggcaccgtgctgcacgaggtgttccagaaggccatcaacaacagctttgcccctgagaagctgcaggagctggccttccagaccatccaggagatccgccacctgaaggagatgtaccgcctgaacctgagccaggatgagatcaagcaggaggtggaggactacctgcccagcttctgcaagtgggccggggacttcatgcacaagaacaccagcacagacttcccccagatgcagctgagcctgcccagcgacaacagcaaggacaacagcacctgcaacatcgaggtggtgaagcccatggacatcgaggagagcatctggagcccccgcttcggcctgaagggcaagattgatgtgacagtgggcgtgaagatccaccggggctacaagaccaagtacaagatcatgcccctggagctgaagacaggcaaggagagcaacagcattgagcacaggagccaggtggtgctgtacaccctgctgagccaggagcggcgggctgaccctgaggccggcctgctgctgtacctgaagacaggccagatgtaccctgtgcctgccaaccacctggacaagcgggagctgctgaagctgaggaaccagatggccttcagcctcttccaccgcatcagcaagagcgccacccggcagaagacccagctggccagcctgccccagatcatcgaggaggagaagacctgcaagtactgcagccagatcggcaactgtgccctgtacagcagagctgtggagcagcagatggactgcagctctgtgcccatcgtgatgctgcccaagattgaggaggagacccagcacctgaagcagacccacctggagtacttcagcctgtggtgcctgatgctgaccctggagagccagagcaaggacaacaagaagaaccaccagaacatctggctgatgcctgccagcgagatggagaagagcggcagctgcatcggcaacctgatccgcatggagcacgtgaagatcgtgtgtgatggccagtacctgcacaacttccagtgcaagcacggggccatccctgtgaccaacctgatggccggggacagagtgattgtgtctggagaggagaggagcctgtttgccctgagccggggctacgtgaaggagatcaacatgaccaccgtgacctgcctgctggacaggaacctgtctgtgctgcctgagagcaccctcttccggctggaccaggaggagaagaactgtgacatcgacacccccctgggcaacctgagcaagctgatggagaacacctttgtgtccaagaagctgcgggacctgatcatcgacttccgggagccccagttcatctcctacctgagctctgtgctgccccatgatgccaaggacacagtggcctgcatcctgaagggcctgaacaagccccagaggcaggccatgaagaaggtgctgctgagcaaggactacaccctcatcgtgggcatgcctggcaccgggaagaccaccaccatctgcaccctggtgcgcatcctgtatgcctgtggcttctctgtgctgctgaccagctacacccacagcgctgtggacaacatcctgctgaagctggccaagttcaagattggcttcctgcggctgggccagatccagaaggtgcacccagccatccagcagttcacagagcaggagatctgccgcagcaagagcatcaagagcctggccctgctggaggagctgtacaacagccagctgattgtggccaccacctgcatgggcatcaaccaccccatcttcagcaggaagatctttgacttctgcatcgtggatgaggccagccagatcagccagcccatctgcctgggccccctcttcttcagccgccgctttgtgctggtgggggaccaccagcagctgccccccctggtgctgaaccgggaggcccgggccctgggcatgtctgagagcctcttcaagaggctggagcagaacaagtctgctgtggtgcagctgactgtgcagtacaggatgaacagcaagatcatgagcctgagcaacaagctgacctatgagggcaagctggagtgtggcagtgacaaggtggccaatgctgtgatcaacctgcggcacttcaaggatgtgaagctggagctggagttctacgccgactacagcgacaacccctggctgatgggcgtgtttgagcccaacaaccctgtgtgcttcctgaacacagacaaggtgcctgcccctgagcaggtggagaagggcggcgtgtccaatgtgacagaggccaagctgattgtgttcctgaccagcatctttgtgaaggccggctgcagccccagcgacatcggcatcatcgccccctaccggcagcagctgaagatcatcaatgacctgctggcccggagcatcggcatggtggaggtgaacacagtggacaagtaccagggccgggacaagagcatcgtgctggtgtcctttgtgcgcagcaacaaggatggcaccgtgggggagctgctgaaggactggaggcggctgaatgtggccatcacccgggccaagcacaagctgatcctgctgggctgtgtgcccagcctgaactgctacccacccctggagaagctgctgaaccacctgaacagcgagaagctgatcatcgacctgcccagccgggagcacgagagcctgtgccacatcctgggggacttccagcgggagtag

SEQ ID NO: 291309 - DNA, 3441 bp, Artificial Sequence
  derived and/or modified sequence
atgaagaccccctgcatccccagccccaagcagggcagcaagggccgaggtcagtcgcccgctgcacaggttagaggccctacttggaacgcaccggccagggaagggcgtcccggggctgggcatcttggccacctgagggtgggagcctgtgcccggggcgcacaggcacgcgcattctttccgtttctttctttcctttgttacccgagatttcggtgcctcttttgcctgcaatttgcaatccccgcttcccgaatggagcagctgaatgaattagaacttctgatggagaaatcattctgggaagaggccgagctgccggccgagcttttccagaagaaagtagtcgcctctttcccccggaccgtgctgagcaccggtatggacaacaggtacctggtccttgccgtaaatactgttcagaataaggaaggcaactgtgaaaaacggcttgttatcaccgcatcgcaatctcttgagaataaggaactgtgtattctgaggaacgattggtgttctgtgcccgtcgagccaggcgacatcatccacctggagggcgattgcaccagcgatacttggattatagataaggatttcggatatctgatcctgtacccagatatgctcattagcggaacttcaatcgctagctccatccgctgcatgagacgcgctgttctgtccgagacatttcggtccagtgacccagcaacccggcagatgctcatcgggactgttcttcacgaggtatttcagaaagccatcaacaactcattcgcccccgagaaattacaggagctggccttccagactatccaagaaattaggcatttgaaggaaatgtacaggttgaacctctcgcaggacgagattaagcaagaggtcgaggactaccttcctagcttctgcaagtgggctggcgattttatgcacaagaatacttctaccgacttcccccagatgcagctgagccttccctcagacaacagtaaggataacagtacatgtaatatcgaggtcgtcaagcctatggatattgaggagtctatctggagccccagattcggtctgaaggggaagattgacgtaacagtgggagtgaagatccatcgcggatataagactaaatacaagatcatgcctttggaactcaagacaggaaaggagtctaattccatcgagcaccgcagtcaggtcgtactttacacacttctgagccaggaaagacgggctgaccctgaggccggcctcctgttgtatctgaagacgggacagatgtaccccgtgcccgctaaccatctggacaagcgggagctgctgaaattgaggaaccaaatggcgttctccttattccataggatttccaaaagcgctaccaggcagaaaactcaacttgcctctcttccacaaataatcgaggaggagaagacctgcaagtactgttcacagatagggaactgtgccctgtattctcgcgctgttgagcagcaaatggattgttccagtgttcccattgtgatgctcccaaaaattgaagaggaaactcaacatttgaagcagacacatctggagtacttctctctttggtgcctgatgctcacgctggaaagccagtctaaagataacaaaaaaaaccatcaaaatatttggttaatgcctgcatcagagatggaaaaatccgggtcctgtattgggaaccttatacgtatggaacacgtaaagatagtatgtgatggacagtacctgcacaattttcagtgcaaacatggagccatacctgtcaccaacttaatggccggcgacagggtcattgtgtccggcgaggaacgctccctattcgcactctcacgtgggtatgtaaaagaaatcaatatgactacagtcacatgcctgctcgataggaatctgagcgtcttgcctgagtcaacgctgttccgtctggaccaggaggagaaaaactgtgacattgataccccactgggaaatttgagtaaactgatggaaaatacatttgtctctaaaaagctgagagatctgatcatcgactttagagagccccagtttatctcttacctgtccagtgtattaccccacgatgcaaaggatacagtcgcttgtattcttaagggcttgaacaagccccagcgacaggctatgaaaaaggtgcttctgtctaaagactacactctgattgtaggcatgccaggcacaggaaagaccaccacaatttgcaccctggtgcgaatcctgtacgcatgcgggttttcagtgctcctcacttcctacacccacagcgccgtggacaacattcttttgaaactggctaagtttaaaattggtttcctaaggctgggccagattcagaaggtacaccctgccatacagcagttcaccgagcaagagatttgccggtctaagtcaataaagtcgctggctctgctggaggaactgtacaacagtcagctgatcgtcgcgaccacttgtatgggaatcaaccaccccattttctctcgcaaaattttcgatttttgcatcgtggacgaagcaagccaaatttcccagcctatctgcctaggacccctattttttagtcggagattcgttcttgttggagatcaccagcagttgcctcctctggtgctgaacagggaggccagagccttgggaatgtccgagagcctgtttaaacgactagaacagaacaagtcagccgtagtgcagctgaccgtacagtacagaatgaactcgaaaattatgtctctttctaacaaactcacctacgagggcaagctcgagtgtggttccgataaggtcgctaatgccgtgattaacctgcgccattttaaggatgtgaaacttgaacttgagttttacgcagactacagcgataatccatggctgatgggagtgttcgagccaaacaaccccgtttgtttcctcaacaccgataaggtgccagcccccgaacaggtggagaagggaggcgtcagcaatgtgaccgaagccaaactcatcgtcttcctgaccagcatattcgttaaagcaggatgttcccctagcgacattggcatcatcgccccgtatcggcagcagctcaagatcattaacgatttgttagctcgctcaatcgggatggtggaagtgaatacagtcgataagtaccaggggcgagacaagagcatcgtgcttgtttcttttgttcgaagcaataaggacggaacagtgggcgaattgctgaaagactggaggcggctgaacgtggccatcacccgcgctaagcataagcttattcttcttgggtgcgtgccctccctaaattgctatcctccgcttgaaaagctgctgaatcacctgaattctgagaagcttattatcgatctaccgagtcgtgaacacgagagcttatgccacatcttaggtgattttcagcgggagtag

SEQ ID NO: 291310 - DNA, 3441 bp, Artificial Sequence
  derived and/or modified sequence
atgaaaacgccttgcataccatcaccaaagcaggggtcaaagggcagaggccaatcaccagccgctcaagttcgaggcccaacgtggaatgcccctgctcgcgaaggacgacccggtgctgggcatctgggtcacctgcgggtgggcgcttgtgcaagaggcgctcaggcccgagcatttttcccgttcttgagtttcctttgttatcctaggtttcggtgcttgttctgccttcagttcgctattcctgcctcgaggatggagcaacttaatgaacttgaactcctgatggagaagagcttttgggaggaagctgagcttcccgctgagctctttcagaaaaaagtggttgcctcttttccaaggacagtgctgagcacaggaatggacaaccgttaccttgtacttgcagttaacaccgtccagaataaagaaggcaactgtgagaagcgactggtcataaccgcaagtcagtcactggagaataaggagctgtgtattctacgtaatgattggtgctcagtgcccgtcgagcctggggatattattcacctggagggggactgtacctctgacacctggatcattgataaggatttcgggtatctaatcctgtatcctgacatgctcatcagcggaacctccatcgcgtcgtcaattaggtgtatgcgcagggccgtgctttcggagacctttagaagcagcgatccagcgacccggcagatgctaatcgggactgtgctgcacgaggtgttccagaaagccatcaataacagttttgcccctgagaagctccaggagctcgcttttcagaccatacaggagattcgccaccttaaagagatgtatagactgaacctcagccaggacgagatcaaacaagaagtggaggactatctcccttctttttgcaagtgggcaggcgactttatgcacaagaatacctccacggattttccccagatgcaactgagcctcccatccgataatagcaaggataatagtacctgtaatattgaggtagtcaagcccatggacattgaggagagcatctggagccccagatttggtctgaaggggaagatcgatgtcaccgtcggtgtcaagattcaccggggttacaaaaccaagtataaaatcatgccattagaactgaagacaggaaaagagtctaattctattgagcatcggagccaagtcgtgctttatactctgttaagtcaggaaagacgtgccgatccagaggcaggcctgttattatacctgaagacaggccaaatgtaccccgtaccggcaaaccacctggacaaacgggagttactaaaactccggaatcagatggcgttttccctctttcataggattagcaagtctgcaacccggcaaaaaacccagttggcatctttgcctcagattattgaggaggagaaaacctgtaaatattgctctcaaataggtaattgtgcgctgtactcacgtgccgtcgagcagcagatggactgttccagcgtgcccatcgtaatgctgccgaagatagaggaagaaacacaacatctgaagcagacacatctggaatattttagtctttggtgcctgatgttgactctggagagccagagtaaagataataagaagaaccatcaaaacatctggctcatgcctgcctctgaaatggaaaagtcaggctcatgcattggaaacttaattagaatggagcatgttaagatcgtctgcgatggacagtaccttcacaacttccagtgtaagcacggtgcaatccccgtcacaaacctcatggctggcgacagagtgattgtgtctggtgaggaacgttccctttttgctctttcccgcggttatgttaaggagatcaatatgaccacggtgacatgtctgcttgacagaaatctgagcgtactacccgagagcacactgtttagactcgatcaggaggaaaagaactgtgacatcgacacccccttaggcaatcttagtaaacttatggagaatacctttgtctctaaaaaactacgtgacctaataatcgactttcgcgaacctcagtttatcagctatctctcctccgtgctgccccacgacgcaaaagataccgttgcatgcatcctgaaggggttaaacaagccacagcgccaggctatgaagaaggttctgctttctaaagactataccctgattgtcgggatgcccggaacaggaaaaacaaccactatctgcacactcgtccggatcctctacgcttgtgggttttccgtactattgactagctatactcacagtgcagtggataacatcctactgaaacttgccaagtttaaaattgggtttttgcggctcggccagatccaaaaggtgcacccggcaatccagcaattcaccgagcaggaaatctgccggagcaagtccattaaatccctggcactcctggaggaactgtacaattcccagttgattgtggcaacgacctgtatggggataaatcatccaatcttctctcgaaagatcttcgatttttgtatcgttgacgaagcgtcccagatctcccagccaatctgtctgggtccattattcttttcccgcagatttgtgctcgtgggcgaccatcagcagctgccccctctggtcctgaatcgcgaggctcgagctttgggcatgagtgagagcctattcaaaagactcgagcagaataagagcgctgtggtgcaacttacagtgcagtaccgcatgaactcaaagatcatgagcctgtcgaacaaactgacttacgagggcaaactcgagtgtggatccgataaagtagcaaacgcagtgatcaatctccgccatttcaaggacgtgaaactggagctcgaattttatgctgattactcagacaacccttggttaatgggggtcttcgagccaaacaaccccgtttgctttctgaataccgataaagtgccggcaccagagcaggttgagaaggggggagtgagtaatgtcacagaggctaaattaatagtgttcttgacttcaatcttcgtgaaagcagggtgttcgccatcagacattggcattatcgccccatatcggcagcagctgaagatcataaacgatctcctggcgcgtagtataggcatggtcgaggtcaacaccgtagataaataccagggtagagacaagagcattgtcctggtgagctttgttcggtctaacaaggacggcaccgtgggggagcttctgaaggactggagacgccttaatgtcgctataactcgcgcaaagcataagcttattctgctcggatgcgtgccaagcctcaactgttaccctcctctggagaaattgttgaaccatctgaactcagaaaaactcattatcgaccttccatcacgcgaacacgagtccctctgtcatattttaggggacttccaaagggaatag

SEQ ID NO: 291311 - DNA, 3441 bp, Artificial Sequence
  derived and/or modified sequence
atgaagaccccctgcatccccagccccaagcagggcagcaagggcagaggccagagccccgccgcccaggtgagaggccccacctggaacgcccccgccagagagggcagacccggcgccggccacctgggccacctgagagtgggcgcctgcgccagaggcgcccaggccagagccttcttccccttcctgagcttcctgtgctaccccagattcagatgcctgttctgcctgcagttcgccatccccgccagcagaatggagcagctgaacgagctggagctgctgatggagaagagcttctgggaggaggccgagctgcccgccgagctgttccagaagaaggtggtggccagcttccccagaaccgtgctgagcaccggcatggacaacagatacctggtgctggccgtgaacaccgtgcagaacaaggagggcaactgcgagaagagactggtgatcaccgccagccagagcctggagaacaaggagctgtgcatcctgagaaacgactggtgcagcgtgcccgtggagcccggcgacatcatccacctggagggcgactgcaccagcgacacctggatcatcgacaaggacttcggctacctgatcctgtaccccgacatgctgatcagcggcaccagcatcgccagcagcatcagatgcatgagaagagccgtgctgagcgagaccttcagaagcagcgaccccgccaccagacagatgctgatcggcaccgtgctgcacgaggtgttccagaaggccatcaacaacagcttcgcccccgagaagctgcaggagctggccttccagaccatccaggagatcagacacctgaaggagatgtacagactgaacctgagccaggacgagatcaagcaggaggtggaggactacctgcccagcttctgcaagtgggccggcgacttcatgcacaagaacaccagcaccgacttcccccagatgcagctgagcctgcccagcgacaacagcaaggacaacagcacctgcaacatcgaggtggtgaagcccatggacatcgaggagagcatctggagccccagattcggcctgaagggcaagatcgacgtgaccgtgggcgtgaagatccacagaggctacaagaccaagtacaagatcatgcccctggagctgaagaccggcaaggagagcaacagcatcgagcacagaagccaggtggtgctgtacaccctgctgagccaggagagaagagccgaccccgaggccggcctgctgctgtacctgaagaccggccagatgtaccccgtgcccgccaaccacctggacaagagagagctgctgaagctgagaaaccagatggccttcagcctgttccacagaatcagcaagagcgccaccagacagaagacccagctggccagcctgccccagatcatcgaggaggagaagacctgcaagtactgcagccagatcggcaactgcgccctgtacagcagagccgtggagcagcagatggactgcagcagcgtgcccatcgtgatgctgcccaagatcgaggaggagacccagcacctgaagcagacccacctggagtacttcagcctgtggtgcctgatgctgaccctggagagccagagcaaggacaacaagaagaaccaccagaacatctggctgatgcccgccagcgagatggagaagagcggcagctgcatcggcaacctgatcagaatggagcacgtgaagatcgtgtgcgacggccagtacctgcacaacttccagtgcaagcacggcgccatccccgtgaccaacctgatggccggcgacagagtgatcgtgagcggcgaggagagaagcctgttcgccctgagcagaggctacgtgaaggagatcaacatgaccaccgtgacctgcctgctggacagaaacctgagcgtgctgcccgagagcaccctgttcagactggaccaggaggagaagaactgcgacatcgacacccccctgggcaacctgagcaagctgatggagaacaccttcgtgagcaagaagctgagagacctgatcatcgacttcagagagccccagttcatcagctacctgagcagcgtgctgccccacgacgccaaggacaccgtggcctgcatcctgaagggcctgaacaagccccagagacaggccatgaagaaggtgctgctgagcaaggactacaccctgatcgtgggcatgcccggcaccggcaagaccaccaccatctgcaccctggtgagaatcctgtacgcctgcggcttcagcgtgctgctgaccagctacacccacagcgccgtggacaacatcctgctgaagctggccaagttcaagatcggcttcctgagactgggccagatccagaaggtgcaccccgccatccagcagttcaccgagcaggagatctgcagaagcaagagcatcaagagcctggccctgctggaggagctgtacaacagccagctgatcgtggccaccacctgcatgggcatcaaccaccccatcttcagcagaaagatcttcgacttctgcatcgtggacgaggccagccagatcagccagcccatctgcctgggccccctgttcttcagcagaagattcgtgctggtgggcgaccaccagcagctgccccccctggtgctgaacagagaggccagagccctgggcatgagcgagagcctgttcaagagactggagcagaacaagagcgccgtggtgcagctgaccgtgcagtacagaatgaacagcaagatcatgagcctgagcaacaagctgacctacgagggcaagctggagtgcggcagcgacaaggtggccaacgccgtgatcaacctgagacacttcaaggacgtgaagctggagctggagttctacgccgactacagcgacaacccctggctgatgggcgtgttcgagcccaacaaccccgtgtgcttcctgaacaccgacaaggtgcccgcccccgagcaggtggagaagggcggcgtgagcaacgtgaccgaggccaagctgatcgtgttcctgaccagcatcttcgtgaaggccggctgcagccccagcgacatcggcatcatcgccccctacagacagcagctgaagatcatcaacgacctgctggccagaagcatcggcatggtggaggtgaacaccgtggacaagtaccagggcagagacaagagcatcgtgctggtgagcttcgtgagaagcaacaaggacggcaccgtgggcgagctgctgaaggactggagaagactgaacgtggccatcaccagagccaagcacaagctgatcctgctgggctgcgtgcccagcctgaactgctacccccccctggagaagctgctgaaccacctgaacagcgagaagctgatcatcgacctgcccagcagagagcacgagagcctgtgccacatcctgggcgacttccagagagagtag

SEQ ID NO: 291312 - DNA, 4208 bp, Artificial Sequence
  derived and/or modified sequence
ccccggttccgctgtcttttctgtctacagtttgcgatccccgcgtccaggatggagcagctgaacgaactggagctgctgatggagaagagtttttgggaggaggcggagctgccggcggagctatttcagaagaaagtggtagcttcctttccaagaacagttctgagcacaggaatggataaccggtacctggtgttggcagtcaatactgtacagaacaaagagggaaactgtgaaaagcgcctggtcatcactgcttcacagtcactagaaaataaagaactatgcatccttaggaatgactggtgttctgttccagtagagccaggagatatcattcatttggagggagactgcacatctgacacttggataatagataaagattttggatatttgattctgtatccagacatgctgatttctggcaccagcatagccagtagtattcgatgtatgagaagagctgtcctgagtgaaacttttaggagctctgatccagccacacgccaaatgctaattggtacggttctccatgaggtgtttcaaaaagccataaataatagctttgccccagaaaagctacaagaacttgcttttcaaacaattcaagaaataagacatttgaaggaaatgtaccgcttaaatctaagtcaagatgaaataaaacaagaagtagaggactatcttccttcgttttgtaaatgggcaggagatttcatgcataaaaacacttcgactgacttccctcagatgcagctctctctgccaagtgataatagtaaggataattcaacatgtaacattgaagtcgtgaaaccaatggatattgaagaaagcatttggtcccctaggtttggattgaaaggcaaaatagatgttacagttggtgtgaaaatacatcgagggtataaaacaaaatacaagataatgccgctggaacttaaaactggcaaagaatcaaattctattgaacaccgtagtcaggttgttctgtacactctactaagccaagagagaagagctgatccagaggctggcttgcttctctacctcaagactggtcagatgtaccctgtgcctgccaaccatctagataaaagagaattattaaagctaagaaaccagatggcattctcattgtttcaccgtattagcaaatctgctactagacagaagacacagcttgcttctttgccacaaataattgaggaagagaaaacttgtaaatattgttcacaaattggcaattgtgctctttatagcagagcagttgaacaacagatggattgtagttcagtcccaattgtgatgctgcccaaaatagaagaagaaacccagcatctgaagcaaacacacttagaatatttcagcctttggtgtctaatgttaaccctggagtcacaatcgaaggataataaaaagaatcaccaaaatatctggctaatgcctgcttcggaaatggagaagagtggcagttgcattggaaacctgattagaatggaacatgtaaagatagtttgtgatgggcaatatttacataatttccaatgtaaacatggtgccatacctgtcacaaatctaatggcaggtgacagagttattgtaagtggagaagaaaggtcactgtttgctttgtctagaggatatgtgaaggagattaacatgacaacagtaacttgtttattagacagaaacttgtcggtccttccagaatcaactttgttcagattagaccaagaagaaaaaaattgtgatatagataccccattaggaaatctttccaaattgatggaaaacacgtttgtcagcaaaaaacttcgagatttaattattgactttcgtgaacctcagtttatatcctaccttagttctgttcttccacatgatgcaaaggatacagttgcctgcattctaaagggtttgaataagcctcagaggcaagcgatgaaaaaggtacttctttcaaaagactacacactcatcgtgggtatgcctgggacaggaaaaacaactacgatatgtactctcgtaagaattctctacgcctgtggttttagcgttttgttgaccagctatacacactctgctgttgacaatattcttttgaagttagccaagtttaaaataggatttttgcgtttgggtcagattcagaaggttcatccagctatccagcaatttacagagcaagaaatttgcagatcaaagtccattaaatccttagctcttctagaagaactctacaatagtcaacttatagttgcaacaacatgtatgggaataaaccatccaatattttcccgtaaaatttttgatttttgtattgtggatgaagcctctcaaattagccaaccaatttgtctgggccccctttttttttcacggagatttgtgttagtgggggaccatcagcagcttcctcccctggtgctaaaccgtgaagcaagagctcttggcatgagtgaaagcttattcaagaggctggagcagaataagagtgctgttgtacagttaaccgtgcagtacagaatgaacagtaaaattatgtccttaagtaataagctgacctatgagggcaagctggagtgtggatcagacaaagtggccaatgcagtgataaacctacgtcactttaaagatgtgaagctggaactggaattttatgctgactattctgataatccttggttgatgggagtatttgaacccaacaatcctgtttgtttccttaatacagacaaggttccagcgccagaacaagttgaaaaaggtggtgtgagcaatgtaacagaagccaaactcatagttttcctaacctccatttttgttaaggctggatgcagtccctctgatattggtattattgcaccgtacaggcagcaattaaagatcatcaatgatttattggcacgttctattgggatggtcgaagttaatacagtagacaaataccaaggaagggacaaaagtattgtcctagtatcttttgttagaagtaataaggatggaactgttggtgaactcttgaaagattggcgacgtcttaatgttgctataaccagagccaaacataaactgattcttctggggtgtgtgccctcactaaattgctatcctcctttggagaagctgcttaatcatttaaactcagaaaaattaatcattgatcttccatcaagagaacatgaaagtctttgccacatattgggtgactttcaaagagaataaaacactatttcccttgccttttcatactagggcagtatctcctctagctagtgcccatacagaaaattctatcaccatacaaaatttaatgcagtatttatgttttaaagcacaggtgtaccgaaaactgtgaaaagtctgaatttatgggttctatgcatgcatttttgcctaacctagagaaagagtttgataaatttttaccagctttgaagatggattaacttttgactttgagctttaaacttttaagtcagacatttcaggactaatttgattttgtagatatcattgtaagaactttatttgaaagactgaataaagggatttgatttgttttcatcatttaagcacagtcttgtgatgatgagaacataagtgtgattcttttctgtattttgaggtccctaatccaaagcccattttgctaggattttttctgctatcagatgtgttttcactctaaacctagtcttttatgacatgaattgattacttcctgttaattttctatcctcccttactatcctccttttttgttttcagtattcagtatttcagtattctagagtagattttgatataaaagaaaataattcttacatcatcttttgcaacaaattttgttttctgaattgataataaatttaaaaagttgattcctattttcacatatgttcatatgcccctatgtttgggggtatcactcagttttcccttttttgtgtaaagatgttttgtaaaacaaaattgtctcaaagtgattatattatatatataaaaagtaacagattttaacaaaggttaaaagattcttggggtaacagattcttctggggcttggaaatcttccatttctcttgagggttttttttaatgagtgttaaatatgttaaaatttttatttctacctcatgtgtttttttaaattattacttgaagttttttatttaataaattttttctactaatgg

SEQ ID NO: 291313 - DNA, 4416 bp, Artificial Sequence
  derived and/or modified sequence
atgaagactccctgtattcccagtcctaagcaagggagcaaaggcaggggacagagccctgctgctcaggtgaggggccccacgtggaacgcgccggcgcgggaggggcggcctggcgcaggtcatttgggacatctgcgggttggcgcatgcgcgcgaggtgcgcaggctcgcgcctttttcccttttctaagctttctgtgttacccccggttccgctgtcttttctgtctacagtttgcgatccccgcgtccaggatggagcagctgaacgaactggagctgctgatggagaagagtttttgggaggaggcggagctgccggcggagctatttcagaagaaagtggtagcttcctttccaagaacagttctgagcacaggaatggataaccggtacctggtgttggcagtcaatactgtacagaacaaagagggaaactgtgaaaagcgcctggtcatcactgcttcacagtcactagaaaataaagaactatgcatccttaggaatgactggtgttctgttccagtagagccaggagatatcattcatttggagggagactgcacatctgacacttggataatagataaagattttggatatttgattctgtatccagacatgctgatttctggcaccagcatagccagtagtattcgatgtatgagaagagctgtcctgagtgaaacttttaggagctctgatccagccacacgccaaatgctaattggtacggttctccatgaggtgtttcaaaaagccataaataatagctttgccccagaaaagctacaagaacttgcttttcaaacaattcaagaaataagacatttgaaggaaatgtaccgcttaaatctaagtcaagatgaaataaaacaagaagtagaggactatcttccttcgttttgtaaatgggcaggagatttcatgcataaaaacacttcgactgacttccctcagatgcagctctctctgccaagtgataatagtaaggataattcaacatgtaacattgaagtcgtgaaaccaatggatattgaagaaagcatttggtcccctaggtttggattgaaaggcaaaatagatgttacagttggtgtgaaaatacatcgagggtataaaacaaaatacaagataatgccgctggaacttaaaactggcaaagaatcaaattctattgaacaccgtagtcaggttgttctgtacactctactaagccaagagagaagagctgatccagaggctggcttgcttctctacctcaagactggtcagatgtaccctgtgcctgccaaccatctagataaaagagaattattaaagctaagaaaccagatggcattctcattgtttcaccgtattagcaaatctgctactagacagaagacacagcttgcttctttgccacaaataattgaggaagagaaaacttgtaaatattgttcacaaattggcaattgtgctctttatagcagagcagttgaacaacagatggattgtagttcagtcccaattgtgatgctgcccaaaatagaagaagaaacccagcatctgaagcaaacacacttagaatatttcagcctttggtgtctaatgttaaccctggagtcacaatcgaaggataataaaaagaatcaccaaaatatctggctaatgcctgcttcggaaatggagaagagtggcagttgcattggaaacctgattagaatggaacatgtaaagatagtttgtgatgggcaatatttacataatttccaatgtaaacatggtgccatacctgtcacaaatctaatggcaggtgacagagttattgtaagtggagaagaaaggtcactgtttgctttgtctagaggatatgtgaaggagattaacatgacaacagtaacttgtttattagacagaaacttgtcggtccttccagaatcaactttgttcagattagaccaagaagaaaaaaattgtgatatagataccccattaggaaatctttccaaattgatggaaaacacgtttgtcagcaaaaaacttcgagatttaattattgactttcgtgaacctcagtttatatcctaccttagttctgttcttccacatgatgcaaaggatacagttgcctgcattctaaagggtttgaataagcctcagaggcaagcgatgaaaaaggtacttctttcaaaagactacacactcatcgtgggtatgcctgggacaggaaaaacaactacgatatgtactctcgtaagaattctctacgcctgtggttttagcgttttgttgaccagctatacacactctgctgttgacaatattcttttgaagttagccaagtttaaaataggatttttgcgtttgggtcagattcagaaggttcatccagctatccagcaatttacagagcaagaaatttgcagatcaaagtccattaaatccttagctcttctagaagaactctacaatagtcaacttatagttgcaacaacatgtatgggaataaaccatccaatattttcccgtaaaatttttgatttttgtattgtggatgaagcctctcaaattagccaaccaatttgtctgggccccctttttttttcacggagatttgtgttagtgggggaccatcagcagcttcctcccctggtgctaaaccgtgaagcaagagctcttggcatgagtgaaagcttattcaagaggctggagcagaataagagtgctgttgtacagttaaccgtgcagtacagaatgaacagtaaaattatgtccttaagtaataagctgacctatgagggcaagctggagtgtggatcagacaaagtggccaatgcagtgataaacctacgtcactttaaagatgtgaagctggaactggaattttatgctgactattctgataatccttggttgatgggagtatttgaacccaacaatcctgtttgtttccttaatacagacaaggttccagcgccagaacaagttgaaaaaggtggtgtgagcaatgtaacagaagccaaactcatagttttcctaacctccatttttgttaaggctggatgcagtccctctgatattggtattattgcaccgtacaggcagcaattaaagatcatcaatgatttattggcacgttctattgggatggtcgaagttaatacagtagacaaataccaaggaagggacaaaagtattgtcctagtatcttttgttagaagtaataaggatggaactgttggtgaactcttgaaagattggcgacgtcttaatgttgctataaccagagccaaacataaactgattcttctggggtgtgtgccctcactaaattgctatcctcctttggagaagctgcttaatcatttaaactcagaaaaattaatcattgatcttccatcaagagaacatgaaagtctttgccacatattgggtgactttcaaagagaataaaacactatttcccttgccttttcatactagggcagtatctcctctagctagtgcccatacagaaaattctatcaccatacaaaatttaatgcagtatttatgttttaaagcacaggtgtaccgaaaactgtgaaaagtctgaatttatgggttctatgcatgcatttttgcctaacctagagaaagagtttgataaatttttaccagctttgaagatggattaacttttgactttgagctttaaacttttaagtcagacatttcaggactaatttgattttgtagatatcattgtaagaactttatttgaaagactgaataaagggatttgatttgttttcatcatttaagcacagtcttgtgatgatgagaacataagtgtgattcttttctgtattttgaggtccctaatccaaagcccattttgctaggattttttctgctatcagatgtgttttcactctaaacctagtcttttatgacatgaattgattacttcctgttaattttctatcctcccttactatcctccttttttgttttcagtattcagtatttcagtattctagagtagattttgatataaaagaaaataattcttacatcatcttttgcaacaaattttgttttctgaattgataataaatttaaaaagttgattcctattttcacatatgttcatatgcccctatgtttgggggtatcactcagttttcccttttttgtgtaaagatgttttgtaaaacaaaattgtctcaaagtgattatattatatatataaaaagtaacagattttaacaaaggttaaaagattcttggggtaacagattcttctggggcttggaaatcttccatttctcttgagggttttttttaatgagtgttaaatatgttaaaatttttatttctacctcatgtgtttttttaaattattacttgaagttttttatttaataaattttttctactaatgga

SEQ ID NO: 291314 - DNA, 1685 bp, Artificial Sequence
  derived and/or modified sequence
gagattgcggcgatgtcgcaggggacgactccctgggggccgaccccggcgggaaccacgcccgaatcggaggtacaccgcccctttcccttcccggtaccggtgccggtaccagagacctccgagcgctcattcccagtccgcggagtctgcggccaagccaaatccggtctccgaagaggcgccgcacgtctggccccggctgaaaactgagaatatttttgaatttcaaaaaccttgaaacttgtttaaaggatgccattctactagattattatgtatctggatttttgtgggctagaggaatggatttctctattattcagtattcaaaatttatgactttactagctatgtcacttcaaaatcttaaaacactacatatgtccttagaggaaagcataaaatggcttggagaagttatggctgaaataggaccaacacattcgcaaaagagtgaggactggaatatctttgatgtaaaacaagccaatgctatcattgattacttaaaaatcagcttatttcaacactacaagctatacgagtttatgttctactctgccagggaagaaattgtgataggaactgagcaagtgatagaggttgtcaagtctgcatgtggccctttcccaaatcctctggaagaaggaatctcatttgatatttattcaacattcatagagccccccacaatattggatacggaaatgaagaggttggatcaagaacaaggccctgaggagtctcagccagaaactgacacctcagacatggatcctttagttggttttaccattgaagatgtaaaatcagtgctggatcaagtcacagatgacattttaatcggcattcagaccgagataaacgaaaaactgcaaatacaggaagaggcctttaatgcacgaatagaaaaattgaaaaaggcctaaggacttggtacaaggagagtgatgctaaacttcacagaaacaaacaaaaccagccagaataacagactctctggagcgtcgtgtctccatcacttagttgtgaaaggaaaaccaagccccactttttattttcctaagtaattagaaaagtattggtcccaattttgctatctcccatcccataacagcctctgaatttattgcaccaagtgtaatgagaacattttgtatacaagagtttgaaaaattatatataaaaatacaattacttttatgatagtcctttgacgttttgactaataaatcctattcatcttcaaggagaatgaagtcaactttttaaataaccagaaataaagaaagatgataataacttcatccattttgacccaaacggactgccacgttactggaacactgtgaaaacataccagtaccacactattgaggataaaatttgttaaacaatagcaattcaaatgcatatatgaggttttttttttttttactgaaatcatttggttttcttatttaaacgtttcagtgtgaaaccaattttctgaaattatataatgcagtttgaagcactttaatttattctgtactgtatttgttatttctaatcttgttactctcccaggagaatacatgacctatataaaaagaagcaatgtataaatggttattaaagaccaacctatatatagattgtaaaaatcttaaatacaaatcaaactcatagagttcccagaa

SEQ ID NO: 291315 - DNA, 253 bp, Artificial Sequence
  derived and/or modified sequence
gggccgaccccggcgggaaccacgcccgaatcggagcactacatatgtccttagaggaaagcataaaatggcttggagaagttatggctgaaataggaccaacacattcgcaaaagagtgaggactggaatatctttgatgtaaaacaagccaatgctatcattgattacttaaaaatcagcttatttcaacactacaagctatacgagtttatgttctactctgccagggaagaaattgtgataggaactga

SEQ ID NO: 291316 - DNA, 255 bp, Artificial Sequence
  derived and/or modified sequence
tgagccgaccccggcggcaaccacgccagaatcggcgccctgcacatgagcctggaggagagcatcaagtggctgggcgaggtgatggccgagatcggccccacccacagccagaagagcgaggactggaacatcttcgacgtgaagcaggccaacgccatcatcgactacctgaagatcagcctgttccagcactacaagctgtacgagttcatgttctacagcgccagagaggagatcgtgatcggcacctag

SEQ ID NO: 291317 - DNA, 255 bp, Artificial Sequence
  derived and/or modified sequence
tgagctgatcctgggggcaatcatgctagaatcggagccttacacatgtctttagaggagtctataaaatggctgggggaggttatggccgagatcggtcctacgcactctcaaaagtcagaagattggaacatcttcgatgtaaagcaagcaaatgccataatcgactacctgaaaatctctctgttccagcactacaagctatatgagtttatgttctatagcgccagggaagagattgtcataggcacatag

SEQ ID NO: 291318 - DNA, 255 bp, Artificial Sequence
  derived and/or modified sequence
tgagctgaccccggcggcaaccacgccagaattggagccctgcacatgagcctggaggagagcatcaagtggctgggggaggtgatggccgagatcggccccacccacagccagaagtctgaggactggaacatctttgatgtgaagcaggccaatgccatcatcgactacctgaagatcagcctcttccagcactacaagctgtatgagttcatgttctacagcgcccgggaggagatcgtcatcggcacctag

SEQ ID NO: 291319 - DNA, 255 bp, Artificial Sequence
  derived and/or modified sequence
tgagccgaccccggcggcaaccacgcccggatcggcgccctgcacatgtcattagaggagagcataaaatggctaggtgaggtcatggccgaaataggacctacacatagtcagaagtctgaagactggaacattttcgatgtcaagcaggctaacgccattatcgactatttgaaaattagccttttccagcattataagctgtatgaatttatgttctatagcgccagagaggagatcgtcatcgggacatag

SEQ ID NO: 291320 - DNA, 255 bp, Artificial Sequence
  derived and/or modified sequence
tgagcggacccgggaggcaaccacgcccgtataggagcactccatatgagtctcgaggagtctattaagtggctaggggaagtcatggccgagatcgggccaacccactcccagaagagcgaggactggaacattttcgacgttaagcaggctaacgccatcattgattacctgaaaattagtctgttccaacactataaactgtacgagtttatgttttacagtgcaagagaagagatagtgatcggtacatag

SEQ ID NO: 291321 - protein, 163 aa, Artificial Sequence
  derived and/or modified sequence
MEGPSLRGPALRLAGLPTQQDCNIQEKIDLEIRMREGIWKLLSLSTQKDQVLHAVKNLMVCNARLMAYTSELQKLEEQIANQTGRCDVKFESKERTACKGKIAISDIRIPLMWKDSDHFSNKERSRRYAIFCLFKMGANVFDTDVVNVDKTITDICFENVTIL

SEQ ID NO: 291322 - DNA, 3061 bp, Artificial Sequence
  derived and/or modified sequence
gagcgggcgagggagcgcgcgcggccgccacaaagctcgggcgccgcggggctgcatgcggcgtacctggcccggcgcggcgactgctctccgggctggcgggggccggccgcgagccccgggggccccgaggccgcagcttgcctgcgcgctctgagccttcgcaactcgcgagcaaagtttggtggaggcaacgccaagcctgagtcctttcttcctctcgttccccaaatccgagggcagcccgcgggcgtcatgcccgcgctcctccgcagcctggggtacgcgtgaagcccgggaggcttggcgccggcgaagacccaaggaccactcttctgcgtttggagttgctccccgcaaccccgggctcgtcgctttctccatcccgacccacgcggggcgcggggacaacacaggtcgcggaggagcgttgccattcaagtgactgcagcagcagcggcagcgcctcggttcctgagcccaccgcaggctgaaggcattgcgcgtagtccatgcccgtagaggaagtgtgcagatgggattaacgtccacatggagatatggaagaggaccggggattggtaccgtaaccatggtcagctggggtcgtttcatctgcctggtcgtggtcaccatggcaaccttgtccctggcccggccctccttcagtttagttgaggataccacattagagccagaagagccaccaaccaaataccaaatctctcaaccagaagtgtacgtggctgcgccaggggagtcgctagaggtgcgctgcctgttgaaagatgccgccgtgatcagttggactaaggatggggtgcacttggggcccaacaataggacagtgcttattggggagtacttgcagataaagggcgccacgcctagagactccggcctctatgcttgtactgccagtaggactgtagacagtgaaacttggtacttcatggtgaatgtcacagatgccatctcatccggagatgatgaggatgacaccgatggtgcggaagattttgtcagtgagaacagtaacaacaagagagcaccatactggaccaacacagaaaagatggaaaagcggctccatgctgtgcctgcggccaacactgtcaagtttcgctgcccagccggggggaacccaatgccaaccatgcggtggctgaaaaacgggaaggagtttaagcaggagcatcgcattggaggctacaaggtacgaaaccagcactggagcctcattatggaaagtgtggtcccatctgacaagggaaattatacctgtgtagtggagaatgaatacgggtccatcaatcacacgtaccacctggatgttgtggagcgatcgcctcaccggcccatcctccaagccggactgccggcaaatgcctccacagtggtcggaggagacgtagagtttgtctgcaaggtttacagtgatgcccagccccacatccagtggatcaagcacgtggaaaagaacggcagtaaatacgggcccgacgggctgccctacctcaaggttctcaagcactcggggataaatagttccaatgcagaagtgctggctctgttcaatgtgaccgaggcggatgctggggaatatatatgtaaggtctccaattatatagggcaggccaaccagtctgcctggctcactgtcctgccaaaacagcaagcgcctggaagagaaaaggagattacagcttccccagactacctggagatagccatttactgcataggggtcttcttaatcgcctgtatggtggtaacagtcatcctgtgccgaatgaagaacacgaccaagaagccagacttcagcagccagccggctgtgcacaagctgaccaaacgtatccccctgcggagacaggtaacagtttcggctgagtccagctcctccatgaactccaacaccccgctggtgaggataacaacacgcctctcttcaacggcagacacccccatgctggcaggggtctccgagtatgaacttccagaggacccaaaatgggagtttccaagagataagctgacactgggcaagcccctgggagaaggttgctttgggcaagtggtcatggcggaagcagtgggaattgacaaagacaagcccaaggaggcggtcaccgtggccgtgaagatgttgaaagatgatgccacagagaaagacctttctgatctggtgtcagagatggagatgatgaagatgattgggaaacacaagaatatcataaatcttcttggagcctgcacacaggatgggcctctctatgtcatagttgagtatgcctctaaaggcaacctccgagaatacctccgagcccggaggccacccgggatggagtactcctatgacattaaccgtgttcctgaggagcagatgaccttcaaggacttggtgtcatgcacctaccagctggccagaggcatggagtacttggcttcccaaaaatgtattcatcgagatttagcagccagaaatgttttggtaacagaaaacaatgtgatgaaaatagcagactttggactcgccagagatatcaacaatatagactattacaaaaagaccaccaatgggcggcttccagtcaagtggatggctccagaagccctgtttgatagagtatacactcatcagagtgatgtctggtccttcggggtgttaatgtgggagatcttcactttagggggctcgccctacccagggattcccgtggaggaactttttaagctgctgaaggaaggacacagaatggataagccagccaactgcaccaacgaactgtacatgatgatgagggactgttggcatgcagtgccctcccagagaccaacgttcaagcagttggtagaagacttggatcgaattctcactctcacaaccaatgaggaatacttggacctcagccaacctctcgaacagtattcacctagttaccctgacacaagaagttcttgttcttcaggagatgattctgttttttctccagaccccatgccttacgaaccatgccttcctcagtatccacacataaacggcagtgttaaaacatga

SEQ ID NO: 291323 - protein, 819 aa, Artificial Sequence
  derived and/or modified sequence
MVSWGRFICLVVVTMATLSLARPSFSLVEDTTLEPEEPPTKYQISQPEVYVAAPGESLEVRCLLKDAAVISWTKDGVHLGPNNRTVLIGEYLQIKGATPRDSGLYACTASRTVDSETWYFMVNVTDAISSGDDEDDTDGAEDFVSENSNNKRAPYWTNTEKMEKRLHAVPAANTVKFRCPAGGNPMPTMRWLKNGKEFKQEHRIGGYKVRNQHWSLIMESVVPSDKGNYTCVVENEYGSINHTYHLDVVERSPHRPILQAGLPANASTVVGGDVEFVCKVYSDAQPHIQWIKHVEKNGSKYGPDGLPYLKVLKAAGVNTTDKEIEVLYIRNVTFEDAGEYTCLAGNSIGISFHSAWLTVLPAPGREKEITASPDYLEIAIYCIGVFLIACMVVTVILCRMKNTTKKPDFSSQPAVHKLTKRIPLRRQVSAESSSSMNSNTPLVRITTRLSSTADTPMLAGVSEYELPEDPKWEFPRDKLTLGKPLGEGCFGQVVMAEAVGIDKDKPKEAVTVAVKMLKDDATEKDLSDLVSEMEMMKMIGKHKNIINLLGACTQDGPLYVIVEYASKGNLREYLRARRPPGMEYSYDINRVPEEQMTFKDLVSCTYQLARGMEYLASQKCIHRDLAARNVLVTENNVMKIADFGLARDINNIDYYKKTTNGRLPVKWMAPEALFDRVYTHQSDVWSFGVLMWEIFTLGGSPYPGIPVEELFKLLKEGHRMDKPANCTNELYMMMRDCWHAVPSQRPTFKQLVEDLDRILTLTTNEEYLDLSQPLEQYSPSYPDTRSSCSSGDDSVFSPDPMPYEPCLPQYPHINGSVKT

SEQ ID NO: 291324 - protein, 785 aa, Artificial Sequence
  derived and/or modified sequence
MVSWGRFICLVVVTMATLSLARPSFSLVEDTTLEPEEPPTKYQISQPEVYVAAPGESLEVRCLLKDAAVISWTKDGVHLGPNNRTVLIGEYLQIKGATPRDSGLYACTASRTVDSETWYFMVNVTDAISSGDDEDDTDGAEDFVSENSNNKRAPYWTNTEKMEKRLHAVPAANTVKFRCPAGGNPMPTMRWLKNGKEFKQEHRIGGYKVRNQHWSLIMESVVPSDKGNYTCVVENEYGSINHTYHLDVVERSPHRPILQAGLPANASTVVGGDVEFVCKVYSDAQPHIQWIKHVEKNGSKYGPDGLPYLKVLKAAGVNTTDKEIEVLYIRNVTFEDAGEYTCLAGNSIGISFHSAWLTVLPAPGREKEITASPDYLEIAIYCIGVFLIACMVVTVILCRMKNTTKKPDFSSQPAVHKLTKRIPLRRQVSAESSSSMNSNTPLVRITTRLSSTADTPMLAGVSEYELPEDPKWEFPRDKLTLGKPLGEGCFGQVVMAEAVGIDKDKPKEAVTVAVKMLKDDATEKDLSDLVSEMEMMKMIGKHKNIINLLGACTQDGPLYVIVEYASKGNLREYLRARRPPGMEYSYDINRVPEEQMTFKDLVSCTYQLARGMEYLASQKCIHRDLAARNVLVTENNVMKIADFGLARDINNIDYYKKTTNGRLPVKWMAPEALFDRVYTHQSDVWSFGVLMWEIFTLGGSPYPGIPVEELFKLLKEGHRMDKPANCTNELYMMMRDCWHAVPSQRPTFKQLVEDLDRILTLTTNEEYLDLSQPLEPYSPCYPDPR

SEQ ID NO: 291325 - protein, 822 aa, Artificial Sequence
  derived and/or modified sequence
MVSWGRFICLVVVTMATLSLARPSFSLVEDTTLEPEEPPTKYQISQPEVYVAAPGESLEVRCLLKDAAVISWTKDGVHLGPNNRTVLIGEYLQIKGATPRDSGLYACTASRTVDSETWYFMVNVTDAISSGDDEDDTDGAEDFVSENSNNKRAPYWTNTEKMEKRLHAVPAANTVKFRCPAGGNPMPTMRWLKNGKEFKQEHRIGGYKVRNQHWSLIMESVVPSDKGNYTCVVENEYGSINHTYHLDVVERSPHRPILQAGLPANASTVVGGDVEFVCKVYSDAQPHIQWIKHVEKNGSKYGPDGLPYLKVLKVTKAAGVNTTDKEIEVLYIRNVTFEDAGEYTCLAGNSIGISFHSAWLTVLPAPGREKEITASPDYLEIAIYCIGVFLIACMVVTVILCRMKNTTKKPDFSSQPAVHKLTKRIPLRRQVSAESSSSMNSNTPLVRITTRLSSTADTPMLAGVSEYELPEDPKWEFPRDKLTLGKPLGEGCFGQVVMAEAVGIDKDKPKEAVTVAVKMLKDDATEKDLSDLVSEMEMMKMIGKHKNIINLLGACTQDGPLYVIVEYASKGNLREYLRARRPPGMEYSYDINRVPEEQMTFKDLVSCTYQLARGMEYLASQKCIHRDLAARNVLVTENNVMKIADFGLARDINNIDYYKKTTNGRLPVKWMAPEALFDRVYTHQSDVWSFGVLMWEIFTLGGSPYPGIPVEELFKLLKEGHRMDKPANCTNELYMMMRDCWHAVPSQRPTFKQLVEDLDRILTLTTNEEYLDLSQPLEQYSPSYPDTRSSCSSGDDSVFSPDPMPYEPCLPQYPHINGSVKT

SEQ ID NO: 291326 - DNA, 2472 bp, Artificial Sequence
  derived and/or modified sequence
ggtaccgtaaccatggtcagctggggtcgtttcatctgcctggtcgtggtcaccatggcaaccttgtccctggcccggccctccttcagtttagttgaggataccacattagagccagaagagccaccaaccaaataccaaatctctcaaccagaagtgtacgtggctgcgccaggggagtcgctagaggtgcgctgcctgttgaaagatgccgccgtgatcagttggactaaggatggggtgcacttggggcccaacaataggacagtgcttattggggagtacttgcagataaagggcgccacgcctagagactccggcctctatgcttgtactgccagtaggactgtagacagtgaaacttggtacttcatggtgaatgtcacagatgccatctcatccggagatgatgaggatgacaccgatggtgcggaagattttgtcagtgagaacagtaacaacaagagagcaccatactggaccaacacagaaaagatggaaaagcggctccatgctgtgcctgcggccaacactgtcaagtttcgctgcccagccggggggaacccaatgccaaccatgcggtggctgaaaaacgggaaggagtttaagcaggagcatcgcattggaggctacaaggtacgaaaccagcactggagcctcattatggaaagtgtggtcccatctgacaagggaaattatacctgtgtagtggagaatgaatacgggtccatcaatcacacgtaccacctggatgttgtggagcgatcgcctcaccggcccatcctccaagccggactgccggcaaatgcctccacagtggtcggaggagacgtagagtttgtctgcaaggtttacagtgatgcccagccccacatccagtggatcaagcacgtggaaaagaacggcagtaaatacgggcccgacgggctgccctacctcaaggttctcaaggccgccggtgttaacaccacggacaaagagattgaggttctctatattcggaatgtaacttttgaggacgctggggaatatacgtgcttggcgggtaattctattgggatatcctttcactctgcatggttgacagttctgccagcgcctggaagagaaaaggagattacagcttccccagactacctggagatagccatttactgcataggggtcttcttaatcgcctgtatggtggtaacagtcatcctgtgccgaatgaagaacacgaccaagaagccagacttcagcagccagccggctgtgcacaagctgaccaaacgtatccccctgcggagacaggtttcggctgagtccagctcctccatgaactccaacaccccgctggtgaggataacaacacgcctctcttcaacggcagacacccccatgctggcaggggtctccgagtatgaacttccagaggacccaaaatgggagtttccaagagataagctgacactgggcaagcccctgggagaaggttgctttgggcaagtggtcatggcggaagcagtgggaattgacaaagacaagcccaaggaggcggtcaccgtggccgtgaagatgttgaaagatgatgccacagagaaagacctttctgatctggtgtcagagatggagatgatgaagatgattgggaaacacaagaatatcataaatcttcttggagcctgcacacaggatgggcctctctatgtcatagttgagtatgcctctaaaggcaacctccgagaatacctccgagcccggaggccacccgggatggagtactcctatgacattaaccgtgttcctgaggagcagatgaccttcaaggacttggtgtcatgcacctaccagctggccagaggcatggagtacttggcttcccaaaaatgtattcatcgagatttagcagccagaaatgttttggtaacagaaaacaatgtgatgaaaatagcagactttggactcgccagagatatcaacaatatagactattacaaaaagaccaccaatgggcggcttccagtcaagtggatggctccagaagccctgtttgatagagtatacactcatcagagtgatgtctggtccttcggggtgttaatgtgggagatcttcactttagggggctcgccctacccagggattcccgtggaggaactttttaagctgctgaaggaaggacacagaatggataagccagccaactgcaccaacgaactgtacatgatgatgagggactgttggcatgcagtgccctcccagagaccaacgttcaagcagttggtagaagacttggatcgaattctcactctcacaaccaatgaggaatacttggacctcagccaacctctcgaacagtattcacctagttaccctgacacaagaagttcttgttcttcaggagatgattctgttttttctccagaccccatgccttacgaaccatgccttcctcagtatccacacataaacggcagtgttaaaacatga

SEQ ID NO: 291327 - DNA, 4255 bp, Artificial Sequence
  derived and/or modified sequence
cccaaggaccactcttctgcgtttggagttgctccccgcaaccccgggctcgtcgctttctccatcccgacccacgcggggcgcggggacaacacaggtcgcggaggagcgttgccattcaagtgactgcagcagcagcggcagcgcctcggttcctgagcccaccgcaggctgaaggcattgcgcgtagtccatgcccgtagaggaagtgtgcagatgggattaacgtccacatggagatatggaagaggaccggggattggtaccgtaaccatggtcagctggggtcgtttcatctgcctggtcgtggtcaccatggcaaccttgtccctggcccggccctccttcagtttagttgaggataccacattagagccagaagagccaccaaccaaataccaaatctctcaaccagaagtgtacgtggctgcgccaggggagtcgctagaggtgcgctgcctgttgaaagatgccgccgtgatcagttggactaaggatggggtgcacttggggcccaacaataggacagtgcttattggggagtacttgcagataaagggcgccacgcctagagactccggcctctatgcttgtactgccagtaggactgtagacagtgaaacttggtacttcatggtgaatgtcacagatgccatctcatccggagatgatgaggatgacaccgatggtgcggaagattttgtcagtgagaacagtaacaacaagagagcaccatactggaccaacacagaaaagatggaaaagcggctccatgctgtgcctgcggccaacactgtcaagtttcgctgcccagccggggggaacccaatgccaaccatgcggtggctgaaaaacgggaaggagtttaagcaggagcatcgcattggaggctacaaggtacgaaaccagcactggagcctcattatggaaagtgtggtcccatctgacaagggaaattatacctgtgtagtggagaatgaatacgggtccatcaatcacacgtaccacctggatgttgtggagcgatcgcctcaccggcccatcctccaagccggactgccggcaaatgcctccacagtggtcggaggagacgtagagtttgtctgcaaggtttacagtgatgcccagccccacatccagtggatcaagcacgtggaaaagaacggcagtaaatacgggcccgacgggctgccctacctcaaggttctcaaggccgccggtgttaacaccacggacaaagagattgaggttctctatattcggaatgtaacttttgaggacgctggggaatatacgtgcttggcgggtaattctattgggatatcctttcactctgcatggttgacagttctgccagcgcctggaagagaaaaggagattacagcttccccagactacctggagatagccatttactgcataggggtcttcttaatcgcctgtatggtggtaacagtcatcctgtgccgaatgaagaacacgaccaagaagccagacttcagcagccagccggctgtgcacaagctgaccaaacgtatccccctgcggagacaggtaacagtttcggctgagtccagctcctccatgaactccaacaccccgctggtgaggataacaacacgcctctcttcaacggcagacacccccatgctggcaggggtctccgagtatgaacttccagaggacccaaaatgggagtttccaagagataagctgacactgggcaagcccctgggagaaggttgctttgggcaagtggtcatggcggaagcagtgggaattgacaaagacaagcccaaggaggcggtcaccgtggccgtgaagatgttgaaagatgatgccacagagaaagacctttctgatctggtgtcagagatggagatgatgaagatgattgggaaacacaagaatatcataaatcttcttggagcctgcacacaggatgggcctctctatgtcatagttgagtatgcctctaaaggcaacctccgagaatacctccgagcccggaggccacccgggatggagtactcctatgacattaaccgtgttcctgaggagcagatgaccttcaaggacttggtgtcatgcacctaccagctggccagaggcatggagtacttggcttcccaaaaatgtattcatcgagatttagcagccagaaatgttttggtaacagaaaacaatgtgatgaaaatagcagactttggactcgccagagatatcaacaatatagactattacaaaaagaccaccaatgggcggcttccagtcaagtggatggctccagaagccctgtttgatagagtatacactcatcagagtgatgtctggtccttcggggtgttaatgtgggagatcttcactttagggggctcgccctacccagggattcccgtggaggaactttttaagctgctgaaggaaggacacagaatggataagccagccaactgcaccaacgaactgtacatgatgatgagggactgttggcatgcagtgccctcccagagaccaacgttcaagcagttggtagaagacttggatcgaattctcactctcacaaccaatgaggaatacttggacctcagccaacctctcgaacagtattcacctagttaccctgacacaagaagttcttgttcttcaggagatgattctgttttttctccagaccccatgccttacgaaccatgccttcctcagtatccacacataaacggcagtgttaaaacatgaatgactgtgtctgcctgtccccaaacaggacagcactgggaacctagctacactgagcagggagaccatgcctcccagagcttgttgtctccacttgtatatatggatcagaggagtaaataattggaaaagtaatcagcatatgtgtaaagatttatacagttgaaaacttgtaatcttccccaggaggagaagaaggtttctggagcagtggactgccacaagccaccatgtaacccctctcacctgccgtgcgtactggctgtggaccagtaggactcaaggtggacgtgcgttctgccttccttgttaattttgtaataattggagaagatttatgtcagcacacacttacagagcacaaatgcagtatataggtgctggatgtatgtaaatatattcaaattatgtataaatatatattatatatttacaaggagttattttttgtattgattttaaatggatgtcccaatgcacctagaaaattggtctctctttttttaatagctatttgctaaatgctgttcttacacataatttcttaattttcaccgagcagaggtggaaaaatacttttgctttcagggaaaatggtataacgttaatttattaataaattggtaatatacaaaacaattaatcatttatagttttttttgtaatttaagtggcatttctatgcaggcagcacagcagactagttaatctattgcttggacttaactagttatcagatcctttgaaaagagaatatttacaatatatgactaatttggggaaaatgaagttttgatttatttgtgtttaaatgctgctgtcagacgattgttcttagacctcctaaatgccccatattaaaagaactcattcataggaaggtgtttcattttggtgtgcaaccctgtcattacgtcaacgcaacgtctaactggacttcccaagataaatggtaccagcgtcctcttaaaagatgccttaatccattccttgaggacagaccttagttgaaatgatagcagaatgtgcttctctctggcagctggccttctgcttctgagttgcacattaatcagattagcctgtattctcttcagtgaattttgataatggcttccagactctttggcgttggagacgcctgttaggatcttcaagtcccatcatagaaaattgaaacacagagttgttctgctgatagttttggggatacgtccatctttttaagggattgctttcatctaattctggcaggacctcaccaaaagatccagcctcatacctacatcagacaaaatatcgccgttgttccttctgtactaaagtattgtgttttgctttggaaacacccactcactttgcaatagccgtgcaagatgaatgcagattacactgatcttatgtgttacaaaattggagaaagtatttaataaaacctgttaatttttatactgacaataaaaatgtttctacagatattaatgttaacaagacaaaataaatgtcacgcaactta

SEQ ID NO: 291328 - DNA, 4639 bp, Artificial Sequence
  derived and/or modified sequence
ggcggcggctggaggagagcgcggtggagagccgagcgggcgggcggcgggtgcggagcgggcgagggagcgcgcgcggccgccacaaagctcgggcgccgcggggctgcatgcggcgtacctggcccggcgcggcgactgctctccgggctggcgggggccggccgcgagccccgggggccccgaggccgcagcttgcctgcgcgctctgagccttcgcaactcgcgagcaaagtttggtggaggcaacgccaagcctgagtcctttcttcctctcgttccccaaatccgagggcagcccgcgggcgtcatgcccgcgctcctccgcagcctggggtacgcgtgaagcccgggaggcttggcgccggcgaagacccaaggaccactcttctgcgtttggagttgctccccgcaaccccgggctcgtcgctttctccatcccgacccacgcggggcgcggggacaacacaggtcgcggaggagcgttgccattcaagtgactgcagcagcagcggcagcgcctcggttcctgagcccaccgcaggctgaaggcattgcgcgtagtccatgcccgtagaggaagtgtgcagatgggattaacgtccacatggagatatggaagaggaccggggattggtaccgtaaccatggtcagctggggtcgtttcatctgcctggtcgtggtcaccatggcaaccttgtccctggcccggccctccttcagtttagttgaggataccacattagagccagaagagccaccaaccaaataccaaatctctcaaccagaagtgtacgtggctgcgccaggggagtcgctagaggtgcgctgcctgttgaaagatgccgccgtgatcagttggactaaggatggggtgcacttggggcccaacaataggacagtgcttattggggagtacttgcagataaagggcgccacgcctagagactccggcctctatgcttgtactgccagtaggactgtagacagtgaaacttggtacttcatggtgaatgtcacagatgccatctcatccggagatgatgaggatgacaccgatggtgcggaagattttgtcagtgagaacagtaacaacaagagagcaccatactggaccaacacagaaaagatggaaaagcggctccatgctgtgcctgcggccaacactgtcaagtttcgctgcccagccggggggaacccaatgccaaccatgcggtggctgaaaaacgggaaggagtttaagcaggagcatcgcattggaggctacaaggtacgaaaccagcactggagcctcattatggaaagtgtggtcccatctgacaagggaaattatacctgtgtagtggagaatgaatacgggtccatcaatcacacgtaccacctggatgttgtggagcgatcgcctcaccggcccatcctccaagccggactgccggcaaatgcctccacagtggtcggaggagacgtagagtttgtctgcaaggtttacagtgatgcccagccccacatccagtggatcaagcacgtggaaaagaacggcagtaaatacgggcccgacgggctgccctacctcaaggttctcaaggttaccaaggccgccggtgttaacaccacggacaaagagattgaggttctctatattcggaatgtaacttttgaggacgctggggaatatacgtgcttggcgggtaattctattgggatatcctttcactctgcatggttgacagttctgccagcgcctggaagagaaaaggagattacagcttccccagactacctggagatagccatttactgcataggggtcttcttaatcgcctgtatggtggtaacagtcatcctgtgccgaatgaagaacacgaccaagaagccagacttcagcagccagccggctgtgcacaagctgaccaaacgtatccccctgcggagacaggtttcggctgagtccagctcctccatgaactccaacaccccgctggtgaggataacaacacgcctctcttcaacggcagacacccccatgctggcaggggtctccgagtatgaacttccagaggacccaaaatgggagtttccaagagataagctgacactgggcaagcccctgggagaaggttgctttgggcaagtggtcatggcggaagcagtgggaattgacaaagacaagcccaaggaggcggtcaccgtggccgtgaagatgttgaaagatgatgccacagagaaagacctttctgatctggtgtcagagatggagatgatgaagatgattgggaaacacaagaatatcataaatcttcttggagcctgcacacaggatgggcctctctatgtcatagttgagtatgcctctaaaggcaacctccgagaatacctccgagcccggaggccacccgggatggagtactcctatgacattaaccgtgttcctgaggagcagatgaccttcaaggacttggtgtcatgcacctaccagctggccagaggcatggagtacttggcttcccaaaaatgtattcatcgagatttagcagccagaaatgttttggtaacagaaaacaatgtgatgaaaatagcagactttggactcgccagagatatcaacaatatagactattacaaaaagaccaccaatgggcggcttccagtcaagtggatggctccagaagccctgtttgatagagtatacactcatcagagtgatgtctggtccttcggggtgttaatgtgggagatcttcactttagggggctcgccctacccagggattcccgtggaggaactttttaagctgctgaaggaaggacacagaatggataagccagccaactgcaccaacgaactgtacatgatgatgagggactgttggcatgcagtgccctcccagagaccaacgttcaagcagttggtagaagacttggatcgaattctcactctcacaaccaatgaggaatacttggacctcagccaacctctcgaacagtattcacctagttaccctgacacaagaagttcttgttcttcaggagatgattctgttttttctccagaccccatgccttacgaaccatgccttcctcagtatccacacataaacggcagtgttaaaacatgaatgactgtgtctgcctgtccccaaacaggacagcactgggaacctagctacactgagcagggagaccatgcctcccagagcttgttgtctccacttgtatatatggatcagaggagtaaataattggaaaagtaatcagcatatgtgtaaagatttatacagttgaaaacttgtaatcttccccaggaggagaagaaggtttctggagcagtggactgccacaagccaccatgtaacccctctcacctgccgtgcgtactggctgtggaccagtaggactcaaggtggacgtgcgttctgccttccttgttaattttgtaataattggagaagatttatgtcagcacacacttacagagcacaaatgcagtatataggtgctggatgtatgtaaatatattcaaattatgtataaatatatattatatatttacaaggagttattttttgtattgattttaaatggatgtcccaatgcacctagaaaattggtctctctttttttaatagctatttgctaaatgctgttcttacacataatttcttaattttcaccgagcagaggtggaaaaatacttttgctttcagggaaaatggtataacgttaatttattaataaattggtaatatacaaaacaattaatcatttatagttttttttgtaatttaagtggcatttctatgcaggcagcacagcagactagttaatctattgcttggacttaactagttatcagatcctttgaaaagagaatatttacaatatatgactaatttggggaaaatgaagttttgatttatttgtgtttaaatgctgctgtcagacgattgttcttagacctcctaaatgccccatattaaaagaactcattcataggaaggtgtttcattttggtgtgcaaccctgtcattacgtcaacgcaacgtctaactggacttcccaagataaatggtaccagcgtcctcttaaaagatgccttaatccattccttgaggacagaccttagttgaaatgatagcagaatgtgcttctctctggcagctggccttctgcttctgagttgcacattaatcagattagcctgtattctcttcagtgaattttgataatggcttccagactctttggcgttggagacgcctgttaggatcttcaagtcccatcatagaaaattgaaacacagagttgttctgctgatagttttggggatacgtccatctttttaagggattgctttcatctaattctggcaggacctcaccaaaagatccagcctcatacctacatcagacaaaatatcgccgttgttccttctgtactaaagtattgtgttttgctttggaaacacccactcactttgcaatagccgtgcaagatgaatgcagattacactgatcttatgtgttacaaaattggagaaagtatttaataaaacctgttaatttttatactgacaataaaaatgtttctacagatattaatgttaacaagacaaaataaatgtcacgcaacttattttttt

SEQ ID NO: 291329 - DNA, 2460 bp, Artificial Sequence
  derived and/or modified sequence
atggtgtcttggggtagatttatctgcctcgtggttgttacaatggccacactgagcctggcgaggccatcattcagcctcgtggaagacactacgcttgagcccgaagagcctcctacgaaatatcagatctctcaacctgaggtctacgtggccgctcccggagagtctttggaagttaggtgtctcctgaaagatgccgctgttatttcctggaccaaggatggggttcatcttggtccaaacaaccggacggttctcattggggagtatctccaaattaaaggcgcgacgcccagggacagtgggttatatgcctgtacagcttcaaggaccgtggatagcgagacatggtacttcatggtgaatgtgaccgacgccatcagttcgggcgacgatgaggacgacaccgatggcgccgaagattttgtgtctgagaattcaaacaacaagagggccccatattggaccaatacagagaagatggagaagcgactccacgccgtcccagccgccaacacagtgaaatttaggtgtcccgccggggggaatcccatgccgaccatgagatggctaaaaaatggcaaggagtttaaacaagaacaccggattggagggtataaggtccgtaaccagcattggtccctgatcatggaaagcgttgtccctagcgacaaggggaattacacgtgcgtggtagagaacgaatacggtagcataaaccacacataccatcttgatgtcgtggagagaagtccgcatagacctatcttgcaggctgggctgcctgccaacgcatcgaccgtcgtcgggggcgatgtggagtttgtgtgtaaggtttactctgacgcgcaaccccacattcagtggataaaacatgtcgaaaagaatggttccaagtatggtcctgacggcctcccatacctgaaggtccttaaggccgccggcgtcaacaccacagacaaggaaattgaagtcctctatattaggaacgtgacttttgaggacgcaggcgagtacacttgtctggccggaaactcgattggcattagcttccactctgcctggcttacagtgctgcctgcgcctggccgcgagaaagaaatcaccgcttctcccgattacctggagatcgcgatctactgcatcggagtctttcttatcgcatgcatggttgtcacagttattctctgtaggatgaagaatactacaaaaaaacccgacttttcctctcagcccgcggtacacaaactcaccaagaggatcccactccggaggcaggtatccgccgagagctcttcttccatgaacagtaacacaccgctggtcaggattaccaccaggctgtcatctacggccgatacacccatgttggctggggttagcgagtatgagctgccggaagatccgaaatgggagtttccccgagataaacttaccttaggaaaaccccttggagagggatgttttggacaggttgtgatggctgaggctgtcggaatagacaaggacaaaccgaaagaggctgtgactgtcgcagtcaaaatgctgaaagacgacgcaacagaaaaggacctgagcgatctcgtctccgaaatggaaatgatgaaaatgataggaaagcacaaaaatatcatcaacctgcttggagcttgcacccaagatgggcctctctatgtgatcgttgaatatgcgtccaaaggcaatttgcgggaatatttgcgcgcgcgaaggccaccagggatggagtattcatatgatatcaatcgcgtcccagaagagcagatgacttttaaggacctagtatcttgtacctatcagcttgcccggggaatggaatacctggccagtcagaagtgcatacaccgggacctggccgcccgaaacgtgctggtcacagagaacaacgttatgaagatcgcggatttcggcctggccagggatataaataacatcgactattataagaagacgaccaacgggcggcttcccgtaaagtggatggcccccgaggctcttttcgaccgggtctatactcaccaatcagacgtgtggtcttttggagttctgatgtgggaaattttcacccttggtggctcaccttaccctggaatacctgttgaagaattgtttaaactgctgaaagaaggacaccgcatggacaagccggcaaactgcactaatgaactctatatgatgatgcgggattgctggcacgccgtgcccagccagagacccacatttaaacagctggtggaagatctggataggattttgaccctcactaccaacgaggagtacctggatttaagccagcctctggaacaatattccccctcataccccgatacaagatctagctgctcttccggagacgacagtgtgttctctccagaccctatgccttacgaaccctgtctgccacagtatcctcacattaatggcagcgttaaaacatag

SEQ ID NO: 291330 - DNA, 2469 bp, Artificial Sequence
  derived and/or modified sequence
atggtatcatggggcaggtttatatgcctcgtggtcgtgaccatggctacccttagtctggctagaccaagcttctccctggtcgaggacaccactctggagccagaagagccccctacaaagtaccagatctcccagccagaagtctacgtcgcggcgcccggggagagtctggaggttcggtgtcttctgaaagatgctgccgtgatatcttggacaaaggacggggtccacttgggacctaacaaccgcaccgtgctaatcggcgagtatctgcaaatcaaaggggcaacaccgagggattcgggactttatgcctgcacggcttctaggaccgtcgattctgagacctggtattttatggttaacgtgactgatgctattagtagcggagatgatgaggacgatactgatggcgccgaggacttcgtatccgagaatagcaacaacaagcgggcgccttattggactaacactgagaagatggaaaagaggctccacgctgtgccagcggcaaacacggttaagttccgctgtcccgctggagggaaccctatgcccaccatgaggtggctgaaaaacggaaaggagttcaagcaggaacacaggattggcggctacaaggttcgcaaccagcattggagcctgatcatggaatccgtggtgccctcagacaaggggaactacacatgcgtggtggagaatgagtatggcagcatcaaccatacatatcacctggacgtcgttgaaaggtccccccatagaccaatactgcaggctgggctcccagcaaacgccagcaccgtggtaggtggagatgttgagttcgtttgtaaggtctatagtgatgcacagccacacatacagtggataaagcacgttgaaaagaatggtagtaaatacggaccagatgggttgccctatctgaaagtgttgaaagtgaccaaagcggcgggcgtgaacacaaccgacaaagagatcgaagtgctttacatccgtaacgtaacctttgaagacgccggtgagtacacgtgtttggccggtaactctattgggattagcttccactcggcctggctgacagtgctgccagcgcctggcagggagaaggaaataactgctagcccagactatttagagattgccatctactgcattggggtgtttctaatcgcctgcatggtagtcactgttattctatgcagaatgaagaataccacaaagaagcctgacttctcctcacagcctgccgtgcacaagttaaccaaacgtatcccattgcgccggcaggtgagcgctgagtccagcagttcaatgaactcgaacacgcccctcgtaagaattaccactcggctcagctccactgccgacacccctatgcttgctggggttagcgagtatgagctgccagaggaccccaagtgggaatttccaagagacaaacttaccctgggcaaacctctcggggagggttgcttcggccaagtagtgatggctgaagcagtcggaattgacaaggataagcccaaggaagccgtcactgtcgcagtgaagatgctgaaagatgatgccaccgagaaggatctctctgatttggtgagtgagatggaaatgatgaagatgatcggtaaacacaaaaacattattaatttgttgggcgcatgcacacaggatggaccactttacgttatcgttgagtatgcgagtaagggtaatctccgggagtatttaagggccaggcgaccacccggcatggagtatagctacgatattaatcgggtgccagaggaacagatgacatttaaagatctggtctcctgtacttaccaactcgccaggggtatggagtaccttgcctcccaaaaatgcatacatcgggatctcgctgctaggaacgtccttgttactgaaaacaacgtgatgaagattgccgattttgggttagccagggatattaataacatcgattactataaaaagactactaacgggcggcttcccgtcaagtggatggccccggaggctctgttcgaccgtgtgtacacccaccagtctgatgtgtggtcctttggtgtgctgatgtgggaaatctttactctgggtggatctccctatcctgggataccggtcgaagagctgttcaagctgctcaaagagggccacagaatggacaaacccgcgaactgcactaacgaactgtacatgatgatgcgagactgttggcatgcggtgccaagccagcgtccaaccttcaaacagctggtcgaggatctggatcgtatcctgacgctcactacaaacgaagaatatttagacctgagccagccattggagcagtattctccttcataccctgacacgagaagcagctgctcctccggggatgactctgtatttagccccgaccctatgccttacgaaccatgtttaccacagtacccccatatcaacggatcggttaagacatag

SEQ ID NO: 291331 - DNA, 2460 bp, Artificial Sequence
  derived and/or modified sequence
atggtgtcctggggccgcttcatctgcctggtggtggtgaccatggccaccctgagcctggcccggcccagcttcagcctggtggaggacaccaccctggagcctgaggagccccccaccaagtaccagatcagccagcctgaggtgtatgtggccgcccctggagagagcctggaggtgcgctgcctgctgaaggatgctgctgtgatctcctggaccaaggatggagtgcacctgggccccaacaacagaacagtgctgattggagagtacctgcagatcaagggggccaccccccgggacagcggcctgtatgcctgcacagccagcaggacagtggacagcgagacctggtacttcatggtgaatgtgacagatgccatcagcagtggagatgatgaagatgacacagatggagcagaagattttgtgtctgagaacagcaacaacaagagggccccctactggaccaacacagagaagatggagaagaggctgcatgctgtgcctgctgccaacacagtgaagttccgctgcccagctgggggcaaccccatgcccaccatgcgctggctgaagaatggcaaggagttcaagcaggagcaccgcatcggcggctacaaggtgaggaaccagcactggagcctcatcatggagagcgtggtgcccagcgacaagggcaactacacctgtgtggtggagaatgaatatggcagcatcaaccacacctaccacctggatgtggtggagaggagcccccaccggcccatcctgcaggccggcctgcctgccaatgccagcacagtggtgggcggagatgtggagtttgtgtgcaaggtgtacagtgatgcccagccccacatccagtggatcaagcacgtggagaagaatggcagcaaatatggcccagatggcctgccctacctgaaggtgctgaaggctgctggggtgaacaccacagacaaggagattgaggtgctgtacatcagaaatgtgacctttgaagatgctggggagtacacctgcctggccggcaacagcatcggcatctccttccacagcgcctggctgactgtgctgcctgcccctggccgggagaaggagatcacagccagcccagactacctggagatcgccatctactgcattggagtcttcctgattgcctgcatggtggtgaccgtcatcctgtgcaggatgaagaacaccaccaagaagccagacttcagcagccagcctgctgtgcacaagctgaccaagaggatccccctgcggcggcaggtgtctgctgagagcagcagctccatgaacagcaacacccccctggtgcgcatcaccacccggctgagcagcacagctgacacccccatgctggccggcgtgtctgaatatgagctgcctgaggaccccaagtgggagttcccccgggacaagctgaccctgggcaagcccctgggggagggctgcttcggccaggtggtgatggccgaggccgtgggcatcgacaaggacaagcccaaggaggccgtgacagtggccgtgaagatgctgaaggatgatgccacagagaaggacctgagtgacctggtgtctgagatggagatgatgaagatgattggcaagcacaagaacatcatcaacctgctgggcgcctgcacccaggacggccccctgtatgtgattgtggagtatgccagcaaaggaaacctgcgggagtacctgcgggcccggcggcccccaggcatggagtacagctatgacatcaacagagtgcctgaggagcagatgaccttcaaggacctggtgtcctgcacctaccagctggcccggggcatggagtacctggccagccagaagtgcatccaccgggacctggccgccagaaatgtgctggtgacagagaacaacgtgatgaagattgctgactttggcctggcccgggacatcaacaacatcgactactacaagaagaccaccaacggccgcctgcctgtgaagtggatggcccctgaggccctgtttgacagagtgtacacccaccagagtgatgtgtggagctttggagtgctgatgtgggagatcttcaccctgggcggcagcccctacccaggcatccctgtggaggagctgttcaagctgctgaaggagggccacaggatggacaagccagccaactgcaccaatgagctgtacatgatgatgagggactgctggcatgctgtgcccagccagaggcccaccttcaagcagctggtggaggacctggaccgcatcctgaccctgaccaccaatgaggagtacctggacctgagccagcccctggagcagtacagccccagctacccagacaccaggagcagctgcagcagtggagatgacagcgtcttctccccagaccccatgccctatgagccctgcctgccccagtacccccacatcaatggatctgtgaagacctag

SEQ ID NO: 291332 - DNA, 2469 bp, Artificial Sequence
  derived and/or modified sequence
atggtgtcctggggccgcttcatctgcctggtggtggtgaccatggccaccctgagcctggcccggcccagcttcagcctggtggaggacaccaccctggagcctgaggagccccccaccaagtaccagatcagccagcctgaggtgtatgtggccgcccctggagagagcctggaggtgcgctgcctgctgaaggatgctgctgtgatctcctggaccaaggatggagtgcacctgggccccaacaacagaacagtgctgattggagagtacctgcagatcaagggggccaccccccgggacagcggcctgtatgcctgcacagccagcaggacagtggacagcgagacctggtacttcatggtgaatgtgacagatgccatcagcagtggagatgatgaagatgacacagatggagcagaagattttgtgtctgagaacagcaacaacaagagggccccctactggaccaacacagagaagatggagaagaggctgcatgctgtgcctgctgccaacacagtgaagttccgctgcccagctgggggcaaccccatgcccaccatgcgctggctgaagaatggcaaggagttcaagcaggagcaccgcatcggcggctacaaggtgaggaaccagcactggagcctcatcatggagagcgtggtgcccagcgacaagggcaactacacctgtgtggtggagaatgaatatggcagcatcaaccacacctaccacctggatgtggtggagaggagcccccaccggcccatcctgcaggccggcctgcctgccaatgccagcacagtggtgggcggagatgtggagtttgtgtgcaaggtgtacagtgatgcccagccccacatccagtggatcaagcacgtggagaagaatggcagcaaatatggcccagatggcctgccctacctgaaggtgctgaaggtgaccaaggccgccggcgtgaacaccacagacaaggagattgaggtgctgtacatcagaaatgtgacctttgaagatgctggggagtacacctgcctggccggcaacagcatcggcatctccttccacagcgcctggctgactgtgctgcctgcccctggccgggagaaggagatcacagccagcccagactacctggagatcgccatctactgcatcggggtcttcctgattgcctgcatggtggtgaccgtcatcctgtgcaggatgaagaacaccaccaagaagccagacttcagcagccagcctgctgtgcacaagctgaccaagaggatccccctgcggcggcaggtgtctgctgagagcagcagctccatgaacagcaacacccccctggtgcgcatcaccacccggctgagcagcacagctgacacccccatgctggccggcgtgtctgaatatgagctgcctgaggaccccaagtgggagttcccccgggacaagctgaccctgggcaagcccctgggggagggctgcttcggccaggtggtgatggccgaggccgtgggcatcgacaaggacaagcccaaggaggccgtgacagtggccgtgaagatgctgaaggatgatgccacagagaaggacctgagtgacctggtgtctgagatggagatgatgaagatgattggcaagcacaagaacatcatcaacctgctgggcgcctgcacccaggacggccccctgtatgtgattgtggagtatgccagcaagggcaacctgcgggagtacctgcgggcccggcggcccccaggcatggagtacagctatgacatcaacagagtgcctgaggagcagatgaccttcaaggacctggtgtcctgcacctaccagctggcccggggcatggagtacctggccagccagaagtgcatccaccgggacctggccgccagaaatgtgctggtgacagaaaataatgtgatgaagattgctgactttggcctggcccgggacatcaacaacatcgactactacaagaagaccaccaacggccgcctgcctgtgaagtggatggcccctgaggccctgtttgacagagtgtacacccaccagagtgatgtgtggagctttggagtgctgatgtgggagatcttcaccctgggcggcagcccctacccaggcatccctgtggaggagctgttcaagctgctgaaggagggccacaggatggacaagccagccaactgcaccaatgagctgtacatgatgatgagggactgctggcatgctgtgcccagccagaggcccaccttcaagcagctggtggaggacctggaccgcatcctgaccctgaccaccaatgaggagtacctggacctgagccagcccctggagcagtacagccccagctacccagacaccaggagcagctgcagcagtggagatgattctgtgttctccccagaccccatgccctatgagccctgcctgccccagtacccccacatcaatggatctgtgaagacctag

SEQ ID NO: 291333 - DNA, 2460 bp, Artificial Sequence
  derived and/or modified sequence
atggtgagctggggccggttcatctgcctggtggtggtgaccatggccacactctccctggcaaggcccagcttctccctggtcgaggacaccaccttagagcctgaagaaccccctaccaaatatcaaatcagccaacccgaggtgtatgtcgcggcaccgggagaaagtctcgaagtcaggtgtttactgaaggacgctgccgtcatatcctggaccaaagatggcgtgcacctgggacctaacaacaggactgtgctcattggtgaatatctacagattaagggtgccactcccagggattccggcttgtacgcctgtactgcttctcgcactgttgatagtgaaacttggtacttcatggtcaatgtgaccgatgctattagcagcggtgatgacgaggatgacaccgacggcgcggaggactttgtaagtgaaaacagcaacaacaagcgggcaccttattggacaaatactgaaaaaatggagaagcggttacacgcagtgccagctgctaacaccgtgaaatttcgatgccccgctggtggaaaccctatgccaactatgcgttggctgaagaacggaaaggaatttaaacaagagcaccgcatcggaggatacaaagtgagaaaccaacactggtctctcattatggagagcgtggtgccatccgacaagggcaactacacatgcgtagttgaaaatgagtatggatccatcaatcacacttatcacttggacgtggtggaaaggagtccgcatcgtcctatactacaggccggcctccctgctaatgcttctactgtggttgggggcgacgtagagttcgtttgtaaggtctactccgatgcccagcctcatattcagtggatcaaacatgtcgaaaaaaatgggtctaagtacggaccggatggtctgccttacctcaaggtcctgaaagccgcaggagtcaacaccacagacaaagaaatcgaagtgctttacatccgcaacgtgaccttcgaggacgcaggggaatatacatgtctagctggcaacagcattggtatcagctttcatagcgcttggttaaccgtgctgccagcacctggcagggaaaaggaaatcacagcatcccccgattatttagagatcgcaatttactgtataggtgtgttcctcatagcttgcatggtcgtcactgtgatactgtgcagaatgaagaacactactaagaaacctgacttttcgtctcagcccgcagttcacaagctaaccaagcgtattcctttgcgaaggcaagtatctgcagagtcaagctcttcaatgaattcgaatacccccctcgtgcggatcacgactcgcctgagtagcacagccgatactccgatgcttgcaggcgtgtccgaatatgaactgcctgaggatccgaagtgggagtttccaagagacaagctgaccctgggcaaacctctcggggaaggttgctttggccaggtggttatggcagaggcggtaggaattgacaaggataaaccaaaagaagccgtgaccgtagcagtcaagatgctaaaagacgacgccaccgaaaaggatttgagcgacttagtgagtgagatggaaatgatgaagatgatcggtaagcataagaacattattaatctccttggcgcctgtacccaggatggccctctgtacgtcatcgtggaatatgcatccaaaggaaatttaagggagtacttaagagctaggagaccccctgggatggagtacagttacgacattaacagagttcctgaagaacagatgaccttcaaggacctggtgagctgtacctatcagcttgcgcggggtatggagtatctggcctcgcagaagtgcatacaccgggaccttgcagcaaggaacgtgctggtcaccgagaataatgtcatgaaaatcgctgattttggactggccagggatattaacaatattgattactataagaaaactaccaacggccggctgccagtgaaatggatggcccccgaggctctttttgatagggtgtatacccatcagtccgatgtttggagctttggagtgctcatgtgggagattttcacccttggggggtctccctacccggggattcccgtggaagagctgttcaagctgctgaaagaaggacaccgaatggataaacctgccaattgcaccaacgaactgtatatgatgatgagagattgctggcacgcggttccttcccagcggcccactttcaagcagctcgttgaggatctggatcggatcctcacccttacgactaatgaagaatacctagacctgagtcagccattagagcaatatagtcccagctatccagacactcgctccagctgttcgtctggggatgattctgtcttctcccccgaccctatgccttacgagccttgcctacctcaatatccgcacattaatggctccgtcaagacgtag

SEQ ID NO: 291334 - DNA, 2469 bp, Artificial Sequence
  derived and/or modified sequence
atggtgagctggggccggttcatctgcctggtggtggtgaccatggcaaccctctccctggcccgcccctccttttctctggtcgaggacacaaccctggagcctgaggagccacccacaaaatatcagatcagtcaaccggaagtgtacgttgccgccccaggggaatcacttgaagtccgctgcctgctgaaggatgccgcggtcatcagctggaccaaggacggagttcatttgggtccgaataacagaaccgtcctgatcggcgaatacctgcagatcaagggggcaacgcccagagattctggcctgtatgcgtgtactgcttcgaggactgtcgattctgagacgtggtattttatggttaacgtaactgatgcaatctcaagtggtgatgatgaagacgatacggatggtgcagaagactttgtgtccgagaattccaataataagcgcgcaccctattggactaacaccgagaagatggagaagcggctgcacgctgtacccgccgccaacaccgtgaaattccgctgcccagccggcggcaatcctatgccaaccatgaggtggttaaaaaacggaaaggaattcaaacaagagcatagaattggcggttataaagtgagaaaccagcattggtcactgattatggagtcagtggttccctctgacaaaggcaactacacttgtgttgtagagaacgagtacggcagtattaaccacacctaccatctggacgtcgtggagaggagtccacatagacctatcctgcaggccggcctacccgccaacgcctcaacagtggtgggaggggatgtagaattcgtgtgtaaagtctactcggacgcccaaccacatatacaatggattaagcatgtcgaaaagaacggaagcaagtacggtccggatggtttgccctatctgaaagtactgaaagtgacaaaggccgctggcgtcaatactactgacaaggaaattgaggtcctctacatcaggaatgtgacctttgaagatgccggcgagtacacatgtctcgcaggaaacagcatcggaattagctttcactctgcttggctaacagtgctcccagcacctgggcgggagaaagagatcaccgcctcacctgactatctcgagatcgccatttattgcattggagttttcctgattgcttgcatggttgtgacggttatcttgtgtcggatgaagaatactacaaagaaaccagactttagttcccagcctgccgtgcataagcttactaaaagaattcccctgcggcggcaggtgtcagcggagagcagctcatcaatgaacagtaatacgcctctggtcaggatcactacacgcctttcatctactgcagatacacctatgctcgcaggtgtgagcgagtatgagttgcccgaggaccctaaatgggagttccctagggataagttgacacttggcaagcccctgggagagggatgctttggccaggttgtcatggccgaggccgtgggcattgataaggacaaacctaaagaggcggttaccgtggctgtgaaaatgttaaaagatgatgccacagaaaaggacttgtcggaccttgtgtctgagatggaaatgatgaagatgatcggcaaacacaagaacatcatcaacctcctgggcgcatgtactcaggatgggcctctgtacgtgatcgtggagtatgcaagcaagggcaacttaagagagtacctgcgggcacgcagaccccccggaatggaatattcctatgatattaatagggttcctgaagagcagatgaccttcaaggatctcgtgtcttgcacctaccaactcgctaggggcatggagtatcttgcaagtcaaaagtgtatccaccgggacctcgcggctagaaacgtgctcgtgacagagaataatgtgatgaaaattgcggatttcggactggcaagagacatcaataatatcgactactataaaaagacgacgaacggcaggctccctgttaaatggatggcccccgaagcactctttgatcgcgtgtatactcaccaaagtgacgtgtggtcttttggagtgctgatgtgggagatattcaccctgggaggatccccatatcctggaatcccagtggaggaactgttcaagttgcttaaggaggggcacagaatggataagccagccaactgtacgaacgagctgtacatgatgatgagggactgctggcacgccgtcccatcacagcggccaacttttaaacagctcgttgaagatctggaccgtattctcacgttgaccacgaacgaagaatacctagaccttagtcagcctctggaacagtactccccctcatacccagacacgcggagcagttgctctagcggcgatgacagcgtgttctcacccgaccctatgccctatgaaccttgtctgccacaatatccacatattaatgggagcgtgaagacatag

SEQ ID NO: 291335 - DNA, 2460 bp, Artificial Sequence
  derived and/or modified sequence
atggtttcctgggggaggtttatatgcctggtggtagtgacaatggctactctgagcctggccaggccttccttttcactggtggaagataccacgctggagcccgaagaaccaccaaccaagtaccagatctcccagcccgaagtctatgtggctgctcccggagaaagcctggaggtgagatgcctattaaaggacgcagccgtaatctcttggactaaggacggcgtccatctgggtcctaataaccggaccgtgctcattggagaatatctacaaatcaaaggtgctacgcccagggatagcggactgtatgcttgcacagcctcaagaacagtggacagcgaaacttggtacttcatggtgaatgtgacagatgctatcagctctggtgacgacgaggatgataccgacggcgctgaagatttcgtgagtgagaatagcaataataaacgcgcaccctattggacgaatacagaaaaaatggagaaacggctccatgctgtcccagctgctaacacagtcaagttcaggtgtcccgcagggggaaatcctatgcctacgatgcgttggctcaaaaatggaaaggaattcaagcaggagcatcgtatcggaggctataaggtaagaaaccagcactggagtctgattatggaatcggtggttccttcagacaaaggaaattatacatgcgtggtggagaatgaatacggctcaattaatcacacctatcacttggatgtcgtcgagcggtcccctcatcggccaattctccaggcaggtctacctgccaatgccagtactgtggtgggaggggacgtcgagttcgtctgcaaggtttacagtgacgcccagccacatatccagtggatcaaacacgtggagaagaacggttctaagtatgggccagatgggctgccgtatctgaaggtccttaaagcagccggtgtaaatacaactgacaaggaaattgaggtcctctacataaggaatgtgacatttgaagatgctggggagtacacatgtcttgccggtaatagcataggcatatcattccatagcgcgtggctgacggtgctccccgctccagggagagaaaaggaaatcaccgcatcaccagattacctggaaatcgccatctactgtatcggagtgtttctgatagcttgcatggtagtgacagtgattctttgtcggatgaagaacacaaccaagaagcctgatttctccagccagccggctgtacacaagctgaccaagcggatacccctccgcagacaagtgagcgcggagtccagctcaagcatgaacagcaacacacctctcgtcagaatcacaacgcgcttgagtagtactgccgatactcctatgctcgcaggcgtctctgagtacgaactgcccgaagatcccaaatgggagtttccccgtgacaaattaacactcggcaaacccctgggtgagggttgtttcggccaagtggtgatggcagaagcagtcgggattgacaaagacaaacctaaggaagccgtgacagtggccgtcaaaatgcttaaggacgatgccaccgaaaaagacttgtccgacctggtgagcgaaatggaaatgatgaagatgattgggaaacacaagaatataattaatctgctaggggcttgcacgcaggacggaccactgtatgtcatagtggaatacgcttctaagggaaacctgcgggaatacctcagggcccgacgccctcctgggatggagtacagctacgatattaaccgagttcccgaggaacagatgacattcaaggacttggtgagttgcacataccagctggcgcgaggaatggaatatcttgcgtcccagaaatgcatccaccgagaccttgctgcaagaaatgtgctggtgacagagaacaatgtaatgaaaatagccgatttcggccttgccagggacataaacaatatagactactataaaaaaaccactaacggaagacttccagtaaaatggatggcgcctgaagctctgtttgatcgagtgtacacccaccagagtgacgtatggtcttttggcgttttaatgtgggaaatattcacactaggcggttccccctacccaggaatccctgtggaggagctgttcaaattactaaaagagggacacaggatggacaagccagccaactgtactaacgaactgtacatgatgatgcgcgattgctggcacgctgttccttcccaacgcccaacgttcaagcagctggtcgaagatctggacagaatcctaacactgacaaccaacgaagaatatctcgacctgagccagccattggaacagtacagcccgagctatccagatacgagatcaagttgctcatcaggcgatgactcagtatttagtccggaccccatgccctacgagccttgcctgccccagtacccccacattaatggttcggtcaaaacttag

SEQ ID NO: 291336 - DNA, 2469 bp, Artificial Sequence
  derived and/or modified sequence
atggtcagctgggggcgatttatttgcttagttgtggtcactatggccacactatctttagctcggccttcctttagcctcgttgaagataccacattagaacccgaggagccccctaccaaatatcaaattagtcagcctgaggtctatgtcgcagcccctggtgaatcactagaggtacggtgtctgctgaaggatgcagccgtcatcagctggacaaaggacggagttcacttgggcccaaacaacagaactgtcctgatcggcgaatacctccagattaaaggagcaactcctagggactcggggctgtacgcctgtacagcatctaggaccgttgatagtgagacatggtacttcatggtcaacgttacagacgcaatctcgtctggcgatgatgaagatgatactgacggcgcagaggatttcgtgtccgagaattcaaataacaagcgagcaccatactggaccaataccgagaaaatggagaagcggctgcacgcagttccggcagcaaacactgtcaagttccggtgtccagccggaggcaaccctatgccaacgatgcgctggctgaagaatgggaaagaatttaaacaggagcatcgaattgggggatacaaagtccgtaatcagcactggtcgctcataatggaatccgtggtccccagtgataagggtaactacacatgtgtggtcgagaacgagtacggctccatcaaccatacgtatcatctcgatgtggtcgaaaggagccctcaccgcccaatcctccaggccggattgcctgcgaatgcttcgaccgtggttggtggggatgttgaattcgtctgtaaagtttactcagatgcccagccgcatattcagtggatcaaacacgtcgagaaaaacggcagcaagtacggccctgatgggctcccttatctgaaagtgctgaaggtgactaaggcggctggggtcaacacgacggataaagagatcgaggtgctgtacatccggaatgtgaccttcgaagacgccggtgagtatacatgtttggccggaaattctatagggatctcattccactcagcatggctgactgttctcccggctccaggtagggagaaggaaataactgcatccccagactacttagagatcgctatctactgtattggcgtgttcctaattgcttgtatggtcgtgacagtaattctgtgtaggatgaagaacaccaccaagaaacctgacttcagttcccagcctgccgtccacaagctgactaagagaattcctctcagaagacaggtcagcgctgagagcagtagcagcatgaactccaatacgcccctggtacgtatcaccactagactgtcttccacggcagatacccccatgctcgccggtgtgtccgaatatgagctgccagaggatccgaagtgggaatttccaagagacaaactaacccttggaaagcctctcggtgagggttgcttcggtcaggtggttatggctgaggccgtcgggatagacaaggacaagcctaaggaagctgtgaccgtggccgtgaagatgctgaaggatgacgctacagaaaaggatctctccgatctggttagcgagatggaaatgatgaaaatgatcggtaagcataagaatataattaacctgctgggcgcatgcacacaagacggcccactgtacgtaatcgtcgaatacgcctccaaggggaatcttagagaatacttacgggcacgacggcctccaggcatggagtactcgtatgatattaaccgcgttcctgaagaacagatgaccttcaaagacctcgtgagctgtacctatcagcttgcacgcggtatggaatatttggcgagccagaaatgtatacaccgggatcttgcagcccgaaatgtgctggtgacggaaaacaacgtcatgaaaatcgccgactttgggctggccagagatatcaataacatcgattactataagaagaccactaatggtaggctgccagttaagtggatggcccctgaggcacttttcgatcgggtgtacacccatcagtctgatgtatggtcttttggcgtgttaatgtgggagatctttactctgggaggttctccttaccccggaattccggtagaagagctattcaaactcctcaaggaaggccatcgtatggacaaacctgccaactgtaccaacgaactgtacatgatgatgcgggactgctggcacgccgtgccaagccagcgtccaacgttcaaacagttagtggaagacctagataggattctgacactgaccaccaacgaagaatacttagacctgtcacaacccttagagcagtatagtccatcttacccagataccagatcaagttgctcctccggagatgatagcgtgttctctcctgaccctatgccctacgaaccatgccttccgcaataccctcatatcaacggcagcgtgaagacttag

SEQ ID NO: 291337 - DNA, 2460 bp, Artificial Sequence
  derived and/or modified sequence
atggtgagctggggcagattcatctgcctggtggtggtgaccatggccaccctgagcctggccagacccagcttcagcctggtggaggacaccaccctggagcccgaggagccccccaccaagtaccagatcagccagcccgaggtgtacgtggccgcccccggcgagagcctggaggtgagatgcctgctgaaggacgccgccgtgatcagctggaccaaggacggcgtgcacctgggccccaacaacagaaccgtgctgatcggcgagtacctgcagatcaagggcgccacccccagagacagcggcctgtacgcctgcaccgccagcagaaccgtggacagcgagacctggtacttcatggtgaacgtgaccgacgccatcagcagcggcgacgacgaggacgacaccgacggcgccgaggacttcgtgagcgagaacagcaacaacaagagagccccctactggaccaacaccgagaagatggagaagagactgcacgccgtgcccgccgccaacaccgtgaagttcagatgccccgccggcggcaaccccatgcccaccatgagatggctgaagaacggcaaggagttcaagcaggagcacagaatcggcggctacaaggtgagaaaccagcactggagcctgatcatggagagcgtggtgcccagcgacaagggcaactacacctgcgtggtggagaacgagtacggcagcatcaaccacacctaccacctggacgtggtggagagaagcccccacagacccatcctgcaggccggcctgcccgccaacgccagcaccgtggtgggcggcgacgtggagttcgtgtgcaaggtgtacagcgacgcccagccccacatccagtggatcaagcacgtggagaagaacggcagcaagtacggccccgacggcctgccctacctgaaggtgctgaaggccgccggcgtgaacaccaccgacaaggagatcgaggtgctgtacatcagaaacgtgaccttcgaggacgccggcgagtacacctgcctggccggcaacagcatcggcatcagcttccacagcgcctggctgaccgtgctgcccgcccccggcagagagaaggagatcaccgccagccccgactacctggagatcgccatctactgcatcggcgtgttcctgatcgcctgcatggtggtgaccgtgatcctgtgcagaatgaagaacaccaccaagaagcccgacttcagcagccagcccgccgtgcacaagctgaccaagagaatccccctgagaagacaggtgagcgccgagagcagcagcagcatgaacagcaacacccccctggtgagaatcaccaccagactgagcagcaccgccgacacccccatgctggccggcgtgagcgagtacgagctgcccgaggaccccaagtgggagttccccagagacaagctgaccctgggcaagcccctgggcgagggctgcttcggccaggtggtgatggccgaggccgtgggcatcgacaaggacaagcccaaggaggccgtgaccgtggccgtgaagatgctgaaggacgacgccaccgagaaggacctgagcgacctggtgagcgagatggagatgatgaagatgatcggcaagcacaagaacatcatcaacctgctgggcgcctgcacccaggacggccccctgtacgtgatcgtggagtacgccagcaagggcaacctgagagagtacctgagagccagaagaccccccggcatggagtacagctacgacatcaacagagtgcccgaggagcagatgaccttcaaggacctggtgagctgcacctaccagctggccagaggcatggagtacctggccagccagaagtgcatccacagagacctggccgccagaaacgtgctggtgaccgagaacaacgtgatgaagatcgccgacttcggcctggccagagacatcaacaacatcgactactacaagaagaccaccaacggcagactgcccgtgaagtggatggcccccgaggccctgttcgacagagtgtacacccaccagagcgacgtgtggagcttcggcgtgctgatgtgggagatcttcaccctgggcggcagcccctaccccggcatccccgtggaggagctgttcaagctgctgaaggagggccacagaatggacaagcccgccaactgcaccaacgagctgtacatgatgatgagagactgctggcacgccgtgcccagccagagacccaccttcaagcagctggtggaggacctggacagaatcctgaccctgaccaccaacgaggagtacctggacctgagccagcccctggagcagtacagccccagctaccccgacaccagaagcagctgcagcagcggcgacgacagcgtgttcagccccgaccccatgccctacgagccctgcctgccccagtacccccacatcaacggcagcgtgaagacctag

SEQ ID NO: 291338 - DNA, 2469 bp, Artificial Sequence
  derived and/or modified sequence
atggtgagctggggcagattcatctgcctggtggtggtgaccatggccaccctgagcctggccagacccagcttcagcctggtggaggacaccaccctggagcccgaggagccccccaccaagtaccagatcagccagcccgaggtgtacgtggccgcccccggcgagagcctggaggtgagatgcctgctgaaggacgccgccgtgatcagctggaccaaggacggcgtgcacctgggccccaacaacagaaccgtgctgatcggcgagtacctgcagatcaagggcgccacccccagagacagcggcctgtacgcctgcaccgccagcagaaccgtggacagcgagacctggtacttcatggtgaacgtgaccgacgccatcagcagcggcgacgacgaggacgacaccgacggcgccgaggacttcgtgagcgagaacagcaacaacaagagagccccctactggaccaacaccgagaagatggagaagagactgcacgccgtgcccgccgccaacaccgtgaagttcagatgccccgccggcggcaaccccatgcccaccatgagatggctgaagaacggcaaggagttcaagcaggagcacagaatcggcggctacaaggtgagaaaccagcactggagcctgatcatggagagcgtggtgcccagcgacaagggcaactacacctgcgtggtggagaacgagtacggcagcatcaaccacacctaccacctggacgtggtggagagaagcccccacagacccatcctgcaggccggcctgcccgccaacgccagcaccgtggtgggcggcgacgtggagttcgtgtgcaaggtgtacagcgacgcccagccccacatccagtggatcaagcacgtggagaagaacggcagcaagtacggccccgacggcctgccctacctgaaggtgctgaaggtgaccaaggccgccggcgtgaacaccaccgacaaggagatcgaggtgctgtacatcagaaacgtgaccttcgaggacgccggcgagtacacctgcctggccggcaacagcatcggcatcagcttccacagcgcctggctgaccgtgctgcccgcccccggcagagagaaggagatcaccgccagccccgactacctggagatcgccatctactgcatcggcgtgttcctgatcgcctgcatggtggtgaccgtgatcctgtgcagaatgaagaacaccaccaagaagcccgacttcagcagccagcccgccgtgcacaagctgaccaagagaatccccctgagaagacaggtgagcgccgagagcagcagcagcatgaacagcaacacccccctggtgagaatcaccaccagactgagcagcaccgccgacacccccatgctggccggcgtgagcgagtacgagctgcccgaggaccccaagtgggagttccccagagacaagctgaccctgggcaagcccctgggcgagggctgcttcggccaggtggtgatggccgaggccgtgggcatcgacaaggacaagcccaaggaggccgtgaccgtggccgtgaagatgctgaaggacgacgccaccgagaaggacctgagcgacctggtgagcgagatggagatgatgaagatgatcggcaagcacaagaacatcatcaacctgctgggcgcctgcacccaggacggccccctgtacgtgatcgtggagtacgccagcaagggcaacctgagagagtacctgagagccagaagaccccccggcatggagtacagctacgacatcaacagagtgcccgaggagcagatgaccttcaaggacctggtgagctgcacctaccagctggccagaggcatggagtacctggccagccagaagtgcatccacagagacctggccgccagaaacgtgctggtgaccgagaacaacgtgatgaagatcgccgacttcggcctggccagagacatcaacaacatcgactactacaagaagaccaccaacggcagactgcccgtgaagtggatggcccccgaggccctgttcgacagagtgtacacccaccagagcgacgtgtggagcttcggcgtgctgatgtgggagatcttcaccctgggcggcagcccctaccccggcatccccgtggaggagctgttcaagctgctgaaggagggccacagaatggacaagcccgccaactgcaccaacgagctgtacatgatgatgagagactgctggcacgccgtgcccagccagagacccaccttcaagcagctggtggaggacctggacagaatcctgaccctgaccaccaacgaggagtacctggacctgagccagcccctggagcagtacagccccagctaccccgacaccagaagcagctgcagcagcggcgacgacagcgtgttcagccccgaccccatgccctacgagccctgcctgccccagtacccccacatcaacggcagcgtgaagacctag

SEQ ID NO: 291339 - DNA, 2650 bp, Artificial Sequence
  derived and/or modified sequence
ggaccggggattggtaccgtaaccatggtcagctggggtcgtttcatctgcctggtcgtggtcaccatggcaaccttgtccctggcccggccctccttcagtttagttgaggataccacattagagccagaagagccaccaaccaaataccaaatctctcaaccagaagtgtacgtggctgcgccaggggagtcgctagaggtgcgctgcctgttgaaagatgccgccgtgatcagttggactaaggatggggtgcacttggggcccaacaataggacagtgcttattggggagtacttgcagataaagggcgccacgcctagagactccggcctctatgcttgtactgccagtaggactgtagacagtgaaacttggtacttcatggtgaatgtcacagatgccatctcatccggagatgatgaggatgacaccgatggtgcggaagattttgtcagtgagaacagtaacaacaagagagcaccatactggaccaacacagaaaagatggaaaagcggctccatgctgtgcctgcggccaacactgtcaagtttcgctgcccagccggggggaacccaatgccaaccatgcggtggctgaaaaacgggaaggagtttaagcaggagcatcgcattggaggctacaaggtacgaaaccagcactggagcctcattatggaaagtgtggtcccatctgacaagggaaattatacctgtgtagtggagaatgaatacgggtccatcaatcacacgtaccacctggatgttgtggagcgatcgcctcaccggcccatcctccaagccggactgccggcaaatgcctccacagtggtcggaggagacgtagagtttgtctgcaaggtttacagtgatgcccagccccacatccagtggatcaagcacgtggaaaagaacggcagtaaatacgggcccgacgggctgccctacctcaaggttctcaagcactcggggataaatagttccaatgcagaagtgctggctctgttcaatgtgaccgaggcggatgctggggaatatatatgtaaggtctccaattatatagggcaggccaaccagtctgcctggctcactgtcctgccaaaacagcaagcgcctggaagagaaaaggagattacagcttccccagactacctggagatagccatttactgcataggggtcttcttaatcgcctgtatggtggtaacagtcatcctgtgccgaatgaagaacacgaccaagaagccagacttcagcagccagccggctgtgcacaagctgaccaaacgtatccccctgcggagacaggtaacagtttcggctgagtccagctcctccatgaactccaacaccccgctggtgaggataacaacacgcctctcttcaacggcagacacccccatgctggcaggggtctccgagtatgaacttccagaggacccaaaatgggagtttccaagagataagctgacactgggcaagcccctgggagaaggttgctttgggcaagtggtcatggcggaagcagtgggaattgacaaagacaagcccaaggaggcggtcaccgtggccgtgaagatgttgaaagatgatgccacagagaaagacctttctgatctggtgtcagagatggagatgatgaagatgattgggaaacacaagaatatcataaatcttcttggagcctgcacacaggatgggcctctctatgtcatagttgagtatgcctctaaaggcaacctccgagaatacctccgagcccggaggccacccgggatggagtactcctatgacattaaccgtgttcctgaggagcagatgaccttcaaggacttggtgtcatgcacctaccagctggccagaggcatggagtacttggcttcccaaaaatgtattcatcgagatttagcagccagaaatgttttggtaacagaaaacaatgtgatgaaaatagcagactttggactcgccagagatatcaacaatatagactattacaaaaagaccaccaatgggcggcttccagtcaagtggatggctccagaagccctgtttgatagagtatacactcatcagagtgatgtctggtccttcggggtgttaatgtgggagatcttcactttagggggctcgccctacccagggattcccgtggaggaactttttaagctgctgaaggaaggacacagaatggataagccagccaactgcaccaacgaactgtacatgatgatgagggactgttggcatgcagtgccctcccagagaccaacgttcaagcagttggtagaagacttggatcgaattctcactctcacaaccaatgagatctgaaagtttatggcttcattgagaaactgggaaaagttggtcaggcgcagtggctcatgcctgtaatcccagcactttgggaggccgaggcaggcggatcatgaggtcaggagttccagaccagcctggccaacatggtgaaaccctgtctctactaaagatacaaaaaattagccgggcgtgttggtgtgcacctgtaatcccagctactccgggaggctgaggcaggagagtcacttgaaccggggaggcggaggttgcagtgagccgagatcatgccattgcattccagccttggcgacagagcgagactccgtct

SEQ ID NO: 291340 - DNA, 2727 bp, Artificial Sequence
  derived and/or modified sequence
cgcgagcaaagtttggtggaggcaacgccaagcctgagtcctttcttcctctcgttccccaaatccgagggcagcccgcgggcgtcatgcccgcgctcctccgcagcctggggtacgcgtgaagcccgggaggcttggcgccggcgaagacccaaggaccactcttctgcgtttggagttgctccccgcaaccccgggctcgtcgctttctccatcccgacccacgcggggcgcggggacaacacaggtcgcggaggagcgttgccattcaagtgactgcagcagcagcggcagcgcctcggttcctgagcccaccgcaggctgaaggcattgcgcgtagtccatgcccgtagaggaagtgtgcagatgggattaacgtccacatggagatatggaagaggaccggggattggtaccgtaaccatggtcagctggggtcgtttcatctgcctggtcgtggtcaccatggcaaccttgtccctggcccggccctccttcagtttagttgaggataccacattagagccagaagagccaccaaccaaataccaaatctctcaaccagaagtgtacgtggctgcgccaggggagtcgctagaggtgcgctgcctgttgaaagatgccgccgtgatcagttggactaaggatggggtgcacttggggcccaacaataggacagtgcttattggggagtacttgcagataaagggcgccacgcctagagactccggcctctatgcttgtactgccagtaggactgtagacagtgaaacttggtacttcatggtgaatgtcacagatgccatctcatccggagatgatgaggatgacaccgatggtgcggaagattttgtcagtgagaacagtaacaacaagagagcaccatactggaccaacacagaaaagatggaaaagcggctccatgctgtgcctgcggccaacactgtcaagtttcgctgcccagccggggggaacccaatgccaaccatgcggtggctgaaaaacgggaaggagtttaagcaggagcatcgcattggaggctacaaggtacgaaaccagcactggagcctcattatggaaagtgtggtcccatctgacaagggaaattatacctgtgtagtggagaatgaatacgggtccatcaatcacacgtaccacctggatgttgtggagcgatcgcctcaccggcccatcctccaagccggactgccggcaaatgcctccacagtggtcggaggagacgtagagtttgtctgcaaggtttacagtgatgcccagccccacatccagtggatcaagcacgtggaaaagaacggcagtaaatacgggcccgacgggctgccctacctcaaggttctcaagcactcggggataaatagttccaatgcagaagtgctggctctgttcaatgtgaccgaggcggatgctggggaatatatatgtaaggtctccaattatatagggcaggccaaccagtctgcctggctcactgtcctgccaaaacagcaagcgcctggaagagaaaaggagattacagcttccccagactacctggagatagccatttactgcataggggtcttcttaatcgcctgtatggtggtaacagtcatcctgtgccgaatgaagaacacgaccaagaagccagacttcagcagccagccggctgtgcacaagctgaccaaacgtatccccctgcggagacaggtaacagtttcggctgagtccagctcctccatgaactccaacaccccgctggtgaggataacaacacgcctctcttcaacggcagacacccccatgctggcaggggtctccgagtatgaacttccagaggacccaaaatgggagtttccaagagataagctgacactgggcaagcccctgggagaaggttgctttgggcaagtggtcatggcggaagcagtgggaattgacaaagacaagcccaaggaggcggtcaccgtggccgtgaagatgttgaaagatgatgccacagagaaagacctttctgatctggtgtcagagatggagatgatgaagatgattgggaaacacaagaatatcataaatcttcttggagcctgcacacaggatgggcctctctatgtcatagttgagtatgcctctaaaggcaacctccgagaatacctccgagcccggaggccacccgggatggagtactcctatgacattaaccgtgttcctgaggagcagatgaccttcaaggacttggtgtcatgcacctaccagctggccagaggcatggagtacttggcttcccaaaaatgtattcatcgagatttagcagccagaaatgttttggtaacagaaaacaatgtgatgaaaatagcagactttggactcgccagagatatcaacaatatagactattacaaaaagaccaccaatgggcggcttccagtcaagtggatggctccagaagccctgtttgatagagtatacactcatcagagtgatgtctggtccttcggggtgttaatgtgggagatcttcactttagggggctcgccctacccagggattcccgtggaggaactttttaagctgctgaaggaaggacacagaatggataagccagccaactgcaccaacgaactgtacatgatgatgagggactgttggcatgcagtgccctcccagagaccaacgttcaagcagttggtagaagacttggatcgaattctcactctcacaaccaatgag

SEQ ID NO: 291341 - DNA, 3001 bp, Artificial Sequence
  derived and/or modified sequence
gagagccgagcgggcgggcggcgggtgcggagcgggcgagggagcgcgcgcggccgccacaaagctcgggcgccgcggggctgcatgcggcgtacctggcccggcgcggcgactgctctccgggctggcgggggccggccgcgagccccgggggccccgaggccgcagcttgcctgcgcgctctgagccttcgcaactcgcgagcaaagtttggtggaggcaacgccaagcctgagtcctttcttcctctcgttccccaaatccgagggcagcccgcgggcgtcatgcccgcgctcctccgcagcctggggtacgcgtgaagcccgggaggcttggcgccggcgaagacccaaggaccactcttctgcgtttggagttgctccccgcaaccccgggctcgtcgctttctccatcccgacccacgcggggcgcggggacaacacaggtcgcggaggagcgttgccattcaagtgactgcagcagcagcggcagcgcctcggttcctgagcccaccgcaggctgaaggcattgcgcgtagtccatgcccgtagaggaagtgtgcagatgggattaacgtccacatggagatatggaagaggaccggggattggtaccgtaaccatggtcagctggggtcgtttcatctgcctggtcgtggtcaccatggcaaccttgtccctggcccggccctccttcagtttagttgaggataccacattagagccagaagatgccatctcatccggagatgatgaggatgacaccgatggtgcggaagattttgtcagtgagaacagtaacaacaagagagcaccatactggaccaacacagaaaagatggaaaagcggctccatgctgtgcctgcggccaacactgtcaagtttcgctgcccagccggggggaacccaatgccaaccatgcggtggctgaaaaacgggaaggagtttaagcaggagcatcgcattggaggctacaaggtacgaaaccagcactggagcctcattatggaaagtgtggtcccatctgacaagggaaattatacctgtgtagtggagaatgaatacgggtccatcaatcacacgtaccacctggatgttgtggagcgatcgcctcaccggcccatcctccaagccggactgccggcaaatgcctccacagtggtcggaggagacgtagagtttgtctgcaaggtttacagtgatgcccagccccacatccagtggatcaagcacgtggaaaagaacggcagtaaatacgggcccgacgggctgccctacctcaaggttctcaagcactcggggataaatagttccaatgcagaagtgctggctctgttcaatgtgaccgaggcggatgctggggaatatatatgtaaggtctccaattatatagggcaggccaaccagtctgcctggctcactgtcctgccaaaacagcaagcgcctggaagagaaaaggagattacagcttccccagactacctggagatagccatttactgcataggggtcttcttaatcgcctgtatggtggtaacagtcatcctgtgccgaatgaagaacacgaccaagaagccagacttcagcagccagccggctgtgcacaagctgaccaaacgtatccccctgcggagacaggtaacagtttcggctgagtccagctcctccatgaactccaacaccccgctggtgaggataacaacacgcctctcttcaacggcagacacccccatgctggcaggggtctccgagtatgaacttccagaggacccaaaatgggagtttccaagagataagctgacactgggcaagcccctgggagaaggttgctttgggcaagtggtcatggcggaagcagtgggaattgacaaagacaagcccaaggaggcggtcaccgtggccgtgaagatgttgaaagatgatgccacagagaaagacctttctgatctggtgtcagagatggagatgatgaagatgattgggaaacacaagaatatcataaatcttcttggagcctgcacacaggatgggcctctctatgtcatagttgagtatgcctctaaaggcaacctccgagaatacctccgagcccggaggccacccgggatggagtactcctatgacattaaccgtgttcctgaggagcagatgaccttcaaggacttggtgtcatgcacctaccagctggccagaggcatggagtacttggcttcccaaaaatgtattcatcgagatttagcagccagaaatgttttggtaacagaaaacaatgtgatgaaaatagcagactttggactcgccagagatatcaacaatatagactattacaaaaagaccaccaatgggcggcttccagtcaagtggatggctccagaagccctgtttgatagagtatacactcatcagagtgatgtctggtccttcggggtgttaatgtgggagatcttcactttagggggctcgccctacccagggattcccgtggaggaactttttaagctgctgaaggaaggacacagaatggataagccagccaactgcaccaacgaactgtacatgatgatgagggactgttggcatgcagtgccctcccagagaccaacgttcaagcagttggtagaagacttggatcgaattctcactctcacaaccaatgagatctgaaagtttatggcttcattgagaaactgggaaaagttggtcaggcgcagtggctcatgcctgtaatcccagcactttgggaggccgaggcaggcggatcatgaggtcaggagttccagaccagcctggccaacatggtgaaaccctgtctctactaaagatacaaaaaattagccgggcgtgttggtgtgcacctgtaatcccagctactccgggaggctgaggcaggagagtcacttgaaccggggaggcggaggttgcagtgagccgagatcatgccattgcattccagccttggcgacagagcgagactccgtctcaaaaaaaaaaaaaataaaaa

SEQ ID NO: 291342 - protein, 707 aa, Artificial Sequence
  derived and/or modified sequence
MVSWGRFICLVVVTMATLSLARPSFSLVEDTTLEPEGAPYWTNTEKMEKRLHAVPAANTVKFRCPAGGNPMPTMRWLKNGKEFKQEHRIGGYKVRNQHWSLIMESVVPSDKGNYTCVVENEYGSINHTYHLDVVERSPHRPILQAGLPANASTVVGGDVEFVCKVYSDAQPHIQWIKHVEKNGSKYGPDGLPYLKVLKHSGINSSNAEVLALFNVTEADAGEYICKVSNYIGQANQSAWLTVLPKQQAPGREKEITASPDYLEIAIYCIGVFLIACMVVTVILCRMKNTTKKPDFSSQPAVHKLTKRIPLRRQVTVSAESSSSMNSNTPLVRITTRLSSTADTPMLAGVSEYELPEDPKWEFPRDKLTLGKPLGEGCFGQVVMAEAVGIDKDKPKEAVTVAVKMLKDDATEKDLSDLVSEMEMMKMIGKHKNIINLLGACTQDGPLYVIVEYASKGNLREYLRARRPPGMEYSYDINRVPEEQMTFKDLVSCTYQLARGMEYLASQKCIHRDLAARNVLVTENNVMKIADFGLARDINNIDYYKKTTNGRLPVKWMAPEALFDRVYTHQSDVWSFGVLMWEIFTLGGSPYPGIPVEELFKLLKEGHRMDKPANCTNELYMMMRDCWHAVPSQRPTFKQLVEDLDRILTLTTNEEYLDLSQPLEQYSPSYPDTRSSCSSGDDSVFSPDPMPYEPCLPQYPHINGSVKT

SEQ ID NO: 291343 - DNA, 3003 bp, Artificial Sequence
  derived and/or modified sequence
ggctggaggagagcgcggtggagagccgagcgggcgggcggcgggtgcggagcgggcgagggagcgcgcgcggccgccacaaagctcgggcgccgcggggctgcatgcggcgtacctggcccggcgcggcgactgctctccgggctggcgggggccggccgcgagccccgggggccccgaggccgcagcttgcctgcgcgctctgagccttcgcaactcgcgagcaaagtttggtggaggcaacgccaagcctgagtcctttcttcctctcgttccccaaatccgagggcagcccgcgggcgtcatgcccgcgctcctccgcagcctggggtacgcgtgaagcccgggaggcttggcgccggcgaagacccaaggaccactcttctgcgtttggagttgctccccgcaaccccgggctcgtcgctttctccatcccgacccacgcggggcgcggggacaacacaggtcgcggaggagcgttgccattcaagtgactgcagcagcagcggcagcgcctcggttcctgagcccaccgcaggctgaaggcattgcgcgtagtccatgcccgtagaggaagtgtgcagatgggattaacgtccacatggagatatggaagaggaccggggattggtaccgtaaccatggtcagctggggtcgtttcatctgcctggtcgtggtcaccatggcaaccttgtccctggcccggccctccttcagtttagttgaggataccacattagagccagaaggagcaccatactggaccaacacagaaaagatggaaaagcggctccatgctgtgcctgcggccaacactgtcaagtttcgctgcccagccggggggaacccaatgccaaccatgcggtggctgaaaaacgggaaggagtttaagcaggagcatcgcattggaggctacaaggtacgaaaccagcactggagcctcattatggaaagtgtggtcccatctgacaagggaaattatacctgtgtagtggagaatgaatacgggtccatcaatcacacgtaccacctggatgttgtggagcgatcgcctcaccggcccatcctccaagccggactgccggcaaatgcctccacagtggtcggaggagacgtagagtttgtctgcaaggtttacagtgatgcccagccccacatccagtggatcaagcacgtggaaaagaacggcagtaaatacgggcccgacgggctgccctacctcaaggttctcaagcactcggggataaatagttccaatgcagaagtgctggctctgttcaatgtgaccgaggcggatgctggggaatatatatgtaaggtctccaattatatagggcaggccaaccagtctgcctggctcactgtcctgccaaaacagcaagcgcctggaagagaaaaggagattacagcttccccagactacctggagatagccatttactgcataggggtcttcttaatcgcctgtatggtggtaacagtcatcctgtgccgaatgaagaacacgaccaagaagccagacttcagcagccagccggctgtgcacaagctgaccaaacgtatccccctgcggagacaggtaacagtttcggctgagtccagctcctccatgaactccaacaccccgctggtgaggataacaacacgcctctcttcaacggcagacacccccatgctggcaggggtctccgagtatgaacttccagaggacccaaaatgggagtttccaagagataagctgacactgggcaagcccctgggagaaggttgctttgggcaagtggtcatggcggaagcagtgggaattgacaaagacaagcccaaggaggcggtcaccgtggccgtgaagatgttgaaagatgatgccacagagaaagacctttctgatctggtgtcagagatggagatgatgaagatgattgggaaacacaagaatatcataaatcttcttggagcctgcacacaggatgggcctctctatgtcatagttgagtatgcctctaaaggcaacctccgagaatacctccgagcccggaggccacccgggatggagtactcctatgacattaaccgtgttcctgaggagcagatgaccttcaaggacttggtgtcatgcacctaccagctggccagaggcatggagtacttggcttcccaaaaatgtattcatcgagatttagcagccagaaatgttttggtaacagaaaacaatgtgatgaaaatagcagactttggactcgccagagatatcaacaatatagactattacaaaaagaccaccaatgggcggcttccagtcaagtggatggctccagaagccctgtttgatagagtatacactcatcagagtgatgtctggtccttcggggtgttaatgtgggagatcttcactttagggggctcgccctacccagggattcccgtggaggaactttttaagctgctgaaggaaggacacagaatggataagccagccaactgcaccaacgaactgtacatgatgatgagggactgttggcatgcagtgccctcccagagaccaacgttcaagcagttggtagaagacttggatcgaattctcactctcacaaccaatgaggaatacttggacctcagccaacctctcgaacagtattcacctagttaccctgacacaagaagttcttgttcttcaggagatgattctgttttttctccagaccccatgccttacgaaccatgccttcctcagtatccacacataaacggcagtgttaaaacatgaatgactgtgtctgcctgtccccaaacaggacagcactgggaacctagctacactgagcagggagaccatgcctcccagagcttgttgtctccacttgtatatatggatcagaggagtaaataattggaaaagtaatcagcatatgtgtaaagatttatacagttgaaaacttgtaatcttccccaggaggagaagaaggtttctggagcagtggactgccacaagccaccatgtaacc

SEQ ID NO: 291344 - DNA, 2124 bp, Artificial Sequence
  derived and/or modified sequence
atggtatcttggggacgcttcatctgtctggttgttgttactatggcgacgctatccctggccaggccaagcttcagcttggtggaggacactaccctggaacccgagggcgccccttactggacaaacactgaaaagatggagaaacggttgcacgccgtccctgcagccaatactgttaagttcaggtgtcccgcaggagggaatccgatgcccacaatgcggtggctcaaaaacggtaaggagttcaagcaagagcaccgaatcggcggatacaaggtgcgcaatcagcattggtccctaatcatggagtcagtggtcccaagcgataagggcaactatacctgtgtggtcgagaatgagtacggatccattaaccatacttaccaccttgacgtagttgaaaggtccccccaccgccccattctgcaggccgggttgcccgccaacgcttccaccgtcgtcgggggcgacgtagagttcgtatgcaaagtgtacagcgatgcacagccccatatccagtggatcaaacacgtggagaagaatggaagcaaatacggccctgatggcctgccatacctgaaggtactaaagcacagcggcattaactccagcaacgcggaagtactcgcactctttaatgtcactgaggccgacgcaggagaatatatctgcaaggtaagcaactacatcggacaggcaaaccagtccgcctggctcacagtgctgcccaagcagcaagcgcccgggcgggagaaggagatcacagctagtccagattatctggaaattgctatttactgcattggcgtctttctgattgcttgcatggtcgtgacagtcatactgtgccgcatgaaaaataccacaaagaagccagacttctcaagtcagccagcagttcacaagctcaccaaaaggattcccttgaggagacaggtcactgtctctgccgaatccagttcttctatgaattctaatacaccccttgtcaggatcactacaagactaagttccactgcagacacccccatgctggctggtgtctctgaatatgagctgcctgaagatcccaagtgggaatttcctcgagataaacttaccttgggtaagcccctaggagaaggatgcttcggccaggttgtaatggccgaggccgttggaattgataaagacaaaccgaaggaggccgtgaccgttgccgtgaaaatgttgaaggacgacgctacggagaaggatctctcagatctggtgtcggagatggaaatgatgaagatgatcggcaagcacaagaacatcataaatctgttgggagcctgtacacaggatggccccctatacgtgatcgtggaatatgcttcaaaagggaacttacgagagtaccttagggcaaggcggccgcccggcatggagtattcatacgacataaatagagtgcccgaggaacagatgacctttaaggatctcgtctcatgtacataccaactcgcaagagggatggagtaccttgcttctcaaaagtgtatccatcgcgatctggccgccaggaatgtactcgttacggagaataacgtcatgaaaatcgccgatttcgggctcgcaagagacatcaacaacattgattactataaaaagactaccaatggacgcctcccagtcaaatggatggctcccgaagcgctgtttgaccgtgtgtatacacaccagtcagacgtctggtcatttggggtgctgatgtgggaaattttcactctcggcggatctccatatcccggcatcccagtggaagagctgtttaagctgcttaaagagggacaccgaatggataagcctgctaactgcacgaacgaactgtacatgatgatgcgagactgttggcacgccgtgccaagccagagacccactttcaagcagttggttgaagacctagaccgcattttgaccctgacaactaacgaggagtatttagatctaagtcaacctttggaacagtattctccttcctaccccgacactaggtcgtcctgctcaagcggagacgactcggtgttctcccccgacccaatgccctatgagccctgcctgccccagtatccgcacatcaacgggagtgtgaagacctag

SEQ ID NO: 291345 - DNA, 2124 bp, Artificial Sequence
  derived and/or modified sequence
atggtgtcctggggccgcttcatctgcctggtggtggtgaccatggccaccctgagcctggcccggcccagcttcagcctggtggaggacaccaccctggagcctgagggcgccccctactggaccaacacagagaagatggagaagaggctgcatgctgtgcctgctgccaacacagtgaagttccgctgcccagctgggggcaaccccatgcccaccatgcgctggctgaagaatggcaaggagttcaagcaggagcacagaattggaggctacaaggtgaggaaccagcactggagcctcatcatggagagcgtggtgcccagcgacaagggcaactacacctgtgtggtggagaatgaatatggcagcatcaaccacacctaccacctggatgtggtggagaggagcccccaccggcccatcctgcaggccggcctgcctgccaatgccagcacagtggtgggcggagatgtggagtttgtgtgcaaggtgtacagtgatgcccagccccacatccagtggatcaagcacgtggagaagaatggcagcaaatatggcccagatggcctgccctacctgaaggtgctgaagcacagcggcatcaacagcagcaatgctgaggtgctggccctcttcaacgtgacagaagcagatgctggggagtacatctgcaaggtgagcaactacatcggccaggccaaccagagcgcctggctgactgtgctgcccaagcagcaggcccctggccgggagaaggagatcacagccagcccagactacctggagatcgccatctactgcattggagtcttcctgattgcctgcatggtggtgaccgtcatcctgtgcaggatgaagaacaccaccaagaagccagacttcagcagccagcctgctgtgcacaagctgaccaagaggatccccctgcggcggcaggtgacagtgtctgctgagagcagcagctccatgaacagcaacacccccctggtgcgcatcaccacccggctgagcagcacagctgacacccccatgctggccggcgtgtctgaatatgagctgcctgaggaccccaagtgggagttcccccgggacaagctgaccctgggcaagcccctgggggagggctgcttcggccaggtggtgatggccgaggccgtgggcatcgacaaggacaagcccaaggaggccgtgacagtggccgtgaagatgctgaaggatgatgccacagagaaggacctgagtgacctggtgtctgagatggagatgatgaagatgattggcaagcacaagaacatcatcaacctgctgggcgcctgcacccaggacggccccctgtatgtgattgtggagtatgccagcaaaggaaacctgcgggagtacctgcgggcccggcggcccccaggcatggagtacagctatgacatcaacagagtgcctgaggagcagatgaccttcaaggacctggtgtcctgcacctaccagctggcccggggcatggagtacctggccagccagaagtgcatccaccgggacctggccgccagaaatgtgctggtgacagagaacaacgtgatgaagattgctgactttggcctggcccgggacatcaacaacatcgactactacaagaagaccaccaacggccgcctgcctgtgaagtggatggcccctgaggccctgtttgacagagtgtacacccaccagagtgatgtgtggagctttggagtgctgatgtgggagatcttcaccctgggcggcagcccctacccaggcatccctgtggaggagctgttcaagctgctgaaggagggccacaggatggacaagccagccaactgcaccaatgagctgtacatgatgatgagggactgctggcatgctgtgcccagccagaggcccaccttcaagcagctggtggaggacctggaccgcatcctgaccctgaccaccaatgaggagtacctggacctgagccagcccctggagcagtacagccccagctacccagacaccaggagcagctgcagcagtggagatgacagcgtcttctccccagaccccatgccctatgagccctgcctgccccagtacccccacatcaatggatctgtgaagacctag

SEQ ID NO: 291346 - DNA, 2124 bp, Artificial Sequence
  derived and/or modified sequence
atggtgagctggggccggttcatctgcctggtggtggtgaccatggccacattatcactggctcgtccaagtttcagtctggtggaggacactacactcgaacccgaaggagctccctactggacgaatactgagaagatggagaagcgtctgcacgctgtgcccgccgccaacactgtgaagttccgctgccccgcaggagggaatcctatgccaacgatgcggtggctcaaaaatggaaaggagtttaaacaagaacatcgaataggaggctataaggtacggaatcagcactggtctctgatcatggaaagtgtcgtcccatccgataagggcaactatacttgtgtggtggagaacgagtacgggtcaatcaaccacacataccatctggacgtggtagagcgatctccacaccgcccaatcttgcaggcaggactgccggccaacgcctctactgttgttggtggcgacgtggagttcgtatgcaaagtatacagtgatgctcagcctcatatccagtggattaaacacgtggagaagaatggatcaaagtacgggcccgatgggcttccgtacctgaaagtactcaaacatagtggaataaattcctccaacgctgaagtacttgcactgttcaacgtgacagaggccgatgcgggcgagtacatttgcaaggtaagtaattacatcgggcaagctaaccagtctgcatggctcactgtgttaccaaaacagcaggcccccggtagggagaaagaaattacggcctcgccagactacctggagatcgctatttactgcatcggggtttttctgatcgcatgcatggtcgttactgtcatcctgtgccggatgaagaacacaacaaaaaaacctgatttttcctctcagcccgcagtgcataaactcacgaagaggatacctctgaggagacaggtcaccgtgagtgctgaaagctccagttccatgaacagtaatactccacttgttagaatcaccacccgcctttccagtacagctgacacccctatgctagctggtgtgtctgaatacgaactccctgaagaccccaagtgggagttcccgagggacaaactgactctagggaaacctctgggcgaagggtgcttcggtcaggtcgttatggcagaagccgttggcattgacaaggacaaaccaaaggaagccgtgactgtggccgtgaaaatgctgaaggacgacgcgacagagaaggatctgtccgatttggtgagtgagatggagatgatgaaaatgattggaaaacacaagaatattataaacttgctgggggcctgtacacaggatgggccactgtacgtaattgtagaatacgcttctaaggggaacctcagagagtacctgagggcacggcgccccccaggcatggaatactcttacgatattaaccgagtcccagaagagcagatgacttttaaagacttggtgtcatgcacctaccaactggcccgggggatggaatacctcgcatctcagaagtgtatacatagagacctagccgctcgaaacgtcttggtgacagaaaacaatgttatgaaaatcgcggacttcggactggctcgagatattaataacatcgattattataaaaagacgaccaacggccgtttgcctgttaagtggatggccccagaagccttattcgatagagtgtacacccaccaatccgacgtgtggtctttcggagttctgatgtgggaaatctttactttgggagggtctccatacccggggattccggtagaagagctcttcaagttactcaaagaagggcatcggatggacaagccagcgaattgcaccaatgagctgtacatgatgatgagggattgctggcatgccgtccctagtcaacggcccacctttaaacaactggtcgaggatctggaccggatcctgaccctcaccacaaatgaagagtacctcgatctctctcagcctctggaacaatattctcctagttaccctgacacaaggagcagctgttcctccggagacgatagtgtgttttcgcctgaccctatgccctatgagccgtgtctgccacaatatccccacatcaacgggtctgttaagacttag

SEQ ID NO: 291347 - DNA, 2124 bp, Artificial Sequence
  derived and/or modified sequence
atggtcagttggggtcgatttatctgcctcgttgtcgtcacgatggccacactgtcccttgcccgacccagttttagtctagtggaagatactacactggaaccagaaggtgctccttattggactaatacagaaaagatggagaaacgcctgcacgctgtgcccgcagctaatacagttaaatttcgatgtcccgctggtgggaaccccatgccgaccatgaggtggcttaagaatggcaaggagtttaaacaggaacatcgaatcgggggatacaaggttaggaaccagcactggtccttgattatggagtccgtcgtgccctcggacaaaggaaactatacctgcgtagtggaaaatgagtacggctccataaatcatacttatcacctggacgtggtggagcggagcccgcaccgtcccatcttgcaggctgggcttccggctaacgcgtcaacggtcgtgggcggagacgtggagtttgtgtgcaaagtgtacagtgatgcacagcctcatatacagtggattaagcacgtggaaaagaatggcagcaagtatggcccagacggcctgccctatctaaaggttctgaaacatagtggcatcaattcgagcaacgcagaggtcttagccctctttaacgtcaccgaagcggatgccggtgagtatatctgcaaggtctcaaactacattggtcaggccaaccagtccgcctggctgaccgtgttaccaaagcagcaagcacccggacgggaaaaagagatcacagcctcacccgactacctggaaattgccatctactgtataggagtgttcctcatcgcctgcatggtggtgaccgtcatcctttgtcgaatgaagaacaccactaagaaacccgatttttcctcccaacccgctgttcacaaactcaccaagcgcatccctctccgaaggcaagtcaccgtctctgcggagagcagctcttccatgaacagtaacacgccactagtgagaatcaccaccagactgagtagcaccgccgacacaccaatgctcgccggagtctcagaatacgagctgcccgaagatcctaagtgggagtttccaagggacaagctcaccctgggcaaacccttgggagagggctgcttcggacaagtggtgatggctgaggccgtcggcattgataaagacaaacctaaagaagcagtcacagtggccgtgaagatgctgaaagacgatgccacggagaaggatctgtccgatcttgtctccgaaatggaaatgatgaagatgattggcaaacacaaaaatatcattaaccttctcggcgcttgtacacaggacgggcctctctatgtgatcgtagagtacgcttcaaagggcaatctgcgtgaatacctacgcgctaggcggccacctgggatggagtattcatatgatatcaacagggtgccagaggagcagatgacatttaaggatctggtgagctgcacctatcagctcgccagggggatggagtatttggcatctcagaagtgtattcatcgggacctggctgccaggaacgtactggtaacagaaaacaacgttatgaaaatagccgatttcggtctggcgagggatatcaacaacatagactattacaaaaaaaccacgaacggccgactgcctgtgaaatggatggctcccgaggccctgtttgaccgcgtctatacacaccagtccgacgtgtggtctttcggcgtactcatgtgggaaatctttaccctgggcggaagcccatatcctgggatacccgtcgaggagcttttcaaactgctgaaagaggggcaccgcatggacaagccagcaaattgcacaaacgaactatacatgatgatgagagactgttggcacgctgtcccctcccagcggccaaccttcaaacaactggtagaggatcttgacaggatcctcactctgacgacaaatgaggagtatttggacctttcccaaccgctggagcagtattcacctagctatcctgacacaagaagttcttgtagctctggggacgacagcgttttttcccctgatcctatgccgtacgaaccatgcctgccacagtacccccatatcaacggctcagtcaagacctag

SEQ ID NO: 291348 - DNA, 2124 bp, Artificial Sequence
  derived and/or modified sequence
atggtgagctggggcagattcatctgcctggtggtggtgaccatggccaccctgagcctggccagacccagcttcagcctggtggaggacaccaccctggagcccgagggcgccccctactggaccaacaccgagaagatggagaagagactgcacgccgtgcccgccgccaacaccgtgaagttcagatgccccgccggcggcaaccccatgcccaccatgagatggctgaagaacggcaaggagttcaagcaggagcacagaatcggcggctacaaggtgagaaaccagcactggagcctgatcatggagagcgtggtgcccagcgacaagggcaactacacctgcgtggtggagaacgagtacggcagcatcaaccacacctaccacctggacgtggtggagagaagcccccacagacccatcctgcaggccggcctgcccgccaacgccagcaccgtggtgggcggcgacgtggagttcgtgtgcaaggtgtacagcgacgcccagccccacatccagtggatcaagcacgtggagaagaacggcagcaagtacggccccgacggcctgccctacctgaaggtgctgaagcacagcggcatcaacagcagcaacgccgaggtgctggccctgttcaacgtgaccgaggccgacgccggcgagtacatctgcaaggtgagcaactacatcggccaggccaaccagagcgcctggctgaccgtgctgcccaagcagcaggcccccggcagagagaaggagatcaccgccagccccgactacctggagatcgccatctactgcatcggcgtgttcctgatcgcctgcatggtggtgaccgtgatcctgtgcagaatgaagaacaccaccaagaagcccgacttcagcagccagcccgccgtgcacaagctgaccaagagaatccccctgagaagacaggtgaccgtgagcgccgagagcagcagcagcatgaacagcaacacccccctggtgagaatcaccaccagactgagcagcaccgccgacacccccatgctggccggcgtgagcgagtacgagctgcccgaggaccccaagtgggagttccccagagacaagctgaccctgggcaagcccctgggcgagggctgcttcggccaggtggtgatggccgaggccgtgggcatcgacaaggacaagcccaaggaggccgtgaccgtggccgtgaagatgctgaaggacgacgccaccgagaaggacctgagcgacctggtgagcgagatggagatgatgaagatgatcggcaagcacaagaacatcatcaacctgctgggcgcctgcacccaggacggccccctgtacgtgatcgtggagtacgccagcaagggcaacctgagagagtacctgagagccagaagaccccccggcatggagtacagctacgacatcaacagagtgcccgaggagcagatgaccttcaaggacctggtgagctgcacctaccagctggccagaggcatggagtacctggccagccagaagtgcatccacagagacctggccgccagaaacgtgctggtgaccgagaacaacgtgatgaagatcgccgacttcggcctggccagagacatcaacaacatcgactactacaagaagaccaccaacggcagactgcccgtgaagtggatggcccccgaggccctgttcgacagagtgtacacccaccagagcgacgtgtggagcttcggcgtgctgatgtgggagatcttcaccctgggcggcagcccctaccccggcatccccgtggaggagctgttcaagctgctgaaggagggccacagaatggacaagcccgccaactgcaccaacgagctgtacatgatgatgagagactgctggcacgccgtgcccagccagagacccaccttcaagcagctggtggaggacctggacagaatcctgaccctgaccaccaacgaggagtacctggacctgagccagcccctggagcagtacagccccagctaccccgacaccagaagcagctgcagcagcggcgacgacagcgtgttcagccccgaccccatgccctacgagccctgcctgccccagtacccccacatcaacggcagcgtgaagacctag

SEQ ID NO: 291349 - DNA, 3005 bp, Artificial Sequence
  derived and/or modified sequence
ggcggcggctggaggagagcgcggtggagagccgagcgggcgggcggcgggtgcggagcgggcgagggagcgcgcgcggccgccacaaagctcgggcgccgcggggctgcatgcggcgtacctggcccggcgcggcgactgctctccgggctggcgggggccggccgcgagccccgggggccccgaggccgcagcttgcctgcgcgctctgagccttcgcaactcgcgagcaaagtttggtggaggcaacgccaagcctgagtcctttcttcctctcgttccccaaatccgagggcagcccgcgggcgtcatgcccgcgctcctccgcagcctggggtacgcgtgaagcccgggaggcttggcgccggcgaagacccaaggaccactcttctgcgtttggagttgctccccgcaaccccgggctcgtcgctttctccatcccgacccacgcggggcgcggggacaacacaggtcgcggaggagcgttgccattcaagtgactgcagcagcagcggcagcgcctcggttcctgagcccaccgcaggctgaaggcattgcgcgtagtccatgcccgtagaggaagtgtgcagatgggattaacgtccacatggagatatggaagaggaccggggattggtaccgtaaccatggtcagctggggtcgtttcatctgcctggtcgtggtcaccatggcaaccttgtccctggcccggccctccttcagtttagttgaggataccacattagagccagaagagccaccaaccaaataccaaatctctcaaccagaagtgtacgtggctgcgccaggggagtcgctagaggtgcgctgcctgttgaaagatgccgccgtgatcagttggactaaggatggggtgcacttggggcccaacaataggacagtgcttattggggagtacttgcagataaagggcgccacgcctagagactccggcctctatgcttgtactgccagtaggactgtagacagtgaaacttggtacttcatggtgaatgtcacagatgccatctcatccggagatgatgaggatgacaccgatggtgcggaagattttgtcagtgagaacagtaacaacaagagagcaccatactggaccaacacagaaaagatggaaaagcggctccatgctgtgcctgcggccaacactgtcaagtttcgctgcccagccggggggaacccaatgccaaccatgcggtggctgaaaaacgggaaggagtttaagcaggagcatcgcattggaggctacaaggtacgaaaccagcactggagcctcattatggaaagtgtggtcccatctgacaagggaaattatacctgtgtagtggagaatgaatacgggtccatcaatcacacgtaccacctggatgttgtggagcgatcgcctcaccggcccatcctccaagccggactgccggcaaatgcctccacagtggtcggaggagacgtagagtttgtctgcaaggtttacagtgatgcccagccccacatccagtggatcaagcacgtggaaaagaacggcagtaaatacgggcccgacgggctgccctacctcaaggttctcaaggccgccggtgttaacaccacggacaaagagattgaggttctctatattcggaatgtaacttttgaggacgctggggaatatacgtgcttggcgggtaattctattgggatatcctttcactctgcatggttgacagttctgccagcgcctggaagagaaaaggagattacagcttccccagactacctggagatagccatttactgcataggggtcttcttaatcgcctgtatggtggtaacagtcatcctgtgccgaatgaagaacacgaccaagaagccagacttcagcagccagccggctgtgcacaagctgaccaaacgtatccccctgcggagacaggtttcggctgagtccagctcctccatgaactccaacaccccgctggtgaggataacaacacgcctctcttcaacggcagacacccccatgctggcaggggtctccgagtatgaacttccagaggacccaaaatgggagtttccaagagataagctgacactgggcaagcccctgggagaaggttgctttgggcaagtggtcatggcggaagcagtgggaattgacaaagacaagcccaaggaggcggtcaccgtggccgtgaagatgttgaaagatgatgccacagagaaagacctttctgatctggtgtcagagatggagatgatgaagatgattgggaaacacaagaatatcataaatcttcttggagcctgcacacaggatgggcctctctatgtcatagttgagtatgcctctaaaggcaacctccgagaatacctccgagcccggaggccacccgggatggagtactcctatgacattaaccgtgttcctgaggagcagatgaccttcaaggacttggtgtcatgcacctaccagctggccagaggcatggagtacttggcttcccaaaaatgtattcatcgagatttagcagccagaaatgttttggtaacagaaaacaatgtgatgaaaatagcagactttggactcgccagagatatcaacaatatagactattacaaaaagaccaccaatgggcggcttccagtcaagtggatggctccagaagccctgtttgatagagtatacactcatcagagtgatgtctggtccttcggggtgttaatgtgggagatcttcactttagggggctcgccctacccagggattcccgtggaggaactttttaagctgctgaaggaaggacacagaatggataagccagccaactgcaccaacgaactgtacatgatgatgagggactgttggcatgcagtgccctcccagagaccaacgttcaagcagttggtagaagacttggatcgaattctcactctcacaaccaatgaggaatacttggacctcagtcagcctctcgaaccgtattcaccttgttatcctgacccaagatga

SEQ ID NO: 291350 - DNA, 1680 bp, Artificial Sequence
  derived and/or modified sequence
ccggccgcgagccccgggggccccgaggccgcagcttgcctgcgcgctctgagccttcgcaactcgcgagcaaagtttggtggaggcaacgccaagcctgagtcctttcttcctctcgttccccaaatccgagggcagcccgcgggcgtcatgcccgcgctcctccgcagcctggggtacgcgtgaagcccgggaggcttggcgccggcgaagacccaaggaccactcttctgcgtttggagttgctccccgcaaccccgggctcgtcgctttctccatcccgacccacgcggggcgcggggacaacacaggtcgcggaggagcgttgccattcaagtgactgcagcagcagcggcagcgcctcggttcctgagcccaccgcaggctgaaggcattgcgcgtagtccatgcccgtagaggaagtgtgcagatgggattaacgtccacatggagatatggaagaggaccggggattggtaccgtaaccatggtcagctggggtcgtttcatctgcctggtcgtggtcaccatggcaaccttgtccctggcccggccctccttcagtttagttgaggataccacattagagccagaagagccaccaaccaaataccaaatctctcaaccagaagtgtacgtggctgcgccaggggagtcgctagaggtgcgctgcctgttgaaagatgccgccgtgatcagttggactaaggatggggtgcacttggggcccaacaataggacagtgcttattggggagtacttgcagataaagggcgccacgcctagagactccggcctctatgcttgtactgccagtaggactgtagacagtgaaacttggtacttcatggtgaatgtcacagatgccatctcatccggagatgatgaggatgacaccgatggtgcggaagattttgtcagtgagaacagtaacaacaagagagcaccatactggaccaacacagaaaagatggaaaagcggctccatgctgtgcctgcggccaacactgtcaagtttcgctgcccagccggggggaacccaatgccaaccatgcggtggctgaaaaacgggaaggagtttaagcaggagcatcgcattggaggctacaaggtacgaaaccagcactggagcctcattatggaaagtgtggtcccatctgacaagggaaattatacctgtgtagtggagaatgaatacgggtccatcaatcacacgtaccacctggatgttgtgggcagccagggtttatgagctttgcatgatcctcatggttcccaagcgtcatctgtgtaaagtggacgtggtatgaaatgtctgacattttggaagctgagattactctgaaaatgttaattgggcaggtgaaaagggtacagatgtgctgtagcagacctttggttttaaaagagaagcatcatttccccaacagggcaactgtagaaggccagctgaagagtaaaggaaaaggtctgaggactgagcctgtggctggctggaaaaaggtgaatgttgagggcccttcacttccatcacaagaaagtcattagacggtaccaattcagtgtctgttcctggcatctatttcctctgtgcaaagggaaccatgtatatgagcttataaatacatttttgtcagagtgcacagataagtaggccattttaattaaacattgaagacc

SEQ ID NO: 291351 - DNA, 2358 bp, Artificial Sequence
  derived and/or modified sequence
atggttagttggggtcggtttatatgtctggtcgtagttacaatggctaccctctccctggcaagacccagtttctccctcgtagaagataccacgctggagcccgaagagccacccactaagtatcagataagtcaaccagaggtctacgtcgctgcccctggagaaagcctcgaagttaggtgtctgctgaaagatgcggccgtgatcagctggactaaagacggcgtccatctgggtccaaataacagaaccgtgcttatcggagagtaccttcagatcaagggggccacgccgcgcgactctggtctgtatgcttgcacggcttcaaggacagtcgacagcgagacctggtatttcatggtaaacgtcaccgatgccatcagctcgggagatgatgaagatgacacagatggcgccgaagactttgtctccgagaattctaacaacaaacgtgcaccttactggaccaataccgagaagatggaaaaaaggctccacgctgtccccgcggctaacacagtcaagtttagatgccccgccgggggtaatccaatgcctacaatgaggtggttgaagaatgggaaggagttcaagcaggagcaccgcatcggcggctacaaggtccgcaaccagcattggtccttgatcatggagtccgtggtgccatctgacaaaggcaattacacctgtgtggtagagaacgagtatgggagtatcaatcacacatatcatctggatgtggtggagcggtctccccaccgcccaattctccaggccggactgccagccaacgcttccaccgttgtcggcggggacgttgaatttgtatgtaaagtctactcggacgcccagccccacattcaatggatcaagcacgtcgagaaaaacgggagtaagtacggcccagatggcctgccataccttaaagtattgaaagcggcaggagttaatactactgataaggagatcgaagtcctgtacattcggaacgtgacctttgaggacgccggcgagtatacttgtctggctggcaattccattggtatcagcttccattctgcttggctgacagtgctaccagcaccgggtcgagagaaggagatcacagcgtctcccgactacctggaaatcgccatttattgtataggagtctttttgattgcctgcatggttgtgactgtaatcctctgtaggatgaagaacaccacgaaaaaaccggactttagctcccagcctgccgtgcataaactgaccaaaagaataccactgcggaggcaggtctcagccgagtccagctcttctatgaattccaatactcccctggtgcgaatcactacgcgcctttcctcaaccgcggacaccccaatgcttgccggcgtgtccgaatacgagctccctgaggatccgaagtgggaattccctcgggacaaattgaccctggggaaacctttgggagaagggtgtttcggccaggtggtgatggctgaggctgtgggcatcgacaaagacaaacccaaggaggctgtaaccgtagcggtgaagatgctgaaagacgacgccaccgagaaagacctgtcagacctggtgagcgagatggagatgatgaaaatgattggaaagcacaagaatatcattaacctgctgggtgcttgtacacaggacgggccactttatgttatcgtggagtacgcaagtaagggtaatcttagagagtatctgagggctcgccgccccccagggatggaatactcctacgacattaatcgggtgcccgaagaacagatgactttcaaagacctcgtttcatgcacataccagctcgcaaggggaatggaatacctggcgtcgcagaagtgtattcatagggacctggccgcccggaacgtcttggtcacagaaaacaatgtcatgaagattgccgacttcggcctggctagagatatcaacaacatcgactactacaagaagacaacgaacggacggcttccagtcaaatggatggcccccgaggctctgttcgacagagtgtacacccaccagagcgatgtgtggagttttggtgtcctcatgtgggaaatattcacgttgggaggtagtccgtaccctggcattcccgtagaagagttgtttaagctgctgaaagaaggccaccgcatggacaaacctgctaattgcaccaacgagctgtacatgatgatgcgtgactgttggcatgccgttccctctcagcgccccaccttcaagcaacttgtagaagacctcgatcgaattcttacgctgaccaccaacgaggagtatttagacctctctcagccgctggagccctatagcccctgctacccggatcctcggtag

SEQ ID NO: 291352 - DNA, 2358 bp, Artificial Sequence
  derived and/or modified sequence
atggtgtcctggggccgcttcatctgcctggtggtggtgaccatggccaccctgagcctggcccggcccagcttcagcctggtggaggacaccaccctggagcctgaggagccccccaccaagtaccagatcagccagcctgaggtgtatgtggccgcccctggagagagcctggaggtgcgctgcctgctgaaggatgctgctgtgatctcctggaccaaggatggagtgcacctgggccccaacaacagaacagtgctgattggagagtacctgcagatcaagggggccaccccccgggacagcggcctgtatgcctgcacagccagcaggacagtggacagcgagacctggtacttcatggtgaatgtgacagatgccatcagcagtggagatgatgaagatgacacagatggagcagaagattttgtgtctgagaacagcaacaacaagagggccccctactggaccaacacagagaagatggagaagaggctgcatgctgtgcctgctgccaacacagtgaagttccgctgcccagctgggggcaaccccatgcccaccatgcgctggctgaagaatggcaaggagttcaagcaggagcaccgcatcggcggctacaaggtgaggaaccagcactggagcctcatcatggagagcgtggtgcccagcgacaagggcaactacacctgtgtggtggagaatgaatatggcagcatcaaccacacctaccacctggatgtggtggagaggagcccccaccggcccatcctgcaggccggcctgcctgccaatgccagcacagtggtgggcggagatgtggagtttgtgtgcaaggtgtacagtgatgcccagccccacatccagtggatcaagcacgtggagaagaatggcagcaaatatggcccagatggcctgccctacctgaaggtgctgaaggctgctggggtgaacaccacagacaaggagattgaggtgctgtacatcagaaatgtgacctttgaagatgctggggagtacacctgcctggccggcaacagcatcggcatctccttccacagcgcctggctgactgtgctgcctgcccctggccgggagaaggagatcacagccagcccagactacctggagatcgccatctactgcattggagtcttcctgattgcctgcatggtggtgaccgtcatcctgtgcaggatgaagaacaccaccaagaagccagacttcagcagccagcctgctgtgcacaagctgaccaagaggatccccctgcggcggcaggtgtctgctgagagcagcagctccatgaacagcaacacccccctggtgcgcatcaccacccggctgagcagcacagctgacacccccatgctggccggcgtgtctgaatatgagctgcctgaggaccccaagtgggagttcccccgggacaagctgaccctgggcaagcccctgggggagggctgcttcggccaggtggtgatggccgaggccgtgggcatcgacaaggacaagcccaaggaggccgtgacagtggccgtgaagatgctgaaggatgatgccacagagaaggacctgagtgacctggtgtctgagatggagatgatgaagatgattggcaagcacaagaacatcatcaacctgctgggcgcctgcacccaggacggccccctgtatgtgattgtggagtatgccagcaaaggaaacctgcgggagtacctgcgggcccggcggcccccaggcatggagtacagctatgacatcaacagagtgcctgaggagcagatgaccttcaaggacctggtgtcctgcacctaccagctggcccggggcatggagtacctggccagccagaagtgcatccaccgggacctggccgccagaaatgtgctggtgacagagaacaacgtgatgaagattgctgactttggcctggcccgggacatcaacaacatcgactactacaagaagaccaccaacggccgcctgcctgtgaagtggatggcccctgaggccctgtttgacagagtgtacacccaccagagtgatgtgtggagctttggagtgctgatgtgggagatcttcaccctgggcggcagcccctacccaggcatccctgtggaggagctgttcaagctgctgaaggagggccacaggatggacaagccagccaactgcaccaatgagctgtacatgatgatgagggactgctggcatgctgtgcccagccagaggcccaccttcaagcagctggtggaggacctggaccgcatcctgaccctgaccaccaatgaggagtacctggacctgagccagcccctggagccctacagcccctgctacccagaccccaggtag

SEQ ID NO: 291353 - DNA, 2358 bp, Artificial Sequence
  derived and/or modified sequence
atggtgagctggggccggttcatctgcctggtggtggtgaccatggctaccctcagcctcgcccgccctagctttagcctcgtggaagatactactctggagcctgaggaacctcccaccaaataccaaatctcccaaccagaggtttacgtcgcggctcctggggagagcctggaagtgcgctgtttactcaaggacgccgccgttatatcatggaccaaggacggtgtgcatctcggacccaacaatagaacagtacttattggcgagtacttgcagatcaaaggcgctacaccgcgcgattctggtctttatgcgtgtactgccagtaggaccgtggacagcgagacttggtactttatggtgaatgtcactgatgcaatctcctcaggcgacgacgaggatgatacagatggcgccgaggacttcgtctcggaaaactctaataacaagcgcgctccctactggaccaatacggagaagatggagaaacgcctccacgcggtcccagccgccaataccgtcaagtttcggtgtccggctggaggaaatccaatgcccactatgcggtggctgaagaacggaaaggaatttaaacaggaacatcgtataggaggttataaagtgaggaaccagcactggtcactgatcatggagtccgtggtgccgagcgacaaagggaattatacctgtgttgtcgagaatgagtatggatctataaaccacacttaccatctggatgtcgtggagaggtcaccacatcggcctatcttgcaggccggccttcccgctaatgcctcgacagtcgttgggggtgatgtcgagttcgtatgcaaggtgtactcggatgcccagccccatattcagtggatcaagcatgtggagaaaaacggatctaaatacgggcccgatggcttaccatatcttaaagtcctaaaagctgcaggtgtaaacacaacggataaggagatagaagtcctgtacatcagaaacgtgacatttgaagacgccggcgaatatacatgtcttgctggcaattccatcgggatatcctttcattcagcctggctgaccgtcctgcccgctcctggtagagagaaagagatcaccgcctccccagactatcttgagattgctatctattgtattggcgtatttttaattgcgtgtatggtggtcacagtgattctctgtagaatgaagaatacgactaagaagcccgatttctcgagtcagcctgctgtccataagctgacaaagagaattcccctgaggcggcaagtgtccgcagagagctccagttcgatgaatagtaacactcccctggttaggattactactaggctgtcttcaactgccgacacgcctatgttagcgggggtttcagagtacgaactgcccgaggatcccaaatgggagttcccaagggataaattaacgttaggcaagcccctgggcgaagggtgcttcggtcaggtggtaatggcagaagcagtagggatcgacaaggacaaaccaaaggaagctgtgaccgtagccgtcaagatgctgaaagacgatgctaccgaaaaggatctgagcgatctggttagcgagatggagatgatgaaaatgatcggaaagcataaaaacatcattaaccttttaggcgcatgtacgcaggacgggccactgtacgtgatcgtagagtacgcaagtaagggaaacctgagggagtacctgagggccaggaggccccctgggatggagtactcgtatgacattaacagagtgccggaagaacagatgaccttcaaggaccttgtgtcttgtacgtatcagcttgccaggggcatggaatatttggcttctcaaaagtgcattcatagggatctagccgcccggaatgtcctggttactgaaaataacgtaatgaagattgcagatttcggtctggctagagatatcaacaacatcgattattataagaaaacaactaacggccggttgcctgtcaaatggatggcccctgaagcactctttgaccgagtttatacccatcagagcgacgtctggagtttcggggttctgatgtgggaaatttttacattgggtggatcaccctatccaggcatacctgtggaagaactcttcaaactgttaaaagaaggacaccggatggacaagccagcaaactgtaccaatgaactgtacatgatgatgagggattgttggcatgccgtccctagccagaggcccacttttaaacaattagtcgaagatctggaccggatcttgaccctgaccaccaatgaggagtacctcgacctctcgcaacccttggagccgtactctccttgctatccagaccctcgatag

SEQ ID NO: 291354 - DNA, 2358 bp, Artificial Sequence
  derived and/or modified sequence
atggtctcgtggggccgattcatttgtctggttgtggtaacaatggcaactctttctctcgcccgacccagtttctctctggtggaggatactaccttggagcctgaggaaccacctactaagtatcaaataagccagcctgaagtttatgttgccgctcctggtgaaagcctcgaggtccgatgtctcctgaaggacgctgccgtgatcagctggaccaaagacggggtgcacttgggcccaaataacagaactgtacttatcggcgagtacctgcaaataaagggcgctaccccgcgagattccggcctgtacgcctgcaccgcttcaaggacggtggactccgagacatggtatttcatggttaatgtaactgatgccatttcatccggggacgatgaagatgacaccgacggagccgaagacttcgtatccgaaaattctaacaataaacgtgccccatattggactaacactgaaaaaatggaaaagcggctgcacgccgtgcccgcagccaacacagttaaattcagatgtcctgctggtggtaatccaatgcccaccatgcgatggttaaaaaatgggaaggagtttaaacaggagcatagaatcgggggatataaggtgcgcaatcaacactggtccctcatcatggaaagtgttgtgccctctgataaggggaattatacgtgtgtcgtggagaacgaatacggaagtattaaccacacctaccacctggatgtagtggagagaagtcctcacagaccgatactgcaggctggactgcccgcaaatgcgtctaccgttgtcggcggagacgtagagtttgtgtgtaaggtgtacagcgatgcccagccgcatatccagtggatcaaacacgtagagaagaatggcagcaagtatggtccagatggcctgccctacctcaaggttttaaaggccgcaggtgtgaacaccactgataaggagatagaagtcctctatattagaaacgtcaccttcgaggacgcgggagaatacacttgcctggctggaaattctataggtatttcattccattccgcgtggctcacagtgcttccagccccaggcagagagaaagagatcaccgcctctcccgattacctggaaattgctatctattgtattggggtgttcctcattgcctgtatggtcgtgactgtgattctgtgccgcatgaagaacaccacaaagaaacctgactttagttctcagcctgccgtgcacaagctgacaaaacggattcctctccggagacaggtgtccgctgagtcctcctcatcaatgaactcaaatacccctctcgtgaggattaccactagacttagttcgacggctgatacacctatgctcgctggagtatcagagtacgaactgcccgaggatcccaaatgggagtttcctagagataagctgacactgggtaaacctcttggcgaaggatgtttcggacaagtagttatggccgaggccgttggcatagacaaggacaagcccaaggaagctgtgaccgtcgctgtaaagatgctcaaggatgatgcaactgaaaaagacttgagtgacctggtcagcgaaatggagatgatgaagatgataggcaagcacaagaacatcatcaatctgctgggagcatgcacgcaagacggaccactgtacgtgatcgttgagtatgcatcgaagggtaatctgagggaatatttaagagcaagaagaccgcctggaatggaatattcctatgacatcaaccgagtgcccgaggaacagatgacattcaaggatctcgtgagctgcacctatcagctagctcggggaatggagtatttggcttcccagaagtgcattcacagggatctggccgctaggaatgtgctggttacagagaataatgttatgaagatcgcagatttcgggctggctcgggacattaataacatcgactattacaagaagacaacaaacgggagactgccagtgaagtggatggctcccgaagctctcttcgaccgtgtgtatacacaccagtcagacgtgtggagcttcggcgtgcttatgtgggaaatcttcaccctcggtggctctccgtaccccggaattcccgtggaagaactctttaagcttctgaaggagggccaccgtatggacaagcccgctaactgtaccaatgaactctacatgatgatgagggattgttggcacgccgtcccatcgcaaaggccgacctttaagcagcttgttgaggacctggaccgcatactcaccctcacaaccaatgaagagtatctggacctgtcacagccactggaaccatattctccctgttaccccgaccctagatag

SEQ ID NO: 291355 - DNA, 2358 bp, Artificial Sequence
  derived and/or modified sequence
atggtgagctggggcagattcatctgcctggtggtggtgaccatggccaccctgagcctggccagacccagcttcagcctggtggaggacaccaccctggagcccgaggagccccccaccaagtaccagatcagccagcccgaggtgtacgtggccgcccccggcgagagcctggaggtgagatgcctgctgaaggacgccgccgtgatcagctggaccaaggacggcgtgcacctgggccccaacaacagaaccgtgctgatcggcgagtacctgcagatcaagggcgccacccccagagacagcggcctgtacgcctgcaccgccagcagaaccgtggacagcgagacctggtacttcatggtgaacgtgaccgacgccatcagcagcggcgacgacgaggacgacaccgacggcgccgaggacttcgtgagcgagaacagcaacaacaagagagccccctactggaccaacaccgagaagatggagaagagactgcacgccgtgcccgccgccaacaccgtgaagttcagatgccccgccggcggcaaccccatgcccaccatgagatggctgaagaacggcaaggagttcaagcaggagcacagaatcggcggctacaaggtgagaaaccagcactggagcctgatcatggagagcgtggtgcccagcgacaagggcaactacacctgcgtggtggagaacgagtacggcagcatcaaccacacctaccacctggacgtggtggagagaagcccccacagacccatcctgcaggccggcctgcccgccaacgccagcaccgtggtgggcggcgacgtggagttcgtgtgcaaggtgtacagcgacgcccagccccacatccagtggatcaagcacgtggagaagaacggcagcaagtacggccccgacggcctgccctacctgaaggtgctgaaggccgccggcgtgaacaccaccgacaaggagatcgaggtgctgtacatcagaaacgtgaccttcgaggacgccggcgagtacacctgcctggccggcaacagcatcggcatcagcttccacagcgcctggctgaccgtgctgcccgcccccggcagagagaaggagatcaccgccagccccgactacctggagatcgccatctactgcatcggcgtgttcctgatcgcctgcatggtggtgaccgtgatcctgtgcagaatgaagaacaccaccaagaagcccgacttcagcagccagcccgccgtgcacaagctgaccaagagaatccccctgagaagacaggtgagcgccgagagcagcagcagcatgaacagcaacacccccctggtgagaatcaccaccagactgagcagcaccgccgacacccccatgctggccggcgtgagcgagtacgagctgcccgaggaccccaagtgggagttccccagagacaagctgaccctgggcaagcccctgggcgagggctgcttcggccaggtggtgatggccgaggccgtgggcatcgacaaggacaagcccaaggaggccgtgaccgtggccgtgaagatgctgaaggacgacgccaccgagaaggacctgagcgacctggtgagcgagatggagatgatgaagatgatcggcaagcacaagaacatcatcaacctgctgggcgcctgcacccaggacggccccctgtacgtgatcgtggagtacgccagcaagggcaacctgagagagtacctgagagccagaagaccccccggcatggagtacagctacgacatcaacagagtgcccgaggagcagatgaccttcaaggacctggtgagctgcacctaccagctggccagaggcatggagtacctggccagccagaagtgcatccacagagacctggccgccagaaacgtgctggtgaccgagaacaacgtgatgaagatcgccgacttcggcctggccagagacatcaacaacatcgactactacaagaagaccaccaacggcagactgcccgtgaagtggatggcccccgaggccctgttcgacagagtgtacacccaccagagcgacgtgtggagcttcggcgtgctgatgtgggagatcttcaccctgggcggcagcccctaccccggcatccccgtggaggagctgttcaagctgctgaaggagggccacagaatggacaagcccgccaactgcaccaacgagctgtacatgatgatgagagactgctggcacgccgtgcccagccagagacccaccttcaagcagctggtggaggacctggacagaatcctgaccctgaccaccaacgaggagtacctggacctgagccagcccctggagccctacagcccctgctaccccgaccccagatag

SEQ ID NO: 291356 - DNA, 1128 bp, Artificial Sequence
  derived and/or modified sequence
atggagctgttccaggccaaggaccactacatcctgcagcagggcgagagagccctgtggtgcagcagaagagacggcggcctgcagctgagacccgccaccgacctgctgctggcctggaaccccatctgcctgggcctggtggagggcgtgatcggcaagatccagctgcacagcgacctgccctggtggctgatcctgatcagacagaaggccctggtgggcaagctgcccggcgaccacgaggtgtgcaaggtgaccaagatcgccgtgctgagcctgagcgagatggagccccaggacctggagctggagctgtgcaagaagcaccacttcggcatcaacaagcccgagaagatcatccccagccccgacgacagcaagttcctgctgaagaccttcacccacatcaagagcaacgtgagcgcccccaacaagaagaaggtgaaggagagcaaggagaaggagaagctggagagaagactgctggaggagctgctgaagatgttcatggacagcgagagcttctactacagcctgacctacgacctgaccaacagcgtgcagagacagagcaccggcgagagagacggcagacccctgtggcagaaggtggacgacagattcttctggaacaagtacatgatccaggacctgaccgagatcggcacccccgacgtggacttctggatcatccccatgatccagggcttcgtgcagatcgaggagctggtggtgaactacaccgagagcagcgacgacgagaagagcagccccgagacccccccccaggagagcacctgcgtggacgacatccaccccagattcctggtggccctgatcagcagaagaagcagacacagagccggcatgagatacaagagaagaggcgtggacaagaacggcaacgtggccaactacgtggagaccgagcagctgatccacgtgcacaaccacaccctgagcttcgtgcagaccagaggcagcgtgcccgtgttctggagccaggtgggctacagatacaaccccagacccagactggacagaagcgagaaggagaccgtggcctacttctgcgcccacttcgaggagcagctgaacatctacaagaagcagcagcagaagtag

SEQ ID NO: 291357 - DNA, 1128 bp, Artificial Sequence
  derived and/or modified sequence
atggagctgttccaagcaaaggaccactatattctgcagcaaggggagcgggcactgtggtgcagtaggcgggacggggggttgcagttgcggcccgccacagatttgttgctagcctggaatcccatctgcctgggcctcgtagagggcgtgatcggcaagatccaactgcatagtgacctgccttggtggctgattctgatccgacaaaaagcactcgtgggcaagctacccggcgatcacgaagtgtgtaaggtcacgaagattgcagtgctatccttgtctgaaatggaaccacaagacctggagctcgagctctgtaagaaacaccacttcggaatcaataaaccggaaaagattattccgtcccccgacgactccaaatttcttctcaagactttcacgcacatcaagagcaatgtcagtgcacccaacaaaaaaaaggttaaagaaagtaaggagaaagaaaaactggagagaaggcttctcgaagaactcctgaagatgttcatggattccgagtcattttattactccctcacttatgatcttactaattcagtgcagcgtcagagcacaggcgaaagagatggtcgccctctatggcagaaggtggatgaccggttcttttggaataaatacatgattcaggacttgactgaaattgggacccccgatgtagacttctggattatccccatgatacaaggtttcgtccagattgaggagctggttgtgaactacacagagtcctcagacgacgaaaagagcagcccggagacacctccccaggagtcaacctgcgtagatgatattcaccctagatttctcgtcgccctgatctcaagaagatcgcggcatcgggctggcatgcgttacaagcggaggggggttgacaaaaacggaaacgttgccaattacgtggagaccgagcagctgatccatgtgcacaatcatacattgagtttcgtccagacgaggggatccgttcctgtattctggtcacaagtagggtaccgatataacccacggcctaggttagaccgtagcgaaaaggagacagttgcatacttctgtgcccattttgaggagcaactgaacatttacaagaagcagcagcaaaagtag

SEQ ID NO: 291358 - DNA, 1128 bp, Artificial Sequence
  derived and/or modified sequence
atggagctgttccaggccaaggaccactacatcctgcagcagggcgagcgggccctgtggtgcagcagaagagatggcggcctgcagctgcggcctgccacagacctgctgctggcctggaaccccatctgcctgggcctggtggagggcgtcatcggcaagatccagctgcacagcgacctgccctggtggctgatcctgatccggcagaaggccctggtgggcaagctgcccggggaccacgaggtgtgcaaggtgaccaagattgctgtgctgagcctgtctgagatggagccccaggacctggagctggagctgtgcaagaagcaccacttcggcatcaacaagccagagaagatcatccccagcccagatgacagcaagttcctgctgaagaccttcacccacatcaagagcaatgtgtctgcccccaacaagaagaaggtgaaggagagcaaggagaaggagaagctggagcggcggctgctggaggagctgctgaagatgttcatggattctgagagcttctactacagcctgacctatgacctgaccaacagcgtgcagaggcagagcactggagagagagatggccggcccctgtggcagaaggtggatgaccgcttcttctggaacaagtacatgatccaggacctgacagagatcggcaccccagatgtggacttctggatcatccccatgatccagggctttgtgcagatcgaggagctggtggtgaactacacagagagcagtgatgatgagaagagcagccctgagaccccaccccaggagagcacctgtgtggatgacatccacccccgcttcctggtggccctgatcagcagaagaagccgccacagagctggcatgagatacaagagaagaggagtggacaagaatggaaatgtggccaactacgtggagacagagcagctgattcatgtgcacaaccacaccctgagctttgtgcagacccggggctctgtgcctgtgttctggagccaggtgggctaccgctacaacccccggccccggctggacagaagtgagaaggagaccgtggcctacttctgtgcccactttgaggagcagctgaacatctacaagaagcagcagcagaagtag

SEQ ID NO: 291359 - DNA, 1294 bp, Artificial Sequence
  derived and/or modified sequence
tctcctcctaccggtcgggtgccccggggcgttccctctgccgctgcttctcggcgcggttcctacccggccgctccccgaggcgcgggctctggcggcctcgaccgactaggacgccccgtgcgccgcccgcgggccgccgcctccctgggcgcgcggggccagcatggagctcttccaagccaaggaccactacatcctgcagcagggcgagcgcgcgctgtggtgcagccgccgcgacggcggcctccagctccgacccgctactgatctacttcttgcctggaatcccatttgtttggggttggtagaaggtgttattgggaaaattcaacttcattcagatcttccatggtggcttattctaattcggcagaaagcattggtgggcaaactcccaggagaccatgaggtctgtaaagttaccaaaattgctgtgctctcactttctgaaatggaacctcaggatcttgagctagagctctgtaagaagcatcattttggtattaacaaaccagagaagatcataccatctcctgatgactcaaagtttctactgaagacctttacgcatattaaatccaatgtgtctgctcctaataaaaagaaagttaaggaaagtaaagagaaggagaagttggagaggagattacttgaagagttgctgaagatgttcatggactcagaatccttttattatagcttgacctatgacctgaccaattccgtgcagaggcagagcactggggagagggacggtcggcccctctggcagaaggttgatgaccgatttttttggaataaatacatgatacaagatcttactgagattggtactccagatgtggacttttggattatccccatgatccaaggttttgtgcagattgaagaacttgtggttaattataccgaatcatctgatgatgagaaaagcagcccagagaccccccctcaggagtccacctgtgtagatgatattcacccacgatttctagtggctctcatttcacgccgaagtaggcacagagcaggaatgcgctataaacgaagaggagtggataaaaatggaaatgttgccaattatgtggagactgagcagttgattcatgttcataatcataccctgtcatttgttcaaacacgaggctctgtgcctgtcttttggagccaggttgggtatcgatataacccaagaccgcggctggacagaagtgaaaaggaaactgttgcctatttctgtgcccatttcgaagaacaactgaacatttacaaaaaacagcaacaaaaatga

SEQ ID NO: 291360 - DNA, 1128 bp, Artificial Sequence
  derived and/or modified sequence
atggagctgttccaggccaaggaccactacatcctgcagcagggcgagcgggcactgtggtgctcccgtcgcgatggcggattgcaactccgccccgctaccgacctgttgctggcctggaatcccatttgcctgggacttgtcgagggagtgattgggaagatacagctgcacagcgatctcccatggtggctgatactgatcaggcagaaggccctcgtaggaaagctacccggagatcacgaagtttgtaaagtgactaagatcgcggtgttgtctctctccgaaatggagcctcaggacctggaactggaattatgcaagaagcaccactttggtatcaacaaaccagagaagataataccgtccccagacgactccaagttcctgctgaagactttcacacacattaaatcaaacgtctccgcgccaaacaagaagaaggttaaggagtccaaagagaaagaaaaactcgagaggcgccttcttgaagagcttttaaaaatgtttatggactcggaaagcttctactattctctgacctacgatttaactaatagcgttcagcggcagagtacaggggaacgcgatgggaggcctctatggcagaaagttgacgatcgatttttttggaacaaatatatgattcaggatcttacagaaatcgggaccccagacgtcgacttctggatcataccaatgattcagggctttgtccagatcgaagagctcgttgtcaactacacggaatcatcagatgacgaaaaaagctccccagagacgccgccacaggaatcgacttgcgtggacgatatccatcccagatttctagtcgctctgatcagtaggaggtccagacaccgggccggcatgcgctataagaggcggggcgtagacaaaaatggcaacgtggccaattacgtcgaaactgaacaactgatccatgtgcacaaccataccctgagtttcgtccagacacggggatccgttcctgttttctggtcacaggtcggttacagatataatccacggccccgcctcgaccgcagcgagaaagaaacagttgcctatttctgcgcacacttcgaagaacaacttaatatatacaaaaagcagcaacaaaaatag

SEQ ID NO: 291361 - DNA, 1128 bp, Artificial Sequence
  derived and/or modified sequence
atggagctgtttcaggcgaaagatcactatatcctgcagcaaggagagagagctttatggtgcagccgaagggatggcggattgcagttaagacctgctaccgacctcctgctggcttggaacccaatctgtttgggcctggttgaaggtgtaatcggcaaaatccagttacattcagacttgccctggtggctcattctaatacggcagaaggcgctcgtgggcaaactccccggtgatcacgaggtgtgtaaggtgacaaagatcgctgtcctatccctctccgagatggagccgcaggatcttgagctggagctctgtaaaaagcaccacttcggtattaacaagcctgaaaagattattcctagcccagatgactccaagtttttgctaaagactttcactcacataaagagcaacgtgtccgcacctaacaaaaagaaggtgaaagagtccaaggagaaagaaaagctggagaggcgtctgctggaggaacttctcaagatgttcatggactccgagtctttctattatagtctgacctacgacctgacaaattccgtgcaaaggcagtctacgggcgaaagggatggacgaccattatggcagaaggttgatgaccgctttttttggaacaaatatatgatccaggacttgacagaaattgggacacctgacgtcgatttctggattattcctatgattcagggtttcgttcaaatcgaagaactggtcgtgaattataccgagtcctctgatgatgagaagtcttcccctgagactccgcctcaggagtcgacctgtgtggatgacatccatccacgcttcttagtcgcactgatttctcgtcgaagccgccaccgggctggtatgcggtacaagaggaggggagtggacaaaaacggtaatgtcgccaactacgtggaaacggaacaactgatacatgtgcataatcatactctgagttttgttcagaccaggggttctgtgccagtgttttggagtcaggtgggatatcgttacaatccaaggccaagactggatcggagtgaaaaggaaacagttgcttacttctgcgcacacttcgaagaacagttaaacatttataaaaaacaacagcaaaaatag

SEQ ID NO: 291362 - DNA, 444 bp, Artificial Sequence
  derived and/or modified sequence
gtgctgcgacaggtagacactaagaccggcaaactaaagataggcacctacacaggcccactgcagcacgggatcgtttacagtgggggctcctccgacacaatctgtgacttgctgggggcaaaaggcaaggatatcttatacatcggggaccatattttcggggatattctgaagtctaagaaaaggcagggctggcgcactttcttggtaattcccgagctcgcccaggagctgcatgtatggacggataaaagttctctctttgaggaactgcaaagcttggacattttcctggccgaactgtacaaacacctagattcatcatcgaatgagaggccagatatctcctccattcagaggcgaatcaagatgcctcacgaatcaactgtggaacatacccatgtggatatcaacgagatggagagccccctggcaacgtag

SEQ ID NO: 291363 - DNA, 444 bp, Artificial Sequence
  derived and/or modified sequence
gtgctgcggcaggtggacaccaagacaggcaagctgaagattggcacctacacaggccccctgcagcacggcatcgtgtacagcggcggcagcagtgacaccatctgtgacctgctgggcgccaagggcaaggacatcctgtacatcggggaccacatctttggagacatcctgaagagcaagaagaggcagggctggaggaccttcctggtgattcctgagctggcccaggagctgcacgtgtggacagacaagagcagcctgtttgaggagctgcagagcctggacatcttcctggccgagctgtacaagcacctggacagcagcagcaatgaaagaccagacatcagcagcatccagaggcgcatcaagatgcctcatgagagcacagtggagcacacccacgtggacatcaatgagatggagagccccctggccacctag

SEQ ID NO: 291364 - DNA, 444 bp, Artificial Sequence
  derived and/or modified sequence
gtgctgcggcaggtggacaccaagaccggcaagctgaagatcggcacctacaccggcccacttcagcacggcattgtctactctggagggtcctcagacacgatttgtgatttactgggcgcgaagggaaaggacattctatacatcggcgatcacatctttggtgatatcctgaagagcaaaaagcgccaggggtggcgaacattccttgtcattcctgagcttgcgcaagaattgcacgtgtggaccgataagagcagtctgtttgaggagctgcagagtctcgacatcttcctggctgagttgtataaacatctcgactccagttcaaacgaaaggccagacataagtagtatccaaaggcgtataaagatgcctcatgagtccaccgtggagcacactcacgttgacattaatgaaatggagagtccactcgctacctag

SEQ ID NO: 291365 - DNA, 444 bp, Artificial Sequence
  derived and/or modified sequence
gtgctcaggcaggtcgatacaaagaccggaaagctcaaaatcggtacctacacaggtccactacagcacggaatcgtttacagcgggggttcttcagataccatatgtgacctgctgggcgcaaaaggaaaagatatactgtatatcggtgatcacatctttggtgatattctcaagtccaaaaagaggcaagggtggagaacttttttggtgatccctgaattggcacaggagctgcacgtctggaccgacaaatcatccctattcgaggaattgcagtcgttagatatttttttagctgaactttacaaacacctggatagttcttcaaacgaacggccagatatctcatccattcagaggcgcatcaaaatgccacatgagtctaccgttgaacatacacatgtcgacatcaatgaaatggagtcacctttggcgacatag

SEQ ID NO: 291366 - DNA, 440 bp, Artificial Sequence
  derived and/or modified sequence
gtactgcgtcaggtggatactaaaactggcaagctgaaaattggtacctacacagggcccctacagcatggtatcgtctactcaggaggttcttctgatacgatctgtgacctgttgggagccaagggaaaagacattttgtatattggagatcacatttttggggacattttaaaatcaaagaaacggcaagggtggcgaacttttttggtgattcctgaactcgcacaggagctacatgtctggactgacaagagttcacttttcgaagaacttcagagcttggatattttcttggctgaactctacaagcatcttgacagcagtagcaatgagcgtccagacatcagttccatccagagacgtattaagatgcctcatgaatcaacggtggagcacacacacgtagatatcaatgagatggagtctcctcttgccac

SEQ ID NO: 291367 - DNA, 444 bp, Artificial Sequence
  derived and/or modified sequence
gtgctgagacaggtggacaccaagaccggcaagctgaagatcggcacctacaccggccccctgcagcacggcatcgtgtacagcggcggcagcagcgacaccatctgcgacctgctgggcgccaagggcaaggacatcctgtacatcggcgaccacatcttcggcgacatcctgaagagcaagaagagacagggctggagaaccttcctggtgatccccgagctggcccaggagctgcacgtgtggaccgacaagagcagcctgttcgaggagctgcagagcctggacatcttcctggccgagctgtacaagcacctggacagcagcagcaacgagagacccgacatcagcagcatccagagaagaatcaagatgccccacgagagcaccgtggagcacacccacgtggacatcaacgagatggagagccccctggccacctag

SEQ ID NO: 291368 - DNA, 306 bp, Artificial Sequence
  derived and/or modified sequence
atgtctcacgagaaatctttcctggtctcgggtgacaactaccctccgcctaaccccggatacccaggtggaccacagccacctatgcctccatatgcccagcccccttatccaggagccccttaccctcagccaccctttcagccgtccccttacggtcaacctggttaccctcacggaccatctccatatccacagggaggatatcctcaggggccttatcctcagggcggatatccccagggcccttatccccaagagggatatccccaggggccttacccgcagggagggtatccacaatag

SEQ ID NO: 291369 - DNA, 867 bp, Artificial Sequence
  derived and/or modified sequence
atggcacttgcccctcctcctcgcggattgtggcaggcaaaagatatctcacctattgtcaaagcagccaggagagacggcgagcttttgctgtccgcccaactcgactcagaggagagagacccaggagtacctcggcctagcccatacgcaccttatatcctcgtctacgccaacgatctcgcgatttccgagcctaactcagtcgccgtgactctccagaggtatgatccgtttcccgctggggatcccgagccacgcgcagccccaaataacagcgcggaccccagagtaagacgggctgctcaagcaacaggccctttgcaggacaacgagctccccggactcgatgaacgaccgccaagggcgcacgctcagcattttcacaagcatcagctgtggccctcaccgttcagggctctgaaacctagaccgggaagaaaggaccgcagaaagaaggggcaggaggttttcatggcagcctcccaagttctcgattttgacgagaagacaatgcagaaggctaggcgcaaacaatgggacgagcccagggtctgttcgcgcagatacttgaaggtggatttcgctgatattggttggaacgaatggattatctcaccgaagagctttgacgcatattactgtgccggtgcctgcgagtttcctatgccaaaaatagtgcggccttccaaccacgcgaccatccaaagcattgtacgcgctgtaggcattatccctggaatacctgagccctgctgcgtgcccgacaagatgaattcacttggagtgctgttcttggacgaaaatagaaacgtggtactcaaggtctaccccaatatgagcgtggacacatgtgcttgtcgctag

SEQ ID NO: 291370 - DNA, 867 bp, Artificial Sequence
  derived and/or modified sequence
atggccttagcacctccgcctagaggcctctggcaggccaaagacatttctcccatcgtgaaggccgctcgtcgagatggagagcttttgctgtctgcccaactcgattccgaagaaagggacccaggtgtcccaagaccttccccctacgcaccctacattttggtttatgcaaacgacctggccatttccgaaccaaatagcgtagcagtgacattacaaaggtacgaccccttccctgcaggcgatcctgaaccacgtgcagcaccaaacaactccgccgaccctagggttagacgcgccgcacaggccactggacctctgcaagacaacgagctgcccgggctcgacgaacgtccacctcgtgcccacgctcagcacttccataaacaccaactgtggccatctcctttccgggctcttaaaccacgtcccggccgtaaggataggcgcaagaagggacaggaggtattcatggccgcctcacaggtccttgacttcgatgagaagacgatgcaaaaggcccgccgcaagcagtgggacgagccccgcgtgtgtagtcgccgatacctcaaagtcgactttgccgatattggctggaacgagtggataatctcacccaagtctttcgatgcctattactgtgcaggagcctgtgaattccctatgcccaaaattgtacgaccttccaaccatgcaacgattcagtccattgtgcgggcggtggggataatccctggaatccccgaaccctgttgtgtgcccgataaaatgaacagcctgggagtgttgttcctggacgagaaccgcaatgttgtgttgaaggtgtacccgaacatgtctgtcgacacctgcgcatgtcgctag

SEQ ID NO: 291371 - DNA, 867 bp, Artificial Sequence
  derived and/or modified sequence
atggccttagcacctccgcctagaggcctctggcaggccaaagacatttctcccatcgtgaaggccgctcgtcgagatggagagcttttgctgtctgcccaactcgattccgaagaaagggacccaggtgtcccaagaccttccccctacgcaccctacattttggtttatgcaaacgacctggccatttccgaaccaaatagcgtagcagtgacattacaaaggtacgaccccttccctgcaggcgatcctgaaccacgtgcagcaccaaacaactccgccgaccctagggttagacgcgccgcccaggccacaggacccctacaagacaatgaactccctggtctcgacgagcgccctccccgcgcacatgctcagcatttccacaaacatcagctttggccaagcccctttcgagctctgaagccaaggcctggccggaaggatcgtcggaagaaaggacaagaagtgtttatggccgctagccaagtactggacttcgatgaaaaaacaatgcagaaagcacggcggaagcagtgggatgaacctagagtgtgtagtaggaggtatctaaaagttgacttcgcggatatcggatggaacgagtggataatctctcccaaaagttttgatgcctactactgcgccggagcttgcgagttcccaatgcccaagatcgtgcgcccctccaaccacgccaccatacaatccatcgtcagagcagttgggattatacctgggataccagagccctgttgtgttcccgataaaatgaatagccttggcgtgctctttttggatgaaaaccgaaatgtggtccttaaagtgtacccaaacatgtctgttgatacctgtgcctgtcgctag

SEQ ID NO: 291372 - DNA, 867 bp, Artificial Sequence
  derived and/or modified sequence
atggccctggcccccccccccagaggcctgtggcaggccaaggacatcagccccatcgtgaaggccgccagaagagacggcgagctgctgctgagcgcccagctggacagcgaggagagagaccccggcgtgcccagacccagcccctacgccccctacatcctggtgtacgccaacgacctggccatcagcgagcccaacagcgtggccgtgaccctgcagagatacgaccccttccccgccggcgaccccgagcccagagccgcccccaacaacagcgccgaccccagagtgagaagagccgcccaggccaccggccccctgcaggacaacgagctgcccggcctggacgagagaccccccagagcccacgcccagcacttccacaagcaccagctgtggcccagccccttcagagccctgaagcccagacccggcagaaaggacagaagaaagaagggccaggaggtgttcatggccgccagccaggtgctggacttcgacgagaagaccatgcagaaggccagaagaaagcagtgggacgagcccagagtgtgcagcagaagatacctgaaggtggacttcgccgacatcggctggaacgagtggatcatcagccccaagagcttcgacgcctactactgcgccggcgcctgcgagttccccatgcccaagatcgtgagacccagcaaccacgccaccatccagagcatcgtgagagccgtgggcatcatccccggcatccccgagccctgctgcgtgcccgacaagatgaacagcctgggcgtgctgttcctggacgagaacagaaacgtggtgctgaaggtgtaccccaacatgagcgtggacacctgcgcctgcagatag

SEQ ID NO: 291373 - DNA, 867 bp, Artificial Sequence
  derived and/or modified sequence
atggcccttgcgccgccacctcggggcttgtggcaggcaaaagacattagcccgattgttaaggccgcccggcgagatggggaattactgttatctgcacaattagattctgaggagcgcgatccaggcgtaccgagaccaagtccttacgccccctacattcttgtgtacgcaaatgacttagctatttcagaacccaatagcgtggcagtgacactgcagcggtatgacccgttccccgccggggatccggagcccagggccgcccccaataatagtgcagatcctagggtccggcgcgccgctcaggcgacgggaccactgcaggataacgaattgcctggcctcgatgagcgccccccacgcgctcatgcccagcatttccacaagcaccaactgtggccctccccttttagggcactcaagcctcggcccgggcgcaaggaccgtcggaagaaaggacaggaggtgtttatggccgcttcacaggtgctggattttgacgagaagactatgcagaaagctcggcgaaaacagtgggatgagccgagggtgtgcagccgccggtaccttaaagtcgatttcgcggacatcggatggaacgagtggataatctcccctaagtcatttgacgcttactactgcgctggggcctgtgagttcccgatgccaaaaattgtgaggccttccaaccacgccaccatacagagtatcgtccgggccgttggaatcattcccggtattcccgaaccttgttgcgttcctgataagatgaattcccttggagtgctgttcctcgacgaaaatagaaatgtcgtactaaaggtgtaccccaatatgtcagtggatacatgtgcgtgccggtag

SEQ ID NO: 291374 - DNA, 867 bp, Artificial Sequence
  derived and/or modified sequence
atggccctggcccccccaccccggggcctgtggcaggccaaggacatcagccccatcgtgaaggccgccaggagagatggagagctgctgctgagcgcccagctggacagcgaggagcgggaccccggggtgccccggcccagcccctatgccccctacatcctggtgtatgccaatgacctggccatcagcgagcccaacagcgtggccgtgaccctgcagagatatgaccccttccctgctggggaccctgagccccgggccgcccccaacaacagcgctgacccccgggtgagaagagctgcccaggccaccggccccctgcaggacaatgagctgcccggcctggatgagcggcccccccgggcccacgcccagcacttccacaagcaccagctgtggcccagccccttccgggccctgaagcccaggcctggcaggaaggacaggaggaagaagggccaggaggtgttcatggccgccagccaggtgctggactttgatgagaagaccatgcagaaggcccggaggaagcagtgggatgagccccgggtgtgcagccgccgctacctgaaggtggactttgctgacatcggctggaatgagtggatcatcagccccaagagctttgatgcctactactgtgccggggcctgtgagttccccatgcccaagatcgtgcggcccagcaaccacgccaccatccagagcatcgtgcgggctgtgggcatcatccctggcatccctgagccctgctgcgtgcctgacaagatgaacagcctgggcgtgctcttcctggatgagaacagaaatgtggtgctgaaggtgtaccccaacatgtctgtggacacctgtgcctgcaggtag

SEQ ID NO: 291375 - DNA, 2080 bp, Artificial Sequence
  derived and/or modified sequence
gggccagggacgaccctgtcagctgcagccccagaggtccggggcgcgcagccgggtcccctcgagggcgcagccggccgccccgccccgcccctcgaagcagccgggccgggcgcgcagtgggctacaaactttcgcggcgcgagtccgccaaggcagcgcgccgactcgggctcggctcggctctgcgctgctccggacggctgtgaccgctggccgggggctcgggccgccggtacccacggaccgcgcgcccgggtgcctgctccgctaagcccctcgccccgcgcggacctcggtatccagcgccctgctgcccgggctctccccgcgcgccctactgccgcgaggtcagtccgcagcctccggtgcgccagcgctcgccttcctcctcctggacttcggccctttgccgccctcaccacgccatggccctggcgcccccaccgcgcggcctgtggcaggccaaggacatctcccccatcgtcaaggcggcccgccgggatggcgagctgctcctctccgcccagctggattctgaggagagggacccgggggtgccccggcccagcccctatgcgccctacatcctagtctatgccaacgatctggccatctcggagcccaacagcgtggcagtgacgctgcagagatacgaccccttccctgccggagaccccgagccccgcgcagcccccaacaactcagcggacccccgcgtgcgccgagccgcgcaggccactgggcccctccaggacaacgagctgccggggctggatgagaggccgccgcgcgcccacgcacagcacttccacaagcaccagctgtggcccagccccttccgggcgctgaaaccccggccagggcgcaaagaccgcaggaagaagggccaggaggtgttcatggccgcctcgcaggtgctggactttgacgagaagacgatgcagaaagcccggaggaagcagtgggatgagccgagggtgtgctcccggaggtacctgaaggtggacttcgcagacatcggctggaatgaatggataatctcaccgaaatcttttgatgcctactactgcgcgggagcatgtgagttccccatgcctaagatcgttcgtccatccaaccatgccaccatccagagcattgtcagggctgtgggcatcatccctggcatcccagagccctgctgtgttcccgataagatgaactcccttggggtcctcttcctggatgagaatcggaatgtggttctgaaggtgtaccccaacatgtccgtggacacctgtgcctgccggtgagaccactccagggtggaaagaagccacgcccagcagagctgccttctcggagccttctgcaaccaggacttgtggtgcagctgcagacacagagcacagctcatgggcaacatcactggggcccagagagagctgtccgccagtgcatcattagggggtctttcattgctagtgactagccccttaaatgccagcctgagtacctgaaggaatctgggaattagccctggcctgaaagtggcccatcattcatacccactgttctgaaggcttgaaaacaaaacatatccacaacattggcttgatgtgatcatcatctcataactgagcaagaagactatgcaaatcttagggcgctcgctccctgcacacggaaagaactctgtttaaatgctcagttcagaacactttgggccacatagtgattttggaaaacaggataatcgtggtgtaaatgagtgtttcctttcaaagtccactgcagagcttttatccatatggtatgcacatgtagccaatattggtttctttttcttaatatatatattttattttaaaacaacaaaaagggagggcgttgacaccattccccacagagatagtcatgctgagtgtgggttgtttaaacatgcatattgaaataacacatatagtaacgtgggaatactaaaaaataaccaagattttatatttttgtaaattatactttctatactgtagattgtgtatgttatgtgtttttatggaaagctaataaattaaaggtacagtggtatcttgaaaaa

SEQ ID NO: 291376 - DNA, 867 bp, Artificial Sequence
  derived and/or modified sequence
atggccctggccccccccccccggggcctgtggcaggccaaggacatatccccaattgtaaaagccgcacgcagggacggcgaacttctactctccgcccaactggactctgaggagagagaccctggcgtgccacgacccagcccctatgccccatatattctcgtctatgccaatgatctggctatttctgaacctaacagtgttgctgttactcttcaacggtacgatccatttcccgctggagatcctgaaccaagggcagcacctaataacagcgccgatcccagggtgcgccgtgctgcgcaggcaaccggtcccctccaggataacgagttacccggactcgacgaaaggcccccccgggcccatgcccagcactttcacaaacaccaactgtggcctagccccttccgcgcactgaagccgcgccctggtaggaaggacagacgcaagaagggccaggaggtgttcatggctgccagccaagtgttggattttgatgagaagaccatgcagaaggcccgtagaaagcaatgggatgagcctcgagtctgttctagacgatatcttaaagtggatttcgctgatatagggtggaatgagtggattatctcgcccaagtcattcgacgcatactattgcgcaggcgcttgtgagtttccaatgcccaagattgtgagaccctctaatcatgctaccattcaaagtatcgtgagagccgtcgggatcattccgggcatcccagagccctgctgtgtgcccgataaaatgaactcactgggggttttgttcctggatgaaaatcggaacgttgtgctgaaagtgtaccccaacatgtctgtcgacacatgcgcttgccgatag

SEQ ID NO: 291377 - RNA, 867 nt, Artificial Sequence
  derived and/or modified sequence
auggccuuagcaccuccgccuagaggccucuggcaggccaaagacauuucucccaucgugaaggccgcucgucgagauggagagcuuuugcugucugcccaacucgauuccgaagaaagggacccaggugucccaagaccuucccccuacgcacccuacauuuugguuuaugcaaacgaccuggccauuuccgaaccaaauagcguagcagugacauuacaaagguacgaccccuucccugcaggcgauccugaaccacgugcagcaccaaacaacuccgccgacccuaggguuagacgcgccgcacaggccacuggaccucugcaagacaacgagcugcccgggcucgacgaacguccaccucgugcccacgcucagcacuuccauaaacaccaacuguggccaucuccuuuccgggcucuuaaaccacgucccggccguaaggauaggcgcaagaagggacaggagguauucauggccgccucacagguccuugacuucgaugagaagacgaugcaaaaggcccgccgcaagcagugggacgagccccgcguguguagucgccgauaccucaaagucgacuuugccgauauuggcuggaacgaguggauaaucucacccaagucuuucgaugccuauuacugugcaggagccugugaauucccuaugcccaaaauuguacgaccuuccaaccaugcaacgauucaguccauugugcgggcgguggggauaaucccuggaauccccgaacccuguugugugcccgauaaaaugaacagccugggaguguuguuccuggacgagaaccgcaauguuguguugaagguguacccgaacaugucugucgacaccugcgcaugucgcuag

SEQ ID NO: 291378 - RNA, 867 nt, Artificial Sequence
  derived and/or modified sequence
auggccuuagcaccuccgccuagaggccucuggcaggccaaagacauuucucccaucgugaaggccgcucgucgagauggagagcuuuugcugucugcccaacucgauuccgaagaaagggacccaggugucccaagaccuucccccuacgcacccuacauuuugguuuaugcaaacgaccuggccauuuccgaaccaaauagcguagcagugacauuacaaagguacgaccccuucccugcaggcgauccugaaccacgugcagcaccaaacaacuccgccgacccuaggguuagacgcgccgcccaggccacaggaccccuacaagacaaugaacucccuggucucgacgagcgcccuccccgcgcacaugcucagcauuuccacaaacaucagcuuuggccaagccccuuucgagcucugaagccaaggccuggccggaaggaucgucggaagaaaggacaagaaguguuuauggccgcuagccaaguacuggacuucgaugaaaaaacaaugcagaaagcacggcggaagcagugggaugaaccuagaguguguaguaggagguaucuaaaaguugacuucgcggauaucggauggaacgaguggauaaucucucccaaaaguuuugaugccuacuacugcgccggagcuugcgaguucccaaugcccaagaucgugcgccccuccaaccacgccaccauacaauccaucgucagagcaguugggauuauaccugggauaccagagcccuguuguguucccgauaaaaugaauagccuuggcgugcucuuuuuggaugaaaaccgaaaugugguccuuaaaguguacccaaacaugucuguugauaccugugccugucgcuag

SEQ ID NO: 291379 - protein, 312 aa, Artificial Sequence
  derived and/or modified sequence
MHHQKYLQRFLGGKREKKQKPISDDEASDGEETQEACSIPGIGKRMAEKIIEILESGHLRKLDHISESVPVLELFSNIWGAGTKTAQMWYQQGFRSLEDIRSQASLTTQQAIGLKHYSDFLERMPREEATEIEQTVQKAAQAFNSGLLCVACGSYRRGKATCGDVDVLITHPDGRSHRGIFSRLLDSLRQEGFLTDDLVSQEENGQQQKYLGVCRLPGPGRRHRRLDIIVVPYSEFACALLYFTGSAHFNRSMRALAKTKGMSLSEHALSTAVVRNTHGCKVGPGRVLPTPTEKDVFRLLGLPYREPAERDW

SEQ ID NO: 291380 - DNA, 939 bp, Artificial Sequence
  derived and/or modified sequence
atgcaccaccagaagtacctgcagagattcctgggcggcaagagagagaagaagcagaagcccatcagcgacgacgaggccagcgacggcgaggagacccaggaggcctgcagcatccccggcatcggcaagagaatggccgagaagatcatcgagatcctggagagcggccacctgagaaagctggaccacatcagcgagagcgtgcccgtgctggagctgttcagcaacatctggggcgccggcaccaagaccgcccagatgtggtaccagcagggcttcagaagcctggaggacatcagaagccaggccagcctgaccacccagcaggccatcggcctgaagcactacagcgacttcctggagagaatgcccagagaggaggccaccgagatcgagcagaccgtgcagaaggccgcccaggccttcaacagcggcctgctgtgcgtggcctgcggcagctacagaagaggcaaggccacctgcggcgacgtggacgtgctgatcacccaccccgacggcagaagccacagaggcatcttcagcagactgctggacagcctgagacaggagggcttcctgaccgacgacctggtgagccaggaggagaacggccagcagcagaagtacctgggcgtgtgcagactgcccggccccggcagaagacacagaagactggacatcatcgtggtgccctacagcgagttcgcctgcgccctgctgtacttcaccggcagcgcccacttcaacagaagcatgagagccctggccaagaccaagggcatgagcctgagcgagcacgccctgagcaccgccgtggtgagaaacacccacggctgcaaggtgggccccggcagagtgctgcccacccccaccgagaaggacgtgttcagactgctgggcctgccctacagagagcccgccgagagagactggtag

SEQ ID NO: 291381 - DNA, 939 bp, Artificial Sequence
  derived and/or modified sequence
atgcaccatcagaaatacctccaaaggtttcttggggggaagcgagagaagaagcagaagcctatcagtgacgacgaggctagcgacggggaggagactcaggaggcctgcagtattccaggcattggaaaaagaatggccgaaaagattattgagatcctggagtctgggcaccttcgcaaactggaccatatcagcgaatcagtgccagtacttgaactcttcagcaacatctggggggctggtacgaaaaccgcgcagatgtggtatcagcagggttttagaagcctcgaggacattcgaagtcaggcgtcactgactacacagcaggctattggcctgaagcattacagcgacttcttagagcgcatgcctcgtgaagaggcgaccgagatcgagcagactgtccaaaaagcagctcaagcattcaacagcgggctcttgtgcgttgcctgcggcagttatagacggggtaaggctacatgcggggatgttgacgttttgatcacacaccccgatggaagaagccatcgtgggattttttcccgcctgcttgatagcctgaggcaagagggtttcttgacggatgatctcgtaagtcaagaagagaatgggcagcaacaaaagtatcttggggtctgtcgcttaccgggccctgggcgacgacaccgccggctggatattatagtggtaccctacagcgagtttgcctgtgcgctgctgtacttcacgggctccgcgcactttaaccgatctatgagagctctggctaaaacaaaaggcatgtccctgtcagagcatgctctcagcaccgccgttgttcgcaatacccacgggtgcaaggtaggtccagggagagttcttcccacaccaacagagaaagatgttttccgactgttgggtttgccttacagagagccagcagagagggactggtag

SEQ ID NO: 291382 - DNA, 939 bp, Artificial Sequence
  derived and/or modified sequence
atgcaccaccagaagtacctgcagcgcttcctgggcggcaagcgggagaagaagcagaagcccatcagtgatgatgaggccagtgatggagaggagacccaggaggcctgcagcatccctggcatcggcaagaggatggccgagaagatcatcgagatcctggagagcggccacctgaggaagctggaccacatcagcgagagcgtgcctgtgctggagctgttcagcaacatctggggcgccggcaccaagacagcccagatgtggtaccagcagggcttccgcagcctggaggacatccgcagccaggccagcctgaccacccagcaggccatcggcctgaagcactacagcgacttcctggagaggatgccccgggaggaggccacagaaattgagcagacagtgcagaaggccgcccaggccttcaacagcggcctgctgtgtgtggcctgtggcagctaccgccggggcaaggccacctgtggagatgtggatgtgctgatcacccacccagatggccgcagccaccggggcatcttcagccggctgctggacagcctgcggcaggagggcttcctgacagatgacctggtgtcccaggaggagaatggccagcagcagaagtacctgggcgtgtgccgcctgcccggccctggaagaagacaccggcggctggacatcatcgtggtgccctacagcgagtttgcctgtgccctgctgtacttcaccggcagcgcccacttcaacagatccatgagggccctggccaagaccaagggcatgagcctgtctgaacatgccctgagcacagctgtggtgaggaacacccacggctgcaaggtgggccctggccgggtgctgcccacccccacagagaaggatgtgttccggctgctgggcctgccctaccgggagcctgctgagcgggactggtag

SEQ ID NO: 291383 - DNA, 939 bp, Artificial Sequence
  derived and/or modified sequence
atgcaccaccagaagtacctgcagcggttcctgggcggcaagcgggaaaagaagcaaaagccaatttcagacgacgaggctagcgatggagaagagactcaggaagcttgctcaatccctgggattggcaaaaggatggccgagaagatcatcgaaatactcgaaagtgggcacctgcgaaagctggatcacatctccgagagcgtgccggtgctcgagttattctccaacatctggggcgccgggacaaagacagctcaaatgtggtaccaacagggctttcggtctttagaggatataaggagccaggcctcactgaccacccagcaagccattgggctgaagcattactccgactttctcgaaagaatgccaagggaggaggcaaccgagatagagcagaccgtgcagaaagctgcccaggctttcaattctggacttttatgcgtagcctgtggaagttatcgtaggggcaaagcaacctgcggcgacgttgatgtgctgattacccatccagacggaaggagccacagaggtattttttctaggctgctcgattccctgagacaggagggtttcctgacggacgatcttgtctcacaagaggagaatgggcagcagcaaaagtatctaggagtgtgccgcttgccaggtcctggcagacggcaccgacgcctggacattattgtggtgccatatagtgagttcgcatgcgcattgttgtacttcactgggagcgctcatttcaatcgcagcatgagagcgttggccaagacgaagggaatgtccttgagcgagcacgcattgtccacggcagtcgtaaggaacacacacggatgcaaggtcggacccggacgtgtcctgccgaccccaacagagaaggatgtgttcagactcctcggtctgccttatagagagcctgcggaaagagactggtag

SEQ ID NO: 291384 - DNA, 939 bp, Artificial Sequence
  derived and/or modified sequence
atgcatcatcagaagtaccttcagcgtttcctaggcggaaaaagggaaaagaaacaaaagccgatcagcgacgacgaggccagcgatggagaggagacccaggaagcctgcagcattcctggtatcggcaagcgcatggctgagaagattatcgaaatattggagtcagggcacttgagaaagctagatcatatcagcgaatcagtgcccgtgctcgaattgttcagtaacatatggggcgctggcaccaaaactgctcaaatgtggtatcagcagggtttcaggtctctcgaggatatccggtcgcaggctagcctgacaactcagcaggccattggcttgaagcattacagtgatttcctggaaagaatgcccagagaggaagccaccgagattgagcaaacagttcagaaggcagcgcaggctttcaattctggcctgctgtgcgtggcctgcggatcttaccgtcgtgggaaagctacctgtggtgatgtggatgttctgatcactcatcccgatgggaggtcacaccgcggaattttttcgaggttactggatagcctaagacaggaggggttcctgaccgatgacctggtcagccaggaggagaacgggcagcaacagaaatacctcggagtctgcagactccctggcccaggacgacggcatcgtcgactggatataattgtggtcccatattcagagttcgcttgtgctctgctctacttcacaggtagtgctcacttcaacaggagcatgcgggctctggccaagacaaaggggatgtccctgagcgaacatgctctgagtacggccgtggtgagaaacacacacggctgtaaagtcgggccaggtcgcgtcctccccacacccaccgaaaaagatgtctttcgcctgctaggcctcccctaccgtgagcccgcagagagagactggtag

SEQ ID NO: 291385 - DNA, 1533 bp, Artificial Sequence
  derived and/or modified sequence
ctcattggctctgctgcagccctgaccaacgctccaataggccgggatccagccatacttcaatggatcccaggggtatcttgaaggcatttcccaagcggcagaaaattcatgctgatgcatcatcaaaagtacttgcaaagattcctaggagggaagagggagaagaagcagaagcccatctctgatgatgaagccagtgatggggaagaaacccaggaggcctgcagtatccctgggattgggaagcggatggctgagaaaatcatagagatcctggagagcgggcatttgcggaagctggaccatatcagtgagagcgtgcctgtcttggagctcttctccaacatctggggagctgggaccaagactgcccagatgtggtaccaacagggcttccgaagtctggaagacatccgcagccaggcctccctgacaacccagcaggccatcggcctgaagcattacagtgacttcctggaacgtatgcccagggaggaggctacagagattgagcagacagtccagaaagcagcccaggcctttaactctgggctgctgtgtgtggcatgtggttcataccgacggggaaaggcgacctgtggtgatgtcgacgtgctcatcactcacccagatggccggtcccaccggggtatcttcagccgcctccttgacagtcttcggcaggaagggttcctcacagatgacttggtgagccaagaggagaatggtcagcaacagaagtacttgggggtgtgccggctcccagggccagggcggcggcaccggcgcctggacatcatcgtggtgccctatagcgagtttgcctgtgccctgctctacttcaccggctctgcacacttcaaccgctccatgcgagccctggccaaaaccaagggcatgagtctgtcagaacatgccctcagcactgctgtggtccggaacacccatggctgcaaggtggggcctggccgagtgctgcccactcccactgagaaggatgtcttcaggctcttaggcctcccctaccgagaacctgctgagcgggactggtgacccatggctgggggtgctgaggagagccgagttggactggctacccctcctggccacccagtactccctccagcctcagctggctgaacctcgccgctccaaccaccagcttcctcagcgagcagggcccagggctctgggcctgaagcaagagccagcccggctcccagtgtctgcccggctcccagtgtctgcccagccctctcccagacaggagcaggctgccaccccttctacctcaccactgcccctcgaagaattttgcaaatggccccttgccccattttaagcaggagcaggtggctggtttgaagccccaggtatcccccttccctgctatgggaaaggccaagctgctgggtggggacagaagctgcaggggagagggaagcagccgtgctgtcaacatcatccggcaccctctggggtaggagaacagccattccacatgtgttccctctatccgtcctgcttcct

SEQ ID NO: 291386 - protein, 846 aa, Artificial Sequence
  derived and/or modified sequence
MPAFLGLKCLGKLCSSEKSKVTSSERTSARGSNRKRLIVEDRRVSGTSFTAHRRATITHLLYLCPKDYCPRGRVCNSVDPFVAHPQDPHHPSEKPVIHCHKCGEPCKGEVLRVQTKHFHIKCFTCKVCGCDLAQGGFFIKNGEYLCTLDYQRMYGTRCHGCGEFVEGEVVTALGKTYHPNCFACTICKRPFPPGDRVTFNGRDCLCQLCAQPMSSSPKETTFSSNCAGCGRDIKNGQALLALDKQWHLGCFKCKSCGKVLTGEYISKDGAPYCEKDYQGLFGVKCEACHQFITGKVLEAGDKHYHPSCARCSRCNQMFTEGEEMYLQGSTVWHPDCKQSTKTEEKLRLPNIRRSSSDFFYSKSLIRRTGRSPSLQPTRTSSESIYSRPGSSIPGSPGHTIYAKVDNEILDYKDLAAIPKVKAIYDIERPDLITYEPFYTSGYDDKQERQSLGESPRTLSPTPSAEGYQDVRDRMIHRSTSQGSINSPVYSRHSYTPTTSRSPQHFHRPELLSPGVQRLSYLRTSSLSPTHSDSRPNPPFRHHFIPHIKGNEPSSGRNSPLPYRPDSRPLTPTYAQAPKHFHVPDQGINIYRKPPIYKQHAALAAQSKSSEDIIKFSKFPAAQAPDPSETPKIETDHWPGPPSFAVVGPDMKRRSSGREEDDEELLRRRQLQEEQLMKLNSGLGQLILKEEMEKESRERSSLLASRYDSPINSASHIPSSKTASLPGYGRNGLHRPVSTDFAQYNSYGDVSGGVRDYQTLPDGHMPAMRMDRGVSMPNMLEPKIFPYEMLMVTNRGRNKILREVDRTRLERHLAPEVFREIFGMSIQEFDRLPLWRRNDMKKKAKLF

SEQ ID NO: 291387 - protein, 846 aa, Artificial Sequence
  derived and/or modified sequence
MPAFLGLKCLGKLCSSEKSKVTSSERTSARGSNRKRLIVEDRRVSGTSFTAHRRATITHLLYLCPKDYCPRGRVCNSVDPFVAHPQDPHHPSEKPVIHCHKCGEPCKGEVLRVQTKHFHIKCFTCKVCGCDLAQGGFFIKNGEYLCTLDYQRMYGTRCHGCGEFVEGEVVTALGKTYHPNCFACTICKRPFPPGDRVTFNGRDCLCQLCAQPMSSSPKETTFSSNCAGCGRDIKNGQALLALDKQWHLGCFKCKSCGKVLTGEYISKDGAPYCEKDYQGLFGVKCEACHQFITGKVLEAGDKHYHPSCARCSRCNQMFTEGEEMYLQGSTVWHPDCKQSTKTEEKLRLPNIRRSSSDFFYSKSLIRRTGRSPSLQPTRTSSESIYSRPGSSIPGSPGHTIYAKVDNEILDYKDLAAIPKVKAIYDIERPDLITYEPFYTSGYDDKQERQSLGESPRTLSPTPSAEGYQDVRDRMIHRSTSQGSINSPVYSRHSYTPTTSRSPQHFHRPELLSPGVQRLSYLRTSSLSPTHSDSRPNPPFRHHFIPHIKGNEPSSGRNSPLPYRPDSRPLTPTYAQAPKHFHVPDQGINIYRKPPIYKQHAALAAQSKSSEDIIKFSKFPAAQAPDPSETPKIETDHWPGPPSFAVVGPDMKRRSSGREEDDEELLRRRQLQEEQLMKLNSGLGQLILKEEMEKESRERSSLLASRYDSPINSASHIPSSKTASLPGYGRNGLHRPVSTDFAQYNSYGDVSGGVREYQTLPDGHMPAMRMDRGVSMPNMLEPKIFPYEMLMVTNRGRNKILREVDRTRLERHLAPEVFREIFGMSIQEFDRLPLWRRNDMKKKAKLF

SEQ ID NO: 291388 - DNA, 1593 bp, Artificial Sequence
  derived and/or modified sequence
atgttcaccgagggcgaggagatgtacctgcagggcagcaccgtgtggcaccccgactgcaagcagagcaccaagaccgaggagaagctgagactgcccaacatcagaagaagcagcagcgacttcttctacagcaagagcctgatcagaagaaccggcagaagccccagcctgcagcccaccagaaccagcagcgagagcatctacagcagacccggcagcagcatccccggcagccccggccacaccatctacgccaaggtggacaacgagatcctggactacaaggacctggccgccatccccaaggtgaaggccatctacgacatcgagagacccgacctgatcacctacgagcccttctacaccagcggctacgacgacaagcaggagagacagagcctgggcgagagccccagaaccctgagccccacccccagcgccgagggctaccaggacgtgagagacagaatgatccacagaagcaccagccagggcagcatcaacagccccgtgtacagcagacacagctacacccccaccaccagcagaagcccccagcacttccacagacccgagctgctgagccccggcgtgcagagactgagctacctgagaaccagcagcctgagccccacccacagcgacagcagacccaacccccccttcagacaccacttcatcccccacatcaagggcaacgagcccagcagcggcagaaacagccccctgccctacagacccgacagcagacccctgacccccacctacgcccaggcccccaagcacttccacgtgcccgaccagggcatcaacatctacagaaagccccccatctacaagcagcacgccgccctggccgcccagagcaagagcagcgaggacatcatcaagttcagcaagttccccgccgcccaggcccccgaccccagcgagacccccaagatcgagaccgaccactggcccggcccccccagcttcgccgtggtgggccccgacatgaagagaagaagcagcggcagagaggaggacgacgaggagctgctgagaagaagacagctgcaggaggagcagctgatgaagctgaacagcggcctgggccagctgatcctgaaggaggagatggagaaggagagcagagagagaagcagcctgctggccagcagatacgacagccccatcaacagcgccagccacatccccagcagcaagaccgccagcctgcccggctacggcagaaacggcctgcacagacccgtgagcaccgacttcgcccagtacaacagctacggcgacgtgagcggcggcgtgagagactaccagaccctgcccgacggccacatgcccgccatgagaatggacagaggcgtgagcatgcccaacatgctggagcccaagatcttcccctacgagatgctgatggtgaccaacagaggcagaaacaagatcctgagagaggtggacagaaccagactggagagacacctggcccccgaggtgttcagagagatcttcggcatgagcatccaggagttcgacagactgcccctgtggagaagaaacgacatgaagaagaaggccaagctgttctag

SEQ ID NO: 291389 - DNA, 1593 bp, Artificial Sequence
  derived and/or modified sequence
atgttcacagagggcgaagagatgtacttacaaggatctaccgtttggcaccccgactgcaagcagagcaccaaaacggaggaaaaactgaggttaccgaacatccgcagaagctctagtgattttttctactcaaaatcattgatccgaagaacaggaaggtcaccatcactgcagccgacaaggacatcgtcagagtcaatctatagcaggccgggcagctcaattcctgggtctcctggccacacaatatatgccaaagttgacaacgaaatcctggattacaaggatctggcagccatccctaaggtcaaagctatttacgacatcgagagacccgacctgataacctatgagcccttctacactagcgggtatgacgacaagcaggaaaggcaatccctaggagagagcccacggactctctcacccacaccgtccgctgagggttaccaggacgtcagagacagaatgattcacaggagtacgagtcagggctcaatcaatagtccagtctattcaaggcactcttacactccaacaacttccaggtctccccagcattttcacaggccagaactgctctctcctggagtacaacgcctgtcatatctgaggacctcatcgctaagtcccactcacagtgattcccgtcctaaccctccattccggcaccatttcattccgcacattaagggtaatgagccatcgtccgggagaaacagtcctctgccataccgccctgatagccgacctcttacccccacctacgcacaggccccgaaacattttcacgtcccggaccaggggattaacatttatcgtaagccccccatctataaacagcacgccgcactcgcggcacaaagtaagtcctctgaggacatcattaaattctctaagttcccagccgcccaggcccccgatccatcagagactccaaagattgagaccgatcactggcctgggcctccaagtttcgcagtagtgggccctgatatgaaaagaagaagtagcgggcgggaagaagatgatgaggaactcttgaggcgcagacaactgcaggaggaacagcttatgaaactgaatagcgggctaggccaactgatccttaaagaggaaatggagaaggaatcccgtgaacgctcctcactcttggcatcaagatacgactctccaattaattcggccagtcacatcccatcaagcaaaactgcatcattacccgggtacggccgaaacggcctacaccgcccagtgagtactgacttcgcccagtacaattcctatggagatgtgagtggcggggtccgcgactatcagacactgcccgatgggcatatgcctgccatgcgcatggacaggggagtctcaatgcctaatatgttggaacctaagatattcccttacgaaatgcttatggtgaccaatcggggacgtaacaaaatcctgcgggaagtggatagaacaagattagaacggcacctggcccccgaggttttcagggagatcttcggcatgagtatccaggagtttgatcgactgcctctgtggcggcgcaacgatatgaagaaaaaagctaagctgttctag

SEQ ID NO: 291390 - DNA, 1593 bp, Artificial Sequence
  derived and/or modified sequence
atgttcacagaaggagaggagatgtacctgcagggcagcacagtgtggcacccagactgcaagcagagcaccaagacagaggagaagctgcggctgcccaacatccgccgcagcagcagtgacttcttctacagcaagagcctcatccggaggacaggccgcagccccagcctgcagcccaccaggaccagcagcgagagcatctacagccggcccggcagcagcatccctggcagccctggccacaccatctatgccaaggtggacaatgagatcctggactacaaggacctggccgccatccccaaggtgaaggccatctatgacatcgagaggccagacctgatcacctatgagcccttctacaccagcggctatgatgacaagcaggagcggcagagcctgggggagagccccaggaccctgagccccaccccatctgctgagggctaccaggatgtgcgggacaggatgatccacaggagcaccagccagggcagcatcaacagccctgtgtacagccgccacagctacacccccaccaccagccgcagcccccagcacttccacaggcctgagctgctgagccctggggtgcagaggctgagctacctgcggaccagcagcctgagccccacccacagcgacagccggcccaacccccccttccgccaccacttcatcccccacatcaagggaaatgagcccagcagcggcaggaacagccccctgccctacagaccagacagccggcccctgacccccacctacgcccaggcccccaagcacttccacgtgcctgaccagggcatcaacatctacaggaagccacccatctacaagcagcacgccgccctggccgcccagagcaagagcagcgaggacatcatcaagttcagcaagtttcctgctgcccaggccccagaccccagcgagacccccaagattgaaacagaccactggccaggcccccccagctttgctgtggtgggccctgacatgaagaggaggagcagcggccgggaggaggatgatgaggagctgctgcggcggcggcagctgcaggaggagcagctgatgaagctgaacagcggcctgggccagctgatcctgaaggaggagatggagaaggagagccgggagaggagcagcctgctggccagccgctatgacagccccatcaacagcgccagccacatccccagcagcaagacagccagcctgcccggctatggaagaaatggcctgcacaggcctgtgtccacagactttgcccagtacaacagctatggagatgtgtctgggggcgtgcgggactaccagaccctgcctgatggccacatgcctgccatgaggatggaccggggcgtgtccatgcccaacatgctggagcccaagatcttcccctatgagatgctgatggtgaccaacagaggaagaaacaagatcctgcgggaggtggacaggacccggctggagcggcacctggcccctgaggtgttccgggagatcttcggcatgagcatccaggagtttgaccggctgcccctgtggaggagaaatgacatgaagaagaaggccaagctgttctag

SEQ ID NO: 291391 - DNA, 1593 bp, Artificial Sequence
  derived and/or modified sequence
atgttcaccgagggcgaggagatgtacctgcagggcagcaccgtgtggcaccccgattgcaaacagtcaacaaaaacagaggaaaagctgcggctgccgaacatcagacgaagttcttccgacttcttctactccaaatcacttattcggcgtactggaaggagcccctcgctacagcccacacgcacatcatcagagtccatctactcgcgacccggtagctcaattccaggcagtcccgggcacacaatctacgcgaaagtggacaacgagatccttgactacaaggaccttgccgccatacctaaggtgaaggcgatctatgacatagaacggcctgacctgattacctatgaacccttttatacgagtggatatgatgataagcaggagaggcagtctctgggagagagcccaaggaccctcagcccaacaccatcagctgaggggtaccaggacgtgagagatcgtatgatccatagatcaacgagccagggttctattaactcaccagtgtactcaaggcattcttacacacctacaacctcacgttcgccccagcattttcacagacccgaactgctgtcaccaggggtccaacggctatcatatctaagaactagcagtctcagcccaacccattccgactcccgaccaaacccccctttcaggcaccactttatcccccatatcaaaggaaatgagccttctagcggaagaaattctcccctgccctacaggcctgactccagaccactcactcccacctacgctcaggcacctaagcattttcatgtgccggaccaagggatcaatatttacaggaagccgccaatctacaagcagcatgcagcgttggctgcccagtcaaagagctcagaggacatcattaaattttcgaaattccctgcagctcaggcacccgatccatcagagactccaaaaatagagactgatcattggcctggtccacccagctttgcagttgtggggcccgacatgaaacgccgatcctctggtcgggaggaagacgacgaggagctacttaggcgccggcagttacaggaggagcagctaatgaaactgaacagtggtctgggtcagctgatcctgaaagaggagatggagaaagagagcagggagcgcagtagccttttggcgagtaggtatgacagccctatcaattcggccagccacattccgagctcaaaaaccgctagtctgcctggctacggacgaaatgggcttcatcggccagtctccactgactttgcacagtataactcatatggcgatgtttctggaggagttcgagattatcaaaccctgcccgatggacatatgccagcaatgcggatggaccgcggcgtttccatgcctaacatgcttgagccaaagatctttccatatgagatgctgatggtaaccaaccgtggcaggaataagatcctgagggaggtggaccggacacggctggaaagacacctggcccccgaggtctttcgagagatttttggaatgtctattcaggagtttgatcgactccctctgtggagacgaaatgacatgaagaagaaagctaagctgttttag

SEQ ID NO: 291392 - DNA, 1593 bp, Artificial Sequence
  derived and/or modified sequence
atgttcacagaaggagaggaaatgtaccttcagggaagcaccgtgtggcaccccgattgcaaacagtctacaaaaacggaggagaagctccgactgccaaatatccggagaagttccagtgacttcttttattccaaaagtcttatccgtagaactggaagaagcccatcactccagccgacgcggacctccagcgaaagcatatactctcggcctggttcatcaatccccggatcccccggacatacaatttacgccaaggtggataacgaaatcctcgactataaggatttggccgctattccgaaagtgaaagctatttacgacattgaacgtcccgatttgattacctacgagcctttctatacgtccgggtacgacgacaagcaagagcgccagtccctgggggaatcaccacggactttgtctccaacgccctcagcagaaggataccaggatgtccgggatcggatgatccacaggagcacatcacagggaagtattaactcgccagtgtacagccgccattcttacacccctacaacgagccgcagccctcagcattttcatcgaccagaactgctctccccaggcgtgcagcgattgagttacctgcgcacatccagtctcagccctacacacagcgattcccggcctaacccgcctttcaggcaccatttcatccctcatattaagggcaacgaaccgtcaagtggcaggaacagccctctgccgtatcggccagactcccgacccctgactccaacctacgctcaggctcctaaacactttcacgtgcccgaccaagggatcaatatctacagaaagccccctatatacaagcagcacgcagcgctcgccgcacaatctaaaagttcagaggacattatcaaatttagcaagtttcccgctgcacaggcccctgacccatcagagacccccaagatcgagacagaccactggccgggacccccatcattcgcagtggtcggtcctgacatgaagcgcaggtccagtggacgtgaggaagatgacgaggagctactacggaggaggcagctgcaagaggagcagttgatgaaactcaatagcgggttggggcagctgatacttaaggaagaaatggagaaggaaagtagggagagatcttcgcttctggcatcacgttatgactctccaattaactccgcatcacacatcccgagcagcaagaccgcctctctaccaggctacggtcggaatgggctccacagacctgtgtctacagatttcgctcaatacaacagctatggcgatgtaagcggaggggtccgcgattaccagacattgccagacggacatatgccggctatgagaatggataggggcgtttctatgcccaacatgctcgaacctaaaatattcccctacgagatgttgatggtaacgaaccgcggaaggaacaagatactcagggaagtagaccggactcgcctcgagcgccacctagcccctgaggtgtttcgcgaaatcttcggaatgagtatacaggagttcgaccgactcccactttggcgccgaaatgacatgaagaagaaagctaagttgttttag

SEQ ID NO: 291393 - DNA, 200 bp, Artificial Sequence
  derived and/or modified sequence
atgtggcccacgagacgcctggttactatcaaaaggagcggggtcgacggtccccactttcccctgagcctcagcacctgcttgtttggaaggaggaaatgtgttcttcagtgcacagaatgcagcaaaacagccatctgataaatgctctgcaagccctcccttaagacggcagtgtattagagaaaatggaaacgtag

SEQ ID NO: 291394 - protein, 323 aa, Artificial Sequence
  derived and/or modified sequence
MAALIAENFRFLSLFFKSKDVMIFNGLVALGTVGSQELFSVVAFHCPCSPARNYLYGLAAIGVPALVLFIIGIILNNHTWNLVAECQHRRTKNCSAAPTFLLLSSILGRAAVAPVTWSVISLLRGEAYVCALSEFVDPSSLTAREEHFPSAHATEILARFPCKENPDNLSDFREEVSRRLRYESQLFGWLLIGVVAILVFLTKCLKHYCSPLSYRQEAYWAQYRANEDQLFQRTAEVHSRVLAANNVRRFFGFVALNKDDEELIANFPVEGTQPRPQWNAITGVYLYRENQGLPLYSRLHKWAQGLAGNGAAPDNVEMALLPS

SEQ ID NO: 291395 - protein, 218 aa, Artificial Sequence
  derived and/or modified sequence
MAALIAENFRFLSLFFKSKDVMIFNGLVALGTVGSQELFSVVAFHCPCSPARNYLYGLAAIGVPALVLFIIGIILNNHTWNLVAECQHRRTKNCSAAPTFLLLSSILGRAAVAPVTWSVISLLRGEAYVCALSEFVDPSSLTAREEHFPSAHATEILARFPCKENPDNLSDFREEVSRRLRYESQVRSCAKGSSSSLVVAGERSGDGLVLKLGLVLRG

SEQ ID NO: 291396 - DNA, 972 bp, Artificial Sequence
  derived and/or modified sequence
atggccgcgttgatcgctgaaaatttcaggttcctgtcactattttttaaatctaaggatgtgatgattttcaatgggttggtggccttggggacagtaggctctcaggagctgttttcagtggtagctttccactgcccttgttcccctgcacggaactacctatatggactggcagccattggagtgcccgcactggtactgtttattattggaattatcctgaataaccacacgtggaatctggtcgctgaatgtcagcatcggcggacaaagaattgctccgccgccccaacattcttgctcctcagtagcatcctcggcagggccgctgtcgccccagtcacctggagcgtcatatctctgctaagaggtgaggcctatgtgtgcgctctgtctgagttcgtagacccgtcctcgcttaccgccagggaagaacattttccgtctgctcacgcgaccgagattcttgcccgcttcccgtgtaaagaaaaccccgacaacctgtccgactttagagaggaggtcagtagaaggctgcgctacgagagccagctgtttggatggctcctgataggcgttgtggcaatactggtattccttacgaaatgtctcaaacactactgtagccccttatcctaccggcaagaagcgtattgggcacagtatagggccaatgaagaccagctattccagcgcacagccgaggtgcattcccgagttctggctgcaaataacgtccgccgtttcttcggtttcgtcgctctgaacaaagatgatgaagaactcattgccaacttcccagtcgagggaactcaaccaaggcctcagtggaacgctattaccggagtgtatctatatagagaaaatcaaggacttcccttgtattcccgacttcacaaatgggcgcagggtctcgccggaaatggcgccgctccggataatgttgaaatggccctgttgccaagctag

SEQ ID NO: 291397 - DNA, 972 bp, Artificial Sequence
  derived and/or modified sequence
atggccgctttgattgccgaaaatttcaggtttctatccctattttttaagtccaaagacgtgatgatcttcaatggtttagtcgctctcgggaccgttgggtcacaggaactcttttccgtggtggcattccattgcccctgtagtcccgctagaaactacctgtatgggttggcagccatcggagtgcctgccttggtgctcttcatcatcgggataatcctcaataaccatacgtggaatttggtggccgagtgccagcatagacgcaccaagaattgctcagccgctcctactttccttctgttgagcagtatactgggcagagcagccgtcgctccagtcacatggagtgtcatttctctcctaaggggagaagcttacgtgtgtgccctgtctgaatttgtggaccccagttcactgactgccagagaggagcacttccctagtgcccatgccaccgagatactagctaggttcccctgcaaagaaaacccggacaacctctctgatttcagggaggaggtgagccggcggctacgctacgaatctcaattgtttggctggctgctcataggcgtcgtagcaattcttgtgtttctgaccaaatgtctgaagcactactgtagcccactgtcatatagacaggaggcctattgggcccagtatagagcgaacgaggaccagcttttccaacggactgctgaagttcacagccgtgtcttagctgcgaacaacgtgaggcgtttctttggctttgtcgcattaaacaaggacgatgaagagctcatagccaactttccggtcgagggcacacagcccagaccgcagtggaacgcgatcactggcgtttacctgtaccgcgagaatcaggggctgcctctctatagccggctacataaatgggcgcaggggctggctggtaacggggccgcaccggacaatgtcgaaatggccctgctgccatcttag

SEQ ID NO: 291398 - DNA, 657 bp, Artificial Sequence
  derived and/or modified sequence
atggcggcactgatagctgagaactttagatttctgtccctgtttttcaaatccaaggacgttatgatctttaacggcctcgtggccctgggaactgtggggagtcaagaactgttcagtgtggtcgcgttccactgtccttgttcacctgcacgaaattacctgtatggtcttgccgccataggtgttcctgctttggtgttattcataattggaatcattctgaacaaccacacctggaacctcgtggcagagtgtcagcatagaagaacgaagaactgcagcgcagcgccaacctttttgctgctgtcaagcatcttgggacgcgccgctgtggcccccgttacctggtctgtgataagccttctcaggggcgaagcctacgtttgtgcactgtccgagttcgtcgacccctcctcactgaccgcccgggaggaacatttccccagcgcgcacgctactgagattctggctcggtttccttgtaaggaaaatcccgacaatttgagcgactttcgtgaagaggtctccaggaggctaagatacgagtcccaggttcgaagctgtgccaaaggatcatccagcagtctcgtggtggccggtgaaaggtcgggagacggacttgtcctgaagctgggcctagtcctgaggggctag

SEQ ID NO: 291399 - DNA, 972 bp, Artificial Sequence
  derived and/or modified sequence
atggccgccctgattgctgagaacttccgcttcctgagcctcttcttcaagagcaaggatgtgatgatcttcaacggcctggtggccctgggcaccgtgggcagccaggagctgttctctgtggtggccttccactgcccctgcagccctgccaggaactacctgtatggcctggccgccatcggcgtgcctgccctggtgctcttcatcatcggcatcatcctgaacaaccacacctggaacctggtggccgagtgccagcacaggaggaccaagaactgcagcgctgcccccaccttcctgctgctgagcagcatcctgggccgggctgctgtggcccctgtgacctggagcgtcatcagcctgctgcggggggaggcctacgtgtgtgccctgtctgaatttgtggaccccagcagcctgacagcccgggaggagcacttccccagcgcccacgccacagagatcctggcccgcttcccctgcaaggagaacccagacaacctgagtgacttccgggaggaggtgtcccggcggctgcgctatgagagccagctgtttggctggctgctgattggagtggtggccatcctggtgttcctgaccaagtgcctgaagcactactgcagccccctgagctaccggcaggaggcctactgggcccagtaccgggccaatgaagaccagctgttccagaggacagctgaggtgcacagccgggtgctggccgccaacaacgtgcggcgcttctttggatttgtggccctgaacaaggatgatgaggagctgattgccaacttccctgtggagggcacccagccccggccccagtggaatgccatcaccggggtgtacctgtaccgggagaaccagggcctgcccctgtacagccggctgcacaagtgggcccagggcctggccggaaatggagctgccccagacaacgtggagatggccctgctgcccagctag

SEQ ID NO: 291400 - DNA, 657 bp, Artificial Sequence
  derived and/or modified sequence
atggccgccctgattgctgagaacttccgcttcctgagcctcttcttcaagagcaaggatgtgatgatcttcaacggcctggtggccctgggcaccgtgggcagccaggagctgttctctgtggtggccttccactgcccctgcagccctgccaggaactacctgtatggcctggccgccatcggcgtgcctgccctggtgctcttcatcatcggcatcatcctgaacaaccacacctggaacctggtggccgagtgccagcacaggaggaccaagaactgcagcgctgcccccaccttcctgctgctgagcagcatcctgggccgggctgctgtggcccctgtgacctggagcgtcatcagcctgctgcggggggaggcctacgtgtgtgccctgtctgaatttgtggaccccagcagcctgacagcccgggaggagcacttccccagcgcccacgccacagagatcctggcccgcttcccctgcaaggagaacccagacaacctgagtgacttccgggaggaggtgtcccggcggctgcgctatgagagccaggtgcgcagctgtgccaagggcagcagcagcagcctggtggtggccggggagaggtctggagatggcctggtgctgaagctgggcctggtgctgcggggctag

SEQ ID NO: 291401 - DNA, 972 bp, Artificial Sequence
  derived and/or modified sequence
atggccgccctgatcgccgagaacttccggttcctgagcctgttcttcaagtccaaggacgtcatgatcttcaatggactggtcgctttaggaacagtaggatctcaagagcttttctcagtggtggcctttcactgtccatgttcccctgcaaggaactacctctacggcctggcagccatcggagtgccggcccttgtactatttataattggcatcatcctgaataaccacacctggaacctcgtagccgaatgccagcatcgacgtacgaaaaactgtagcgccgctcccaccttcctgctgctcagttccattctgggacgagccgcggtggctcctgttacttggagcgtcatctctctgctgagaggtgaggcgtacgtgtgcgccctgtccgaattcgtggacccctcgtcattgactgcacgcgaggagcacttcccaagcgcgcacgccaccgaaattctcgcacgctttccttgcaaagaaaatcctgacaatctctcggatttccgtgaagaagtatctcggcggcttcgttatgagtctcagctcttcggttggctattgatcggcgtcgttgccatccttgtttttctgacaaagtgtctgaagcactactgtagcccactcagctatcgtcaagaagcctattgggcccaatatcgcgctaatgaggaccaactgttccaacggacagcggaggtccactctagggtattggctgctaacaacgtgcggagatttttcggcttcgtggccctgaacaaggacgacgaggaactgatcgcaaattttccagtcgaaggcacccagccacgaccccagtggaacgccatcacgggggtgtacttgtatcgggaaaatcagggactgccactgtacagccgactgcataagtgggcacagggcttggccgggaacggcgctgctccagataatgtggaaatggctctcctcccatcttag

SEQ ID NO: 291402 - DNA, 972 bp, Artificial Sequence
  derived and/or modified sequence
atggccgccctgatcgccgagaacttccggttcctgagcctgttctttaagagcaaggatgttatgatctttaatggccttgtcgcgctgggcacagtgggatcgcaggagctgttctctgtggtcgcctttcactgtccctgttccccagcaagaaactatctttacgggttggctgccattggagtacccgcactagttctgttcattatcgggatcattctcaacaatcatacctggaacctggtagctgagtgtcagcatcggcggacaaagaactgctctgcagctccaacctttctcctgctctcttccatccttggaagggccgcagtagctcccgtgacatggtcagtgatttccctcctgagaggggaggcttacgtttgcgccttgtctgagttcgttgaccccagctctctcaccgccagggaagagcactttccatccgcacacgctaccgagatccttgcaaggttcccatgcaaagagaaccctgacaacttgagcgatttccgggaggaggtgtctagacgactccggtacgaatcgcagctgttcggatggctcctcatcggagttgtggccatcctcgtattcctcacgaagtgtttgaagcactattgctctcctctgagctatcggcaggaggcctactgggctcaatatcgggccaatgaagaccagctatttcagagaacggctgaggtgcactccagagtgctggccgcaaacaatgtgaggaggttctttggctttgtagcgttgaataaggatgacgaggagctgattgctaatttccccgtcgaaggcacccagccccgtccgcaatggaatgcgattactggtgtatacttatatcgggaaaatcaaggcctgccactgtacagccgtctccataaatgggcacaggggctcgccggcaacggcgccgccccagacaacgtagagatggcattactgccctcctag

SEQ ID NO: 291403 - DNA, 657 bp, Artificial Sequence
  derived and/or modified sequence
atggccgccctgatcgccgagaacttccggttcctgagcctgttcttcaagagcaaggacgtgatgatcttcaacgggttagtggccttaggcaccgtgggctcccaggagctgttttctgtagtagcctttcactgcccctgcagtcctgcacgaaactacttatacggcctggccgcgattggcgtccccgccctagtgctctttatcattggcatcatccttaataaccacacctggaacttggttgcagagtgtcagcaccgtagaaccaaaaactgttctgctgctcccactttcctacttctttcatccatcctcggcagagcagcagtggcacctgtgacttggagtgtaatcagtctcctccgaggggaggcttatgtgtgtgctctatccgagtttgttgacccgagttcactcactgccagagaggaacatttcccatcagctcatgccacagagatcttagcccgtttcccctgtaaggagaatcctgataatctgagcgacttcagggaggaggtctctcggcggttaagatatgagagccaagtgcggagctgtgctaaaggatcctcctctagtttggtggtggccggagagcgaagcggagacggcctggtgttaaaactgggactggttctgaggggttag

SEQ ID NO: 291404 - DNA, 972 bp, Artificial Sequence
  derived and/or modified sequence
atggcggctttgatcgctgagaactttaggttcctttccctgtttttcaaatcaaaggacgtgatgattttcaacggtctcgtggcgctaggtactgtcggtagccaggagctgttttctgtggtggcctttcattgtccgtgttcgcctgccaggaattacctttacggtctggccgcaatcggtgtgccagcactggtgctcttcattattggtattatcctgaacaatcatacatggaacctcgtggccgagtgtcaacaccgtaggaccaagaattgtagcgctgcacccaccttcctcctgctgagctctatcctgggcagagccgctgtggcccctgttacatggtcagtgatctctctgcttagaggcgaagcctacgtctgcgctttgagtgagttcgtcgaccccagctccctcacagcacgggaagagcactttccatccgctcacgctactgaaatactcgccagattcccctgcaaggaaaacccggataacctctcagactttcgggaggaggtctctagaagactaagatacgagagccagctgttcggatggctgctgatcggcgttgtggctatcctcgtgttcctcaccaagtgcttaaagcactattgttcaccattgtcgtataggcaggaggcctactgggcacagtacagagccaatgaggatcagctcttccagcgtactgccgaggtgcactcacgcgtgctcgcggctaataatgtgcggcgattctttggatttgttgctctaaataaggatgatgaggaactgatcgcgaatttcccagttgagggaacccaaccacgccctcaatggaatgccatcacaggtgtgtatttatatagagaaaatcaggggctgcctctttacagccgtctccacaaatgggcacaaggcctggccggaaatggggctgcacccgataatgtggagatggctcttctgccttcctag

SEQ ID NO: 291405 - DNA, 972 bp, Artificial Sequence
  derived and/or modified sequence
atggctgccctcatcgctgaaaactttcggttcctgtcgcttttctttaagagtaaagatgtgatgatctttaatggcctggtggccctgggcactgtgggatcacaggagttgttttccgtcgtggcttttcattgtccttgttctcctgcgaggaattacttatatggcctagcagcgatcggtgttcccgcacttgtactttttataattggaattattctaaataaccatacttggaatctagtcgccgagtgccagcatagaagaacaaagaattgctccgcggctcctacctttctgttgctgtcatcaatattagggcgagctgcagtggccccagttacttggagcgtaatttccctcctgagaggagaggcatacgtgtgcgccctgagtgagtttgtggatcccagtagcctgactgccagagaagagcattttcctagtgcacacgcgacggagatcctggctcgattcccatgcaaggaaaatccagataacctgagcgatttcagagaggaagtatctaggcgcctgcgctacgaaagccagctgtttggttggttacttatcggcgtggtggctatccttgtttttttgaccaaatgtttaaaacactactgcagcccactgagctaccgacaggaggcctactgggcccaataccgggcaaacgaagatcagctgttccagcggacagccgaagtccactcccgcgtcttggcggcaaacaatgtcagaagattctttggattcgtagcgttgaataaggacgatgaggagcttattgctaattttccggtcgagggaacccagcccagaccccagtggaacgccatcaccggagtgtacctgtaccgtgaaaaccagggactgccattatatagtcgccttcacaaatgggcccaagggctggccggaaatggcgcagctcccgacaacgtagagatggctcttcttcccagctag

SEQ ID NO: 291406 - DNA, 657 bp, Artificial Sequence
  derived and/or modified sequence
atggctgccctgatcgcagagaacttccgtttcctcagcctgttcttcaaatcaaaagacgtgatgatctttaatggcctggtagctctcggtacggttggcagtcaggagctctttagtgtggtggccttccactgcccctgtagtcctgctcgtaactatctgtacgggttggctgccattggcgtgcctgcactggtgctgtttatcatcggaatcatattgaacaaccatacttggaaccttgtcgccgagtgtcagcataggagaacgaagaactgctccgccgctccaacttttctgttgctgagttcaatcttagggagagccgcagtcgccccagtcacctggtccgttatctcattattgcgaggcgaagcttacgtgtgtgcactgtccgagttcgtcgatccaagcagcctaacggctagagaggagcactttccgtctgcacacgcaacagaaattttggcaagattcccgtgcaaagagaaccctgacaacttgtctgacttcagggaagaggtgagccgacgcttgaggtatgaatcgcaggtacgcagctgcgctaagggaagctcttcctccctggttgttgctggggagcgcagcggagacggtctcgtgctgaaactgggcttagttctgaggggatag

SEQ ID NO: 291407 - DNA, 1859 bp, Artificial Sequence
  derived and/or modified sequence
gttagattagtctgaagccgccaccagccccaggcccccgtgcagaagaaaagcgggagggaacggcggaggccgccgctgccctgcaccgccctcctggaggccacttggagagtccggccccgaggaggccatggccacaagtgcccacagctggccccaggttgccagcgtcgctacagcccagaccaaggcagaataatctccggatgagctggtggcaccgctgagcctttggtctcaccagggcttcctgttgctggcaggcggggtggagcggagctgctgggaggctgctggataggagaggggtcacggctgcggaagaggaggttcttcgggacacccgtggatggacacggcaaggaaacaccaggccaaccacagctggggataaaatagcacaaccacaccctgccgtccagcgcctcccagcctgtgccccttcctagtaccaccagcaaccatcaatcccgtctcctcctgcctcctctcctgcaatccaccccgccacgactatcgccatggcagccctgatcgcagagaacttccgcttcctgtcacttttcttcaagagcaaggatgtgatgattttcaacggcctggtggcactgggcacggtgggcagccaggagctgttctctgtggtggccttccactgcccctgctcgccggcccggaactacctgtacgggctggcggccatcggcgtgcccgccctggtgctcttcatcattggcatcatcctcaacaaccacacctggaacctcgtggccgagtgccagcaccggaggaccaagaactgctccgccgcccccaccttcctccttctaagctccatcctgggacgtgcggctgtggcccctgtcacctggtctgtcatctccctgctgcgtggtgaggcttatgtctgtgctctcagtgagttcgtggacccttcctcactcacggccagggaagagcacttcccatcagcccacgccactgaaatcctggccaggttcccctgcaaggagaaccctgacaacctgtcagacttccgggaggaggtcagccgcaggctcaggtatgagtcccagctctttggatggctgctcatcggcgtggtggccatcctggtgttcctgaccaagtgcctcaagcattactgctcaccactcagctaccgccaggaggcctactgggcgcagtaccgcgccaatgaggaccagctgttccagcgcacggccgaggtgcactctcgggtgctcgctgccaacaatgtgcgccgcttctttggctttgtggcgctcaacaaggatgatgaggaactgattgccaacttcccagtggaaggcacgcagccacggccacagtggaatgccatcaccggcgtctacttgtaccgtgagaaccagggcctcccactctacagccgcctgcacaagtgggcccagggtctggcaggcaacggcgcggcccctgacaacgtggagatggccctgctcccctcctaaggaggtgcttcccatgctctttgtaaatggcactacttggtcccaaactgaaccccactgcttgctcacatccatatcagaaggggatttttaaaaaactgttatcttcttggccaggggaaaggaccacaaggcaatctggggtgtggacagacccagtagacaatggaagccccagccagcagggccaggtgacagtgaagctcaccagtgggctcctttatggtactctatgcagttaacatgtatctagctgcatagggacacccagcgcagcagtgcaccactgggaagtggcctccagtgcagcctctggccttattttatatatttaaatttttgataaagtttttcttactaaaa

SEQ ID NO: 291408 - DNA, 1843 bp, Artificial Sequence
  derived and/or modified sequence
ctctgcctggtggcgccgggaggctgtttttccactcactggcgcgcagactccatcccactgttttcttctctcttttctggagttagattagtctgaagccgccaccagccccaggcccccgtgcagaagaaaagcgggagggaacggcggaggccgccgctgccctgcaccgccctcctggaggccacttggagagtccggccccgaggaggccatggccacaagtgcccacagctggccccaggcggggtggagcggagctgctgggaggctgctggataggagaggggtcacggctgcggaagaggaggttcttcgggacacccgtggatggacacggcaaggaaacaccaggccaaccacagctggggataaaatagcacaaccacaccctgccgtccagcgcctcccagcctgtgccccttcctagtaccaccagcaaccatcaatcccgtctcctcctgcctcctctcctgcaatccaccccgccacgactatcgccatggcagccctgatcgcagagaacttccgcttcctgtcacttttcttcaagagcaaggatgtgatgattttcaacggcctggtggcactgggcacggtgggcagccaggagctgttctctgtggtggccttccactgcccctgctcgccggcccggaactacctgtacgggctggcggccatcggcgtgcccgccctggtgctcttcatcattggcatcatcctcaacaaccacacctggaacctcgtggccgagtgccagcaccggaggaccaagaactgctccgccgcccccaccttcctccttctaagctccatcctgggacgtgcggctgtggcccctgtcacctggtctgtcatctccctgctgcgtggtgaggcttatgtctgtgctctcagtgagttcgtggacccttcctcactcacggccagggaagagcacttcccatcagcccacgccactgaaatcctggccaggttcccctgcaaggagaaccctgacaacctgtcagacttccgggaggaggtcagccgcaggctcaggtatgagtcccagctctttggatggctgctcatcggcgtggtggccatcctggtgttcctgaccaagtgcctcaagcattactgctcaccactcagctaccgccaggaggcctactgggcgcagtaccgcgccaatgaggaccagctgttccagcgcacggccgaggtgcactctcgggtgctcgctgccaacaatgtgcgccgcttctttggctttgtggcgctcaacaaggatgatgaggaactgattgccaacttcccagtggaaggcacgcagccacggccacagtggaatgccatcaccggcgtctacttgtaccgtgagaaccagggcctcccactctacagccgcctgcacaagtgggcccagggtctggcaggcaacggcgcggcccctgacaacgtggagatggccctgctcccctcctaaggaggtgcttcccatgctctttgtaaatggcactacttggtcccaaactgaaccccactgcttgctcacatccatatcagaaggggatttttaaaaaactgttatcttcttggccaggggaaaggaccacaaggcaatctggggtgtggacagacccagtagacaatggaagccccagccagcagggccaggtgacagtgaagctcaccagtgggctcctttatggtactctatgcagttaacatgtatctagctgcatagggacacccagcgcagcagtgcaccactgggaagtggcctccagtgcagcctctggccttattttatatatttaaatttttgataaagtttttcttactaaaagga

SEQ ID NO: 291409 - DNA, 2026 bp, Artificial Sequence
  derived and/or modified sequence
aattcaatcctcagccctccagggatccgaagcaggtcccggggagttagctgactataggtcaaagagtcagcattggggatggtttgtccagtcaatggacaactctgagggagaagggccagtagagggtggggccctggccctgagcatcctgcagggctcagcgcgggcctgacgacaccctcccttgaccctcgcggggtctcctttggtagcttctgcccagcgggggtcaagcggggtggagcggagctgctgggaggctgctggataggagaggggtcacggctgcggaagaggaggttcttcgggacacccgtggatggacacggcaaggaaagagcaaggctcaggatgatttatcctcttttcactgatgaggaatctgaggcccagagaacagtcatgaagtgtgatcagaccctgaggtctccaaaaagataatgtccttgcgaactccagggattctggcatcttgctgtacccaccccagcccacacggcaggatcctatccaagtcccttatccacccggacactcactttagcttttacaccctcaaggctgagaccctaaggacacgccctggatccaaggagtccctggcccctctgctaatatgcgccacctggactcccagagggaaagccggtcagcaccccacatgcattagcaccatgggccacccccaagccctaccccaggagaagctcgtggtggcaaaaagaacctaagcatttgaggcaggtcacccaagcttgaatctcagtctgcctctcatctgtgaccctggcgagccactcgtcctcaggaagccttcactttccctagtgcacggcgggcacacagctcaacgtgggactgtgaggatgggaaatgaggggtgccatgcaccctggaggaactcagtgaacagtggcaactgtcacttccctggggccctatggtccttcctttctccccagcctgtccacactagcatcttcctcaactcctggttttcagagggaaacacttatcggtcatctgctccacaggaaacaccaggccaaccacagctggggataaaatagcacaaccacaccctgccgtccagcgcctcccagcctgtgccccttcctagtaccaccagcaaccatcaatcccgtctcctcctgcctcctctcctgcaatccaccccgccacgactatcgccatggcagccctgatcgcagagaacttccgcttcctgtcacttttcttcaagagcaaggatgtgatgattttcaacggcctggtggcactgggcacggtgggcagccaggagctgttctctgtggtggccttccactgcccctgctcgccggcccggaactacctgtacgggctggcggccatcggcgtgcccgccctggtgctcttcatcattggcatcatcctcaacaaccacacctggaacctcgtggccgagtgccagcaccggaggaccaagaactgctccgccgcccccaccttcctccttctaagctccatcctgggacgtgcggctgtggcccctgtcacctggtctgtcatctccctgctgcgtggtgaggcttatgtctgtgctctcagtgagttcgtggacccttcctcactcacggccagggaagagcacttcccatcagcccacgccactgaaatcctggccaggttcccctgcaaggagaaccctgacaacctgtcagacttccgggaggaggtcagccgcaggctcaggtatgagtcccaggtaaggagctgtgcaaagggaagctcctcttccctagtggtggctggtgagaggtccggggatggcctagtgctaaagctggggttggtcctcaggggctgaggtctgtgggaaagcactagcgttaggtatcagggctggttaactggtgcatggtggggcaagggccagttccagacacaaataagacagttttatcaatttttttttttactgtaaatctcagttgtatatgaccaaattagttttaaacattaaaggaacattcttctg

SEQ ID NO: 291410 - DNA, 972 bp, Artificial Sequence
  derived and/or modified sequence
atggccgccctgatcgccgagaacttcagattcctgagcctgttcttcaagagcaaggacgtgatgatcttcaacggcctggtggccctgggcaccgtgggcagccaggagctgttcagcgtggtggccttccactgcccctgcagccccgccagaaactacctgtacggcctggccgccatcggcgtgcccgccctggtgctgttcatcatcggcatcatcctgaacaaccacacctggaacctggtggccgagtgccagcacagaagaaccaagaactgcagcgccgcccccaccttcctgctgctgagcagcatcctgggcagagccgccgtggcccccgtgacctggagcgtgatcagcctgctgagaggcgaggcctacgtgtgcgccctgagcgagttcgtggaccccagcagcctgaccgccagagaggagcacttccccagcgcccacgccaccgagatcctggccagattcccctgcaaggagaaccccgacaacctgagcgacttcagagaggaggtgagcagaagactgagatacgagagccagctgttcggctggctgctgatcggcgtggtggccatcctggtgttcctgaccaagtgcctgaagcactactgcagccccctgagctacagacaggaggcctactgggcccagtacagagccaacgaggaccagctgttccagagaaccgccgaggtgcacagcagagtgctggccgccaacaacgtgagaagattcttcggcttcgtggccctgaacaaggacgacgaggagctgatcgccaacttccccgtggagggcacccagcccagaccccagtggaacgccatcaccggcgtgtacctgtacagagagaaccagggcctgcccctgtacagcagactgcacaagtgggcccagggcctggccggcaacggcgccgcccccgacaacgtggagatggccctgctgcccagctag

SEQ ID NO: 291411 - DNA, 657 bp, Artificial Sequence
  derived and/or modified sequence
atggccgccctgatcgccgagaacttcagattcctgagcctgttcttcaagagcaaggacgtgatgatcttcaacggcctggtggccctgggcaccgtgggcagccaggagctgttcagcgtggtggccttccactgcccctgcagccccgccagaaactacctgtacggcctggccgccatcggcgtgcccgccctggtgctgttcatcatcggcatcatcctgaacaaccacacctggaacctggtggccgagtgccagcacagaagaaccaagaactgcagcgccgcccccaccttcctgctgctgagcagcatcctgggcagagccgccgtggcccccgtgacctggagcgtgatcagcctgctgagaggcgaggcctacgtgtgcgccctgagcgagttcgtggaccccagcagcctgaccgccagagaggagcacttccccagcgcccacgccaccgagatcctggccagattcccctgcaaggagaaccccgacaacctgagcgacttcagagaggaggtgagcagaagactgagatacgagagccaggtgagaagctgcgccaagggcagcagcagcagcctggtggtggccggcgagagaagcggcgacggcctggtgctgaagctgggcctggtgctgagaggctag

SEQ ID NO: 291412 - protein, 968 aa, Artificial Sequence
  derived and/or modified sequence
MRLLRHTESEQWFHRFPLCPSLTFWAPVAMWPQTHCVGGRSSGLTKWTYSFSASLQDGSFPYDSVPWQQNTNQPPGSLSVVTTVWGVTNTSQSQADVLIPHATCRPGPLLITAWEPYGQCQQPHESRRQPHGVGHDHQQPRPQLPTVCGAAAAVLSQGWPRSALHPAEHVWPAQLPRQRGLWGQPAAAAAAAAVAAAAATATATATATVAALQETQNKDINQYGPAPVLLPDLLKDGLGDEERGAPIGMQNSMNPASMAAGMTPSGMSGPPMGMNQPRPPGISPFGTHGQRMPQQTYPGPRPQSLPIQNIKRPYPGEPNYGNQQYGPNSQFPTQPGQYPAPNPPRPLTSPNYPGQRMPSQPSSGQYPPPTVNMGQYYKPEQFNGQNNTFSGSSYSNYSQGNVNRPPRPVPVANYPHSPVPGNPTPPMTPGSSIPPYLSPSQDVKPPFPPDIKPNMSALPPPPDHNDELRLTFPVRDGVVLEPFRLEHNLAVSNHVFHLRPTVHQTLMWSDLELQFKCYHHEDRQMNTNWPASVQVSVNATPLTIERGDNKTSHKPLHLKHVCQPGRNTIQITVTACCCSHLFVLQLVHRPSVRSVLQGLLKKRLLPAEHCITKKRNFSSVAASSGNTTLNGEDGVEQTAIKVSLKCPITFRRIQLPARGHDCKHVQCFDLESYLQLNCERGTWRCPVCKTALLEGLEVDQYMWGILNAIHSEFEEVTIDPTCSWRPVPIKSDLHIKDDPDGIPSKRFKTMSPSQMIMPNVMEMIAALGPGPSPYPLPPPPGGTNSNDYSSQNNYQGHGNFDFPHGNPGGTSMNDFMHGPPQLSHPPDMPNNMAALEKPLSHPMQETMPHAGSSDQPHPSIQQGLHVPHPSSQSGPPLHHSGAPPPPPSQPPRQPPQAAPSSHPHSDLTFNPSSALEGQAGAQGASDMPEPSLDLLPELTNPDELLSYLDPPDLPSNSNDDLLSLFENN

SEQ ID NO: 291413 - protein, 133 aa, Artificial Sequence
  derived and/or modified sequence
MSPSQMIMPNVMEMIAALGPGPSPYPLPPPPGGTNSNDYSSQGNNYQGHGNFDFPHGNPGGTSMNDFMHGPPQLSHPPDMPNNMAALEKPLSHPMQETLLPELTNPDELLSYLDPPDLPSNSNDDLLSLFENN

SEQ ID NO: 291414 - DNA, 663 bp, Artificial Sequence
  derived and/or modified sequence
atgaacagcatggacagacacatccagcagaccaacgacagactgcagtgcatcaagcagcacctgcagaaccccgccaacttccacaacgccgccaccgagctgctggactggtgcggcgaccccagagccttccagagacccttcgagcagagcctgatgggctgcctgaccgtggtgagcagagtggccgcccagcagggcttcgacctggacctgggctacagactgctggccgtgtgcgccgccaacagagacaagttcacccccaagagcgccgccctgctgagcagctggtgcgaggagctgggcagactgctgctgctgagacaccagaagagcagacagagcgacccccccggcaagctgcccatgcagccccccctgagcagcatgagcagcatgaagcccaccctgagccacagcgacggcagcttcccctacgacagcgtgccctggctgcccgcctaccccgcctgcacccccccccccagccagagccaccccaacagctgcagcctgaagcagaagcagcccctggccttccccccccccctgtgcagcatctggctgaccaccctgcagggcctgctgggcagcctgagctgcgtgcacttcgtgagcggctggagcgtgcccagagagccccacggcctgggctag

SEQ ID NO: 291415 - DNA, 402 bp, Artificial Sequence
  derived and/or modified sequence
atgagccccagccagatgatcatgcccaacgtgatggagatgatcgccgccctgggccccggccccagcccctaccccctgccccccccccccggcggcaccaacagcaacgactacagcagccagggcaacaactaccagggccacggcaacttcgacttcccccacggcaaccccggcggcaccagcatgaacgacttcatgcacggccccccccagctgagccacccccccgacatgcccaacaacatggccgccctggagaagcccctgagccaccccatgcaggagaccctgctgcccgagctgaccaaccccgacgagctgctgagctacctggacccccccgacctgcccagcaacagcaacgacgacctgctgagcctgttcgagaacaactag

SEQ ID NO: 291416 - DNA, 663 bp, Artificial Sequence
  derived and/or modified sequence
atgaatagcatggaccgtcacattcagcagactaatgacagactgcagtgtataaagcagcacctgcagaacccagctaatttccacaacgcggcaacggaactgttggactggtgcggggatccaagggctttccagcgcccttttgagcagtcgctgatggggtgtttaacagtggtatccagagtcgccgctcagcagggttttgatctggacctgggctaccggctgctcgcggtgtgcgccgcgaaccgcgacaagttcactcccaagtctgctgccctacttagctcttggtgtgaggagttgggccgactcttgttactgcggcaccagaaaagcagacaaagcgatcctcctgggaagcttcctatgcagcctcctctgtcctcaatgtcaagcatgaaacccaccctcagccactccgacggcagctttccatacgattcagttccttggctacctgcttaccccgcttgcacccctccaccttctcagagccatcccaacagctgttcactgaagcaaaagcaacctctggccttcccacctcctctatgttcaatctggctcacaacattgcaggggcttctgggttccctctcttgtgtgcattttgtttcagggtggtctgtcccacgggagccgcacggcctggggtag

SEQ ID NO: 291417 - DNA, 402 bp, Artificial Sequence
  derived and/or modified sequence
atgagcccttcacagatgattatgccaaacgtcatggaaatgatcgctgcgctcggtcctggaccctctccctaccctttgccgcctccacccggggggactaatagcaacgactacagcagtcagggtaataattatcaaggccatggaaactttgatttcccccacggtaaccctggtggcaccagcatgaatgatttcatgcatggcccaccgcagcttagccacccacccgatatgcccaacaatatggcagcactagaaaagccactgagccatcccatgcaagagaccttgcttcctgaactgactaatccagacgagctgctctcctacctggacccccccgaccttcccagtaacagcaatgatgacctcctgagcctctttgaaaataactag

SEQ ID NO: 291418 - DNA, 663 bp, Artificial Sequence
  derived and/or modified sequence
atgaacagcatggacagacacatccagcagaccaatgaccggctgcagtgcatcaagcagcacctgcagaacccagccaacttccacaatgctgccacagagctgctggactggtgtggggacccccgggccttccagaggccctttgagcagagcctgatgggctgcctgactgtggtgtcccgggtggccgcccagcagggctttgacctggacctgggctaccgcctgctggccgtgtgtgccgccaacagagacaagttcacccccaagtctgctgccctgctgagctcctggtgtgaggagctgggccgcctgctgctgctgcggcaccagaagagccggcagagcgaccccccaggcaagctgcccatgcagccccccctgagctccatgagctccatgaagcccaccctgagccacagtgatggcagcttcccctatgacagcgtgccctggctgcctgcctacccagcctgcaccccaccacccagccagagccaccccaacagctgcagcctgaagcagaagcagcccctggccttccccccacccctgtgcagcatctggctgaccaccctgcagggcctgctgggcagcctgagctgtgtgcactttgtgtctggctggagcgtgccccgggagccccacggcctgggctag

SEQ ID NO: 291419 - DNA, 402 bp, Artificial Sequence
  derived and/or modified sequence
atgagccccagccagatgatcatgcccaacgtgatggagatgattgctgccctgggccctggccccagcccctaccccctgcccccacctcctgggggcaccaacagcaatgactacagcagccagggcaacaactaccagggccacggcaactttgacttcccccacggcaaccctgggggcacctccatgaatgacttcatgcacggccccccccagctgagccaccccccagacatgcccaacaacatggccgccctggagaagcccctgagccaccccatgcaggagaccctgctgcctgagctgaccaacccagatgagctgctgagctacctggaccccccagacctgcccagcaacagcaatgatgacctgctgagcctgtttgagaacaactag

SEQ ID NO: 291420 - DNA, 2196 bp, Artificial Sequence
  derived and/or modified sequence
ttcatggctctcgggtagaacctagtgaaacggccagaatgaattctatggacaggcacatccagcagaccaatgaccgactgcagtgcatcaagcagcacttacagaatcctgccaacttccacaatgccgccacggagctgctggactggtgcggagacccacgggccttccagcggcccttcgagcagagcctgatgggctgtttgacggtggtcagtcgggtggcagcccagcaaggctttgacctggacctcggctacagactgctggctgtgtgtgctgcaaaccgagacaagttcaccccgaagtctgccgccttgttgtcctcctggtgcgaagagctcggccgcctgctgctgctccgacatcagaagagccgccagagcgatccccctgggaaactccccatgcagccccctctcagctccatgagctccatgaaacccactctgtcgcacagtgatgggtcgttcccctatgactctgtcccttggctgccagcctaccctgcctgcactcctccaccatcacaatctcacccaaactcctgctcactcaagcaaaagcagcctctggccttccctccaccgctttgctccatctggcttaccactctccagggcctcctggggagcctgtcctgtgttcactttgtttcaggctggtctgtgccccgtgagccacatggcctagggtgatgccaggttgtcccgtcactggggtcccatctgtaaattctttgcgcccttcccggctgctgcctggggccctttcctgctctcccgtccgctgtgggtggtccccagctctcctctgtgggttttaccggaaaggtggccccagctgttgacttccagtcactgtcccagacggcacaaggttttctgtaggaaagctgccattgccccggccccttttcttcctttgtcccgttgtcgaggttttttcaaatagcgtgttgttcagtatgcaaatcaattattttaagaatcgcttttgtaaatatctttgtgaatattttagtatcgtctttgataatattcaacattttcatgacctggttatagcctttgctggtgtttttaaaatacctggactcaatgacaaagaccgagtcttctttttttttaaacaaaaacaaaaaaagcaaccagggctatttgtacagttgaaggggtgaacagaatgggcggctgtgctgggagttggaagaccgggcagcccgctatttagagccatccctcagtcagctggcagggacaagccaacgccaggtagcatgtggccacccttgcccagtgtctgtggcctggcaagtggccacgccctgtgtcagaccatctgggaattaagctccagacagacttacagatgccttccttaggagttcttgcttcttgcgttgatactttgccccagaaaggcctgggattcattctggttcttatcagggtgtgtccacactctgctcacaggtggatccacggctttccagtgcggagagtcgagatgctccctgcagcccaggccccgggcacctcctgcaaccatctctgggctcagcacctgaggcgggtttcctgggtcccctctccagcaagcctccaccagcaagctcggcccagagcttcccttccggctggctctgaaccgtgcgtggtgcctacagcctgcagtctggagacaagctcttccggagtgctctgggagccaggccagggtgtgagggaggtgcagaggcatccggggcgggagcaagccccaggttgtgacaggtgcaggtagacaacgcccataaacagagatggtcctgaactctggagagatccttccctgatcctttcggacgactacttggagccataagtaacctcagcaaaaacgaggcctctgcaagccacttttccatgccaagcatccacccggcccacaggcatgtttctgccgccactccgcaagatggacagggagccagcaggcaggcgggaagggccaagtacaggcaatcacccccatcttcttggtttgaagctttatccatgtatcatgttccgtgtagccattttattttttaagaaactgctaatactttctccctaatggaagccctgatcccccagagagctacaggtctgctcccgacgggcctcgggcctgacccgtccacacagggccgtgtcaacagcagcgact

SEQ ID NO: 291421 - DNA, 663 bp, Artificial Sequence
  derived and/or modified sequence
atgaacagcatggaccggcacatccagcagaccaacgaccggctgcagtgtattaagcagcatcttcagaacccagccaacttccataacgctgccaccgaattgctggattggtgtggagaccctcgcgcctttcaacggccctttgagcagtctttaatggggtgtctaaccgtggtaagccgagtggccgcgcagcaaggctttgacctggatctgggttaccgcttgcttgctgtctgtgccgcgaatcgtgacaagttcactcctaagtccgccgcactgctgtcctcttggtgcgaagagctcggcaggctgctcctgctcaggcatcagaaaagccggcaaagcgacccgccaggaaagctcccaatgcagcctcctctttcaagtatgtcaagcatgaaacccacactgtcccatagcgacggctcattcccatacgacagcgtaccctggcttcccgcttaccctgcatgtactccaccaccgtcacaatctcacccaaattcttgcagcttgaagcagaaacaacctcttgcatttcccccccccctgtgctccatctggctcacaaccctgcagggacttctcggatccctcagctgtgttcactttgtgagcggatggagtgtgccaagagaaccccacggcttaggctag

SEQ ID NO: 291422 - DNA, 402 bp, Artificial Sequence
  derived and/or modified sequence
atgagccccagccagatgatcatgcccaacgtgatggagatgatcgcggcactcggccccggtccatccccataccctctgcctcctcctccaggaggaacgaacagtaatgattatagcagccagggcaataactaccaagggcatgggaatttcgactttcctcatgggaacccaggcggaacaagtatgaatgacttcatgcatggcccgccacagctctcccacccaccggacatgccgaacaacatggctgcgctggaaaaacccctgagccacccgatgcaggagaccttactgccggaactgaccaatcctgatgagttgctctcctacctcgatccccctgatctgcccagcaacagtaacgacgatctgctctccttatttgagaataactag

SEQ ID NO: 291423 - DNA, 663 bp, Artificial Sequence
  derived and/or modified sequence
atgaattcgatggaccgccatattcagcaaacaaacgatagactgcagtgtattaagcagcaccttcagaacccagcgaacttccacaacgctgccacagaactactggactggtgcggtgacccacgcgctttccagcggccttttgagcagtctttaatgggctgtttgaccgtggtttcacgggtcgccgcacagcaggggtttgacctcgacctcggctaccgtctgctcgcggtatgcgccgctaacagggataaattcacgccaaagtcagccgctctcctctcttcctggtgtgaggagctgggaagattgctcctgcttcggcaccagaagtcgcgccagtccgacccaccgggaaaactcccaatgcaacctcccctgtcctctatgagttccatgaagcctaccctgagtcactccgacgggagtttcccctatgatagcgtgccatggctgcccgcatatcccgcatgtacccccccaccttctcagtcacatcccaattcttgtagtctcaagcagaagcagcccttggctttcccacctcccctgtgttctatatggttaaccacactgcagggtctgctcggatctctgtcctgcgtccacttcgtgagcgggtggagcgttcccagagagccccatgggctcggatag

SEQ ID NO: 291424 - DNA, 402 bp, Artificial Sequence
  derived and/or modified sequence
atgtctccaagccagatgatcatgcccaacgtcatggagatgatagcagccctggggccaggaccaagcccttacccactgccccctccacctggagggacgaactcaaacgactattcctcccagggtaacaattatcagggccacggtaatttcgacttcccccatgggaaccccggtggcacctcaatgaacgacttcatgcacgggccaccacaactgagccatcctccagacatgccaaataacatggctgcactagagaagcctctgagtcatccaatgcaagaaacactgcttccagagttaacaaatcccgacgaactgctgagctacctcgacccacccgacctgccgtccaattcaaacgatgacctgctatccctgttcgaaaacaattag

SEQ ID NO: 291425 - DNA, 402 bp, Artificial Sequence
  derived and/or modified sequence
atgagtcccagccagatgatcatgcccaatgtcatggagatgatcgcagccctgggccccggcccgtccccctatcccctcccgcctcccccagggggcaccaactccaacgactacagcagccaaggcaacaactaccaaggccatggcaactttgacttcccccacgggaaccctggagggacatccatgaatgacttcatgcacgggcccccccagctctcccaccccccggacatgcccaacaacatggccgccctcgagaaacccctcagccaccccatgcaggaaactctccttcccgaactcacaaatcctgacgagctcctgtcttatctggacccccccgacctgccgagcaatagtaacgatgacctcctgtctctatttgagaacaactga

SEQ ID NO: 291426 - protein, 3357 aa, Artificial Sequence
  derived and/or modified sequence
MGRHVATSCHVAWLLVLISGCWGQVNRLPFFTNHFFDTYLLISEDTPVGSSVTQLLAQDMDNDPLVFGVSGEEASRFFAVEPDTGVVWLRQPLDRETKSEFTVEFSVSDHQGVITRKVNIQVGDVNDNAPTFHNQPYSVRIPEVGATGNTPVGTPIFIVNATDPDLGAGGSVLYSFQPPSQFFAIDSARGIVTVIRELDYETTQAYQLTVNATDQDKTRPLSTLANLAIIITDVQDMDPIFINLPYSTNIYEHSPPGTTVRIITAIDQDKGRPRGIGYTIVSGNTNSIFALDYISGVLTLNGLLDRENPLYSHGFILTVKGTELNDDRTPSDATVTTTFNILVIDINDNAPEFNSSEYSVAITELAQVGFALPLFIQVVDKDEGLNSMFEVYLVGNNSHHFIISPTSVQGKADIRIRVAIPLDYETVDRYDFDLFANESVPDHVGYAKVKITLINENDNRPIFSQPLYNISLYENVTVGTSVLTVLATDNDAGTFGEVSYFFSDDPDRFSLDKDTGLIMLIARLDYELIQRFTLTIIARDGGGEETTGRVRINVLDVNDNVPTFQKDAYVGALRENEPSVTQLVRLRATDEDSPPNNQITYSIVSASAFGSYFDISLYEGYGVISVSRPLDYEQISNGLIYLTVMAMDAGNPPLNSTVPVTIEVFDENDNPPTFSKPAYFVSVVENIMAGATVLFLNATDLDRSREYGQESIIYSLEGSTQFRINARSGEITTTSLLDRETKSEYILIVRAVDGGVGHNQKTGIATVNITLLDINDNHPTWKDAPYYINLVEMTPPDSDVTTVVAVDPDLGENGTLVYSIQPPNKFYSLNSTTGKIRTTHAMLDRENPDPHEAELMRKIVVSVTDCGRPPLKATSSATVFVNLLDLNDNDPTFQNLPFVAEVLEGIPAGVSIYQVVAIDLDEGLNGLVSYRMPVGMPRMDFLINSSSGVVVTTTELDRERIAEYQLRVVASDAGTPTKSSTSTLTIHVLDVNDETPTFFPAVYNVSVSEDVPREFRVVWLNCTDNDVGLNAELSYFITGGNVDGKFSVGYRDAVVRTVVGLDRETTAAYMLILEAIDNGPVGKRHTGTATVFVTVLDVNDNRPIFLQSSYEASVPEDIPEGHSILQLKATDADEGEFGRVWYRILHGNHGNNFRIHVSNGLLMRGPRPLDRERNSSHVLIVEAYNHDLGPMRSSVRVIVYVEDINDEAPVFTQQQYSRLGLRETAGIGTSVIVVQATDRDSGDGGLVNYRILSGAEGKFEIDESTGLIITVNYLDYETKTSYMMNVSATDQAPPFNQGFCSVYITLLNELDEAVQFSNASYEAAILENLALGTEIVRVQAYSIDNLNQITYRFNAYTSTQAKALFKIDAITGVITVQGLVDREKGDFYTLTVVADDGGPKVDSTVKVYITVLDENDNSPRFDFTSDSAVSIPEDCPVGQRVATVKAWDPDAGSNGQVVFSLASGNIAGAFEIVTTNDSIGEVFVARPLDREELDHYILQVVASDRGTPPRKKDHILQVTILDINDNPPVIESPFGYNVSVNENVGGGTAVVQVRATDRDIGINSVLSYYITEGNKDMAFRMDRISGEIATRPAPPDRERQSFYHLVATVEDEGTPTLSATTHVYVTIVDENDNAPMFQQPHYEVLLDEGPDTLNTSLITIQALDLDEGPNGTVTYAIVAGNIVNTFRIDRHMGVITAAKELDYEISHGRYTLIVTATDQCPILSHRLTSTTTVLVNVNDINDNVPTFPRDYEGPFEVTEGQPGPRVWTFLAHDRDSGPNGQVEYSIMDGDPLGEFVISPVEGVLRVRKDVELDRETIAFYNLTICARDRGMPPLSSTMLVGIRVLDINDNDPVLLNLPMNITISENSPVSSFVAHVLASDADSGCNARLTFNITAGNRERAFFINATTGIVTVNRPLDRERIPEYKLTISVKDNPENPRIARRDYDLLLIFLSDENDNHPLFTKSTYQAEVMENSPAGTPLTVLNGPILALDADQDIYAVVTYQLLGAQSGLFDINSSTGVVTVRSGVIIDREAFSPPILELLLLAEDIGLLNSTAHLLITILDDNDNRPTFSPATLTVHLLENCPPGFSVLQVTATDEDSGLNGELVYRIEAGAQDRFLIHLVTGVIRVGNATIDREEQESYRLTVVATDRGTVPLSGTAIVTILIDDINDSRPEFLNPIQTVSVLESAEPGTVIANITAIDHDLNPKLEYHIVGIVAKDDTDRLVPNQEDAFAVNINTGSVMVKSPMNRELVATYEVTLSVIDNASDLPERSVSVPNAKLTVNVLDVNDNTPQFKPFGITYYMERILEGATPGTTLIAVAAVDPDKGLNGLVTYTLLDLVPPGYVQLEDSSAGKVIANRTVDYEEVHWLNFTVRASDNGSPPRAAEIPVYLEIVDINDNNPIFDQPSYQEAVFEDVPVGTIILTVTATDADSGNFALIEYSLGDGESKFAINPTTGDIYVLSSLDREKKDHYILTALAKDNPGDVASNRRENSVQVVIQVLDVNDCRPQFSKPQFSTSVYENEPAGTSVITMMATDQDEGPNGELTYSLEGPGVEAFHVDMDSGLVTTQRPLQSYEKFSLTVVATDGGEPPLWGTTMLLVEVIDVNDNRPVFVRPPNGTILHIREEIPLRSNVYEVYATDKDEGLNGAVRYSFLKTAGNRDWEFFIIDPISGLIQTAQRLDRESQAVYSLILVASDLGQPVPYETMQPLQVALEDIDDNEPLFVRPPKGSPQYQLLTVPEHSPRGTLVGNVTGAVDADEGPNAIVYYFIAAGNEEKNFHLQPDGCLLVLRDLDREREAIFSFIVKASSNRSWTPPRGPSPTLDLVADLTLQEVRVVLEDINDQPPRFTKAEYTAGVATDAKVGSELIQVLALDADIGNNSLVFYSILAIHYFRALANDSEDVGQVFTMGSMDGILRTFDLFMAYSPGYFVVDIVARDLAGHNDTAIIGIYILRDDQRVKIVINEIPDRVRGFEEEFIHLLSNITGAIVNTDNVQFHVDKKGRVNFAQTELLIHVVNRDTNRILDVDRVIQMIDENKEQLRNLFRNYNVLDVQPAISVRLPDDMSALQMAIIVLAILLFLAAMLFVLMNWYYRTVHKRKLKAIVAGSAGNRGFIDIMDMPNTNKYSFDGANPVWLDPFCRNLELAAQAEHEDDLPENLSEIADLWNSPTRTHGTFGREPAAVKPDDDRYLRAAIQEYDNIAKLGQIIREGPIKGSLLKVVLEDYLRLKKLFAQRMVQKASSCHSSISELIQTELDEEPGDHSPGQGSLRFRHKPPVELKGPDGIHVVHGSTGTLLATDLNSLPEEDQKGLGRSLETLTAAEATAFERNARTESAKSTPLHKLRDVIMETPLEITEL

SEQ ID NO: 291427 - protein, 3359 aa, Artificial Sequence
  derived and/or modified sequence
MGRHVATSCHVAWLLVLISGCWGQVNRLPFFTNHFFDTYLLISEDTPVGSSVTQLLAQDMDNDPLVFGVSGEEASRFFAVEPDTGVVWLRQPLDRETKSEFTVEFSVSDHQGVITRKVNIQVGDVNDNAPTFHNQPYSVRIPEVGATGNTPVGTPIFIVNATDPDLGAGGSVLYSFQPPSQFFAIDSARGIVTVIRELDYETTQAYQLTVNATDQDKTRPLSTLANLAIIITDVQDMDPIFINLPYSTNIYEHSPPGTTVRIITAIDQDKGRPRGIGYTIVSVAGNTNSIFALDYISGVLTLNGLLDRENPLYSHGFILTVKGTELNDDRTPSDATVTTTFNILVIDINDNAPEFNSSEYSVAITELAQVGFALPLFIQVVDKDEGLNSMFEVYLVGNNSHHFIISPTSVQGKADIRIRVAIPLDYETVDRYDFDLFANESVPDHVGYAKVKITLINENDNRPIFSQPLYNISLYENVTVGTSVLTVLATDNDAGTFGEVSYFFSDDPDRFSLDKDTGLIMLIARLDYELIQRFTLTIIARDGGGEETTGRVRINVLDVNDNVPTFQKDAYVGALRENEPSVTQLVRLRATDEDSPPNNQITYSIVSASAFGSYFDISLYEGYGVISVSRPLDYEQISNGLIYLTVMAMDAGNPPLNSTVPVTIEVFDENDNPPTFSKPAYFVSVVENIMAGATVLFLNATDLDRSREYGQESIIYSLEGSTQFRINARSGEITTTSLLDRETKSEYILIVRAVDGGVGHNQKTGIATVNITLLDINDNHPTWKDAPYYINLVEMTPPDSDVTTVVAVDPDLGENGTLVYSIQPPNKFYSLNSTTGKIRTTHAMLDRENPDPHEAELMRKIVVSVTDCGRPPLKATSSATVFVNLLDLNDNDPTFQNLPFVAEVLEGIPAGVSIYQVVAIDLDEGLNGLVSYRMPVGMPRMDFLINSSSGVVVTTTELDRERIAEYQLRVVASDAGTPTKSSTSTLTIHVLDVNDETPTFFPAVYNVSVSEDVPREFRVVWLNCTDNDVGLNAELSYFITGGNVDGKFSVGYRDAVVRTVVGLDRETTAAYMLILEAIDNGPVGKRHTGTATVFVTVLDVNDNRPIFLQSSYEASVPEDIPEGHSILQLKATDADEGEFGRVWYRILHGNHGNNFRIHVSNGLLMRGPRPLDRERNSSHVLIVEAYNHDLGPMRSSVRVIVYVEDINDEAPVFTQQQYSRLGLRETAGIGTSVIVVQATDRDSGDGGLVNYRILSGAEGKFEIDESTGLIITVNYLDYETKTSYMMNVSATDQAPPFNQGFCSVYITLLNELDEAVQFSNASYEAAILENLALGTEIVRVQAYSIDNLNQITYRFNAYTSTQAKALFKIDAITGVITVQGLVDREKGDFYTLTVVADDGGPKVDSTVQVYITVLDENDNSPRFDFTSDSAVSIPEDCPVGQRVATVKAWDPDAGSNGQVVFSLASGNIAGAFEIVTTNDSIGEVFVARPLDREELDHYILQVVASDRGTPPRKKDHILQVTILDINDNPPVIESPFGYNVSVNENVGGGTAVVQVRATDRDIGINSVLSYYITEGNKDMAFRMDRISGEIATRPAPPDRERQSFYHLVATVEDEGTPTLSATTHVYVTIVDENDNAPMFQQPHYEVLLDEGPDTLNTSLITIQALDLDEGPNGTVTYAIVAGNIVNTFRIDRHMGVITAAKELDYEISHGRYTLIVTATDQCPILSHRLTSTTTVLVNVNDINDNVPTFPRDYEGPFEVTEGQPGPRVWTFLAHDRDSGPNGQVEYSIMDGDPLGEFVISPVEGVLRVRKDVELDRETIAFYNLTICARDRGMPPLSSTMLVGIRVLDINDNDPVLLNLPMNITISENSPVSSFVAHVLASDADSGCNARLTFNITAGNRERAFFINATTGIVTVNRPLDRERIPEYKLTISVKDNPENPRIARRDYDLLLIFLSDENDNHPLFTKSTYQAEVMENSPAGTPLTVLNGPILALDADQDIYAVVTYQLLGAQSGLFDINSSTGVVTVRSGVIIDREAFSPPILELLLLAEDIGLLNSTAHLLITILDDNDNRPTFSPATLTVHLLENCPPGFSVLQVTATDEDSGLNGELVYRIEAGAQDRFLIHLVTGVIRVGNATIDREEQESYRLTVVATDRGTVPLSGTAIVTILIDDINDSRPEFLNPIQTVSVLESAEPGTVIANITAIDHDLNPKLEYHIVGIVAKDDTDRLVPNQEDAFAVNINTGSVMVKSPMNRELVATYEVTLSVIDNASDLPERSVSVPNAKLTVNVLDVNDNTPQFKPFGITYYMERILEGATPGTTLIAVAAVDPDKGLNGLVTYTLLDLVPPGYVQLEDSSAGKVIANRTVDYEEVHWLNFTVRASDNGSPPRAAEIPVYLEIVDINDNNPIFDQPSYQEAVFEDVPVGTIILTVTATDADSGNFALIEYSLGDGESKFAINPTTGDIYVLSSLDREKKDHYILTALAKDNPGDVASNRRENSVQVVIQVLDVNDCRPQFSKPQFSTSVYENEPAGTSVITMMATDQDEGPNGELTYSLEGPGVEAFHVDMDSGLVTTQRPLQSYEKFSLTVVATDGGEPPLWGTTMLLVEVIDVNDNRPVFVRPPNGTILHIREEIPLRSNVYEVYATDKDEGLNGAVRYSFLKTAGNRDWEFFIIDPISGLIQTAQRLDRESQAVYSLILVASDLGQPVPYETMQPLQVALEDIDDNEPLFVRPPKGSPQYQLLTVPEHSPRGTLVGNVTGAVDADEGPNAIVYYFIAAGNEEKNFHLQPDGCLLVLRDLDREREAIFSFIVKASSNRSWTPPRGPSPTLDLVADLTLQEVRVVLEDINDQPPRFTKAEYTAGVATDAKVGSELIQVLALDADIGNNSLVFYSILAIHYFRALANDSEDVGQVFTMGSMDGILRTFDLFMAYSPGYFVVDIVARDLAGHNDTAIIGIYILRDDQRVKIVINEIPDRVRGFEEEFIHLLSNITGAIVNTDNVQFHVDKKGRVNFAQTELLIHVVNRDTNRILDVDRVIQMIDENKEQLRNLFRNYNVLDVQPAISVRLPDDMSALQMAIIVLAILLFLAAMLFVLMNWYYRTVHKRKLKAIVAGSAGNRGFIDIMDMPNTNKYSFDGANPVWLDPFCRNLELAAQAEHEDDLPENLSEIADLWNSPTRTHGTFGREPAAVKPDDDRYLRAAIQEYDNIAKLGQIIREGPIKGSLLKVVLEDYLRLKKLFAQRMVQKASSCHSSISELIQTELDEEPGDHSPGQGSLRFRHKPPVELKGPDGIHVVHGSTGTLLATDLNSLPEEDQKGLGRSLETLTAAEATAFERNARTESAKSTPLHKLRDVIMETPLEITEL

SEQ ID NO: 291428 - DNA, 10074 bp, Artificial Sequence
  derived and/or modified sequence
atgggcagacacgtggccaccagctgccacgtggcctggctgctggtgctgatcagcggctgctggggccaggtgaacagactgcccttcttcaccaaccacttcttcgacacctacctgctgatcagcgaggacacccccgtgggcagcagcgtgacccagctgctggcccaggacatggacaacgaccccctggtgttcggcgtgagcggcgaggaggccagcagattcttcgccgtggagcccgacaccggcgtggtgtggctgagacagcccctggacagagagaccaagagcgagttcaccgtggagttcagcgtgagcgaccaccagggcgtgatcaccagaaaggtgaacatccaggtgggcgacgtgaacgacaacgcccccaccttccacaaccagccctacagcgtgagaatccccgaggtgggcgccaccggcaacacccccgtgggcacccccatcttcatcgtgaacgccaccgaccccgacctgggcgccggcggcagcgtgctgtacagcttccagccccccagccagttcttcgccatcgacagcgccagaggcatcgtgaccgtgatcagagagctggactacgagaccacccaggcctaccagctgaccgtgaacgccaccgaccaggacaagaccagacccctgagcaccctggccaacctggccatcatcatcaccgacgtgcaggacatggaccccatcttcatcaacctgccctacagcaccaacatctacgagcacagcccccccggcaccaccgtgagaatcatcaccgccatcgaccaggacaagggcagacccagaggcatcggctacaccatcgtgagcggcaacaccaacagcatcttcgccctggactacatcagcggcgtgctgaccctgaacggcctgctggacagagagaaccccctgtacagccacggcttcatcctgaccgtgaagggcaccgagctgaacgacgacagaacccccagcgacgccaccgtgaccaccaccttcaacatcctggtgatcgacatcaacgacaacgcccccgagttcaacagcagcgagtacagcgtggccatcaccgagctggcccaggtgggcttcgccctgcccctgttcatccaggtggtggacaaggacgagggcctgaacagcatgttcgaggtgtacctggtgggcaacaacagccaccacttcatcatcagccccaccagcgtgcagggcaaggccgacatcagaatcagagtggccatccccctggactacgagaccgtggacagatacgacttcgacctgttcgccaacgagagcgtgcccgaccacgtgggctacgccaaggtgaagatcaccctgatcaacgagaacgacaacagacccatcttcagccagcccctgtacaacatcagcctgtacgagaacgtgaccgtgggcaccagcgtgctgaccgtgctggccaccgacaacgacgccggcaccttcggcgaggtgagctacttcttcagcgacgaccccgacagattcagcctggacaaggacaccggcctgatcatgctgatcgccagactggactacgagctgatccagagattcaccctgaccatcatcgccagagacggcggcggcgaggagaccaccggcagagtgagaatcaacgtgctggacgtgaacgacaacgtgcccaccttccagaaggacgcctacgtgggcgccctgagagagaacgagcccagcgtgacccagctggtgagactgagagccaccgacgaggacagcccccccaacaaccagatcacctacagcatcgtgagcgccagcgccttcggcagctacttcgacatcagcctgtacgagggctacggcgtgatcagcgtgagcagacccctggactacgagcagatcagcaacggcctgatctacctgaccgtgatggccatggacgccggcaacccccccctgaacagcaccgtgcccgtgaccatcgaggtgttcgacgagaacgacaacccccccaccttcagcaagcccgcctacttcgtgagcgtggtggagaacatcatggccggcgccaccgtgctgttcctgaacgccaccgacctggacagaagcagagagtacggccaggagagcatcatctacagcctggagggcagcacccagttcagaatcaacgccagaagcggcgagatcaccaccaccagcctgctggacagagagaccaagagcgagtacatcctgatcgtgagagccgtggacggcggcgtgggccacaaccagaagaccggcatcgccaccgtgaacatcaccctgctggacatcaacgacaaccaccccacctggaaggacgccccctactacatcaacctggtggagatgaccccccccgacagcgacgtgaccaccgtggtggccgtggaccccgacctgggcgagaacggcaccctggtgtacagcatccagccccccaacaagttctacagcctgaacagcaccaccggcaagatcagaaccacccacgccatgctggacagagagaaccccgacccccacgaggccgagctgatgagaaagatcgtggtgagcgtgaccgactgcggcagaccccccctgaaggccaccagcagcgccaccgtgttcgtgaacctgctggacctgaacgacaacgaccccaccttccagaacctgcccttcgtggccgaggtgctggagggcatccccgccggcgtgagcatctaccaggtggtggccatcgacctggacgagggcctgaacggcctggtgagctacagaatgcccgtgggcatgcccagaatggacttcctgatcaacagcagcagcggcgtggtggtgaccaccaccgagctggacagagagagaatcgccgagtaccagctgagagtggtggccagcgacgccggcacccccaccaagagcagcaccagcaccctgaccatccacgtgctggacgtgaacgacgagacccccaccttcttccccgccgtgtacaacgtgagcgtgagcgaggacgtgcccagagagttcagagtggtgtggctgaactgcaccgacaacgacgtgggcctgaacgccgagctgagctacttcatcaccggcggcaacgtggacggcaagttcagcgtgggctacagagacgccgtggtgagaaccgtggtgggcctggacagagagaccaccgccgcctacatgctgatcctggaggccatcgacaacggccccgtgggcaagagacacaccggcaccgccaccgtgttcgtgaccgtgctggacgtgaacgacaacagacccatcttcctgcagagcagctacgaggccagcgtgcccgaggacatccccgagggccacagcatcctgcagctgaaggccaccgacgccgacgagggcgagttcggcagagtgtggtacagaatcctgcacggcaaccacggcaacaacttcagaatccacgtgagcaacggcctgctgatgagaggccccagacccctggacagagagagaaacagcagccacgtgctgatcgtggaggcctacaaccacgacctgggccccatgagaagcagcgtgagagtgatcgtgtacgtggaggacatcaacgacgaggcccccgtgttcacccagcagcagtacagcagactgggcctgagagagaccgccggcatcggcaccagcgtgatcgtggtgcaggccaccgacagagacagcggcgacggcggcctggtgaactacagaatcctgagcggcgccgagggcaagttcgagatcgacgagagcaccggcctgatcatcaccgtgaactacctggactacgagaccaagaccagctacatgatgaacgtgagcgccaccgaccaggccccccccttcaaccagggcttctgcagcgtgtacatcaccctgctgaacgagctggacgaggccgtgcagttcagcaacgccagctacgaggccgccatcctggagaacctggccctgggcaccgagatcgtgagagtgcaggcctacagcatcgacaacctgaaccagatcacctacagattcaacgcctacaccagcacccaggccaaggccctgttcaagatcgacgccatcaccggcgtgatcaccgtgcagggcctggtggacagagagaagggcgacttctacaccctgaccgtggtggccgacgacggcggccccaaggtggacagcaccgtgaaggtgtacatcaccgtgctggacgagaacgacaacagccccagattcgacttcaccagcgacagcgccgtgagcatccccgaggactgccccgtgggccagagagtggccaccgtgaaggcctgggaccccgacgccggcagcaacggccaggtggtgttcagcctggccagcggcaacatcgccggcgccttcgagatcgtgaccaccaacgacagcatcggcgaggtgttcgtggccagacccctggacagagaggagctggaccactacatcctgcaggtggtggccagcgacagaggcaccccccccagaaagaaggaccacatcctgcaggtgaccatcctggacatcaacgacaacccccccgtgatcgagagccccttcggctacaacgtgagcgtgaacgagaacgtgggcggcggcaccgccgtggtgcaggtgagagccaccgacagagacatcggcatcaacagcgtgctgagctactacatcaccgagggcaacaaggacatggccttcagaatggacagaatcagcggcgagatcgccaccagacccgccccccccgacagagagagacagagcttctaccacctggtggccaccgtggaggacgagggcacccccaccctgagcgccaccacccacgtgtacgtgaccatcgtggacgagaacgacaacgcccccatgttccagcagccccactacgaggtgctgctggacgagggccccgacaccctgaacaccagcctgatcaccatccaggccctggacctggacgagggccccaacggcaccgtgacctacgccatcgtggccggcaacatcgtgaacaccttcagaatcgacagacacatgggcgtgatcaccgccgccaaggagctggactacgagatcagccacggcagatacaccctgatcgtgaccgccaccgaccagtgccccatcctgagccacagactgaccagcaccaccaccgtgctggtgaacgtgaacgacatcaacgacaacgtgcccaccttccccagagactacgagggccccttcgaggtgaccgagggccagcccggccccagagtgtggaccttcctggcccacgacagagacagcggccccaacggccaggtggagtacagcatcatggacggcgaccccctgggcgagttcgtgatcagccccgtggagggcgtgctgagagtgagaaaggacgtggagctggacagagagaccatcgccttctacaacctgaccatctgcgccagagacagaggcatgccccccctgagcagcaccatgctggtgggcatcagagtgctggacatcaacgacaacgaccccgtgctgctgaacctgcccatgaacatcaccatcagcgagaacagccccgtgagcagcttcgtggcccacgtgctggccagcgacgccgacagcggctgcaacgccagactgaccttcaacatcaccgccggcaacagagagagagccttcttcatcaacgccaccaccggcatcgtgaccgtgaacagacccctggacagagagagaatccccgagtacaagctgaccatcagcgtgaaggacaaccccgagaaccccagaatcgccagaagagactacgacctgctgctgatcttcctgagcgacgagaacgacaaccaccccctgttcaccaagagcacctaccaggccgaggtgatggagaacagccccgccggcacccccctgaccgtgctgaacggccccatcctggccctggacgccgaccaggacatctacgccgtggtgacctaccagctgctgggcgcccagagcggcctgttcgacatcaacagcagcaccggcgtggtgaccgtgagaagcggcgtgatcatcgacagagaggccttcagcccccccatcctggagctgctgctgctggccgaggacatcggcctgctgaacagcaccgcccacctgctgatcaccatcctggacgacaacgacaacagacccaccttcagccccgccaccctgaccgtgcacctgctggagaactgcccccccggcttcagcgtgctgcaggtgaccgccaccgacgaggacagcggcctgaacggcgagctggtgtacagaatcgaggccggcgcccaggacagattcctgatccacctggtgaccggcgtgatcagagtgggcaacgccaccatcgacagagaggagcaggagagctacagactgaccgtggtggccaccgacagaggcaccgtgcccctgagcggcaccgccatcgtgaccatcctgatcgacgacatcaacgacagcagacccgagttcctgaaccccatccagaccgtgagcgtgctggagagcgccgagcccggcaccgtgatcgccaacatcaccgccatcgaccacgacctgaaccccaagctggagtaccacatcgtgggcatcgtggccaaggacgacaccgacagactggtgcccaaccaggaggacgccttcgccgtgaacatcaacaccggcagcgtgatggtgaagagccccatgaacagagagctggtggccacctacgaggtgaccctgagcgtgatcgacaacgccagcgacctgcccgagagaagcgtgagcgtgcccaacgccaagctgaccgtgaacgtgctggacgtgaacgacaacaccccccagttcaagcccttcggcatcacctactacatggagagaatcctggagggcgccacccccggcaccaccctgatcgccgtggccgccgtggaccccgacaagggcctgaacggcctggtgacctacaccctgctggacctggtgccccccggctacgtgcagctggaggacagcagcgccggcaaggtgatcgccaacagaaccgtggactacgaggaggtgcactggctgaacttcaccgtgagagccagcgacaacggcagcccccccagagccgccgagatccccgtgtacctggagatcgtggacatcaacgacaacaaccccatcttcgaccagcccagctaccaggaggccgtgttcgaggacgtgcccgtgggcaccatcatcctgaccgtgaccgccaccgacgccgacagcggcaacttcgccctgatcgagtacagcctgggcgacggcgagagcaagttcgccatcaaccccaccaccggcgacatctacgtgctgagcagcctggacagagagaagaaggaccactacatcctgaccgccctggccaaggacaaccccggcgacgtggccagcaacagaagagagaacagcgtgcaggtggtgatccaggtgctggacgtgaacgactgcagaccccagttcagcaagccccagttcagcaccagcgtgtacgagaacgagcccgccggcaccagcgtgatcaccatgatggccaccgaccaggacgagggccccaacggcgagctgacctacagcctggagggccccggcgtggaggccttccacgtggacatggacagcggcctggtgaccacccagagacccctgcagagctacgagaagttcagcctgaccgtggtggccaccgacggcggcgagccccccctgtggggcaccaccatgctgctggtggaggtgatcgacgtgaacgacaacagacccgtgttcgtgagaccccccaacggcaccatcctgcacatcagagaggagatccccctgagaagcaacgtgtacgaggtgtacgccaccgacaaggacgagggcctgaacggcgccgtgagatacagcttcctgaagaccgccggcaacagagactgggagttcttcatcatcgaccccatcagcggcctgatccagaccgcccagagactggacagagagagccaggccgtgtacagcctgatcctggtggccagcgacctgggccagcccgtgccctacgagaccatgcagcccctgcaggtggccctggaggacatcgacgacaacgagcccctgttcgtgagaccccccaagggcagcccccagtaccagctgctgaccgtgcccgagcacagccccagaggcaccctggtgggcaacgtgaccggcgccgtggacgccgacgagggccccaacgccatcgtgtactacttcatcgccgccggcaacgaggagaagaacttccacctgcagcccgacggctgcctgctggtgctgagagacctggacagagagagagaggccatcttcagcttcatcgtgaaggccagcagcaacagaagctggaccccccccagaggccccagccccaccctggacctggtggccgacctgaccctgcaggaggtgagagtggtgctggaggacatcaacgaccagccccccagattcaccaaggccgagtacaccgccggcgtggccaccgacgccaaggtgggcagcgagctgatccaggtgctggccctggacgccgacatcggcaacaacagcctggtgttctacagcatcctggccatccactacttcagagccctggccaacgacagcgaggacgtgggccaggtgttcaccatgggcagcatggacggcatcctgagaaccttcgacctgttcatggcctacagccccggctacttcgtggtggacatcgtggccagagacctggccggccacaacgacaccgccatcatcggcatctacatcctgagagacgaccagagagtgaagatcgtgatcaacgagatccccgacagagtgagaggcttcgaggaggagttcatccacctgctgagcaacatcaccggcgccatcgtgaacaccgacaacgtgcagttccacgtggacaagaagggcagagtgaacttcgcccagaccgagctgctgatccacgtggtgaacagagacaccaacagaatcctggacgtggacagagtgatccagatgatcgacgagaacaaggagcagctgagaaacctgttcagaaactacaacgtgctggacgtgcagcccgccatcagcgtgagactgcccgacgacatgagcgccctgcagatggccatcatcgtgctggccatcctgctgttcctggccgccatgctgttcgtgctgatgaactggtactacagaaccgtgcacaagagaaagctgaaggccatcgtggccggcagcgccggcaacagaggcttcatcgacatcatggacatgcccaacaccaacaagtacagcttcgacggcgccaaccccgtgtggctggaccccttctgcagaaacctggagctggccgcccaggccgagcacgaggacgacctgcccgagaacctgagcgagatcgccgacctgtggaacagccccaccagaacccacggcaccttcggcagagagcccgccgccgtgaagcccgacgacgacagatacctgagagccgccatccaggagtacgacaacatcgccaagctgggccagatcatcagagagggccccatcaagggcagcctgctgaaggtggtgctggaggactacctgagactgaagaagctgttcgcccagagaatggtgcagaaggccagcagctgccacagcagcatcagcgagctgatccagaccgagctggacgaggagcccggcgaccacagccccggccagggcagcctgagattcagacacaagccccccgtggagctgaagggccccgacggcatccacgtggtgcacggcagcaccggcaccctgctggccaccgacctgaacagcctgcccgaggaggaccagaagggcctgggcagaagcctggagaccctgaccgccgccgaggccaccgccttcgagagaaacgccagaaccgagagcgccaagagcacccccctgcacaagctgagagacgtgatcatggagacccccctggagatcaccgagctgtag

SEQ ID NO: 291429 - DNA, 10074 bp, Artificial Sequence
  derived and/or modified sequence
atgggaaggcacgtggctacgtcatgtcacgtcgcctggttgctggtgttaattagtggatgctgggggcaggttaatagacttccgttctttaccaaccacttctttgatacctacctcctcatctcagaggatacccctgtggggtcctcagtgactcaactgctagctcaggatatggataacgaccctctagtcttcggcgtaagcggggaagaggcatctcggttctttgccgtggaaccagatacaggagtcgtgtggctgagacagcccctggacagagagaccaaaagcgagttcactgtggagttcagcgtgtccgatcaccagggcgtcattacgcgcaaagtaaacatccaagtgggagacgtgaatgacaatgcaccgaccttccataatcagccttacagtgtgcgcatccccgaggtgggagccaccgggaatacccctgtgggcacacctatcttcatcgtgaatgcaacggacccagacctcggtgcaggcggaagcgtcttatattcatttcagcccccatcgcaattctttgcaattgacagcgccaggggaatcgttactgtgattcgagaacttgactatgagaccacacaggcttatcagcttactgtaaatgcaacagatcaagataaaacccgaccactaagcacactcgccaatctcgccatcattattaccgatgtacaggacatggacccgatcttcatcaacttgccctattccacaaatatctatgaacatagccctcctggaacaactgtcagaatcattaccgctatcgaccaagataaggggcgcccccgagggataggatataccatcgtatccgggaatactaactcaatttttgctctggactacattagtggggtgttaaccctaaacggcttactcgaccgcgagaacccattatatagccacggcttcattctgaccgtgaagggcacagagctgaatgacgaccgcacccctagtgatgctaccgtcacaacaacctttaacatcctcgtgatagacattaacgacaatgccccagaatttaactcgagcgagtacagtgtggccattactgaactagcccaggtcggcttcgcattgccactgttcattcaggtggtggacaaggatgaaggcctcaattcaatgtttgaggtctatctggtgggcaataactctcaccactttattataagccccaccagcgtgcaggggaaagctgacatcaggatacgagttgcgatccctctcgattacgagaccgttgaccgatacgacttcgacctcttcgcaaatgagtctgtgccagaccatgtggggtatgcgaaagtcaagatcacactcatcaatgagaacgacaaccgtccgatcttttcgcagccactgtacaacatctcgctctacgagaacgttaccgtgggtacctccgtactcactgttttggcaaccgataacgacgcgggtacttttggggaagttagctacttctttagtgatgatcccgatcgtttcagcctggacaaggatacgggccttataatgctgatagcgaggttggattacgagttaatccaacgatttacattgactatcatcgcccgggatggcggcggagaagagaccacgggtcgggtgcggattaatgtgttggatgtcaatgacaacgttccaacatttcagaaagatgcatacgtcggggctcttagggaaaacgaaccatcagtgacgcagttagtgcgcttaagggcaaccgatgaggactcccccccaaataatcagatcacttactccatcgtgtccgctagtgcctttgggtcctacttcgacatctcactctacgagggctatggcgtgatctccgtcagtcggccactggattacgagcagatatctaacggtcttatttacttgaccgtaatggcgatggatgctggcaatccgccactgaactcaacagtgccagtcacgatcgaggtgttcgacgaaaacgacaacccaccaactttcagcaagcctgcatactttgttagcgtggtggagaacattatggcaggcgcgaccgttttgttcttaaatgcgacagacttagaccggtcccgtgaatatggtcaggaaagtatcatttactctctagaagggtctacgcaatttcgaattaatgcaagaagcggagagattaccacaaccagcttgctggatcgcgaaacgaagtcggagtacatcttgattgtgagggctgtggatgggggtgtcggccacaaccagaagactgggattgcaacagtaaacattaccctgcttgacatcaacgataatcatccaacttggaaggatgctccatattatattaatttggtcgaaatgaccccccctgactctgacgtcacaacggtcgttgcagtcgacccggatttgggcgagaatgggacccttgtgtatagtattcagccacctaacaagttttattctctcaactcaacaactggaaaaatcaggactactcatgctatgctggatagggaaaatcccgacccccacgaggctgagttaatgcgaaagatcgtggtttccgtgactgactgcggacggccgccactgaaagccactagctcggccacggtttttgtgaatctgttagatctgaatgacaacgaccccaccttccagaatctgccatttgtcgctgaagtactcgaggggattccagctggggtgtctatctatcaggttgtggccattgacctcgacgaagggctgaatggactggtctcctacaggatgcctgtgggcatgccaagaatggactttctgataaattcttcctccggtgtcgtggtgacaacgactgagctggatcgggagcggattgctgagtaccagctgagagtggtggcctcggacgctgggacgcccactaaaagcagcacttctacgttaaccatccacgtcctggacgtgaacgacgaaactccaacgtttttccccgcggtctacaacgtgagtgtgtcagaggacgtgcctcgagagttccgagtggtgtggctgaactgtaccgataatgatgtcggcctgaatgctgagctctcttactttatcacagggggcaacgtggacgggaaatttagtgttggatacagagacgccgttgtccgcactgttgtggggcttgacagagaaaccaccgccgcctatatgctgattctcgaggctatcgataacggtcccgtggggaaacgtcacacgggcacagccaccgtctttgtgaccgtgctcgatgtcaatgacaacagacctatcttcctccagagctcctatgaggcctccgtaccagaggacatcccggaaggccacagcattctgcaactaaaagccaccgatgccgatgagggtgagtttggtcgtgtttggtatcggattctccatgggaaccacggaaataactttcgcatacacgtgagcaatggacttttaatgcgaggacctcgcccactggatagagaacgcaatagctcccacgtcctgatcgttgaggcctacaatcacgaccttgggcctatgcgaagctccgtgcgggtgattgtgtatgtcgaagacattaatgacgaggcacccgtcttcacccagcagcagtattctcggcttggcctcagggagacagccgggatcggaacatcagttattgttgtgcaagcgaccgaccgcgacagtggagatggcggactagtcaattatcgtatcctctcaggagcagagggaaagtttgaaatcgatgaatccactggccttattataacggtgaactatcttgattacgagacaaaaactagttacatgatgaacgtgtccgcaacagatcaggctcctccctttaaccaaggcttttgctcagtttacataaccctactcaatgagctcgacgaggccgtgcagttttccaacgcttcgtacgaagccgctattctggagaaccttgctctcggcactgagatcgtgagagtgcaggcctactcaatcgacaacctgaatcagatcacctacagattcaacgcctatacaagtacccaggccaaagccctgttcaaaatagacgctatcaccggggtcatcacagtgcagggcctggtagatcgcgagaagggcgatttttatacactgacagttgttgctgatgacggcgggcccaaggtagactcaaccgttaaggtctacattactgtgcttgacgaaaacgacaattcgccgcggtttgatttcacaagcgattctgctgtgagcatacctgaggattgcccagtggggcaaagggtggctacagtcaaagcatgggatcccgatgccggcagcaacgggcaggtggttttcagcctggcgtctggcaacatcgctggcgcatttgaaatcgtgaccactaacgacagcatcggcgaagttttcgtggcccgccccttggaccgggaagaactcgatcactatatccttcaggtcgtggcgtctgatagggggacacccccacggaaaaaggaccatatcctccaggtgacaatactagacatcaacgataaccccccggtgattgaatcaccgtttgggtataatgtctccgtcaatgagaatgtcggcggaggaacagcggtcgtccaagtgcgggcgacggatcgggacatcggtatcaactccgtcttatcttattacatcacagagggtaataaagatatggccttccggatggataggattagcggtgagattgcaacacgccccgccccgccagaccgagaaaggcagtccttctaccatctggttgctacagtcgaggatgaaggaacccctactctttctgccacaacccacgtttacgtcacaattgtggacgagaacgataacgctcctatgttccagcagccacattacgaagttctacttgacgaagggcccgatacacttaatacctccctgattactatccaggcgcttgatctcgacgaaggacctaacggtaccgtgacttacgccattgtggccggaaacatagtaaacacttttaggatcgatcgccacatgggcgtgattactgctgccaaagagttagactacgaaatttcccatggccggtatactctgatcgtcacagccaccgaccagtgtcctatcctaagtcaccggctgacctctaccaccaccgttctggtgaatgtgaatgacatcaatgataatgtgcccacctttccccgagactatgaaggcccattcgaggtgaccgaaggccagccgggccccagagtgtggacatttctggctcatgaccgagattctggaccaaacggtcaagtcgaatattccatcatggacggagaccccctaggcgagttcgttattagccctgtagaaggagtgcttcgcgtacgcaaagacgttgaactggacagggaaacaattgccttttacaacctgacgatctgcgcacgggatcggggtatgcctccacttagcagcactatgctggtgggaattcgggtccttgatatcaacgataacgaccccgttctgctgaacctgccaatgaatatcacgattagtgaaaatagcccggtgagctcctttgtggcccacgttctggcctctgacgctgactctggatgtaacgcaaggctgaccttcaacatcacggccggaaacagagagcgtgctttttttatcaatgccaccacaggcattgtgaccgtcaacagacctctggatcgcgaaaggattcccgaatacaaactcactatctccgtaaaagataaccctgaaaatccgaggattgctcgaagagattacgacctgctgcttatcttcctgagcgatgaaaacgacaatcatcctctgtttaccaagtcaacatatcaggctgaagtcatggagaactccccagctggcaccccactgaccgttttgaacggcccaatcctggccctcgatgcagatcaggatatctacgcggtggtgacctaccagcttctaggtgctcagtccggcctattcgacataaattcaagtactggcgttgtaaccgtgcgatcaggcgtgattattgatcgcgaagccttctcgcctcctattcttgagctcctgctgctagctgaggatatagggctgctgaacagcacagctcatctacttattaccattctcgatgacaacgataaccggccgacctttagccctgccacacttaccgtccacctgctggagaattgcccaccagggttttcggtattacaggtcacagctacggacgaggactcgggccttaacggcgagctggtatataggatcgaagctggcgcacaggaccgttttctaattcatctggtgaccggagtcatcagggtaggtaatgccactatcgaccgtgaggagcaggagtcttaccgtcttactgtggtggcgacagatagaggaactgttccgctgtccggtactgctattgtcactattctaatcgacgacatcaacgacagcagacccgaattcctgaaccctattcagacagtgtcagtactagaatcggccgagcctggcacagttatcgcgaacatcactgccatcgaccatgatttaaaccccaaactcgagtatcacattgtgggtattgttgctaaagatgacactgaccgactcgtgcccaatcaggaagacgccttcgcagtgaacattaacaccgggagtgtgatggtgaagtcacctatgaaccgcgaacttgtcgcaacatatgaagtcacattgtcggtcattgacaacgccagcgatctcccagaaaggagcgtgagtgtgcctaacgccaaacttacggttaatgttctcgacgttaacgataatacaccacaatttaagccgtttggcatcacctattatatggaacgtatcctggaaggggctacacctggcactacactcatcgcggtggccgcagtggatcccgataaagggttgaacgggctcgtaacctacaccctcctggacttagtgcctccaggttacgtccagctggaggacagttctgcaggcaaagtaattgccaaccggaccgtagattacgaagaggtacactggctgaacttcactgtgagagcatcggacaatgggagcccaccccgcgccgcggagattccagtctatctggagatcgttgacattaacgataataaccctatattcgaccagccgtcctaccaggaggcagtgtttgaggacgttccggtggggactatcattctgactgtaaccgccacagatgcagacagtgggaattttgcgcttatcgagtatagcttaggcgatggggaaagcaagttcgctatcaaccccaccactggcgatatttacgtactgtccagcttagatcgcgaaaagaaagaccactacatacttactgcactcgccaaagataatcctggcgacgtggcatccaatagacgcgagaattcagtccaggtggtgatacaagttttagacgtgaacgactgccggccccagtttagcaaaccccaattctccaccagtgtgtacgagaacgagcccgcgggaacctccgtgattactatgatggccaccgatcaagatgaaggtcccaacggagagctaacttatagccttgaaggcccaggtgtagaggccttccacgtggacatggactctggactggtgaccacccagagaccgctgcagagctacgagaagtttagccttactgtcgtggccacggacgggggggagccccccttgtggggaaccaccatgctgttggttgaggtgattgatgtaaatgacaacaggcctgtatttgtgcgaccacctaacgggaccatcctgcatatccgtgaggaaatccccctgaggagcaatgtttacgaggtttacgctacggacaaagatgaaggacttaatggcgcagttcggtacagtttcttaaaaacagctggaaatagggattgggagttttttataatcgaccccattagcggtctgattcagaccgcccagcgacttgaccgtgaaagccaggcagtgtacagtctgatcctagtggcctcagatctgggccaacccgttccctacgagacaatgcaacctctgcaagtggcactggaggacatcgatgacaatgaacctctatttgtcagacctcctaaaggcagtccacagtatcagctgcttacggttccggagcactcgccaaggggcacccttgtcggtaacgttacaggtgccgtcgacgctgacgagggacctaacgcaattgtgtactacttcattgctgctggcaacgaggagaagaactttcacctgcagccggacggatgtctactcgtcctgagggatttggatcgagagagagaggccattttttccttcatagtcaaagccagcagtaacaggtcctggacccccccaagaggcccatctccaacactggatctagtggccgatctgactctgcaggaggttagggtggttctagaggacattaacgatcagcctccgcgctttacaaaggctgagtatactgccggagtggcaaccgacgcgaaggtggggagcgagctgatccaagtcctggcacttgatgcggatatcggtaacaattctttggtgttctatagtatactcgccattcactatttcagagctttggccaatgactctgaggacgtagggcaggtgttcactatgggaagcatggacggaatattacggactttcgatctgttcatggcttactcaccagggtattttgttgtggacattgtagcccgcgatcttgccggccataatgacactgcaatcattggcatttatatactgcgggatgaccaacgggtcaagattgttatcaatgagatcccagaccgggtgcgggggttcgaggaagaattcatccatcttctctcaaacataaccggggccatcgtcaacaccgataatgtgcaattccacgtagacaagaaaggacgggtgaactttgctcaaaccgagctgttgatccatgtggtaaacagggataccaacagaattctcgatgttgaccgggtcatccaaatgatcgacgaaaacaaagagcaactgaggaacctgtttagaaattataatgtgctcgatgttcaacccgccatatctgtgaggctacccgatgacatgagcgctctccagatggccattatcgtgcttgccatactgcttttcctggccgccatgctgtttgtcttaatgaattggtactacagaaccgtccacaagagaaaactgaaggctattgtggcagggagcgcgggcaatagagggtttattgatatcatggatatgcccaacaccaacaagtacagcttcgacggtgccaaccctgtgtggctcgaccccttctgtagaaaccttgaactcgcagctcaggctgagcacgaggatgacttgcccgaaaatttgtctgagatagcagacctctggaattcgcccaccagaacccacgggaccttcggccgagagccggctgccgtcaagcctgatgacgaccggtacctccgcgctgcaatccaagagtacgataatatagccaaactcggccagattattagagaaggtcccattaagggcagcttgctgaaggtcgttctcgaagattatttacgcctcaagaagttattcgcccaacgaatggtgcagaaggcctcctcttgtcacagctctatcagcgagcttattcaaactgaactggatgaagagccaggcgaccactcacctggacaggggtccttacgtttcagacacaaaccccccgtggaactaaagggccccgatgggatccacgtcgtgcacggctctacaggcacgctactggctacagacctgaattctttgcctgaggaggatcaaaagggactcggccggtcactcgagactctaacagccgctgaggcgacagcttttgaaaggaacgccaggacagaatcagccaaaagcacccccctgcataagctgcgggatgtgatcatggaaaccccactggaaatcactgaactgtag

SEQ ID NO: 291430 - DNA, 10074 bp, Artificial Sequence
  derived and/or modified sequence
atgggccgccacgtggccaccagctgccacgtggcctggctgctggtgctgatcagcggctgctggggccaggtgaaccggctgcccttcttcaccaaccacttctttgacacctacctgctgatcagcgaggacacccctgtgggcagctctgtgacccagctgctggcccaggacatggacaatgaccccctggtgtttggagtgtctggagaggaggccagccgcttctttgctgtggagccagacaccggggtggtgtggctgcggcagcccctggaccgggagaccaagtctgagttcaccgtggagttctctgtgtctgaccaccagggcgtcatcaccaggaaggtgaacatccaggtgggagatgtgaatgacaatgcccccaccttccacaaccagccctacagcgtgcgcatccctgaggtgggcgccactggaaacacccctgtgggcacccccatcttcatcgtgaatgccacagatcctgacctgggcgctgggggctctgtgctgtacagcttccagccccccagccagttctttgccattgattctgcccggggcatcgtgaccgtcatccgggagctggactatgagaccacccaggcctaccagctgactgtgaatgccacagaccaggacaagacccggcccctgagcaccctggccaacctggccatcatcatcacagatgtgcaggacatggaccccatcttcatcaacctgccctacagcaccaacatctatgagcacagccccccaggcaccaccgtgcgcatcatcacagccatcgaccaggacaagggccggccccggggcatcggctacaccatcgtgtctggcaacaccaacagcatctttgccctggactacatctctggagtgctgaccctgaatggcctgctggaccgggagaaccccctgtacagccacggcttcatcctgactgtgaagggcacagagctgaatgatgacaggacccccagtgatgccaccgtgaccaccaccttcaacatcctggtgattgacatcaatgacaatgcccctgagttcaacagcagcgagtacagcgtggccatcacagagctggcccaggtgggctttgccctgcccctcttcatccaggtggtggacaaggatgagggcctgaacagcatgtttgaggtgtacctggtgggcaacaacagccaccacttcatcatcagccccacctctgtgcagggcaaggctgacatccgcatccgggtggccatccccctggactatgagaccgtggacagatatgactttgacctgtttgccaatgaatctgtgcctgaccacgtgggctacgccaaggtgaagatcaccctcatcaatgaaaatgacaaccggcccatcttcagccagcccctgtacaacatcagcctgtatgaaaatgtgacagtgggcacctctgtgctgactgtgctggccacagacaatgatgctggcacctttggagaggtgtcctacttcttcagtgatgatcctgaccgcttcagcctggacaaggacaccggcctcatcatgctgattgcccggctggactatgagctgatccagcgcttcaccctgaccatcatcgccagagatggcggcggggaggagaccaccggccgggtgcgcatcaacgtgctggatgtgaatgacaacgtgcccaccttccagaaggatgcctacgtgggcgccctgagagaaaatgagcccagcgtgacccagctggtgcggctgcgggccacagatgaggacagcccccccaacaaccagatcacctacagcatcgtgtctgccagcgccttcggcagctactttgacatcagcctgtatgagggctatggagtcatctctgtgtcccggcccctggactatgagcagatcagcaatggcctcatctacctgactgtgatggccatggatgctggcaacccccccctgaacagcacagtgcctgtgaccatcgaggtgtttgatgaaaatgacaacccccccaccttcagcaagccagcctactttgtgtctgtggtggagaacatcatggccggggccaccgtgctcttcctgaatgccacagacctggacaggagccgggagtatggccaggagagcatcatctacagcctggagggcagcacccagttccgcatcaatgcccggagcggggagatcaccaccaccagcctgctggaccgggagaccaagtctgagtacatcctgattgtgcgggctgtggatggaggagtgggccacaaccagaagacaggcatcgccaccgtgaacatcaccctgctggacatcaatgacaaccaccccacctggaaggatgccccctactacatcaacctggtggagatgaccccaccagacagtgatgtgaccaccgtggtggccgtggaccctgacctgggggagaatggcaccctggtgtacagcatccagccccccaacaagttctacagcctgaacagcaccaccgggaagatccgcaccacccacgccatgctggaccgggagaacccagacccccatgaagctgagctgatgaggaagatcgtggtgtctgtgacagactgtggccggccccccctgaaggccaccagcagcgccaccgtgtttgtgaacctgctggacctgaatgacaatgaccccaccttccagaacctgccctttgtggccgaggtgctggagggcatcccagctggggtgtccatctaccaggtggtggccatcgacctggatgagggcctgaatggcctggtgtcctacaggatgcctgtgggcatgcccaggatggacttcctgatcaacagcagcagtggagtggtggtgaccaccacagagctggaccgggagagaattgctgagtaccagctgcgggtggtggccagtgatgctggcacccccaccaagagcagcaccagcaccctgaccatccacgtgctggatgtgaatgatgagacccccaccttcttccctgctgtgtacaacgtgtctgtgtctgaagatgtgccccgggagttccgggtggtgtggctgaactgcacagacaatgatgtgggcctgaatgctgagctgagctacttcatcaccggcggcaatgtggatggcaagttctctgtgggctacagagatgctgtggtgaggacagtggtgggcctggaccgggagaccacagctgcctacatgctgatcctggaggccatcgacaatggacctgtgggcaagaggcacactggaacagccaccgtgtttgtgacagtgctggatgtgaatgacaaccggcccatcttcctgcagagcagctatgaggcctctgtgcctgaggacatccctgagggccacagcatcctgcagctgaaggccacagatgctgatgaaggagaatttggccgggtgtggtaccgcatcctgcacggcaaccacggcaacaacttccgcatccacgtgtccaatggcctgctgatgaggggcccccggcccctggaccgggagaggaacagcagccacgtgctgattgtggaggcctacaaccacgacctgggccccatgaggagctctgtgcgggtcatcgtgtatgtggaggacatcaatgatgaggcccctgtgttcacccagcagcagtacagccggctgggcctgcgggagacagctggcatcggcaccagcgtcatcgtggtgcaggccacagaccgggacagcggagatggcggcctggtgaactaccgcatcctgtctggagctgagggcaagtttgaaattgatgagagcacaggcctcatcatcaccgtgaactacctggactatgagaccaagaccagctacatgatgaatgtgtctgccacagaccaggccccacccttcaaccagggcttctgcagcgtgtacatcaccctgctgaatgagctggatgaagctgtgcagttcagcaatgccagctatgaagctgccatcctggagaacctggccctgggcacagaaattgtgcgggtgcaggcctacagcattgacaacctgaaccagatcacctaccgcttcaatgcctacaccagcacccaggccaaggccctcttcaagattgatgccatcactggagtcatcaccgtgcagggcctggtggaccgggagaagggggacttctacaccctgactgtggtggctgatgatggcggccccaaggtggacagcacagtgaaggtgtacatcaccgtgctggatgaaaatgacaacagccccaggtttgacttcaccagtgacagcgctgtgtccatccctgaggactgccctgtgggccagagggtggccaccgtgaaggcctgggaccctgatgctggcagcaatggccaggtggtgttcagcctggccagcggcaacattgctggggcctttgagatcgtgaccaccaatgacagcattggagaggtgtttgtggcccggcccctggaccgggaggagctggaccactacatcctgcaggtggtggccagtgaccggggcaccccacccaggaagaaggaccacatcctgcaggtgaccatcctggacatcaatgacaacccccctgtgattgagagccccttcggctacaacgtgtctgtgaatgaaaatgtgggcggcggcacagctgtggtgcaggtgcgggccacagaccgggacatcggcatcaacagcgtgctgagctactacatcacagagggcaacaaggacatggccttcaggatggaccgcatctctggagagatcgccaccaggcctgcccccccagaccgggagcggcagagcttctaccacctggtggccaccgtggaggatgagggcacccccaccctgagcgccaccacccacgtgtatgtgaccatcgtggatgaaaatgacaatgcccccatgttccagcagccccactatgaggtgctgctggatgagggccctgacaccctgaacaccagcctcatcaccatccaggccctggacctggatgagggccccaacggcaccgtgacctacgccatcgtggccggcaacatcgtgaacaccttcagaattgacagacacatgggcgtcatcacagctgccaaggagctggactatgagatcagccacggccgctacaccctgattgtgacagccacagaccagtgccccatcctgagccaccggctgaccagcaccaccaccgtgctggtgaatgtgaatgacatcaatgacaacgtgcccaccttcccccgggactatgagggcccctttgaggtgacagagggccagcccggcccccgggtgtggaccttcctggcccatgaccgggacagcggccccaacggccaggtggagtacagcatcatggatggagaccccctgggggagtttgtgatcagccctgtggagggcgtgctgcgggtgaggaaggatgtggagctggaccgggagaccatcgccttctacaacctgaccatctgtgcccgggaccggggcatgccacccctgagcagcaccatgctggtgggcatccgggtgctggacatcaatgacaatgaccctgtgctgctgaacctgcccatgaacatcaccatcagcgagaacagccctgtgtcctcctttgtggcccacgtgctggccagtgatgctgacagcggctgcaatgcccggctgaccttcaacatcacagctggcaaccgggagcgggccttcttcatcaatgccaccaccggcatcgtgacagtgaaccggcccctggaccgggagcgcatccctgagtacaagctgaccatctctgtgaaggacaaccctgagaacccccgcatcgcccggcgggactatgacctgctgctgatcttcctgagtgatgaaaatgacaaccaccccctcttcaccaagagcacctaccaggccgaggtgatggagaacagccctgctggcacccccctgactgtgctgaatggccccatcctggccctggatgctgaccaggacatctatgctgtggtgacctaccagctgctgggcgcccagagcggcctgtttgacatcaacagcagcactggagtggtgacagtgcgcagcggggtcatcatcgaccgggaggccttcagcccccccatcctggagctgctgctgctggctgaagatattggcctgctgaacagcacagcccacctgctgatcaccatcctggatgacaatgacaaccggcccaccttcagccctgccaccctgactgtgcacctgctggagaactgccccccaggcttctctgtgctgcaggtgacagccacagatgaagattctggcctgaatggagagctggtgtacagaattgaagctggggcccaggaccgcttcctgatccacctggtgactggagtcatccgggtgggcaatgccaccatcgaccgggaggagcaggagagctaccgcctgactgtggtggccacagaccggggcaccgtgcccctgagcggcacagccatcgtgaccatcctgattgatgacatcaatgacagcaggcctgagttcctgaaccccatccagacagtgtctgtgctggagagcgctgagcccggcaccgtcatcgccaacatcacagccatcgaccatgacctgaaccccaagctggagtaccacatcgtgggcatcgtggccaaggatgacacagaccggctggtgcccaaccaggaggatgcctttgctgtgaacatcaacacaggctctgtgatggtgaagagccccatgaaccgggagctggtggccacctatgaggtgaccctgagcgtcatcgacaatgccagtgacctgcctgagaggtctgtgtctgtgcccaatgccaagctgactgtgaatgtgctggatgtgaatgacaacaccccccagttcaagcccttcggcatcacctactacatggagcgcatcctggagggcgccaccccaggcaccaccctgattgctgtggccgctgtggaccctgacaagggcctgaatggcctggtgacctacaccctgctggacctggtgcccccaggctacgtgcagctggaggacagcagcgctgggaaggtgattgccaacagaacagtggactatgaggaggtgcactggctgaacttcaccgtgcgggccagtgacaatggcagcccccccagggctgctgagatccctgtgtacctggagatcgtggacatcaatgacaacaaccccatctttgaccagcccagctaccaggaggccgtgtttgaagatgtgcctgtgggcaccatcatcctgactgtgacagccacagatgctgacagcggcaactttgccctgattgagtacagcctgggagatggagagagcaagtttgccatcaaccccaccactggagacatctacgtgctgagcagcctggaccgggagaagaaggaccactacatcctgacagccctggccaaggacaaccctggagatgtggccagcaacagaagagaaaattctgtgcaggtggtgatccaggtgctggatgtgaatgactgccggccccagttcagcaagccccagttcagcacctctgtgtatgaaaatgaacctgctggcaccagcgtcatcaccatgatggccacagaccaggatgagggccccaacggggagctgacctacagcctggagggccctggggtggaggccttccacgtggacatggattctggcctggtgaccacccagaggcccctgcagagctatgagaagttcagcctgactgtggtggccacagatggaggagagccccccctgtggggcaccaccatgctgctggtggaggtgattgatgtgaatgacaacagacctgtgtttgtgcggcccccaaatggcaccatcctgcacatccgggaggagatccccctgcggagcaatgtgtatgaggtgtatgccacagacaaggatgagggcctgaatggagctgtgcgctacagcttcctgaagacagctggcaacagagactgggagttcttcatcatcgaccccatcagcggcctcatccagacagcccagaggctggaccgggagagccaggccgtgtacagcctcatcctggtggccagtgacctgggccagcctgtgccctatgagaccatgcagcccctgcaggtggccctggaggacattgatgacaatgagcccctgtttgtgcggccccccaagggcagcccccagtaccagctgctgactgtgcctgagcacagcccccggggcaccctggtgggcaatgtgactggagctgtggatgctgatgagggccccaatgccatcgtgtactacttcatcgctgctggaaatgaggagaagaacttccacctgcagccagatggctgcctgctggtgctgcgggacctggaccgggagcgggaggccatcttctccttcatcgtgaaggccagcagcaacagatcctggaccccaccccggggccccagccccaccctggacctggtggccgacctgaccctgcaggaggtgcgggtggtgctggaggacatcaatgaccagcccccacgcttcaccaaggccgagtacacagctggggtggccacagatgccaaggtgggcagcgagctgatccaggtgctggccctggatgctgacatcggcaacaacagcctggtgttctacagcatcctggccatccactacttccgggccctggccaatgattctgaagatgtgggccaggtgttcaccatgggctccatggatggcatcctgcggacctttgacctcttcatggcctacagccctggctactttgtggtggacatcgtggcccgggacctggccggccacaatgacacagccatcatcggcatctacatcctgagagatgaccagagggtgaagatcgtcatcaatgagatcccagacagagtgcggggctttgaggaggagttcatccacctgctgagcaacatcaccggggccatcgtgaacacagacaacgtgcagttccacgtggacaagaagggccgggtgaactttgcccagacagagctgctgattcatgtggtgaacagagacaccaaccgcatcctggatgtggacagagtcatccagatgattgatgagaacaaggagcagctgaggaacctcttcaggaactacaacgtgctggatgtgcagcctgccatctctgtgcggctgcctgatgacatgtctgccctgcagatggccatcatcgtgctggccatcctgctcttcctggccgccatgctgtttgtgctgatgaactggtactacagaacagtgcacaagaggaagctgaaggccatcgtggccggcagcgctggcaacagaggcttcatcgacatcatggacatgcccaacaccaacaagtacagctttgatggagccaaccctgtgtggctggaccccttctgcaggaacctggagctggccgcccaggccgagcatgaagatgacctgcctgagaacctgtctgaaattgctgacctgtggaacagccccaccaggacccacggcaccttcggccgggagcctgctgctgtgaagccagatgatgaccgctacctgcgggccgccatccaggagtatgacaacatcgccaagctgggccagatcatccgggagggccccatcaagggcagcctgctgaaggtggtgctggaggactacctgcggctgaagaagctgtttgcccagaggatggtgcagaaggccagcagctgccacagcagcatcagcgagctgatccagacagagctggatgaggagcccggggaccacagccctggccagggcagcctgcgcttccgccacaagccccctgtggagctgaagggcccagatggcatccacgtggtgcacggcagcacaggcaccctgctggccacagacctgaacagcctgcctgaggaggaccagaagggcctgggccgcagcctggagaccctgacagctgctgaggccacagcctttgaaagaaatgccaggacagagagcgccaagagcacccccctgcacaagctgagagatgtgatcatggagacccccctggagatcacagagctgtag

SEQ ID NO: 291431 - DNA, 10074 bp, Artificial Sequence
  derived and/or modified sequence
atgggccggcacgtggccaccagctgccacgtggcctggctgctggtgcttatctcagggtgctggggccaagtaaacagacttccctttttcaccaatcacttctttgatacctatctcctcattagtgaggacacaccagtggggtcaagtgtgacccagctgctggctcaggatatggacaatgatcccttggtttttggcgtcagcggcgaagaggcctccaggtttttcgcggtggagcctgacacaggggtcgtatggctacggcagccccttgatagagagacaaagtccgagttcaccgttgagtttagcgtgagcgaccatcagggggtgattacacgcaaagtcaacatccaagtgggtgacgtcaatgataacgccccaacttttcataaccaaccttattcagtccgtatccccgaggtgggtgctactggcaatactcctgtgggcacccccatctttattgttaatgccacagaccccgacctgggggcaggagggagcgtgttgtactccttccagccaccctcccagttctttgccattgactcggcacggggaatagtgactgtgattagagaattagattatgagactacccaagcctaccagctcacggttaacgcaactgatcaggacaagacacgcccactgtctactctggcaaacctcgccataatcatcaccgacgttcaggacatggatccgatcttcattaatctcccatactccacgaacatctacgagcactctccacctggcacgacagtcagaattataaccgccatcgatcaggacaagggtaggcctcgggggataggatataccatcgtctccggcaacactaactccatctttgccttggactacatttccggagttctgactcttaatggtctactggacagggaaaacccactttactcacatggattcattctgacagtgaagggtacagaactgaacgatgatagaactccctctgacgctactgtgactacaacctttaatattcttgtcattgacattaatgataacgcacctgagtttaactcttccgagtatagcgtggctatcaccgaattggcacaagtgggctttgccctacccttatttatccaggttgttgacaaagacgagggattgaattcaatgtttgaagtttacctggtggggaataatagtcaccacttcatcattagcccaaccagtgtgcagggaaaggcagacattcgtattcgggtggcaatcccactcgactatgaaactgtggaccgatacgatttcgatttatttgccaacgagtctgtgccagaccacgtgggatacgccaaagtcaagattactctgattaacgaaaatgataataggcctatattctctcagcctctctacaatatcagcctttacgaaaatgtaactgtggggacatcggtgcttacagtcctggcgactgacaatgatgccggtacctttggcgaagtaagttatttcttctcagacgatcctgaccgcttctccctggacaaagacaccggtcttatcatgcttatcgcacgccttgactacgagctcatacagaggttcactctaacaattatcgcaagagatggtgggggcgaagagactacagggcgcgtgaggataaacgttctggatgtgaacgataatgtcccaaccttccagaaagacgcctatgttggagctctccgagagaatgagccatccgtcacgcagttggtgaggctgcgggcgaccgatgaggactcaccccctaacaatcagataacctatagtattgtgtcagccagtgcgttcgggagctattttgatattagcctatatgaagggtatggggtgatctcagttagcaggccgttagattacgagcagatctccaatggcctgatttatcttacagtgatggcgatggatgccggcaaccctcctcttaatagcacggtgcctgtgaccatcgaggtgtttgacgagaatgataaccctccaaccttctctaaacccgcatacttcgtgtcagtggtggagaacattatggccggcgccactgtcctgttcctgaatgccacagatctcgaccgttccagagaatatgggcaggagtccattatctactccctcgagggttcaacacagtttcgaattaatgccaggagtggtgaaatcacaactacatcccttttggatcgagagacaaagagcgagtacattctgattgtgcgggctgttgatggcggcgtcggccacaaccagaaaacaggaattgccactgtcaacattacactgctggatatcaatgacaatcaccctacatggaaagacgcaccatactacataaatctggtcgagatgaccccacccgattccgatgtgaccaccgtggtggccgttgaccccgacttgggagagaacggcacgttagtctactcgatacagccacccaataaattctattcactgaacagcaccacgggtaaaatcaggacgactcatgccatgttggatcgcgaaaatcccgatccccatgaggcggagctgatgagaaagattgtggtgagcgtgactgactgcggccgcccgccactgaaggcgacatcttctgcaactgtcttcgttaaccttctcgacttaaacgataacgatcccacctttcagaatctgcccttcgtcgccgaagtccttgaaggtattcccgccggagtgagtatttaccaagtagtggccattgacctagatgaagggcttaatgggctagttagttatagaatgcccgtgggtatgccccgaatggattttttaatcaactcttctagtggagtggtcgtaacgactacagaattggatagagaaagaatcgcagaataccagctgcgggtcgtggcctcggacgccggaacccctaccaagagttctacctctacacttacaatccacgttctggatgttaacgacgaaacccccactttttttccagcagtctacaatgtttccgtatccgaggatgtgccaagggagttccgagtggtgtggctgaattgtacagataacgacgtggggttgaatgcggaactttcctacttcatcaccggtgggaatgtggatggcaagttttccgtgggctatagagatgccgtggttcgcaccgttgtcggcttagatagagagacgactgctgcctacatgctgatcttagaagcaatcgataatggtccagttggaaaaaggcacacaggaaccgctacagtgtttgttactgtgctagacgttaatgacaatcgtcccatttttctgcaatcttcgtatgaggcctctgtccccgaggacatcccagaaggccactcaattctgcagctaaaagccactgacgcagatgaaggcgaatttggaagagtgtggtatagaattcttcacggaaaccacggaaataacttccgaattcatgttagcaatggcctgctgatgcgcggcccgaggcccctcgatcgcgaaaggaactccagtcacgttttgatcgtggaagcctacaatcacgacctggggcccatgcggagtagcgttagggtcattgtctacgtcgaggacatcaacgacgaagcccctgtgttcacgcaacaacagtattcaaggctgggtctgagagaaaccgccgggattggcaccagtgtgatagtcgtccaggcaactgacagggattctggggacgggggcctggtcaactacaggatcctttccggcgccgagggtaaatttgagattgacgagtcgacgggcctcatcattactgtgaactatctagattacgaaaccaaaacctcatacatgatgaacgtgtcagcaactgatcaggcccctccctttaatcaaggtttctgttctgtgtacattaccctgctgaacgagctggacgaagcagtacaattctccaatgcatcctacgaggccgctatcctggagaatttggctctcggcactgagatcgtgcgtgtgcaggcttattccattgacaatttgaatcagatcacttatcgatttaatgcttacacatccacacaagccaaggccctgttcaagattgacgccattactggtgtgatcaccgtccaaggactggttgaccgcgagaaaggcgatttctatacactgaccgtggtcgcggacgatggcggtccaaaagtagactcgactgtaaaggtatatattacagtgctggacgaaaatgataattctccaaggtttgatttcacaagcgactcagcagtgtcaattcccgaagactgtcccgttggccagagagtggcaactgtgaaagcttgggatccagacgccggttctaatggacaggttgtgttcagtcttgccagcggaaatatcgctggggcgttcgaaatcgtgactaccaacgacagtatcggagaggtgttcgtagcgcgccctctagatcgcgaggagcttgaccattatatcttgcaagttgttgccagtgacagggggaccccccccaggaagaaagaccacatcctgcaggtgactatcctcgatatcaatgataatccgccggtgatagagtcaccgtttggatataacgtatcggtaaacgagaacgtaggcggtgggaccgccgtggtgcaggtgcgagcaacagatcgagacataggaattaacagtgttttgagttactacattaccgaaggaaacaaagatatggcatttcggatggaccgcatttctggggagattgctaccaggcccgccccccctgaccgggagcgccaaagcttttaccacttggtggccacagtggaagatgagggtacacccactttatcagcaaccacacacgtctatgtgacgattgttgacgaaaatgataacgcccctatgttccagcaaccacactacgaggtcctgctggatgaggggcctgatactctaaacactagcctaatcacaattcaggcactcgacctagatgaaggtcccaatggtacagttacatacgcaatcgtggccggtaacattgtcaacacctttagaattgatagacacatgggcgtgattacggccgccaaggagttggactacgagataagccacgggcgatacactctgattgtgaccgcaactgaccagtgtcctattctctcacaccgcttgaccagtaccactaccgtactagtcaatgtaaatgatattaatgataatgtacctaccttcccccgtgattacgaaggaccgttcgaggtgaccgaaggacagccgggtcccagggtgtggacttttctggctcatgacagagacagcggcccgaatggacaagtggaatactctatcatggacggcgacccgctcggagagttcgtgatatcaccagtagagggagtactgagggtgagaaaggacgtggaactggatcgggaaacgattgcattttacaatctgacaatttgtgcacgagatcgcggaatgccaccactgagtagcacaatgctcgtgggcatcagagtcttggacatcaatgacaatgacccagtgctgctcaacctccctatgaatatcactattagcgaaaatagccccgtctcttcgtttgtagcccacgtgctcgccagcgacgccgattcgggctgcaatgcccgcctcaccttcaacatcacggcaggcaatagagagagggcttttttcattaatgcaaccactgggatagtgacggtaaatcgacctctggacagagagagaattcctgagtacaagctgaccatttcggtcaaggataacccagaaaacccacggatagcccgccgggattacgacctcctcctgatctttttgtctgacgaaaacgataaccaccccctgtttaccaagtcaacttaccaggccgaggtgatggagaatagccctgcggggacacccttgacagtgctgaacgggccaattctggcattagatgccgaccaggacatttacgccgtcgttacctatcagctgctgggagcccagtcaggactgtttgacattaatagcagcacaggcgtggtgacggtccgctccggcgtcatcatagaccgcgaggctttctcacctcccatccttgaactgctgctcctggctgaggatatcggactccttaatagtaccgcccaccttctcataaccatcttggatgacaacgacaatagacctaccttcagcccagcaactctgacagtgcacctgttggagaactgcccccctggtttctctgtactccaagtcaccgctaccgacgaggattctggcttgaacggcgagctggtctaccggattgaggccggcgcacaagatcgcttcctgatccacttggtgacaggcgtgattagggttgggaacgccacaatcgaccgtgaggaacaggaatcataccgcttgactgtggtggcaaccgatcgcggaacagtgcctctgtcaggcacagcaatcgtgaccatcctgattgatgacataaatgacagcaggccagagtttctgaacccgattcagaccgttagcgttctggagtcagctgaacccgggaccgttatcgcgaatatcactgcaatcgaccacgacctcaacccgaagctagaatatcacatcgtgggtatcgtcgccaaggacgataccgacaggctggttcctaaccaggaggacgcattcgctgtgaacatcaataccggatccgtgatggtcaaatcccccatgaatagagagcttgtggctacttacgaagtgactttgtctgtgatcgataacgcgagcgatcttcctgagcggagtgttagcgtacccaatgccaagctcacggtgaacgtgctggacgtaaacgataataccccacagtttaaaccatttggaattacatattatatggagaggattctggagggagccacccccggtaccaccctgatcgctgtcgccgccgtggaccccgacaagggtcttaacggtcttgtgacctacaccttactcgatctcgtcccaccggggtacgtgcagctggaggatagttctgctggaaaagtgattgcaaaccgaaccgtagattacgaagaagtgcattggttaaacttcacggtacgcgcatctgacaatggaagcccacctagggcagctgagatacccgtatatctcgaaattgtcgacattaacgataacaatcccatattcgaccagccatcttaccaggaagccgttttcgaagacgttcctgtgggcacgattatccttacagtgactgctaccgatgcagatagtggaaatttcgcactgatcgaatatagcctgggggacggggagtccaagtttgccatcaatcccacaactggagatatatatgtgctgtcaagcttggaccgggagaaaaaggatcactacatcttgacggccctcgccaaggataatccaggcgatgtggcgtctaaccgacgtgaaaactcagtacaggtagtcatacaggtacttgacgtcaatgattgtcggccccaattcagtaaacctcagtttagcacctcagtctacgaaaatgaacccgcggggacatcagtaatcacgatgatggctacagaccaggacgaaggtcctaacggtgagttaacatatagcctggagggccctggagtcgaggccttccatgtggatatggactccggattggttactacccagcgccccctgcaatcatacgagaaattcagcctcaccgttgtggccaccgacgggggtgaaccacccctttgggggactaccatgttgctcgtggaagtcatagacgtaaacgacaatcggccagtctttgttcggccacccaatggtaccatcttacacatccgggaggaaatcccactgcggtctaatgtctacgaagtttacgccactgacaaggacgaaggcctgaacggggctgtgagatacagcttcctgaagaccgccggcaaccgagactgggaattctttatcatcgatccaatctcgggacttatacagaccgcccaacgtctggaccgggagtctcaggcagtgtacagtctcatcctggttgcgtcggacctgggccagcctgtcccctacgaaactatgcagcctcttcaagtggctctggaggatatcgacgataatgaaccacttttcgtcaggccacctaagggaagtcctcagtatcagctgctgactgtgccagaacacagtcctcgagggacgctggtggggaacgtgacaggagccgtcgatgcggacgagggccctaacgccattgtctactattttatcgccgctggaaatgaagagaagaatttccacctgcagcccgacgggtgcctccttgtcctgagagacctcgaccgagagcgcgaagctatcttctcttttatcgtcaaagcgtcctccaacagaagttggacccccccccggggcccctccccaaccctggatctggtggcagatcttactctccaggaggtgcgcgtcgtcctcgaggatatcaacgatcagcctccccggtttaccaaggccgaatatactgcaggtgttgccacagatgccaaggttggttccgaattaatccaggtcctggctctcgacgctgacattgggaataactcactggtgttctactccatcttggctattcactacttccgagcccttgcgaacgattccgaagatgtgggccaggtgttcacaatgggcagcatggacggcatcctgaggacattcgacctgttcatggcatactcgcctggatatttcgttgtggacattgtggctcgggatctggctggccacaatgatactgcaattataggcatttatattctgagagacgatcagagagtcaaaattgtgatcaacgaaattcctgatagagtccgtgggttcgaggaagagtttattcacctgctgtctaacataaccggggcgatcgttaacactgacaatgtccagtttcacgtggacaagaagggtagggttaatttcgcgcagaccgaattgttgattcacgtcgtaaatagggatactaataggattctggatgtggatcgggtgatccaaatgatagacgaaaataaagagcagctcagaaatttgtttagaaactacaacgtgctagacgttcagccagcaatcagtgtgaggttgccggatgatatgtcagcgctgcagatggccatcattgttctggcaatactgctgttcctcgctgctatgctgttcgtactgatgaactggtactatcggaccgtgcataaacgcaaactcaaagccatagtcgcaggctcggcaggtaatcgtggatttatcgacatcatggacatgccgaacaccaataagtactcgtttgatggggctaaccccgtttggttagatcccttctgtcggaacctggagctggctgcccaggcagagcacgaggacgatctgccggaaaatctatctgaaattgcagatctctggaatagtcccacgagaacccacggtaccttcggaagggaacccgcagccgtcaagcctgacgacgacaggtacttacgtgctgctatccaggagtatgataacatcgccaaactcggacagatcatccgcgagggcccgatcaagggttccctcttgaaagtggtcctggaggactacctgcgactgaaaaaactgtttgctcagaggatggttcagaaggcctcgtcctgccatagctccataagtgaattgatccagaccgaactggacgaggaacccggcgaccacagtccaggacaggggagcttgagatttcgtcataaacccccggttgaattgaagggccccgacggaatccatgtggtgcacggttcaaccggaaccctgcttgccaccgatctcaatagcctacccgaagaggatcagaaagggctgggtaggtccctggagactcttaccgcagctgaggcgacggctttcgagcggaatgctcggacggagagcgcaaaaagtacacctcttcataagcttagagatgtgatcatggagactccactggagattacagaactgtag

SEQ ID NO: 291432 - DNA, 10074 bp, Artificial Sequence
  derived and/or modified sequence
atgggcagacatgtggcgacttcctgccatgtagcttggttgctggtgcttatttctgggtgctggggccaagtaaataggctcccatttttcacaaaccattttttcgacacctacctcttgatctcggaggatacgccagttgggtcatcagtcactcagctgttggctcaggatatggacaacgacccgctggtgttcggcgtctctggggaagaagcctctcggttctttgctgtggagccagataccggggtcgtctggctgagacagcccctcgatcgggaaacgaagagtgaattcaccgtcgaattttctgtatcagaccaccaaggtgtgataaccaggaaagtgaatatacaagttggggacgtcaatgataacgcaccaactttccataatcagccatactcagtgcggatccccgaagtaggagcgactggaaataccccggtaggtacaccgatttttatcgtaaatgctaccgacccagatcttggagcagggggatcagtgctttactccttccagccccctagccaattttttgccatcgacagcgccaggggtatcgtgacagtaatcagagaactggattatgagacaactcaggcatatcagctgaccgtcaatgccactgatcaggataagactcgaccactgtccaccctcgcaaacctcgccatcattatcactgatgtgcaagacatggaccctatcttcatcaacctgccctattccaccaacatctacgaacacagtccccctggtactacggtacgcatcattaccgcaattgaccaagacaaggggcgacctagagggatagggtacaccatcgtgtccggcaatactaattctatattcgctttagattacattagtggggtactgaccctaaacgggctgctggatagggagaacccactttacagtcatggatttatcctgactgtgaagggcaccgagctgaatgatgatcgtacacctagcgacgccactgtcaccacaacgttcaatatactcgtgattgacattaacgataatgcacccgaatttaactctagcgagtattccgtcgcgatcacagagctggcgcaagtgggatttgcactgccactgttcatccaagtggtggataaggacgaaggcttgaatagtatgttcgaagtatatctcgtggggaacaacagccatcatttcatcatatcacctacgtctgtgcaagggaaagcggacatccggatccgcgtcgcaataccccttgactatgaaacagtcgaccgatacgacttcgacctctttgcgaacgaatctgtgccagatcatgtaggatacgcaaaggtgaagatcactctcatcaatgaaaacgataataggcccatcttctcccaacccttatacaatatatctctctacgaaaatgtgactgtgggaacatctgtgctgaccgtgctcgcaacagataacgatgccggtactttcggcgaagtgtcgtactttttcagtgacgaccctgatagattcagtttggataaagataccggcctcataatgctcattgcacgtctggactatgaactgatacagcggtttaccttaactataatcgcacgcgacggtggaggggaagagacaactgggagggttcggataaacgttctggatgtgaatgacaatgtgcctacgtttcagaaagacgcctacgtgggggctttaagggagaatgagcctagcgtaacacagctggtccggctgcgggcaacggatgaggactcacctccaaacaatcagattacgtacagcatcgtttctgcttccgcatttgggtcctactttgatatatccttgtacgaaggatacggagtaatctccgtctctcgtcccctcgactatgagcaaattagcaacggcttgatctacctcacagtcatggccatggatgctggaaacccaccactcaactcgacagtccccgtcacgattgaggtcttcgatgagaacgataacccccctaccttcagcaaaccagcctactttgtcagtgtagtagagaatattatggccggagctaccgtccttttcctcaacgccacagacctagaccgctctcgagagtacggtcaggaatccattatttatagcctggaaggttccactcagttccgaatcaacgccagaagcggtgagattactacaacctcactgctggaccgcgaaacaaagtccgaatacattctgatcgtaagagctgtggatggtggggtcggccataatcagaaaacaggaattgcaaccgtgaacatcacactgttggacatcaatgataatcatccaacctggaaggacgctccctattatattaacctggtagagatgacacctcccgatagcgacgtgacaaccgtcgttgcggttgaccccgacctcggcgagaacggaacactcgtgtacagtattcagcctccaaacaagttctatagcctgaactccaccaccggcaagatcagaacaactcatgctatgctcgatcgcgagaatccagacccacatgaggcggagctcatgcgaaaaatcgtggtgtccgtgaccgattgtgggaggcctccgctgaaagccactagctctgctactgtatttgttaatctgttagacctcaatgacaacgatcccacatttcagaacctgccgtttgtggctgaggtactggagggaatcccggctggagtgagcatctatcaggtggtggctattgacctcgatgagggcctgaacgggctggtttcttacagaatgcctgtcggcatgcccagaatggatttcctgatcaatagctcatcaggcgttgtggttacaaccaccgagctggaccgagagaggatcgcagaataccagctgcgcgtggtcgcaagcgatgcagggacacctacaaagtcaagcacctccacgctcacaatccatgtgctggatgtcaatgatgagacacctacgttcttccctgccgtttacaatgtgtcggtctctgaagatgtcccccgagagtttcgcgttgtctggcttaattgtactgataacgacgtgggacttaacgccgagctgtcgtattttatcacaggtggcaatgtggatggcaagtttagtgtcggatatagagatgccgtggtgaggacagtagttgggctggatcgggagactactgctgcatatatgctcatcctggaggcaattgacaacggcccagtcggtaaacgacacaccggaactgccaccgtgttcgtcaccgtgctggacgtcaacgataaccggccaattttcctccagagcagttacgaggctagtgttcccgaagatattcccgagggtcacagcatcctacaactaaaggctacagatgctgacgagggcgaatttggtcgcgtgtggtatcgtatcttgcacggaaaccatggcaataatttccgtattcacgtcagcaatggactcctcatgcggggaccacgacccctagaccgggagcggaactctagtcacgtgctgatcgtggaggcctataatcacgacctgggtccgatgaggtcatccgtgagggtcatcgtctacgtagaagatataaacgacgaagctccagttttcacccagcagcagtactcgcggcttggcctcagggaaacagcgggaatcggaacgtccgttatagttgtgcaggcgacagatagagactctggagacggaggcctggtaaactacaggatcctgtctggcgctgagggcaagttcgaaatcgacgaatccacaggcctgattattacagttaattatctggactatgaaactaaaacttcctatatgatgaatgtgtcggctacagaccaggctccgcctttcaatcaggggttctgcagcgtctatatcactctgctgaacgaactcgacgaagcggttcagttctcgaatgccagttacgaggctgcaattcttgagaatctggctctaggcaccgagattgttcgcgtccaggcctattccatcgataacctgaatcaaataacgtataggtttaacgcctacacaagcactcaggccaaagccctcttcaagatcgacgcgattaccggagtcattaccgtccagggtctggtggatagggagaaaggcgacttctacacactgactgtggtcgctgacgatggaggcccaaaggtcgacagtacagtaaaggtgtatattaccgttctcgatgagaatgacaattctcctagattcgacttcacttctgacagtgccgttagtatccctgaggactgtcccgtgggccagcgagtggcgacagtcaaggcctgggaccccgatgctggttcgaacggtcaggttgtgttctcattggcctccgggaacattgccggagccttcgaaattgtgacgaccaacgattctatcggagaggtcttcgtagccagacccctggaccgggaggagctcgaccattatattcttcaggtggtggcctctgatagagggacgccgccacggaaaaaagaccacatcctgcaagttacaattctggatattaatgacaacccacctgtcatcgagtccccattcggctataatgtgtctgtaaacgagaatgtgggtggaggtacagccgttgtgcaggtcagggcaactgaccgggacattgggatcaacagtgtgctgagctactacatcaccgagggcaacaaggatatggcctttaggatggatagaatctctggagagatcgcaactcgcccagccccacccgaccgtgaacgccagagtttttatcacctggttgccaccgtcgaggacgagggcacgcccacccttagcgccacgacacatgtttatgtcactattgtggacgagaacgataatgctccaatgttccagcagcctcactatgaagtcctgctcgacgaaggcccagacaccctgaataccagcctgatcacgattcaggctctagatctcgacgaaggacctaacggaactgtgacctatgccattgttgccggtaacatcgttaacacatttcgtatcgaccgacatatgggagtgatcactgcagcaaaagagctcgattacgagatttcccacggccgatataccttgattgttacagccacagaccagtgcccgattctcagccaccgcctgaccagtaccactacggtcctcgtgaacgtgaacgatatcaatgacaatgtccctacttttcccagggattatgaaggcccatttgaggtgacagagggacaacctgggcctcgtgtgtggacctttttagcgcatgatcgtgactcaggacccaatggtcaggtagagtattccattatggacggtgatccactcggcgaattcgttatctcacctgtggaaggcgtattaagagtaaggaaggacgtcgaactggaccgggaaacaatagccttctacaacctcaccatctgcgcacgggatagggggatgcctcctttgtcatcaaccatgctagtcggaatccgcgtcctagatatcaatgacaacgatccagttctcctcaacctgcccatgaacattaccatatccgagaattcgcccgtcagttcctttgtcgctcacgtgcttgcaagcgatgccgactccggatgtaatgccagacttacctttaatattacagctgggaaccgtgagcgagcattttttataaatgccacgactggcatcgtgactgtgaatcgcccattggaccgggaacggatccctgagtacaagctaaccatctcagtcaaagataatcccgaaaaccccaggatcgctcggcgagactacgacctgcttctgatttttttgtccgatgagaatgataatcatccactgttcacgaagagtacttatcaagcagaagtgatggagaacagccccgctgggaccccactgaccgtgcttaacggtcctatcctggctctcgacgccgatcaggacatctatgcggtggtgacataccaattgctgggagctcagagtggtctgttcgacatcaacagctcaacaggagtggtgactgtgcggtcgggcgtgataatcgatagagaggctttttcaccacctattcttgaacttctcctgcttgctgaagacatcggcctcctcaactccaccgcccatctgctcatcaccatccttgacgataacgataaccgacccacgttctcccccgctacactcacagtacatctcctggagaattgcccaccagggttctcggttttgcaagtaacagcaacggatgaagatagtggactcaacggtgaattagtgtaccggattgaagcgggagcgcaggatcggttcttaattcatctggtgaccggagtcatccgcgtgggcaatgccacgattgatcgggaagagcaggaatcctatagacttaccgtggtagccacggaccgcggtactgtccctctgagtggaaccgctatcgtcaccattctgattgacgatatcaatgacagccgacccgagttcttgaaccccatccagactgtgtccgtgcttgaatctgcagagccgggaacggtaatcgcaaatatcacagctatcgaccacgacctgaacccgaagctggaataccatatcgtcggtattgttgccaaagacgatactgatcggctcgtccctaatcaggaggatgctttcgccgtaaacattaatacaggctctgtgatggtaaaatctcctatgaatcgggaattggttgcaacatacgaggtaacactgtccgtgatcgacaacgctagcgatctgccagagcggtcggtttcagttcccaacgcaaaactcactgtgaatgtcctagatgtaaacgataacacaccccagttcaagccgtttggaatcacgtattacatggagagaattttggaaggggcaacacctggaactacgttgatagccgtggctgccgttgacccagataagggactcaatggtcttgtcacatacactctgttggacttggttccacccggatacgtccagctcgaagattcctctgccggtaaggtgattgccaaccgcacggtcgattacgaagaggtacattggctcaacttcactgtgcgagcctccgataatggttcccctccaagagccgctgaaatcccagtgtacttggagatcgtcgacatcaacgacaacaacccgatattcgatcagccatcctaccaggaagccgtgttcgaggacgtgcctgtggggaccattatacttaccgtcacagctactgacgccgattctggaaattttgccctcatagagtactcattgggagatggcgagtcaaaattcgctattaaccctaccacgggggacatctacgtcttgtcaagtctggatcgggagaagaaagaccactacattttgaccgcactggcaaaggataatccgggagacgtggcgtccaataggcgggaaaactccgtgcaagttgtgattcaggtgctggatgtaaatgattgccgcccacagttctccaaaccacagttctcaactagcgtatacgagaacgaaccagcagggacttcggtgataactatgatggcaaccgatcaggatgaagggccaaatggcgagctgacttatagcctggagggccctggagttgaggccttccacgtggacatggactcaggtctggtcaccacgcagagacccctgcaatcttacgagaaattctctctgactgttgtcgctactgatgggggtgagccaccactgtggggcaccactatgctgcttgtcgaggttatcgacgtaaacgataaccgccctgtatttgttaggcctcccaatggtacgatcctccatatccgggaggagatccctctcagaagcaatgtgtacgaagtctacgccacagacaaagacgaaggcctgaatggagccgtgcgctattccttcctcaaaaccgcaggaaatcgcgattgggagttcttcataatcgaccctattagtggtctgatccagaccgctcagagactcgatagggagagccaggccgtttactctctgatcctggtagcatcagacctaggccagccagtgccctacgaaaccatgcagcccttgcaggtggcgctcgaagacatcgacgataacgaacccctgtttgtcaggccgcctaagggtagtccacagtatcagctgctgacagtgcctgaacactccccccgaggcacattagtgggcaacgtcaccggcgcagtggacgcagatgagggacctaacgctattgtctactactttatcgctgcaggtaatgaggaaaagaacttccacctgcagccagacggctgtctgcttgttctgcgcgatctggatagagagcgggaagcaattttctctttcattgtaaaggcttctagcaatcgaagttggactcctcctcgaggaccctctcccactttggatttagtcgcagacctgacactccaggaggtgcgagtggtcttagaagacatcaacgaccagcctcctcgattcacgaaagccgaatacacagccggtgtcgccactgacgctaaggtaggcagcgagttaatccaggtgcttgcccttgatgccgatattgggaataacagcctagtcttttatagcatcctggctattcattatttccgcgctttggctaatgactctgaagatgtcgggcaagtgtttaccatggggtccatggatggtattctgagaaccttcgatctcttcatggcctattctcctggctacttcgtggtggacatcgtcgcacgggacctggcgggtcacaatgatacagcgatcataggaatctacatcctgagggacgatcagcgggtcaaaatagtgataaacgagattccagacagggtgcggggtttcgaagaagagtttattcatttgctcagcaacattactggggctatcgtcaacacagataacgtgcagtttcacgtggataagaaggggagggttaatttcgcacagactgagctacttattcacgtcgtcaaccgagacaccaatcggattctcgacgtagacagggtcatccagatgatagacgaaaataaggaacaactgaggaacctgttccgcaactacaacgtgcttgacgtccaacctgccattagcgttcgtctgccggacgatatgtccgcactccaaatggccatcatcgtcctggcgatcctattgtttttggcggcaatgttgtttgttctcatgaactggtactaccggaccgtccataaacggaaactcaaggccatcgtagccggttcggctggcaacagaggctttatcgacattatggatatgcctaacactaataagtactctttcgatggcgcaaatcctgtctggctggatccgttttgtcgcaacctcgaactggctgcccaggccgaacacgaggatgatctgccagaaaatctgagcgaaatcgctgacctgtggaacagtcctacccgcacacacgggacgttcgggagagaaccggctgcagttaaacctgatgacgataggtacctgcgggctgccatacaagagtacgataatattgccaaactaggacagatcatccgggaggggcctatcaagggttccctgctaaaagtggtattggaggattaccttcgcctgaagaaactctttgcccaacggatggtacaaaaggcaagctcatgtcacagtagcatctctgaactgatccagaccgaactggacgaagaacctggtgaccacagcccagggcagggctccttgcggttccgacataagcctccagtggaactcaagggtcccgacggcatccatgtggttcacggatctaccggaacactcctcgctacagatctgaattcactgcccgaagaggatcagaaaggtctaggccgttcgctggaaactctcactgccgctgaggccacagcctttgaaagaaacgccagaaccgagagcgcaaagagtacccctttacacaagctgagagatgtgataatggagacaccgctggagatcactgaactgtac

SEQ ID NO: 291433 - DNA, 10080 bp, Artificial Sequence
  derived and/or modified sequence
atggggcgccacgtggcaacctcttgccacgtcgcatggctcctggtgctgatttctgggtgctggggccaggtgaatcgacttccttttttcactaaccatttctttgacacatacttactcattagtgaggacactcccgtgggttcctctgtgactcaactgttggcacaggatatggataacgatccattggtgttcggggtaagcggcgaggaagcctctcgcttcttcgcagtcgaacctgatactggcgtagtgtggttacgccagccactggaccgggagacaaaaagcgagttcaccgttgagttctctgtatctgaccatcaaggcgtcatcactagaaaggtcaatattcaagtgggggacgtgaacgataacgccccaaccttccacaatcaaccatactccgtgcgcatacccgaagtaggtgcaacagggaataccccggtgggcacaccaatctttatcgttaacgcaaccgatcccgacctaggagctggtggaagtgtgctgtatagtttccagccccctagccaattttttgcgattgattcagcccggggtatcgtaacggtgatcagggaactggattacgaaacaacccaggcttatcagctgaccgtcaatgcaaccgaccaggataaaactcgaccactgagcactttggctaatcttgccatcattattaccgatgtgcaggacatggacccaatatttattaacctcccatattctactaatatctacgagcattctccaccaggcactacggtgcgtatcatcactgccatcgaccaggacaagggacgtcccagaggcataggttacactatagtgtcagtcgctggcaataccaacagtatctttgcactggattatatctccggcgtcctgacattgaacggacttctggatcgagaaaatcccctttattctcacgggtttatcctcaccgtcaagggcaccgaactcaacgatgatagaaccccatctgacgccacagtcacaaccacctttaacatcctggttattgatattaatgacaatgccccagaatttaattcctccgaatattctgtggctataaccgaactggctcaagtcggattcgcattgccccttttcatacaggtcgtcgacaaagatgaaggactgaactctatgtttgaagtgtacctggtcggcaacaacagccaccacttcatcattagccccacctccgtgcaagggaaagccgatattcgtattagggtggcaattcccctggactacgagacagttgataggtacgacttcgatcttttcgctaatgagtcagtacccgatcacgtgggctacgccaaagtaaagatcacgctcattaatgaaaacgacaataggcccatattcagccagcctctgtataacatctccctgtacgagaacgtgactgtaggaacttcagtcctgaccgtcctggctaccgacaacgatgcggggacctttggcgaagtgagctacttcttctcagacgatcccgacagatttagcctcgacaaagacactggcttaataatgctgatcgcccgtctggactatgaattgatccagcggttcacacttactatcatcgcccgcgacggggggggcgaagagactaccggccgggtgcgaatcaacgtgctggacgtgaacgacaacgtacctacattccaaaaagatgcctacgttggagcacttcgggaaaatgagccaagcgtgacccaattggttaggctgcgagccaccgacgaagactcaccgcctaacaatcagatcacttactctattgtgtctgccagcgcctttggatcatactttgacatctctctatatgagggttacggtgtaatttcagtgtcacgaccactggattacgagcagatcagcaatggattgatctaccttaccgtgatggctatggacgcaggcaacccacccctgaatagcacagttcctgttacaatagaagtatttgatgaaaatgacaacccccctacatttagcaaaccagcgtattttgttagcgtggtggagaatattatggcaggagccactgtgctgtttctgaacgctactgatctggaccggtctcgggagtacggacaggaaagcataatttatagtctggagggtagtacgcagtttcgaattaatgcacgtagtggggaaattaccaccaccagtctgctcgatcgcgagactaaaagtgaatacatactcattgtgagagctgtcgacgggggagtgggccataaccagaaaactggaatcgctactgtgaacattacactcctggatattaacgataatcatccgacttggaaggatgctccttattatattaacctggtggagatgacgccacccgactctgacgtcaccacagtggtggcggttgatcctgacctgggggagaatggaacgctggtgtacagtatccagccccctaacaaattttatagtctgaactctacaaccggcaaaattcgcacaacacatgctatgcttgatcgggaaaatccggacccacacgaagcagaattaatgcgcaagatcgtggtttccgtgaccgattgcggccggccacccctgaaagccaccagttccgccaccgtattcgtcaatcttttggatctaaatgacaatgatcccacattccaaaatctgccttttgttgccgaggtattagaaggcattccagccggggttagcatctaccaggtcgtagcaatcgacctcgacgaaggcctcaatggtctggtgagttaccgcatgccagtgggcatgccccgaatggacttcctcattaacagttcctctggcgttgtcgtgaccacaacagaattggatagggagcggatagctgagtatcaacttagagttgtcgctagcgatgcggggacacccacgaaaagcagtacttccaccttgactattcacgtgctcgacgtcaatgatgagactcccactttctttccggctgtctacaacgtatcagttagcgaagacgtgcctagagagttcagggtcgtgtggctcaactgcaccgacaatgacgtcggtctgaatgcagaactgtcttattttataactggaggtaacgtggacggcaaattttctgttggctatagggatgccgtggtcaggacagtcgtgggtctcgaccgcgagacaaccgccgcctatatgctgatcctggaggccatcgacaatgggccagtcggaaagagacacaccggaaccgcgacggtctttgtgaccgtcctggatgtgaatgacaatcgccccattttcctgcagtcatcctatgaagctagtgtgccggaggacatccccgaaggacatagtatacttcaactcaaggccacggacgccgatgaaggcgaattcggacgagtgtggtacaggatcctgcatggtaaccatggtaacaattttcgaattcacgttagtaacgggttgctgatgcgaggcccacgcccactcgaccgtgagcggaattcctctcacgttctgatcgtggaagcctacaatcatgatctcgggcccatgagaagcagtgttcgcgtcattgtgtatgttgaagacatcaacgatgaagcgcctgtgttcacccagcagcaatactctagactgggactccgggagacggctgggattggaacaagtgtgattgtcgtgcaggccaccgatcgcgacagtggcgacggaggattggtcaactaccgcatattgtccggagctgaggggaagttcgagattgacgagtctaccggtctgattattacggtgaattatctcgactacgagacgaagaccagttatatgatgaacgtgagcgcaaccgaccaggccccacctttcaatcaggggttttgttccgtatatatcactttgctcaacgaattggatgaggccgtgcagttcagtaatgcctcctatgaggcagcaatcctggaaaacttggctctagggaccgagatagtaagggtgcaggcttactccatcgataatctgaatcagattacttatcggttcaatgcatacacctcaactcaggctaaggctctgttcaagattgatgctatcacaggcgtaatcacggtacagggacttgtggatagggagaagggtgatttttacaccctgaccgtcgtagcagacgatggcgggcctaaagtggattccaccgtgcaggtgtatatcacagtattggacgagaacgacaactctccacgattcgactttacaagcgattccgcagtgtctatacctgaagattgtcctgtcggtcagcgggtcgccaccgtgaaggcctgggatcccgacgccggctcaaatgggcaggtagttttttcgctggcatcaggcaatatagccggtgcctttgagatcgtcacaactaacgacagtattggagaggtgttcgtcgcccgccctctggatagggaggaattagaccattacatacttcaggtcgttgcctccgacagaggcactcctccccgcaagaaagatcacatattgcaggtaaccatccttgacataaacgataacccgccagttatcgaatctcctttcggctacaatgtgagtgtgaacgaaaatgtgggagggggaaccgcagtggtgcaagttcgcgcgaccgaccgcgatattggcattaactcagtgcttagctactatatcacagaaggaaataaagacatggccttccgaatggacagaatctccggcgaaatcgctactaggcccgctcccccggatcgagaaaggcagagtttctatcacctagtggccacagtggaggacgaaggcacaccaactttgtcagccactacccacgtatacgtgaccattgtggatgaaaatgataatgcccccatgtttcagcaacctcactatgaagtgctactggacgaaggacccgatactttgaacacctcactgattactattcaagccttggatctggacgaggggcccaacgggaccgtgacctacgctatcgtggcagggaacatcgtgaacacatttcggatcgacaggcacatgggcgtcataaccgccgcgaaagagctagactatgagatatctcacggaaggtacaccctgatagttacagcaactgatcagtgtcctatcctgagccaccggctgacctcaactaccacagtcctagtgaacgtcaatgacattaatgacaatgtaccgacgtttcccagggattatgagggaccattcgaggtgaccgaggggcaacccggaccccgagtgtggacttttctagcgcatgatagggacagtggtccgaacggacaggtggagtactccatcatggacggcgaccccctcggagaatttgtcatttctcccgtggaaggagttttgcgggtcaggaaggatgtcgaattagacagagagaccatcgcattctataatcttacgatatgcgcaagggatagaggcatgccaccattaagtagcacgatgttggttggcatcagagtgctggatataaacgacaatgacccagtcctgctgaatctcccaatgaacattactattagcgagaactctcccgtgagcagctttgttgcacacgtcttagcaagcgacgccgactctggatgtaacgccaggctgacatttaacataaccgcaggtaatcgcgagagagcgttctttatcaatgcaaccactggtatcgtgaccgtcaatagacctctggacagggaaaggatccctgagtataaactgacgatatctgtgaaggataatcccgaaaatccaaggatagccaggagggactatgacctgttgttgatttttctgtccgacgagaatgacaatcatcccctgttcactaagtctacctaccaggccgaggtcatggagaatagccccgcaggaactcctctaaccgtgctgaatggacctatcctggctcttgatgccgatcaagatatatacgcggttgtgacatatcaactccttggtgctcaaagcggcttatttgacatcaactcttctactggggtcgttactgtgcggagcggtgtgatcattgaccgcgaggcatttagcccaccaatcttggaactcctgctgctggccgaagatatcggtttgctgaactcaaccgcccacctactcataactattcttgacgacaacgacaatcggcctacttttagtcccgcgactcttactgtgcacctcttagaaaattgtcctccaggtttttcagtgctgcaggtaacggcaaccgatgaggatagtggccttaatggcgagcttgtttaccgcatcgaggcgggcgcccaggacaggttcctgattcacctcgtgaccggggtgatccgggtggggaacgcaacaatcgaccgagaggagcaggaaagttatagactgacggttgttgccactgatagaggcaccgtgccactaagtggcaccgctatcgtgacaatcctgatcgatgacatcaacgatagcaggcccgaatttctgaatcctatccaaaccgtgagtgttttggagagtgccgaacctgggaccgtgatcgcgaatattactgccatagatcatgatttgaacccaaaactggaatatcacatcgtcggcatcgtagcaaaggatgatacagataggctggttcctaatcaggaggatgcttttgcagttaatattaacaccggatccgtaatggttaaaagccctatgaatagagagcttgttgcaacttacgaggtgaccttgtccgtgatagacaacgcttccgacctgcccgagcgatctgtgtccgtcccaaatgcaaagcttaccgtgaatgtgctggatgtaaatgacaacacgcctcagttcaagcctttcggaatcacttactatatggagcgtatcttagagggcgcaaccccgggtactacactcatcgccgttgctgccgtcgaccctgataagggtctcaacgggttagtgacctatacactgttagacttagtcccacctgggtacgtgcagctagaggattcaagcgccggaaaagttattgctaaccgcactgttgactacgaggaagtgcactggttaaacttcaccgtgagggcttcggataacggatcacctcctagggccgccgaaattcctgtctatctggaaattgtggatattaacgataataacccaatttttgaccagcccagctatcaggaggcagtctttgaagatgtcccagtgggcacgattattttgacagtgaccgctacggatgctgactctgggaactttgcactgatcgaatattccctcggagatggggagagcaaatttgccataaatcccacaactggggacatctatgtgttgtcctcccttgacagggagaaaaaggatcactacattctgaccgcactagctaaggataaccccggcgacgttgcttctaaccggagggaaaactctgtgcaggttgttatccaggtgttggacgtgaacgactgtcgcccccaattctctaaacctcaattctcgacatctgtgtatgagaacgagccggccggcacctcagtgatcactatgatggcaacagatcaggacgaaggacccaatggcgaactgacatatagcctcgaagggccaggtgtcgaggcattccacgtggacatggactccggacttgtgaccacgcagcgccccttacagtcgtatgagaaattttctctgactgtggttgcaaccgacggaggagaaccaccactgtgggggacgactatgctgctggtcgaagtaatcgatgtgaacgacaaccgccctgtctttgttcgcccgcctaatggtactattctgcacattcgcgaggagatccccctgcgctcaaacgtgtacgaggtgtacgctaccgacaaggacgaaggccttaatggggccgtccgttattcttttctaaagaccgctggcaatcgggattgggagttttttatcatcgaccccatctctggtttgatccaaactgcccagagattagacagggagtcccaggctgtctacagcctgatcttggtcgccagcgatctggggcagcctgtcccatacgagacaatgcagccactccaggtcgcattggaagatattgatgacaacgaacctttgttcgtcaggcctcccaaaggcagtccgcagtaccagctcctcactgtgccagagcatagccctcgcggcactctcgttgggaacgtcaccggggcagtggacgccgatgaggggcctaacgctatcgtctattactttatcgccgcggggaacgaagaaaagaatttccacctgcagcctgatgggtgcctgctagtgttgcgggatttggaccgggagcgggaagccatcttctccttcatcgtgaaagcctcatcaaaccggagctggacccctccccgtggcccatcacctactctggacctcgtggctgacctgactctgcaagaggtgcgcgttgtgctggaggacataaatgaccaaccccctaggttcactaaagccgagtacacagccggggttgcgactgacgctaaagttggctccgaactaatccaggtgcttgctctggacgctgatattgggaataatagccttgtgttttattccattctcgccattcactattttagagcactagccaacgatagcgaagacgttggacaggtctttactatgggttcaatggacggcattcttcggactttcgatctgtttatggcttacagtccgggctactttgttgtggacatcgtggctagggacctcgctgggcacaacgacaccgccattattgggatttacatcctgagagacgaccagagagttaagatagtcatcaacgaaattccagatagggtccgtggttttgaggaggagttcattcacctgctctctaacattacaggagcgatagttaatacggacaacgtccagtttcatgtggataaaaaggggcgcgttaacttcgctcagacggagttattaatccacgtggtgaatagagatacaaacagaatcttggacgtggacagagtgatccaaatgatagatgaaaacaaggagcagctaagaaatctgttccggaattataatgtgctggacgtgcaaccagccatatccgtccgcctgcctgacgacatgtccgctttgcagatggctatcattgtgctcgcaatcttactctttctggccgccatgctgttcgtgctgatgaactggtactatcggaccgtgcataaacggaaactaaaggccattgtggctggcagtgctggaaatcgggggttcatagacatcatggatatgcccaacactaacaagtattctttcgatggggctaatcccgtgtggcttgaccccttctgtagaaaccttgaacttgccgctcaagcagagcatgaggacgacttgcccgaaaacctatcagaaattgccgatctctggaacagtcctacccggacccacgggacattcggtagagagccagccgccgtcaaacccgacgatgaccggtatttgagggcagccatccaagagtatgataacatcgccaagctcggacagattatccgtgaaggccctattaaaggttcactcctcaaagttgttctggaagactatttgaggttgaaaaaactcttcgcccaacgtatggtccaaaaagcttcctcttgtcactcaagtatatctgagctgatacaaaccgagcttgatgaagaacccggtgaccatagtccagggcaggggtctctgcgctttaggcataaacccccggtcgagctaaaagggcccgacgggattcacgtggtgcatggtagtacaggtacacttctggccaccgacctgaattcgcttcctgaggaggatcagaagggcctggggcgctccctggagaccttgaccgccgcggaggctaccgcctttgagaggaatgcgcgaacagagagtgcaaagtccacacctcttcacaagctgagagatgtcattatggagacacctctcgagatcacagaattgtag

SEQ ID NO: 291434 - DNA, 10080 bp, Artificial Sequence
  derived and/or modified sequence
atgggccgccacgtggccaccagctgccacgtggcctggctgctggtgctgatcagcggctgctggggccaggtgaaccggctgcccttcttcaccaaccacttctttgacacctacctgctgatcagcgaggacacccctgtgggcagctctgtgacccagctgctggcccaggacatggacaatgaccccctggtgtttggagtgtctggagaggaggccagccgcttctttgctgtggagccagacaccggggtggtgtggctgcggcagcccctggaccgggagaccaagtctgagttcaccgtggagttctctgtgtctgaccaccagggcgtcatcaccaggaaggtgaacatccaggtgggagatgtgaatgacaatgcccccaccttccacaaccagccctacagcgtgcgcatccctgaggtgggcgccactggaaacacccctgtgggcacccccatcttcatcgtgaatgccacagatcctgacctgggcgctgggggctctgtgctgtacagcttccagccccccagccagttctttgccattgattctgcccggggcatcgtgaccgtcatccgggagctggactatgagaccacccaggcctaccagctgactgtgaatgccacagaccaggacaagacccggcccctgagcaccctggccaacctggccatcatcatcacagatgtgcaggacatggaccccatcttcatcaacctgccctacagcaccaacatctatgagcacagccccccaggcaccaccgtgcgcatcatcacagccatcgaccaggacaagggccggccccggggcatcggctacaccatcgtgtctgtggccggcaacaccaacagcatctttgccctggactacatctctggagtgctgaccctgaatggcctgctggaccgggagaaccccctgtacagccacggcttcatcctgactgtgaagggcacagagctgaatgatgacaggacccccagtgatgccaccgtgaccaccaccttcaacatcctggtgattgacatcaatgacaatgcccctgagttcaacagcagcgagtacagcgtggccatcacagagctggcccaggtgggctttgccctgcccctcttcatccaggtggtggacaaggatgagggcctgaacagcatgtttgaggtgtacctggtgggcaacaacagccaccacttcatcatcagccccacctctgtgcagggcaaggctgacatccgcatccgggtggccatccccctggactatgagaccgtggacagatatgactttgacctgtttgccaatgaatctgtgcctgaccacgtgggctacgccaaggtgaagatcaccctcatcaatgaaaatgacaaccggcccatcttcagccagcccctgtacaacatcagcctgtatgaaaatgtgacagtgggcacctctgtgctgactgtgctggccacagacaatgatgctggcacctttggagaggtgtcctacttcttcagtgatgatcctgaccgcttcagcctggacaaggacaccggcctcatcatgctgattgcccggctggactatgagctgatccagcgcttcaccctgaccatcatcgccagagatggcggcggggaggagaccaccggccgggtgcgcatcaacgtgctggatgtgaatgacaacgtgcccaccttccagaaggatgcctacgtgggcgccctgagagaaaatgagcccagcgtgacccagctggtgcggctgcgggccacagatgaggacagcccccccaacaaccagatcacctacagcatcgtgtctgccagcgccttcggcagctactttgacatcagcctgtatgagggctatggagtcatctctgtgtcccggcccctggactatgagcagatcagcaatggcctcatctacctgactgtgatggccatggatgctggcaacccccccctgaacagcacagtgcctgtgaccatcgaggtgtttgatgaaaatgacaacccccccaccttcagcaagccagcctactttgtgtctgtggtggagaacatcatggccggggccaccgtgctcttcctgaatgccacagacctggacaggagccgggagtatggccaggagagcatcatctacagcctggagggcagcacccagttccgcatcaatgcccggagcggggagatcaccaccaccagcctgctggaccgggagaccaagtctgagtacatcctgattgtgcgggctgtggatggaggagtgggccacaaccagaagacaggcatcgccaccgtgaacatcaccctgctggacatcaatgacaaccaccccacctggaaggatgccccctactacatcaacctggtggagatgaccccaccagacagtgatgtgaccaccgtggtggccgtggaccctgacctgggggagaatggcaccctggtgtacagcatccagccccccaacaagttctacagcctgaacagcaccaccgggaagatccgcaccacccacgccatgctggaccgggagaacccagacccccatgaagctgagctgatgaggaagatcgtggtgtctgtgacagactgtggccggccccccctgaaggccaccagcagcgccaccgtgtttgtgaacctgctggacctgaatgacaatgaccccaccttccagaacctgccctttgtggccgaggtgctggagggcatcccagctggggtgtccatctaccaggtggtggccatcgacctggatgagggcctgaatggcctggtgtcctacaggatgcctgtgggcatgcccaggatggacttcctgatcaacagcagcagtggagtggtggtgaccaccacagagctggaccgggagagaattgctgagtaccagctgcgggtggtggccagtgatgctggcacccccaccaagagcagcaccagcaccctgaccatccacgtgctggatgtgaatgatgagacccccaccttcttccctgctgtgtacaacgtgtctgtgtctgaagatgtgccccgggagttccgggtggtgtggctgaactgcacagacaatgatgtgggcctgaatgctgagctgagctacttcatcaccggcggcaatgtggatggcaagttctctgtgggctacagagatgctgtggtgaggacagtggtgggcctggaccgggagaccacagctgcctacatgctgatcctggaggccatcgacaatggacctgtgggcaagaggcacactggaacagccaccgtgtttgtgacagtgctggatgtgaatgacaaccggcccatcttcctgcagagcagctatgaggcctctgtgcctgaggacatccctgagggccacagcatcctgcagctgaaggccacagatgctgatgaaggagaatttggccgggtgtggtaccgcatcctgcacggcaaccacggcaacaacttccgcatccacgtgtccaatggcctgctgatgaggggcccccggcccctggaccgggagaggaacagcagccacgtgctgattgtggaggcctacaaccacgacctgggccccatgaggagctctgtgcgggtcatcgtgtatgtggaggacatcaatgatgaggcccctgtgttcacccagcagcagtacagccggctgggcctgcgggagacagctggcatcggcaccagcgtcatcgtggtgcaggccacagaccgggacagcggagatggcggcctggtgaactaccgcatcctgtctggagctgagggcaagtttgaaattgatgagagcacaggcctcatcatcaccgtgaactacctggactatgagaccaagaccagctacatgatgaatgtgtctgccacagaccaggccccacccttcaaccagggcttctgcagcgtgtacatcaccctgctgaatgagctggatgaagctgtgcagttcagcaatgccagctatgaagctgccatcctggagaacctggccctgggcacagaaattgtgcgggtgcaggcctacagcattgacaacctgaaccagatcacctaccgcttcaatgcctacaccagcacccaggccaaggccctcttcaagattgatgccatcactggagtcatcaccgtgcagggcctggtggaccgggagaagggggacttctacaccctgactgtggtggctgatgatggcggccccaaggtggacagcacagtgcaggtgtacatcaccgtgctggatgaaaatgacaacagccccaggtttgacttcaccagtgacagcgctgtgtccatccctgaggactgccctgtgggccagagggtggccaccgtgaaggcctgggaccctgatgctggcagcaatggccaggtggtgttcagcctggccagcggcaacattgctggggcctttgagatcgtgaccaccaatgacagcattggagaggtgtttgtggcccggcccctggaccgggaggagctggaccactacatcctgcaggtggtggccagtgaccggggcaccccacccaggaagaaggaccacatcctgcaggtgaccatcctggacatcaatgacaacccccctgtgattgagagccccttcggctacaacgtgtctgtgaatgaaaatgtgggcggcggcacagctgtggtgcaggtgcgggccacagaccgggacatcggcatcaacagcgtgctgagctactacatcacagagggcaacaaggacatggccttcaggatggaccgcatctctggagagatcgccaccaggcctgcccccccagaccgggagcggcagagcttctaccacctggtggccaccgtggaggatgagggcacccccaccctgagcgccaccacccacgtgtatgtgaccatcgtggatgaaaatgacaatgcccccatgttccagcagccccactatgaggtgctgctggatgagggccctgacaccctgaacaccagcctcatcaccatccaggccctggacctggatgagggccccaacggcaccgtgacctacgccatcgtggccggcaacatcgtgaacaccttcagaattgacagacacatgggcgtcatcacagctgccaaggagctggactatgagatcagccacggccgctacaccctgattgtgacagccacagaccagtgccccatcctgagccaccggctgaccagcaccaccaccgtgctggtgaatgtgaatgacatcaatgacaacgtgcccaccttcccccgggactatgagggcccctttgaggtgacagagggccagcccggcccccgggtgtggaccttcctggcccatgaccgggacagcggccccaacggccaggtggagtacagcatcatggatggagaccccctgggggagtttgtgatcagccctgtggagggcgtgctgcgggtgaggaaggatgtggagctggaccgggagaccatcgccttctacaacctgaccatctgtgcccgggaccggggcatgccacccctgagcagcaccatgctggtgggcatccgggtgctggacatcaatgacaatgaccctgtgctgctgaacctgcccatgaacatcaccatcagcgagaacagccctgtgtcctcctttgtggcccacgtgctggccagtgatgctgacagcggctgcaatgcccggctgaccttcaacatcacagctggcaaccgggagcgggccttcttcatcaatgccaccaccggcatcgtgacagtgaaccggcccctggaccgggagcgcatccctgagtacaagctgaccatctctgtgaaggacaaccctgagaacccccgcatcgcccggcgggactatgacctgctgctgatcttcctgagtgatgaaaatgacaaccaccccctcttcaccaagagcacctaccaggccgaggtgatggagaacagccctgctggcacccccctgactgtgctgaatggccccatcctggccctggatgctgaccaggacatctatgctgtggtgacctaccagctgctgggcgcccagagcggcctgtttgacatcaacagcagcactggagtggtgacagtgcgcagcggggtcatcatcgaccgggaggccttcagcccccccatcctggagctgctgctgctggctgaagatattggcctgctgaacagcacagcccacctgctgatcaccatcctggatgacaatgacaaccggcccaccttcagccctgccaccctgactgtgcacctgctggagaactgccccccaggcttctctgtgctgcaggtgacagccacagatgaagattctggcctgaatggagagctggtgtacagaattgaagctggggcccaggaccgcttcctgatccacctggtgactggagtcatccgggtgggcaatgccaccatcgaccgggaggagcaggagagctaccgcctgactgtggtggccacagaccggggcaccgtgcccctgagcggcacagccatcgtgaccatcctgattgatgacatcaatgacagcaggcctgagttcctgaaccccatccagacagtgtctgtgctggagagcgctgagcccggcaccgtcatcgccaacatcacagccatcgaccatgacctgaaccccaagctggagtaccacatcgtgggcatcgtggccaaggatgacacagaccggctggtgcccaaccaggaggatgcctttgctgtgaacatcaacacaggctctgtgatggtgaagagccccatgaaccgggagctggtggccacctatgaggtgaccctgagcgtcatcgacaatgccagtgacctgcctgagaggtctgtgtctgtgcccaatgccaagctgactgtgaatgtgctggatgtgaatgacaacaccccccagttcaagcccttcggcatcacctactacatggagcgcatcctggagggcgccaccccaggcaccaccctgattgctgtggccgctgtggaccctgacaagggcctgaatggcctggtgacctacaccctgctggacctggtgcccccaggctacgtgcagctggaggacagcagcgctgggaaggtgattgccaacagaacagtggactatgaggaggtgcactggctgaacttcaccgtgcgggccagtgacaatggcagcccccccagggctgctgagatccctgtgtacctggagatcgtggacatcaatgacaacaaccccatctttgaccagcccagctaccaggaggccgtgtttgaagatgtgcctgtgggcaccatcatcctgactgtgacagccacagatgctgacagcggcaactttgccctgattgagtacagcctgggagatggagagagcaagtttgccatcaaccccaccactggagacatctacgtgctgagcagcctggaccgggagaagaaggaccactacatcctgacagccctggccaaggacaaccctggagatgtggccagcaacagaagagaaaattctgtgcaggtggtgatccaggtgctggatgtgaatgactgccggccccagttcagcaagccccagttcagcacctctgtgtatgaaaatgaacctgctggcaccagcgtcatcaccatgatggccacagaccaggatgagggccccaacggggagctgacctacagcctggagggccctggggtggaggccttccacgtggacatggattctggcctggtgaccacccagaggcccctgcagagctatgagaagttcagcctgactgtggtggccacagatggaggagagccccccctgtggggcaccaccatgctgctggtggaggtgattgatgtgaatgacaacagacctgtgtttgtgcggcccccaaatggcaccatcctgcacatccgggaggagatccccctgcggagcaatgtgtatgaggtgtatgccacagacaaggatgagggcctgaatggagctgtgcgctacagcttcctgaagacagctggcaacagagactgggagttcttcatcatcgaccccatcagcggcctcatccagacagcccagaggctggaccgggagagccaggccgtgtacagcctcatcctggtggccagtgacctgggccagcctgtgccctatgagaccatgcagcccctgcaggtggccctggaggacattgatgacaatgagcccctgtttgtgcggccccccaagggcagcccccagtaccagctgctgactgtgcctgagcacagcccccggggcaccctggtgggcaatgtgactggagctgtggatgctgatgagggccccaatgccatcgtgtactacttcatcgctgctggaaatgaggagaagaacttccacctgcagccagatggctgcctgctggtgctgcgggacctggaccgggagcgggaggccatcttctccttcatcgtgaaggccagcagcaacagatcctggaccccaccccggggccccagccccaccctggacctggtggccgacctgaccctgcaggaggtgcgggtggtgctggaggacatcaatgaccagcccccacgcttcaccaaggccgagtacacagctggggtggccacagatgccaaggtgggcagcgagctgatccaggtgctggccctggatgctgacatcggcaacaacagcctggtgttctacagcatcctggccatccactacttccgggccctggccaatgattctgaagatgtgggccaggtgttcaccatgggctccatggatggcatcctgcggacctttgacctcttcatggcctacagccctggctactttgtggtggacatcgtggcccgggacctggccggccacaatgacacagccatcatcggcatctacatcctgagagatgaccagagggtgaagatcgtcatcaatgagatcccagacagagtgcggggctttgaggaggagttcatccacctgctgagcaacatcaccggggccatcgtgaacacagacaacgtgcagttccacgtggacaagaagggccgggtgaactttgcccagacagagctgctgattcatgtggtgaacagagacaccaaccgcatcctggatgtggacagagtcatccagatgattgatgagaacaaggagcagctgaggaacctcttcaggaactacaacgtgctggatgtgcagcctgccatctctgtgcggctgcctgatgacatgtctgccctgcagatggccatcatcgtgctggccatcctgctcttcctggccgccatgctgtttgtgctgatgaactggtactacagaacagtgcacaagaggaagctgaaggccatcgtggccggcagcgctggcaacagaggcttcatcgacatcatggacatgcccaacaccaacaagtacagctttgatggagccaaccctgtgtggctggaccccttctgcaggaacctggagctggccgcccaggccgagcatgaagatgacctgcctgagaacctgtctgaaattgctgacctgtggaacagccccaccaggacccacggcaccttcggccgggagcctgctgctgtgaagccagatgatgaccgctacctgcgggccgccatccaggagtatgacaacatcgccaagctgggccagatcatccgggagggccccatcaagggcagcctgctgaaggtggtgctggaggactacctgcggctgaagaagctgtttgcccagaggatggtgcagaaggccagcagctgccacagcagcatcagcgagctgatccagacagagctggatgaggagcccggggaccacagccctggccagggcagcctgcgcttccgccacaagccccctgtggagctgaagggcccagatggcatccacgtggtgcacggcagcacaggcaccctgctggccacagacctgaacagcctgcctgaggaggaccagaagggcctgggccgcagcctggagaccctgacagctgctgaggccacagcctttgaaagaaatgccaggacagagagcgccaagagcacccccctgcacaagctgagagatgtgatcatggagacccccctggagatcacagagctgtag

SEQ ID NO: 291435 - DNA, 10080 bp, Artificial Sequence
  derived and/or modified sequence
atgggccggcacgtggccaccagctgccacgtggcctggctgctggttttaatctccggctgttgggggcaggtgaataggcttcctttcttcacaaaccatttttttgatacatacttactgatttcagaggacacaccagtcggttcttccgtcacccaactcctagcacaggatatggacaatgatccgcttgtttttggagtgagcggggaggaagccagcagatttttcgccgttgagcccgacaccggtgtggtctggcttaggcaaccactagatagagaaacgaagagcgagtttactgtggagtttagtgtatctgaccatcaaggggtgattacaagaaaggtgaatatccaggtcggcgatgtgaacgacaacgcaccgacattccacaatcaaccgtattccgtcagaatccctgaggtgggcgcaacgggaaacacaccggtcggcacacccatctttatcgtgaatgcaacagatccagacctgggcgccggaggtagcgtgctgtattctttccaacccccctctcagttcttcgcaatcgattcagctagaggtatagttaccgttatccgcgaactggattatgagacaacccaggcctaccagttaaccgtgaatgcgactgaccaggacaagacccgacctttgtccactctggctaacctggcgatcattatcactgatgtgcaggatatggatcccatcttcataaatctcccttactccaccaatatttatgagcattctcctccaggaacaaccgtacgcattatcaccgctattgaccaggacaaggggagacctcggggcattggttatactatcgtgtcagtcgccggtaacacaaactcaatctttgcgctggactatatatcaggtgtattaacactgaacgggctgttagacagggagaacccattatactcacacggattcatcctgaccgtgaaaggaactgagcttaacgatgaccggacacccagtgatgccacagtgaccacgacgttcaatatcttagtgatcgatattaatgataacgcacctgaattcaattcctctgagtatagtgtggcgattaccgagttggcccaggtgggattcgccctacctctgtttatccaggtcgtggataaggatgaggggctgaacagtatgtttgaggtctacctggtgggcaacaactcccatcactttattatctcccccacctctgtccaaggtaaagctgacatacgcatacgggtcgcaatccctttggattatgagactgtcgaccggtatgatttcgatctgttcgcgaacgagagcgttcctgaccacgttggatatgctaaggtcaagataactctcattaacgagaacgataaccgaccaatttttagtcagccactgtacaacatctcactgtatgaaaacgtcaccgtcggaacaagcgttctgactgttctcgccaccgataacgatgcaggtacttttggcgaagtctcttacttcttctccgatgaccccgaccgcttctcgctggacaaggatacaggcctgattatgcttatcgccaggctggattacgaacttattcagcgatttacactgacgatcatcgctagagacggtgggggtgaagaaacaactggtcgcgttagaataaatgtgctggacgtaaatgataatgtgcctaccttccagaaagatgcttacgtcggggcgctgcgggagaacgagccgtccgtgacccagctggtccgactgcgggcgactgacgaggacagtccaccaaataaccaaattacatatagcattgtgagcgcctctgcatttggatcttatttcgatatatcactttacgagggatacggcgtgatttctgtctccagaccattggactatgaacaaatctctaacggcctgatataccttacggttatggcaatggacgccggcaatcctccccttaacagcaccgtacctgtgacaattgaggttttcgatgaaaatgacaatcccccgacttttagcaaacccgcgtactttgtgtcagtggtagagaacatcatggctggagcaacagttctcttcctgaatgctactgacctggatcggagcagggaatatggtcaggagtcaatcatctacagcctcgagggatctacccagtttagaattaatgcacggagcggtgaaatcaccacaaccagcttgctagatcgggagacaaaaagcgaatacatcctgatcgtccgtgctgtagacggaggagtgggccataaccaaaagaccggtatcgcaacagtcaacattactttgttagatataaacgataatcacccaacgtggaaggatgccccttactacatcaaccttgtagagatgactccccccgatagcgatgtgaccacggtagtggccgtagatccagatctcggcgagaacgggacactcgtctactccatacaacctcccaataaattttactcgctgaactccacgaccggcaagatcagaacaactcacgcgatgctagatcgcgagaacccagacccccatgaagctgagttgatgcgaaaaattgtcgtcagcgtgactgactgcggccggcctcccctgaaagcgacgtcttccgctaccgtcttcgtcaatctgctcgatctgaatgataatgaccccaccttccaaaatctgccctttgtggctgaggtccttgaaggaatcccagccggggtatccatttatcaggtggtagccattgatctggatgagggactgaacggtctcgtttcataccgaatgcctgtgggtatgcctaggatggactttctgatcaactcgtcatctggtgtagtggtcactacaacggaactcgacagggagcggatagccgagtaccagttacgcgtggttgccagtgatgccggcacacctaccaagtctagcacgtctacactgactatacatgtcctggacgtcaacgatgaaacccccacattctttccggccgtatacaacgtgtccgtgagcgaggacgtccctcgtgaattcagagtcgtgtggctcaactgcacagacaacgacgtagggttgaacgctgagctgtcgtacttcatcacaggcggcaacgtcgacggtaagttttctgtggggtacagagacgccgtggtgcggaccgtagtggggttggatagagagacaactgcagcctatatgctgattctagaggcaatcgataatggccctgtgggaaaaagacacactggcacagccactgtctttgtaacagttttggacgtcaacgacaatagacccatcttcttgcagagcagttacgaagctagcgtgcccgaagacatccccgaggggcattcaatcctacagcttaaggctaccgatgcggacgagggcgagtttggacgggtttggtataggatattgcatggcaatcacggaaacaactttaggatccacgtgtccaacggcctccttatgcgagggcctaggccccttgacagagagaggaactctagtcacgtcctgatcgtggaggcttacaaccacgatttaggccctatgagaagctctgtgagggtcattgtatacgtcgaggatataaacgatgaggctccagtattcactcaacaacagtactctcgattgggtcttcgagagactgccggcatcgggactagcgtgatcgtggttcaggcaacggatcgcgattccggcgatggcggtttggtgaattatcgaatccttagtggagctgagggcaagttcgagatcgacgaatccactggcctgatcattacagtgaactatttagactacgagacgaaaactagttacatgatgaatgtcagtgccaccgaccaggcacctccgttcaaccagggattttgtagcgtgtatattaccctgctgaacgaattagatgaagccgtgcaattttccaacgcatcctacgaagcagccatcctggaaaatctcgcccttggaacagaaattgtgagggtccaggcttattctattgacaatcttaaccagatcacctataggtttaatgcatacacatctacccaggccaaggcactgtttaaaatagacgctatcactggcgtgatcaccgtccaaggactagtcgacagagagaagggagatttttacaccttaacagtggtagccgatgatgggggccctaaggtcgattcaactgtgcaagtgtacattacagtgctggatgaaaatgataattccccgcgcttcgattttacatctgactctgccgtctccatccctgaagactgccctgttgggcagagggttgctaccgtgaaagcgtgggaccccgatgccggctccaacggacaagtggtcttttctctggcctcaggtaacatcgctggagcattcgagattgtgaccactaacgactcaatcggggaggtgttcgtagcacgtcccctggacagggaggagctagaccactatattctgcaagttgtggcttccgatcgcggcacccctccccgtaagaaagatcacattctgcaggtgacaattctggacattaacgacaatccccccgtgattgaatctcctttcggctacaatgtgtctgtaaacgagaacgtaggaggtggcaccgccgtggtccaggttagagcgacagatcgagacatcggcattaactcagtcctgtcctactatatcacagaaggtaacaaggacatggcatttcgcatggataggatttcaggcgagatcgccactaggccagcccccccagacagggagcgacagtcattttaccacctggtggcgactgtggaagatgaaggaaccccgactctgagtgccaccacccacgtgtacgtcacaatagtggatgagaatgacaacgcacctatgttccaacaacctcattatgaagtgctcttggacgaaggccctgatactttaaatactagcctaatcaccatccaagccctggacttggatgagggccccaacggcacagtcacctacgcaattgtggctggcaacattgtaaatacttttcgaatcgatcggcatatgggtgtgataaccgctgccaaagaactggactacgagatatcgcacgggcgttataccctcattgtgaccgctactgaccaatgccctatcctgtcccataggctgacatccactacgaccgtgctggttaatgtgaacgatattaacgacaatgtgcccacatttccccgagattatgagggaccattcgaagtgaccgaaggtcagcctggtccccgcgtgtggacattcttggcacatgacagagatagcgggccaaacgggcaggtggaatattcaatcatggatggcgacccactgggcgagtttgtcatttctcccgtcgagggggttcttagggtcaggaaagatgtggaactcgatagggaaacaattgctttctataatttaaccatctgcgccagggataggggaatgccacccctgtccagcactatgctcgtggggattagggtccttgacatcaatgacaatgatccagtgttgctgaaccttccgatgaacattactatctccgaaaattcaccggtgagctcttttgtggcgcatgtgctcgcctcagacgctgactctggctgtaacgctcgattgactttcaatattactgcggggaaccgcgagcgggcattttttataaacgctacaactggcatcgtgacagtgaacagacctctggatcgagagcggataccagagtacaagttgaccatttcagttaaagacaacccagaaaatcctagaatagccagacgggattacgaccttctgctcatttttctctctgatgagaatgataaccatcccctgttcaccaagtctacatatcaagcagaagtgatggaaaacagtcccgctggaacccctctgactgtcctcaatgggcccattctggcgctggatgctgaccaggacatctatgcagtggtgacctaccagctgctgggagcacagtcaggtcttttcgatatcaatagctctactggagtggttacagtacgttctggcgtgatcattgatcgggaggcattctcaccaccaattctggagctgctcctgctggcagaggacatcgggctcctgaatagcactgcgcacctgctgatcaccattctggacgataatgacaaccggcccacctttagtcctgccacgttaacagttcacttgctcgagaattgtccccccgggttctcagtcctgcaagtcactgcaaccgatgaggattccggactaaatggggaactggtttatcggatagaagccggcgcccaggatagattcctgattcacctcgtgacgggtgtgatccgcgtggggaacgccaccatcgaccgcgaggagcaggagtcttataggcttacagtggtggcaactgatcgtggtaccgtgcccctgtccgggaccgcaattgtgaccatcttgatcgacgacataaatgattcccggccagaatttctgaatccgatacaaacggtatctgtgctggagagcgctgagcctggtaccgttattgccaacataaccgctattgatcacgatctgaacccaaagcttgagtaccatattgtgggcatcgtggctaaagacgacacagaccgcttggtgccaaatcaggaagacgcttttgctgtgaatatcaatactggaagcgtcatggtaaaatctcctatgaaccgcgagctcgtggccacctacgaggtaacactgagcgtgatcgacaacgcctccgacctaccagagcgcagtgtgtcggtgcctaacgccaagttgacagtcaacgtactggatgtgaacgacaatactccacaattcaagcctttcggcatcacctactatatggagagaatccttgagggggctaccccaggcactactctgattgcagtcgctgctgtggatccggataaggggcttaacggactggtgacatatacccttctggacctcgtccccccgggttacgtacagctggaagacagctccgccgggaaggttatcgcaaataggaccgtggattacgaggaagtccattggctcaacttcacggtaagggcctcagacaatgggtctccccccagggccgcagagattccagtctacctggagatagtggacattaatgataataatcccattttcgatcaaccgtcctaccaggaggccgtgttcgaggacgtccctgtgggaactattatcctgacggtgacggccactgatgcggactccggtaatttcgccttaatcgaatatagtctaggggacggagagagcaagttcgccattaaccccaccactggggatatttacgtgctatcctccctcgaccgagaaaagaaagatcactacatactgacagccctcgccaaagacaatccgggtgacgtcgctagcaaccgaagggagaatagcgtgcaggtggtaattcaagtgctggacgtgaatgattgtaggcctcagttctctaaaccacagtttagcaccagtgtatacgagaacgaacctgccggaacatccgtgattaccatgatggctacggatcaggacgagggtcctaacggcgagttgacttacagcctggaaggacccggggtcgaagcctttcatgtcgacatggatagtggtctcgtgaccacccagcgcccactgcagtcctatgagaaatttagcctaaccgtcgtggccaccgatggaggagagccacccctctggggcaccaccatgctgttggtggaagtaatagatgtgaacgataatcgccccgtgtttgtccgacctccaaatggaaccatactccacatccgagaggaaatacctctgcggtccaatgtgtatgaagtgtatgcgacagacaaagacgaagggctcaatggcgcagtcaggtactcgtttctgaaaactgccggaaaccgagactgggaatttttcatcattgacccaatctctggtttaattcagacagctcagagattggaccgggaaagtcaggctgtctacagcctgattttagtagcatctgaccttggtcagcccgtgccatacgaaacaatgcaaccgctgcaagttgctttggaggatatagacgacaatgagcccctgtttgtgcgccctcccaagggaagtcctcaatatcagcttctcactgtgccagagcacagccccagagggacgctggtgggcaacgtcacaggcgccgtggatgcggatgagggccccaacgccatcgtttattatttcattgccgctgggaatgaagagaaaaacttccacctgcagcccgatgggtgtcttcttgtactgagggacctcgaccgtgaaagggaggccatcttcagttttatcgtcaaagcgagcagcaataggagctggacacccccacgcgggccctctccgacactagacctcgtcgccgacttgactttgcaagaagttcgcgttgtgctggaagacattaacgaccagcccccgaggttcactaaggctgagtatactgccggcgtcgctacggatgctaaggtaggatccgaattgatccaggtcctcgctttggacgccgatattgggaataattcactggtgttttactccatcctggctatacactacttccgagcactcgccaacgacagcgaagacgttgggcaggtatttactatgggtagcatggacggcatcctccgaacgtttgacctgttcatggcttactctcccggttatttcgtcgtcgatattgtagctagagatctagcgggccataacgacaccgccatcatcgggatctacatcctgagggacgaccagagagtgaaaatcgtcataaacgaaattccagaccgggtgagggggttcgaggaagagttcatacatctcctgagtaacattacaggcgccatcgtcaacacggacaacgttcagttccacgtagacaagaaaggacgggtcaactttgcacagactgaactgttgattcacgtcgttaaccgggacactaacagaattttagacgtagacagggtgatccagatgatagacgaaaataaggagcaactgagaaatctattcaggaactataatgtacttgacgtccagccagccattagcgtccggcttcccgacgacatgtctgctctgcaaatggccatcattgtcctggccattctcttgttcctggctgcaatgctctttgtcctgatgaattggtactacagaacagtgcataagagaaagttgaaagcgatcgtcgcgggatcagctggtaatcgggggttcattgacattatggatatgcctaatactaataaatactcctttgatggagcaaacccagtctggctggacccgttctgtcgcaacctggaactagcagcccaggccgaacacgaagacgaccttcctgaaaacttgtccgaaatagcggacttatggaactcacccaccaggacacatggcacatttggacgcgaacctgctgccgtgaaacccgatgacgaccggtacctgcgcgccgctatccaggagtatgacaatattgcaaaactaggccagatcattcgagagggcccgatcaagggatcgttactaaaggtggttctggaggattacctcagactcaaaaagctcttcgcccagaggatggtgcagaaggcaagcagctgtcattcctctatttccgagttgatccagacagaattagacgaagaacccggtgaccactctccagggcagggcagcctccggtttcgtcacaaaccaccagtggaattgaaggggcccgatgggatacacgtggtgcacggtagtacagggactttacttgctactgacctcaattctctgccagaagaagaccagaagggactgggcaggtctttagagacactgacagctgccgaagccacagctttcgagcgaaatgcgcgaactgagagcgccaagtccactcccctgcataagctgcgggacgtgatcatggagaccccactggagatcacagagctatag

SEQ ID NO: 291436 - DNA, 10079 bp, Artificial Sequence
  derived and/or modified sequence
atgggtcgacatgtggccacatcatgtcacgtggcctggctgctggttttgatttccgggtgttggggacaggtcaacagactccctttctttacaaatcacttttttgacacttatctgctcatttccgaggacacacctgttgggtcttccgtgacacaactgttggcccaggacatggacaatgatcctctcgtgtttggggtctcaggagaggaagccagtagattttttgcggttgagcccgacaccggagtagtgtggctacgacaacccctcgatagggaaacaaagtcagaattcacggtggaattctctgtaagtgaccaccagggggtgatcacacgaaaagtgaacattcaggttggagacgtgaacgataacgctccgacgtttcataaccagccttattccgtcagaattccagaggttggggcaaccggtaatactcccgtgggcactccgatcttcatcgtaaacgccactgaccccgacctgggcgcaggagggagtgtcctctatagttttcagccgcctagccaattttttgccattgacagcgccaggggcatcgtgacagtgatccgggagcttgattatgagacgactcaggcataccaactgactgtcaatgcaaccgatcaagacaaaactcggcctttatcaacccttgccaacctggcgattataatcaccgacgtgcaggatatggaccccatcttcatcaacttaccctactctaccaatatttacgagcacagtcctcctgggactaccgtcagaattatcacagccattgatcaggacaaaggcaggcctaggggtattggctacaccatcgtcagcgtggccggtaataccaattcaatcttcgctctcgactacattagcggcgtcctgaccttaaatggcctgctagatcgggaaaacccattatacagtcatggctttattctgaccgtgaaaggcacagagttaaacgatgaccggaccccatccgatgccacagtgactaccacattcaatatcttagtgatcgacataaacgataacgctccagagtttaactcctctgagtactcagtagctatcacggaactggcacaggtcggcttcgcactcccactgttcatacaggttgtagataaagacgagggcttaaattcaatgttcgaagtgtacctcgtgggcaacaactcgcaccattttattatatccccgacttctgtccagggaaaggctgacatccggatccgcgtggccatcccactagactatgagactgttgacagatatgactttgacctgtttgccaatgaatccgtccctgaccacgtcggatatgccaaggtaaaaattactttaatcaatgagaacgataatcgaccaattttttcccagccgctctacaatatatccctgtacgaaaacgtgaccgttggaaccagcgtgttgacagtgctggccacggataatgatgcgggaacattcggagaggttagctacttcttttcagacgaccccgataggttttccttggataaggataccggactgattatgctcattgcaaggctagactacgagctcatccagcgcttcacgctaaccatcatagctcgcgatggagggggtgaggagacaaccggtcgcgtccgtattaacgttctcgacgtcaatgataatgtgccgacatttcagaaagacgcctacgtgggggctctgagagaaaatgaaccatctgttacccagttggtaagacttcgcgcaaccgatgaggacagtccccctaataatcagatcacttacagcattgtgtccgcctccgctttcggcagctacttcgacattagcttgtacgaggggtacggagtgatctctgtgtccagaccgttggactacgagcagatttcaaacggtctgatttacctgactgtcatggccatggacgctgggaacccacccctgaattctaccgtgccagtgaccattgaagtcttcgacgagaatgataacccccctacattcagcaaaccagcttattttgttagtgttgtggaaaatataatggccggagccaccgtgctgtttctcaacgccactgacctcgatcgatcacgcgagtacggtcaagagtcgattatttactccctggaaggatctactcaattccggataaatgccagaagcggcgaaataaccacaacgagcttgctcgacagggaaaccaagagcgaatacattctaatcgttagggcagtggatgggggtgtggggcacaatcagaagacagggatcgcaaccgtgaatatcacgctcttggatattaacgacaatcaccccacttggaaggacgctccttattacatcaatctggtggaaatgactccacctgatagtgatgtgacgacagtcgtagccgtcgatccggatctgggagaaaatggcacgctggtgtattccatccaacctccgaataaattctattccttaaactcgactacagggaagattcggacaacccatgctatgctggatcgggagaatccagatccacacgaagccgagctgatgcgcaagattgtggtctcagtcacagattgcggcaggcccccactgaaagccactagcagcgctacagtattcgtcaacctcctggacctgaatgataacgatccgacgtttcaaaatttgccttttgtggcagaggtgttagaaggaatacccgctggcgtatccatctaccaggtggtggctatcgatttagacgagggcctcaacggactggtcagttataggatgcctgtcggcatgcccaggatggattttctaatcaactcctcctcaggcgtggtcgttactaccaccgaactggacagggaaaggattgctgaataccagcttagagtcgtcgcttctgatgcgggaacccctactaaatcttccacatcaacattgacaatccacgttcttgacgtgaatgacgagactccaaccttctttcccgctgtgtataatgtgtccgtgtccgaggacgtgcccagagaatttagggttgtgtggctcaattgtacggataatgatgtggggctgaacgctgagctatcttacttcatcactggcggaaacgtagacggcaagttctcagtgggttatcgagatgcagtggtccgcactgtagttggcctcgatagggaaactacagccgcttatatgctcatcttggaagcgattgacaacggccctgtgggcaagcgacacacgggcaccgccactgtgttcgttaccgttctcgatgtaaatgacaatagacctatctttctgcagtcaagctatgaagcatctgtgcccgaggacataccggagggacacagtattttgcagctcaaggccactgacgcagatgagggggagttcggaagggtgtggtaccgcattctacacggcaaccacggtaataacttccggattcatgtgagcaatggcctccttatgcggggaccacggccattagatagggagagaaactcatcccacgttctcatcgttgaggcatacaatcatgatttaggccctatgcgttcaagtgtccgtgtaatagtctacgtggaagatatcaacgacgaggcgccagtgtttactcagcagcaatactcaagactaggcctccgcgagacggcaggtatcggtacatcagttattgttgtacaggccaccgaccgtgactcgggcgacgggggtctggttaactataggattctttctggcgctgaagggaaatttgagatcgatgagagcacgggtctgattatcactgtgaactatctcgactacgaaactaaaacttcttacatgatgaacgtctctgctacggaccaggcgccaccattcaatcaggggttttgctctgtgtacatcactcttcttaatgaactagacgaggcagtccaattcagcaatgcgtcatacgaggctgccattctggagaacttagccctgggaactgagatcgtgcgagtccaggcctattctattgacaatcttaaccaaattacatatcgtttcaatgcctacaccagcactcaggctaaggctctattcaagatcgatgccattaccggcgttatcacggttcagggattagttgatcgcgagaagggagacttctacacattgactgtggtagccgacgatggtggtcccaaagtagattcaaccgtacaggtgtatataaccgtgctggacgaaaacgataactcacctagatttgatttcacatccgattccgccgtatccatcccagaagactgccccgtgggacaacgagtggctacagtaaaggcttgggatcctgatgccggaagcaacgggcaggtagtgttttctctcgcatccggtaatatcgctggggcttttgaaattgtgaccacaaacgattcaatcggcgaggtcttcgtggccagaccacttgatcgagaagagctcgaccattacattttacaggtggtggcgagcgaccggggtaccccgcctaggaaaaaagaccacatcctgcaagtaacaatcctggacatcaacgacaaccctccggttattgaaagcccatttggctataacgtctcggtgaatgaaaacgtgggcggaggcacagctgtggtgcaagtgagggccacggaccgggacattgggatcaactcggtgttgagctactatatcacagaggggaataaagacatggcattccggatggacagaatttcgggggaaattgcaacccgccctgctcctcctgatagagagcgacagtctttttaccacctggtggccacagtggaggatgagggcacgcccacgctttctgccaccactcacgtgtacgtgaccatcgtggatgagaacgacaatgctccaatgttccaacagcctcattatgaggtcctgttggatgagggccctgatacgctcaacacaagtcttatcacaatccaggcgctcgatcttgacgaaggcccaaacggaactgtcacgtacgcgatagttgcgggtaacattgtgaacacttttcggatcgaccgacacatgggagtcatcactgcggctaaggagctggactatgagatttcacatggcaggtacactctgatcgtgacagccaccgatcaatgcccgattttgtcacaccggctcacctccactacaaccgtgcttgttaacgtgaacgatattaatgacaatgtccctacttttcctagagattatgaaggccctttcgaagtaaccgaaggccagccgggaccacgcgtatggacatttctggcccacgacagggactctggacccaatgggcaggttgagtattccataatggatggggatcccttgggtgagttcgtgatcagtccggtcgagggcgtgcttagggtcagaaaagacgtggagttggatcgtgagacaattgccttttacaatttaaccatttgcgcccgagatcggggaatgccacccttgagttccacgatgctggtcgggattagagtccttgacataaacgataatgacccagtgctgctcaatttgcccatgaatattactatttcggagaactcccctgtgtcttctttcgtcgctcacgttctggcctccgatgctgatagcggttgcaatgccagactgactttcaacatcactgcaggcaaccgggaaagggctttttttattaacgccactactggcatcgtgacagtgaatcgaccccttgatagagagaggatccctgagtacaaattgacaatttccgttaaggataatccagaaaaccctcggattgccagaagagactacgacctgcttctgatttttctgtccgacgagaacgacaatcaccccctgttcacgaaatcgacctaccaggccgaagtcatggagaacagccctgctggcacccccctgaccgtgctcaatggtccaattctagcccttgatgcggatcaagatatctacgctgtggtgacttaccagctccttggggctcagtccggcctgtttgatattaattcatctaccggggttgtcacagtgcgaagtggcgttatcatcgaccgggaagccttctcaccaccgatattagaactgctgctgcttgcagaagacatcgggctgctgaattccacggcccatctcctcattacgatactcgatgacaatgataacagaccaacttttagtcctgctactcttactgttcatctcttagagaattgtccacccggtttctcagtgttgcaagtgacagcaacagatgaggatagcggtctcaatggtgaactagtataccggatcgaggcgggtgcacaggacaggttcctcatccacctagtgacaggcgtcatcagagtcggcaacgctacaattgacagggaggagcaggaaagctaccggctgaccgtcgttgcaaccgaccggggtacggtgcctttaagcggtactgcgattgtgactatcctgatcgacgacattaacgacagtcgtccagaatttctcaatccaattcagaccgtgagcgttcttgaaagcgcagaaccagggacggtaatcgctaatatcacggccattgaccacgatctgaatccaaaattggaataccacatagtgggtattgtggctaaagacgataccgaccggctcgtcccaaatcaggaagacgcttttgcagtcaatatcaacactggtagcgttatggtcaagagccccatgaacagagagctggttgccacctacgaggtcaccctttcagtcatcgataacgctagcgacctgcctgagcgatcagtctccgtgcccaatgctaaactgacggttaatgtgttggacgtgaacgataatacaccccagtttaaacccttcggaatcacctactatatggagcggatcctggaaggcgctacacctggcactaccctcatagccgtggctgctgtggaccctgataaaggactcaacggcctcgttacgtacacactgctcgacttggttccccctggctacgtacagctggaggacagcagcgcaggcaaggtgattgctaaccgaactgtggactacgaagaggtccactggctcaattttacggttagggccagcgacaatggctccccaccacgagcggcagaaatacccgtctacctagagatcgtcgatattaatgacaataatcccatcttcgaccagccctcttaccaggaggcagtgtttgaagatgtgccggtcgggactattattctcacagtcaccgctacggacgctgactcgggaaatttcgcgctgattgagtattccctcggcgacggagagtctaagttcgccatcaatcccaccaccggtgacatctatgtactgtcttctttagatagagagaagaaggaccattatatccttacggccctcgctaaagacaatccaggcgacgtcgcatctaacagaagagagaatagcgtgcaggtcgtgatacaagtgctcgatgtgaatgactgtcgaccccagttttccaagccacagtttagcacctccgtatatgaaaatgaacccgctggcacttcagtgatcactatgatggcgacggaccaggacgaggggcctaatggagagctcacctattctctggagggtccaggtgtggaagcctttcatgtcgacatggacagcgggttggttaccacccagcggccactccagtcctatgaaaaattttcacttaccgtagtggctacagatggcggagaacctccactgtggggaacaacaatgctgctggttgaggtgatagacgttaatgacaacagaccggttttcgttaggcccccaaatggaactatcctgcacatacgggaggaaattccacttaggtccaacgtgtatgaagtttatgctacagataaagatgaggggctgaacggcgcagttcggtattcctttctcaagactgccggaaaccgcgactgggagttttttattatagaccccatctccggtctcatccaaaccgcccagcgcttggatagggagtcccaggccgtatacagcttgatcttggtggcaagcgacctgggacagcccgtcccatacgagacaatgcaacccctgcaggttgcactggaagatatcgacgataacgagccactgttcgtacgaccaccaaaaggttctccacagtaccagcttctgacagtccccgaacatagccctagaggcacacttgtcggcaacgtgaccggtgcagttgatgcggacgagggaccaaacgccatcgtgtattacttcattgctgctggcaacgaagagaagaatttccacttgcaacccgacgggtgcctgctggtattgcgggatctggaccgcgaaagagaagcgatattctccttcatcgtgaaggcatcgtccaatcggagttggacacctcctcgcggaccaagtcctaccctggaccttgtggctgaccttacactgcaagaagtcagagttgtcctggaggacattaatgatcagccgccaagatttacaaaggccgaatatactgccggagtcgccaccgatgcaaaagttggctcagagttaattcaggtgctggctctggatgccgacatagggaacaattcgctagtattttattcaatcttagccatacactacttccgggctctagcaaacgatagcgaggatgtgggacaggtattcacgatgggttccatggacggcatcctacgaaccttcgatctcttcatggcttatagccctggctattttgttgttgatattgtggctcgcgacttggccggacacaatgacacagcaattattgggatttatatcctgcgtgatgaccagcgggttaaaatagtcatcaatgagatcccagatcgagtccgtggattcgaggaggagtttatccacctcttgtccaacattactggcgcaatcgtgaatactgataacgttcagtttcatgtggacaaaaagggtcgtgttaactttgctcagaccgagcttctcatccatgtggtgaatagagatacaaataggattctggacgtcgatagagttatccagatgattgacgagaacaaagaacaattaaggaacttgtttaggaactacaacgtgctcgatgtacaacccgcaatttctgtgaggttgccggatgatatgtccgccttgcagatggctattattgtcctcgccatcctcctctttctagctgccatgctattcgttctgatgaactggtattaccggaccgtccacaagagaaaattgaaggcaattgtagccggatccgctggtaaccggggtttcatcgacatcatggacatgccaaacaccaacaagtatagctttgatggagcaaaccctgtatggctcgacccgttctgtcgcaaccttgagttggcggctcaagccgagcatgaagatgacctccccgaaaacctttctgagatcgccgacctgtggaattccccaaccaggacccacggcacattcggtagggaacccgctgccgtaaagcccgacgatgaccgctaccttcgagcagccatccaggagtatgacaatatagccaaactgggccagattataagagaaggccctatcaagggtagtcttctgaaggtggtcctggaagactatcttcgcctgaagaaactgtttgcgcagcggatggttcagaaagcatcgtcatgtcattcctcgattagtgaattaattcagaccgagctcgacgaggaaccgggagaccatagtccaggacaggggagcctcaggtttcggcacaagcctcctgtggagttaaagggcccagatgggatacatgtggtccatgggtctactggtacactcctggccacagacctcaatagtttgcctgaagaggatcagaaggggctggggagaagccttgagaccttgactgcagcagaggccacagcgtttgagaggaatgcccgaaccgagagcgccaagagtacccccctgcataaactgcgcgatgtcattatggagacccccctggagataaccgagcttta

SEQ ID NO: 291437 - DNA, 11079 bp, Artificial Sequence
  derived and/or modified sequence
gcggcggcggctcgggagagagggacgcgggctgcaggcgcgatgcttggctagaggacgcgtccgacggcggccggacgctgaggtggtcggggctagtcagcccggcctgggcatggagcgcggggtggcagagcctctggacgtttggggcgcgcccagtccgagcccccggcgcgcctgaagttgcgagcggcgagcggcgagcggcgagcggcccgcggagacccaggagctgccggcacgccgcggatgagccttcgcgccggcgggaagacgcggcggtggccagggccagagcaggcggcccgcgggggccgatccggcggagagcagagcccgaggcgaggcgaggcgcggcgccgctgcacacacgcacacggagccatggggcgccatgttgccaccagctgccacgtggcctggcttttggtgctgatctctggatgctggggccaggtgaaccggctgcccttcttcaccaaccacttctttgatacatacctgctgatcagcgaggacacgcctgtgggttcttctgtgacccagttgctggcccaagacatggacaatgaccccctggtgtttggcgtgtctggggaggaggcctctcgcttctttgcagtggagcctgacactggcgtggtgtggctccggcagccactggacagagagaccaagtcagagttcaccgtggagttctctgtcagcgaccaccagggggtgatcacacggaaggtgaacatccaggttggggatgtgaatgacaacgcgcccacatttcacaatcagccctacagcgtccgcatccctgaggtaggagccactgggaatacaccagtggggacgcccatcttcatcgtgaatgccacagaccccgacttgggggcagggggcagcgtcctctactccttccagcccccctcccaattcttcgccattgacagcgcccgcggtatcgtcacagtgatccgggagctggactacgagaccacacaggcctaccagctcacggtcaacgccacagatcaagacaagaccaggcctctgtccaccctggccaacttggccatcatcatcacagatgtccaggacatggaccccatcttcatcaacctgccttacagcaccaacatctacgagcattctcctccgggcacgacggtgcgcatcatcaccgccatagaccaggataaaggacgtccccggggcattggctacaccatcgtttcagggaataccaacagcatctttgccctggactacatcagcggagtgctgaccttgaatggcctgctggaccgggagaaccccctgtacagccatggcttcatcctgactgtgaagggcacggagctgaacgatgaccgcaccccatctgacgctacagtcaccacgaccttcaatatcctggttattgacatcaatgacaatgccccggagttcaacagctccgagtacagcgtggccatcactgagctggcacaggtcggctttgcccttccactcttcatccaggtggtggacaaggatgagggcctgaacagcatgtttgaggtgtacttggtggggaacaactcccaccacttcatcatctccccgacctccgtccaggggaaggcggacattcgtattcgggtggccatcccactggactacgagaccgtggaccgctacgactttgatctctttgccaatgagagtgtgcctgaccatgtgggctatgccaaggtgaagatcactctcatcaatgaaaatgacaaccggcccatcttcagccagccactgtacaacatcagcctgtacgagaacgtcaccgtggggacctctgtgctgacagtcctggcaactgacaatgatgcaggcacctttggggaagtcagctacttcttcagtgatgaccctgacaggttctcgctggacaaggacacgggactcatcatgctgattgccaggctggactatgagctcatccagcgcttcaccctgacgatcattgcccgggacgggggcggcgaggagaccacaggccgggtcaggatcaatgtgttggatgtcaacgacaacgtgcccaccttccagaaggatgcctacgtgggtgctctgcgggagaacgagccttctgtcacacagctggtgcggctccgggcaacagatgaagactcccctcccaacaaccagatcacctacagcattgtcagtgcatctgcctttggcagctacttcgacatcagcctgtacgagggctatggagtgatcagcgtcagtcgccccctggattatgaacagatatccaatgggctgatttatctgacggtcatggccatggatgctggcaacccccctctcaacagcaccgtccctgtcaccatcgaggtgtttgatgagaatgacaaccctcccaccttcagcaagcccgcctacttcgtctccgtggtggagaacatcatggcaggagccacggtgctgttcctgaatgccacagacctggaccgctcccgggagtacggccaggagtccatcatctactccttggaaggctccacccagtttcggatcaatgcccgctcaggggaaatcaccaccacgtctctgcttgaccgagagaccaagtctgaatacatcctcatcgttcgcgcagtggacgggggtgtgggccacaaccagaaaactggcatcgccaccgtaaacatcaccctcctggacatcaatgacaaccaccccacgtggaaggacgcaccctactacatcaacctggtggagatgacccctccagactctgatgtgaccacggtggtggctgttgacccagacctgggggagaatggcaccctggtgtacagcatccagccacccaacaagttctacagcctcaacagcaccacgggcaagatccgcaccacccacgccatgctggaccgggagaaccccgacccccatgaggccgagctgatgcgcaaaatcgtcgtctctgttactgactgtggcaggccccctctgaaagccaccagcagtgccacagtgtttgtgaacctcttggatctcaatgacaatgaccccacctttcagaacctgccttttgtggccgaggtgcttgaaggcatcccggcgggggtctccatctaccaagtggtggccatcgacctcgatgagggcctgaacggcctggtgtcctaccgcatgccggtgggcatgccccgcatggacttcctcatcaacagcagcagcggcgtggtggtcaccaccaccgagctggaccgcgagcgcatcgcggagtaccagctgcgggtggtggccagtgatgcaggcacgcccaccaagagctccaccagcacgctcaccatccatgtgctggatgtgaacgacgagacgcccaccttcttcccggccgtgtacaatgtgtctgtgtccgaggacgtgccacgcgagttccgggtggtctggctgaactgcacggacaacgacgtgggcctcaatgcagagctcagctacttcatcacaggtggcaacgtggatgggaagttcagcgtgggttaccgcgatgccgttgtgagaaccgtggtgggcctggaccgggagaccacagccgcctacatgctcatcctggaggccatcgacaacggccctgtagggaagcgacacacgggcacagccaccgtgttcgtcactgtcctggatgtgaatgacaaccggcccatctttctgcagagcagctatgaggccagcgtccctgaggacatccctgaaggccacagcatcttgcagctgaaagccacggacgcagatgagggcgagtttgggcgtgtgtggtaccgcatcctccatggtaaccatggcaacaacttccggatccatgtcagcaatgggctcctgatgcgagggccccggcccctggaccgggagcggaactcatcccacgtgctgatagtggaggcctacaaccacgacctgggccccatgcggagctccgtcagggtgattgtgtacgtggaggacatcaacgatgaggcccccgtgttcacacagcagcagtacagccgtctggggcttcgagagaccgcaggcattggaacgtcagtcatcgtggtccaagccacagaccgagactctggggatggtggcctggtgaactaccgcatcctgtcgggcgcagaggggaagtttgagattgacgagagcacagggcttatcatcaccgtgaattacctggactacgagaccaagaccagctacatgatgaatgtgtcggccactgaccaggccccgcccttcaaccagggcttctgcagcgtctacatcactctgctcaacgagctggacgaggccgtgcagttctccaatgcctcatacgaggctgccatcctggagaatctggcactgggtactgagattgtgcgggtccaggcctactccatcgacaacctcaaccaaatcacgtaccgcttcaacgcctacaccagcacccaggccaaagccctcttcaagatagacgccatcacgggtgtgatcacagtccagggcctggtggaccgtgagaagggcgacttctataccttgacagtggtggcagatgacggcggccccaaggtggactccaccgtgaaggtctacatcactgtgctggacgagaatgacaacagcccccggtttgacttcacctccgactcggcggtcagcatacccgaggactgccctgtgggccagcgagtggctactgtcaaggcctgggaccctgatgctggcagcaatgggcaggtggtcttctccctggcctctggcaacatcgcgggggcctttgagatcgtcaccaccaatgactccattggcgaagtgtttgtggccaggcccctggacagagaagagctggatcactacatcctccaggttgtggcttctgaccgaggcacccctccacggaagaaggaccacatcctgcaggtgaccatcctggacatcaatgacaaccctccagtcatcgagagcccctttggatacaatgtcagtgtgaatgagaacgtgggtggaggtactgctgtggtccaggtgagagccactgaccgtgacatcgggatcaacagtgttctgtcctactacatcaccgagggcaacaaggacatggccttccgcatggaccgcatcagcggtgagatcgccacacggcctgccccgcctgaccgcgagcgccagagcttctaccacctggtggccactgtggaggacgagggcaccccaaccctgtcggccaccacgcacgtgtacgtgaccattgtggatgagaatgataacgcgcccatgttccagcagccccactatgaggtgctgctggatgagggcccagacacgctcaacaccagcctcatcaccatccaggcactggacctggatgagggtcccaacggcacagtcacctatgccatcgtcgcaggcaacatcgtcaacaccttccgcatcgacagacacatgggtgtcatcactgctgccaaagagctggactacgagatcagccacggccgctacaccctgatcgtcactgccacagaccagtgccccatcttatcccaccgcctcacctctaccaccacggtgcttgtgaatgtgaatgacatcaacgacaatgtgcctaccttcccccgggactatgagggaccatttgaagtcactgagggccagccggggcccagagtgtggaccttcctggcccatgaccgagactcaggacccaacgggcaggtggagtacagcatcatggatggagaccctctgggggagtttgtgatctctcctgtggagggggtgctaagggtccggaaggacgtggagctggaccgggagaccatcgccttctacaacctgaccatctgtgcccgtgaccgggggatgcccccactcagctccacaatgctggtggggatccgggtgctggacatcaacgacaacgaccctgtgctgctgaacctgcccatgaacatcaccatcagcgagaacagccctgtctccagctttgtcgcccatgtcctggccagtgacgctgacagtggctgcaatgcacgcctcaccttcaacatcactgcgggcaaccgcgagcgggccttcttcatcaatgccacgacagggatcgtcactgtgaaccggcccctggaccgcgagcggatcccagagtacaagctgaccatttctgtgaaggacaacccggagaatccacgcatagccaggagggattatgacttgcttctgatcttcctttctgatgagaatgacaaccaccccctcttcactaaaagcacctaccaggcagaggtgatggaaaactctcccgctggcacccctctcacggtgctcaatgggcccatcctggccctggatgcagaccaagacatctacgccgtggtgacctaccagctgctgggtgcccagagtggcctctttgacatcaacagcagcaccggtgtggtgaccgtgaggtcaggtgtcatcattgaccgggaggcattctcgccacccatcctggagctgctgctgctggctgaggacatcgggctgctcaacagcacggcccacctgctcatcaccatcctggatgacaatgacaaccggcccacctttagccctgccaccctcactgtccatctgctagagaactgcccgcctggattctcagtccttcaagtcacagccacagatgaggacagtggcctcaatggggagctggtctaccgaatagaagctggggctcaggaccgcttcctcattcatctggtcaccggggtcatccgtgttggtaatgccaccatcgacagagaggagcaggagtcctacaggctaacggtggtggccaccgaccggggcaccgttcctctctcgggcacagccattgtcaccattctgatcgatgacatcaatgactcccgccccgagttcctcaaccccatccagacagtgagcgtgctggagtcggctgagccaggcactgtcattgccaatatcacggccattgaccacgacctcaacccaaagctagagtaccacattgtcggcattgtggccaaggacgacactgatcgcctggtgcccaaccaggaggacgcctttgctgtgaatatcaacacaggatctgtaatggtgaagtcccccatgaatcgggagctggttgccacctatgaggtcactctctcagtgattgacaatgccagcgacctaccagagcgctctgtcagtgtgccaaatgccaagctgactgtcaacgtcctggacgtcaatgacaatacgccccagttcaagccctttgggatcacctactacatggagcggatcctggagggggccacccctgggaccacactcattgctgtggcagccgtggaccctgacaagggccttaatgggctggtcacctacaccctgctggacctggtgcccccagggtatgtccagctggaggactcctcggcagggaaggtcattgccaaccggacagtggactacgaggaggtgcactggctcaactttaccgtgagggcctcagacaacgggtccccgccccgggcagctgagatccctgtctacctggaaatcgtggacatcaatgacaacaaccccatctttgaccagccctcctaccaggaggctgtctttgaggatgtgcctgtgggcacaatcatcctgacagtcactgccactgatgctgactcaggcaactttgcactcattgagtacagccttggagatggagagagcaagtttgccatcaaccccaccacgggtgacatctatgtgctgtcttctctggaccgggagaagaaggaccactatatcctgactgccttggccaaagacaaccctggggatgtagccagcaaccgtcgcgaaaattcagtgcaggtggtgatccaagtgctggatgtcaatgactgccggccacagttctccaagccccagttcagcacaagcgtgtatgagaatgagccggcgggcacctcggtcatcaccatgatggccactgaccaggatgaaggtcccaatggagagttgacctactcacttgagggccctggcgtggaggccttccatgtggacatggactcgggcttggtgaccacacagcggccactgcagtcctacgagaagttcagtctgaccgtggtggccacagatggtggagagcccccactctggggcaccaccatgctcctggtggaggtcatcgacgtcaatgacaaccgccctgtctttgtgcgcccacccaacggcaccatcctccacatcagagaggagatcccgctgcgctccaacgtgtacgaggtctacgccacggacaaggatgagggcctcaacggggcggtgcgctacagcttcctgaagactgcgggcaaccgggactgggagttcttcatcatcgacccaatcagcggcctcatccagactgctcagcgcctggaccgcgagtcgcaggcggtgtacagcctcatcttggtggccagcgacctgggccagccagtgccatacgagactatgcagccgctgcaggtggccctggaggacatcgatgacaacgaaccccttttcgtgaggcctccaaaaggcagcccccagtaccagctgctgacagtgcctgagcactcaccacgcggcaccctcgtgggcaacgtgacaggcgcagtggatgcagatgagggccccaacgcgatcgtgtactacttcatcgcagccggcaacgaagagaagaacttccatctgcagcccgatgggtgtctgctggtgctgcgggacctggaccgggagcgagaagccatcttctccttcatcgtcaaggcctccagcaatcgcagctggacacctccccgtggaccctccccaaccctcgacctggttgctgacctcacactgcaggaggtgcgcgttgtgctagaggacatcaacgaccagccaccacgcttcaccaaggctgagtacactgcaggggtggccaccgacgccaaggtgggctcagagttgatccaggtgctggccctggatgcagacattggcaacaacagccttgtcttctacagcattctggccatccactacttccgggcccttgccaacgactctgaagatgtgggccaggtcttcaccatggggagcatggacggcattctgcgcaccttcgacctcttcatggcctacagccccggctacttcgtggtggacattgtggcccgagacctggcaggccacaacgacacggccatcatcggcatctacatcctgagggacgaccagcgcgtcaagatcgtcattaacgagatccccgaccgtgtgcgcggcttcgaggaggagttcatccacctgctctccaacatcactggggccattgtcaatactgacaatgtgcagttccatgtggacaagaagggccgggtgaactttgcgcagacagaactgcttatccacgtggtgaaccgcgataccaaccgcatcctggacgtggaccgggtgatccagatgatcgatgagaacaaggagcagctacggaatcttttccggaactacaacgtcctggacgtgcagcctgccatctctgtccggctgccggatgacatgtctgccctgcagatggcgatcatcgtcctggctatcctcctgttcctggccgccatgctctttgtcctcatgaactggtactacaggactgtacacaagaggaagctcaaggccattgtggctggctcagctgggaatcgtggcttcatcgacatcatggacatgcctaacaccaacaagtactcctttgatggagccaaccctgtgtggctggatcccttctgtcggaacctggagctggccgcccaggcggagcatgaggatgacctaccggagaacctgagtgagatcgccgacctgtggaacagccccacgcgcacccatggaacttttgggcgtgagccagcagctgtcaagcctgatgatgaccgatacctgcgggctgccatccaggagtatgacaacattgccaagctgggccagatcattcgtgaggggccaatcaagggctcgctgctgaaggtggtcctggaggattacctgcggctcaaaaagctctttgcacagcggatggtgcaaaaagcctcctcctgccactcctccatctctgagctgatacagactgagctggacgaggagccaggagaccacagcccagggcagggtagcctgcgcttccgccacaagccaccagtggagctcaaggggcccgatgggatccatgtggtgcacggcagcacgggcacgctgctggccaccgacctcaacagcctgcccgaggaagaccagaagggcctgggccgctcgctggagacgctgaccgctgccgaggccactgccttcgagcgcaacgcccgcacagaatccgccaaatccacacccctgcacaaacttcgcgacgtgatcatggagacccccctggagatcacagagctgtgactagacagggaagccttgtgggtgtgagcagcacccatccaccgtcccctcccagggagcaagggcagggacagggccggtcgggggggaccctccaaggccaggccttggggacaaccttggcttggccctggcagcccgcatcagctgctcagatcccacttttgccagacgctcattcagcatctgacctctaccttcataagatctgttatttttataagaaaaccaaacaaaaatgttaagcatctaaggacaaggtaaggagggtcactggggcccaagagtctggggaccagcttggctcaggctgagctgaaagaggccaaacaggccctcctccctcccagctccaccccgcaagcaccatcccctccggctaagcaggcgcaagggaggcccagcgcggacatcccctgctggccggacacccgactccagtccaagtctcgctacatttccgccacatccctctctgctggacgtccaggtggaggtggcatccccacgtggacaagaaagtcaatgtcaatgaacaagcattctctccatttcactggcttcccaaatgtgtgcccagcttataaacagaagtgactgatgttccctccggttttg

SEQ ID NO: 291438 - DNA, 11137 bp, Artificial Sequence
  derived and/or modified sequence
gcggcggcggcggctcgggagagagggacgcgggctgcaggcgcgatgcttggctagaggacgcgtccgacggcggccggacgctgaggtggtcggggctagtcagcccggcctgggcatggagcgcggggtggcagagcctctggacgtttggggcgcgcccagtccgagcccccggcgcgcctgaagttgcgagcggcgagcggcgagcggcgagcggcccgcggagacccaggagctgccggcacgccgcggatgagccttcgcgccggcgggaagacgcggcggtggccagggccagagcaggcggcccgcgggggccgatccggcggagagcagagcccgaggcgaggcgaggcgcggcgccgctgcacacacgcacacggagccatggggcgccatgttgccaccagctgccacgtggcctggcttttggtgctgatctctggatgctggggccaggtgaaccggctgcccttcttcaccaaccacttctttgatacatacctgctgatcagcgaggacacgcctgtgggttcttctgtgacccagttgctggcccaagacatggacaatgaccccctggtgtttggcgtgtctggggaggaggcctctcgcttctttgcagtggagcctgacactggcgtggtgtggctccggcagccactggacagagagaccaagtcagagttcaccgtggagttctctgtcagcgaccaccagggggtgatcacacggaaggtgaacatccaggttggggatgtgaatgacaacgcgcccacatttcacaatcagccctacagcgtccgcatccctgaggtaggagccactgggaatacaccagtggggacgcccatcttcatcgtgaatgccacagaccccgacttgggggcagggggcagcgtcctctactccttccagcccccctcccaattcttcgccattgacagcgcccgcggtatcgtcacagtgatccgggagctggactacgagaccacacaggcctaccagctcacggtcaacgccacagatcaagacaagaccaggcctctgtccaccctggccaacttggccatcatcatcacagatgtccaggacatggaccccatcttcatcaacctgccttacagcaccaacatctacgagcattctcctccgggcacgacggtgcgcatcatcaccgccatagaccaggataaaggacgtccccggggcattggctacaccatcgtttcagttgcagggaataccaacagcatctttgccctggactacatcagcggagtgctgaccttgaatggcctgctggaccgggagaaccccctgtacagccatggcttcatcctgactgtgaagggcacggagctgaacgatgaccgcaccccatctgacgctacagtcaccacgaccttcaatatcctggttattgacatcaatgacaatgccccggagttcaacagctccgagtacagcgtggccatcactgagctggcacaggtcggctttgcccttccactcttcatccaggtggtggacaaggatgagggcctgaacagcatgtttgaggtgtacttggtggggaacaactcccaccacttcatcatctccccgacctccgtccaggggaaggcggacattcgtattcgggtggccatcccactggactacgagaccgtggaccgctacgactttgatctctttgccaatgagagtgtgcctgaccatgtgggctatgccaaggtgaagatcactctcatcaatgaaaatgacaaccggcccatcttcagccagccactgtacaacatcagcctgtacgagaacgtcaccgtggggacctctgtgctgacagtcctggcaactgacaatgatgcaggcacctttggggaagtcagctacttcttcagtgatgaccctgacaggttctcgctggacaaggacacgggactcatcatgctgattgccaggctggactatgagctcatccagcgcttcaccctgacgatcattgcccgggacgggggcggcgaggagaccacaggccgggtcaggatcaatgtgttggatgtcaacgacaacgtgcccaccttccagaaggatgcctacgtgggtgctctgcgggagaacgagccttctgtcacacagctggtgcggctccgggcaacagatgaagactcccctcccaacaaccagatcacctacagcattgtcagtgcatctgcctttggcagctacttcgacatcagcctgtacgagggctatggagtgatcagcgtcagtcgccccctggattatgaacagatatccaatgggctgatttatctgacggtcatggccatggatgctggcaacccccctctcaacagcaccgtccctgtcaccatcgaggtgtttgatgagaatgacaaccctcccaccttcagcaagcccgcctacttcgtctccgtggtggagaacatcatggcaggagccacggtgctgttcctgaatgccacagacctggaccgctcccgggagtacggccaggagtccatcatctactccttggaaggctccacccagtttcggatcaatgcccgctcaggggaaatcaccaccacgtctctgcttgaccgagagaccaagtctgaatacatcctcatcgttcgcgcagtggacgggggtgtgggccacaaccagaaaactggcatcgccaccgtaaacatcaccctcctggacatcaatgacaaccaccccacgtggaaggacgcaccctactacatcaacctggtggagatgacccctccagactctgatgtgaccacggtggtggctgttgacccagacctgggggagaatggcaccctggtgtacagcatccagccacccaacaagttctacagcctcaacagcaccacgggcaagatccgcaccacccacgccatgctggaccgggagaaccccgacccccatgaggccgagctgatgcgcaaaatcgtcgtctctgttactgactgtggcaggccccctctgaaagccaccagcagtgccacagtgtttgtgaacctcttggatctcaatgacaatgaccccacctttcagaacctgccttttgtggccgaggtgcttgaaggcatcccggcgggggtctccatctaccaagtggtggccatcgacctcgatgagggcctgaacggcctggtgtcctaccgcatgccggtgggcatgccccgcatggacttcctcatcaacagcagcagcggcgtggtggtcaccaccaccgagctggaccgcgagcgcatcgcggagtaccagctgcgggtggtggccagtgatgcaggcacgcccaccaagagctccaccagcacgctcaccatccatgtgctggatgtgaacgacgagacgcccaccttcttcccggccgtgtacaatgtgtctgtgtccgaggacgtgccacgcgagttccgggtggtctggctgaactgcacggacaacgacgtgggcctcaatgcagagctcagctacttcatcacaggtggcaacgtggatgggaagttcagcgtgggttaccgcgatgccgttgtgagaaccgtggtgggcctggaccgggagaccacagccgcctacatgctcatcctggaggccatcgacaacggccctgtagggaagcgacacacgggcacagccaccgtgttcgtcactgtcctggatgtgaatgacaaccggcccatctttctgcagagcagctatgaggccagcgtccctgaggacatccctgaaggccacagcatcttgcagctgaaagccacggacgcagatgagggcgagtttgggcgtgtgtggtaccgcatcctccatggtaaccatggcaacaacttccggatccatgtcagcaatgggctcctgatgcgagggccccggcccctggaccgggagcggaactcatcccacgtgctgatagtggaggcctacaaccacgacctgggccccatgcggagctccgtcagggtgattgtgtacgtggaggacatcaacgatgaggcccccgtgttcacacagcagcagtacagccgtctggggcttcgagagaccgcaggcattggaacgtcagtcatcgtggtccaagccacagaccgagactctggggatggtggcctggtgaactaccgcatcctgtcgggcgcagaggggaagtttgagattgacgagagcacagggcttatcatcaccgtgaattacctggactacgagaccaagaccagctacatgatgaatgtgtcggccactgaccaggccccgcccttcaaccagggcttctgcagcgtctacatcactctgctcaacgagctggacgaggccgtgcagttctccaatgcctcatacgaggctgccatcctggagaatctggcactgggtactgagattgtgcgggtccaggcctactccatcgacaacctcaaccaaatcacgtaccgcttcaacgcctacaccagcacccaggccaaagccctcttcaagatagacgccatcacgggtgtgatcacagtccagggcctggtggaccgtgagaagggcgacttctataccttgacagtggtggcagatgacggcggccccaaggtggactccaccgtgcaggtctacatcactgtgctggacgagaatgacaacagcccccggtttgacttcacctccgactcggcggtcagcatacccgaggactgccctgtgggccagcgagtggctactgtcaaggcctgggaccctgatgctggcagcaatgggcaggtggtcttctccctggcctctggcaacatcgcgggggcctttgagatcgtcaccaccaatgactccattggcgaagtgtttgtggccaggcccctggacagagaagagctggatcactacatcctccaggttgtggcttctgaccgaggcacccctccacggaagaaggaccacatcctgcaggtgaccatcctggacatcaatgacaaccctccagtcatcgagagcccctttggatacaatgtcagtgtgaatgagaacgtgggtggaggtactgctgtggtccaggtgagagccactgaccgtgacatcgggatcaacagtgttctgtcctactacatcaccgagggcaacaaggacatggccttccgcatggaccgcatcagcggtgagatcgccacacggcctgccccgcctgaccgcgagcgccagagcttctaccacctggtggccactgtggaggacgagggcaccccaaccctgtcggccaccacgcacgtgtacgtgaccattgtggatgagaatgataacgcgcccatgttccagcagccccactatgaggtgctgctggatgagggcccagacacgctcaacaccagcctcatcaccatccaggcactggacctggatgagggtcccaacggcacagtcacctatgccatcgtcgcaggcaacatcgtcaacaccttccgcatcgacagacacatgggtgtcatcactgctgccaaagagctggactacgagatcagccacggccgctacaccctgatcgtcactgccacagaccagtgccccatcttatcccaccgcctcacctctaccaccacggtgcttgtgaatgtgaatgacatcaacgacaatgtgcctaccttcccccgggactatgagggaccatttgaagtcactgagggccagccggggcccagagtgtggaccttcctggcccatgaccgagactcaggacccaacgggcaggtggagtacagcatcatggatggagaccctctgggggagtttgtgatctctcctgtggagggggtgctaagggtccggaaggacgtggagctggaccgggagaccatcgccttctacaacctgaccatctgtgcccgtgaccgggggatgcccccactcagctccacaatgctggtggggatccgggtgctggacatcaacgacaacgaccctgtgctgctgaacctgcccatgaacatcaccatcagcgagaacagccctgtctccagctttgtcgcccatgtcctggccagtgacgctgacagtggctgcaatgcacgcctcaccttcaacatcactgcgggcaaccgcgagcgggccttcttcatcaatgccacgacagggatcgtcactgtgaaccggcccctggaccgcgagcggatcccagagtacaagctgaccatttctgtgaaggacaacccggagaatccacgcatagccaggagggattatgacttgcttctgatcttcctttctgatgagaatgacaaccaccccctcttcactaaaagcacctaccaggcagaggtgatggaaaactctcccgctggcacccctctcacggtgctcaatgggcccatcctggccctggatgcagaccaagacatctacgccgtggtgacctaccagctgctgggtgcccagagtggcctctttgacatcaacagcagcaccggtgtggtgaccgtgaggtcaggtgtcatcattgaccgggaggcattctcgccacccatcctggagctgctgctgctggctgaggacatcgggctgctcaacagcacggcccacctgctcatcaccatcctggatgacaatgacaaccggcccacctttagccctgccaccctcactgtccatctgctagagaactgcccgcctggattctcagtccttcaagtcacagccacagatgaggacagtggcctcaatggggagctggtctaccgaatagaagctggggctcaggaccgcttcctcattcatctggtcaccggggtcatccgtgttggtaatgccaccatcgacagagaggagcaggagtcctacaggctaacggtggtggccaccgaccggggcaccgttcctctctcgggcacagccattgtcaccattctgatcgatgacatcaatgactcccgccccgagttcctcaaccccatccagacagtgagcgtgctggagtcggctgagccaggcactgtcattgccaatatcacggccattgaccacgacctcaacccaaagctagagtaccacattgtcggcattgtggccaaggacgacactgatcgcctggtgcccaaccaggaggacgcctttgctgtgaatatcaacacaggatctgtaatggtgaagtcccccatgaatcgggagctggttgccacctatgaggtcactctctcagtgattgacaatgccagcgacctaccagagcgctctgtcagtgtgccaaatgccaagctgactgtcaacgtcctggacgtcaatgacaatacgccccagttcaagccctttgggatcacctactacatggagcggatcctggagggggccacccctgggaccacactcattgctgtggcagccgtggaccctgacaagggccttaatgggctggtcacctacaccctgctggacctggtgcccccagggtatgtccagctggaggactcctcggcagggaaggtcattgccaaccggacagtggactacgaggaggtgcactggctcaactttaccgtgagggcctcagacaacgggtccccgccccgggcagctgagatccctgtctacctggaaatcgtggacatcaatgacaacaaccccatctttgaccagccctcctaccaggaggctgtctttgaggatgtgcctgtgggcacaatcatcctgacagtcactgccactgatgctgactcaggcaactttgcactcattgagtacagccttggagatggagagagcaagtttgccatcaaccccaccacgggtgacatctatgtgctgtcttctctggaccgggagaagaaggaccactatatcctgactgccttggccaaagacaaccctggggatgtagccagcaaccgtcgcgaaaattcagtgcaggtggtgatccaagtgctggatgtcaatgactgccggccacagttctccaagccccagttcagcacaagcgtgtatgagaatgagccggcgggcacctcggtcatcaccatgatggccactgaccaggatgaaggtcccaatggagagttgacctactcacttgagggccctggcgtggaggccttccatgtggacatggactcgggcttggtgaccacacagcggccactgcagtcctacgagaagttcagtctgaccgtggtggccacagatggtggagagcccccactctggggcaccaccatgctcctggtggaggtcatcgacgtcaatgacaaccgccctgtctttgtgcgcccacccaacggcaccatcctccacatcagagaggagatcccgctgcgctccaacgtgtacgaggtctacgccacggacaaggatgagggcctcaacggggcggtgcgctacagcttcctgaagactgcgggcaaccgggactgggagttcttcatcatcgacccaatcagcggcctcatccagactgctcagcgcctggaccgcgagtcgcaggcggtgtacagcctcatcttggtggccagcgacctgggccagccagtgccatacgagactatgcagccgctgcaggtggccctggaggacatcgatgacaacgaaccccttttcgtgaggcctccaaaaggcagcccccagtaccagctgctgacagtgcctgagcactcaccacgcggcaccctcgtgggcaacgtgacaggcgcagtggatgcagatgagggccccaacgcgatcgtgtactacttcatcgcagccggcaacgaagagaagaacttccatctgcagcccgatgggtgtctgctggtgctgcgggacctggaccgggagcgagaagccatcttctccttcatcgtcaaggcctccagcaatcgcagctggacacctccccgtggaccctccccaaccctcgacctggttgctgacctcacactgcaggaggtgcgcgttgtgctagaggacatcaacgaccagccaccacgcttcaccaaggctgagtacactgcaggggtggccaccgacgccaaggtgggctcagagttgatccaggtgctggccctggatgcagacattggcaacaacagccttgtcttctacagcattctggccatccactacttccgggcccttgccaacgactctgaagatgtgggccaggtcttcaccatggggagcatggacggcattctgcgcaccttcgacctcttcatggcctacagccccggctacttcgtggtggacattgtggcccgagacctggcaggccacaacgacacggccatcatcggcatctacatcctgagggacgaccagcgcgtcaagatcgtcattaacgagatccccgaccgtgtgcgcggcttcgaggaggagttcatccacctgctctccaacatcactggggccattgtcaatactgacaatgtgcagttccatgtggacaagaagggccgggtgaactttgcgcagacagaactgcttatccacgtggtgaaccgcgataccaaccgcatcctggacgtggaccgggtgatccagatgatcgatgagaacaaggagcagctacggaatcttttccggaactacaacgtcctggacgtgcagcctgccatctctgtccggctgccggatgacatgtctgccctgcagatggcgatcatcgtcctggctatcctcctgttcctggccgccatgctctttgtcctcatgaactggtactacaggactgtacacaagaggaagctcaaggccattgtggctggctcagctgggaatcgtggcttcatcgacatcatggacatgcctaacaccaacaagtactcctttgatggagccaaccctgtgtggctggatcccttctgtcggaacctggagctggccgcccaggcggagcatgaggatgacctaccggagaacctgagtgagatcgccgacctgtggaacagccccacgcgcacccatggaacttttgggcgtgagccagcagctgtcaagcctgatgatgaccgatacctgcgggctgccatccaggagtatgacaacattgccaagctgggccagatcattcgtgaggggccaatcaagggctcgctgctgaaggtggtcctggaggattacctgcggctcaaaaagctctttgcacagcggatggtgcaaaaagcctcctcctgccactcctccatctctgagctgatacagactgagctggacgaggagccaggagaccacagcccagggcagggtagcctgcgcttccgccacaagccaccagtggagctcaaggggcccgatgggatccatgtggtgcacggcagcacgggcacgctgctggccaccgacctcaacagcctgcccgaggaagaccagaagggcctgggccgctcgctggagacgctgaccgctgccgaggccactgccttcgagcgcaacgcccgcacagaatccgccaaatccacacccctgcacaaacttcgcgacgtgatcatggagacccccctggagatcacagagctgtgactagacagggaagccttgtgggtgtgagcagcacccatccaccgtcccctcccagggagcaagggcagggacagggccggtcgggggggaccctccaaggccaggccttggggacaaccttggcttggccctggcagcccgcatcagctgctcagatcccacttttgccagacgctcattcagcatctgacctctaccttcataagatctgttatttttataagaaaaccaaacaaaaatgttaagcatctaaggacaaggtaaggagggtcactggggcccaagagtctggggaccagcttggctcaggctgagctgaaagaggccaaacaggccctcctccctcccagctccaccccgcaagcaccatcccctccggctaagcaggcgcaagggaggcccagcgcggacatcccctgctggccggacacccgactccagtccaagtctcgctacatttccgccacatccctctctgctggacgtccaggtggaggtggcatccccacgtggacaagaaagtcaatgtcaatgaacaagcattctctccatttcactggcttcccaaatgtgtgcccagcttataaacagaagtgactgatgttccctccggttttgaatgtggagtgtttgtgtgtgttccttttttaaattaagttattccctc

SEQ ID NO: 291439 - DNA, 10080 bp, Artificial Sequence
  derived and/or modified sequence
atgggcagacacgtggccaccagctgccacgtggcctggctgctggtgctgatcagcggctgctggggccaggtgaacagactgcccttcttcaccaaccacttcttcgacacctacctgctgatcagcgaggacacccccgtgggcagcagcgtgacccagctgctggcccaggacatggacaacgaccccctggtgttcggcgtgagcggcgaggaggccagcagattcttcgccgtggagcccgacaccggcgtggtgtggctgagacagcccctggacagagagaccaagagcgagttcaccgtggagttcagcgtgagcgaccaccagggcgtgatcaccagaaaggtgaacatccaggtgggcgacgtgaacgacaacgcccccaccttccacaaccagccctacagcgtgagaatccccgaggtgggcgccaccggcaacacccccgtgggcacccccatcttcatcgtgaacgccaccgaccccgacctgggcgccggcggcagcgtgctgtacagcttccagccccccagccagttcttcgccatcgacagcgccagaggcatcgtgaccgtgatcagagagctggactacgagaccacccaggcctaccagctgaccgtgaacgccaccgaccaggacaagaccagacccctgagcaccctggccaacctggccatcatcatcaccgacgtgcaggacatggaccccatcttcatcaacctgccctacagcaccaacatctacgagcacagcccccccggcaccaccgtgagaatcatcaccgccatcgaccaggacaagggcagacccagaggcatcggctacaccatcgtgagcgtggccggcaacaccaacagcatcttcgccctggactacatcagcggcgtgctgaccctgaacggcctgctggacagagagaaccccctgtacagccacggcttcatcctgaccgtgaagggcaccgagctgaacgacgacagaacccccagcgacgccaccgtgaccaccaccttcaacatcctggtgatcgacatcaacgacaacgcccccgagttcaacagcagcgagtacagcgtggccatcaccgagctggcccaggtgggcttcgccctgcccctgttcatccaggtggtggacaaggacgagggcctgaacagcatgttcgaggtgtacctggtgggcaacaacagccaccacttcatcatcagccccaccagcgtgcagggcaaggccgacatcagaatcagagtggccatccccctggactacgagaccgtggacagatacgacttcgacctgttcgccaacgagagcgtgcccgaccacgtgggctacgccaaggtgaagatcaccctgatcaacgagaacgacaacagacccatcttcagccagcccctgtacaacatcagcctgtacgagaacgtgaccgtgggcaccagcgtgctgaccgtgctggccaccgacaacgacgccggcaccttcggcgaggtgagctacttcttcagcgacgaccccgacagattcagcctggacaaggacaccggcctgatcatgctgatcgccagactggactacgagctgatccagagattcaccctgaccatcatcgccagagacggcggcggcgaggagaccaccggcagagtgagaatcaacgtgctggacgtgaacgacaacgtgcccaccttccagaaggacgcctacgtgggcgccctgagagagaacgagcccagcgtgacccagctggtgagactgagagccaccgacgaggacagcccccccaacaaccagatcacctacagcatcgtgagcgccagcgccttcggcagctacttcgacatcagcctgtacgagggctacggcgtgatcagcgtgagcagacccctggactacgagcagatcagcaacggcctgatctacctgaccgtgatggccatggacgccggcaacccccccctgaacagcaccgtgcccgtgaccatcgaggtgttcgacgagaacgacaacccccccaccttcagcaagcccgcctacttcgtgagcgtggtggagaacatcatggccggcgccaccgtgctgttcctgaacgccaccgacctggacagaagcagagagtacggccaggagagcatcatctacagcctggagggcagcacccagttcagaatcaacgccagaagcggcgagatcaccaccaccagcctgctggacagagagaccaagagcgagtacatcctgatcgtgagagccgtggacggcggcgtgggccacaaccagaagaccggcatcgccaccgtgaacatcaccctgctggacatcaacgacaaccaccccacctggaaggacgccccctactacatcaacctggtggagatgaccccccccgacagcgacgtgaccaccgtggtggccgtggaccccgacctgggcgagaacggcaccctggtgtacagcatccagccccccaacaagttctacagcctgaacagcaccaccggcaagatcagaaccacccacgccatgctggacagagagaaccccgacccccacgaggccgagctgatgagaaagatcgtggtgagcgtgaccgactgcggcagaccccccctgaaggccaccagcagcgccaccgtgttcgtgaacctgctggacctgaacgacaacgaccccaccttccagaacctgcccttcgtggccgaggtgctggagggcatccccgccggcgtgagcatctaccaggtggtggccatcgacctggacgagggcctgaacggcctggtgagctacagaatgcccgtgggcatgcccagaatggacttcctgatcaacagcagcagcggcgtggtggtgaccaccaccgagctggacagagagagaatcgccgagtaccagctgagagtggtggccagcgacgccggcacccccaccaagagcagcaccagcaccctgaccatccacgtgctggacgtgaacgacgagacccccaccttcttccccgccgtgtacaacgtgagcgtgagcgaggacgtgcccagagagttcagagtggtgtggctgaactgcaccgacaacgacgtgggcctgaacgccgagctgagctacttcatcaccggcggcaacgtggacggcaagttcagcgtgggctacagagacgccgtggtgagaaccgtggtgggcctggacagagagaccaccgccgcctacatgctgatcctggaggccatcgacaacggccccgtgggcaagagacacaccggcaccgccaccgtgttcgtgaccgtgctggacgtgaacgacaacagacccatcttcctgcagagcagctacgaggccagcgtgcccgaggacatccccgagggccacagcatcctgcagctgaaggccaccgacgccgacgagggcgagttcggcagagtgtggtacagaatcctgcacggcaaccacggcaacaacttcagaatccacgtgagcaacggcctgctgatgagaggccccagacccctggacagagagagaaacagcagccacgtgctgatcgtggaggcctacaaccacgacctgggccccatgagaagcagcgtgagagtgatcgtgtacgtggaggacatcaacgacgaggcccccgtgttcacccagcagcagtacagcagactgggcctgagagagaccgccggcatcggcaccagcgtgatcgtggtgcaggccaccgacagagacagcggcgacggcggcctggtgaactacagaatcctgagcggcgccgagggcaagttcgagatcgacgagagcaccggcctgatcatcaccgtgaactacctggactacgagaccaagaccagctacatgatgaacgtgagcgccaccgaccaggccccccccttcaaccagggcttctgcagcgtgtacatcaccctgctgaacgagctggacgaggccgtgcagttcagcaacgccagctacgaggccgccatcctggagaacctggccctgggcaccgagatcgtgagagtgcaggcctacagcatcgacaacctgaaccagatcacctacagattcaacgcctacaccagcacccaggccaaggccctgttcaagatcgacgccatcaccggcgtgatcaccgtgcagggcctggtggacagagagaagggcgacttctacaccctgaccgtggtggccgacgacggcggccccaaggtggacagcaccgtgcaggtgtacatcaccgtgctggacgagaacgacaacagccccagattcgacttcaccagcgacagcgccgtgagcatccccgaggactgccccgtgggccagagagtggccaccgtgaaggcctgggaccccgacgccggcagcaacggccaggtggtgttcagcctggccagcggcaacatcgccggcgccttcgagatcgtgaccaccaacgacagcatcggcgaggtgttcgtggccagacccctggacagagaggagctggaccactacatcctgcaggtggtggccagcgacagaggcaccccccccagaaagaaggaccacatcctgcaggtgaccatcctggacatcaacgacaacccccccgtgatcgagagccccttcggctacaacgtgagcgtgaacgagaacgtgggcggcggcaccgccgtggtgcaggtgagagccaccgacagagacatcggcatcaacagcgtgctgagctactacatcaccgagggcaacaaggacatggccttcagaatggacagaatcagcggcgagatcgccaccagacccgccccccccgacagagagagacagagcttctaccacctggtggccaccgtggaggacgagggcacccccaccctgagcgccaccacccacgtgtacgtgaccatcgtggacgagaacgacaacgcccccatgttccagcagccccactacgaggtgctgctggacgagggccccgacaccctgaacaccagcctgatcaccatccaggccctggacctggacgagggccccaacggcaccgtgacctacgccatcgtggccggcaacatcgtgaacaccttcagaatcgacagacacatgggcgtgatcaccgccgccaaggagctggactacgagatcagccacggcagatacaccctgatcgtgaccgccaccgaccagtgccccatcctgagccacagactgaccagcaccaccaccgtgctggtgaacgtgaacgacatcaacgacaacgtgcccaccttccccagagactacgagggccccttcgaggtgaccgagggccagcccggccccagagtgtggaccttcctggcccacgacagagacagcggccccaacggccaggtggagtacagcatcatggacggcgaccccctgggcgagttcgtgatcagccccgtggagggcgtgctgagagtgagaaaggacgtggagctggacagagagaccatcgccttctacaacctgaccatctgcgccagagacagaggcatgccccccctgagcagcaccatgctggtgggcatcagagtgctggacatcaacgacaacgaccccgtgctgctgaacctgcccatgaacatcaccatcagcgagaacagccccgtgagcagcttcgtggcccacgtgctggccagcgacgccgacagcggctgcaacgccagactgaccttcaacatcaccgccggcaacagagagagagccttcttcatcaacgccaccaccggcatcgtgaccgtgaacagacccctggacagagagagaatccccgagtacaagctgaccatcagcgtgaaggacaaccccgagaaccccagaatcgccagaagagactacgacctgctgctgatcttcctgagcgacgagaacgacaaccaccccctgttcaccaagagcacctaccaggccgaggtgatggagaacagccccgccggcacccccctgaccgtgctgaacggccccatcctggccctggacgccgaccaggacatctacgccgtggtgacctaccagctgctgggcgcccagagcggcctgttcgacatcaacagcagcaccggcgtggtgaccgtgagaagcggcgtgatcatcgacagagaggccttcagcccccccatcctggagctgctgctgctggccgaggacatcggcctgctgaacagcaccgcccacctgctgatcaccatcctggacgacaacgacaacagacccaccttcagccccgccaccctgaccgtgcacctgctggagaactgcccccccggcttcagcgtgctgcaggtgaccgccaccgacgaggacagcggcctgaacggcgagctggtgtacagaatcgaggccggcgcccaggacagattcctgatccacctggtgaccggcgtgatcagagtgggcaacgccaccatcgacagagaggagcaggagagctacagactgaccgtggtggccaccgacagaggcaccgtgcccctgagcggcaccgccatcgtgaccatcctgatcgacgacatcaacgacagcagacccgagttcctgaaccccatccagaccgtgagcgtgctggagagcgccgagcccggcaccgtgatcgccaacatcaccgccatcgaccacgacctgaaccccaagctggagtaccacatcgtgggcatcgtggccaaggacgacaccgacagactggtgcccaaccaggaggacgccttcgccgtgaacatcaacaccggcagcgtgatggtgaagagccccatgaacagagagctggtggccacctacgaggtgaccctgagcgtgatcgacaacgccagcgacctgcccgagagaagcgtgagcgtgcccaacgccaagctgaccgtgaacgtgctggacgtgaacgacaacaccccccagttcaagcccttcggcatcacctactacatggagagaatcctggagggcgccacccccggcaccaccctgatcgccgtggccgccgtggaccccgacaagggcctgaacggcctggtgacctacaccctgctggacctggtgccccccggctacgtgcagctggaggacagcagcgccggcaaggtgatcgccaacagaaccgtggactacgaggaggtgcactggctgaacttcaccgtgagagccagcgacaacggcagcccccccagagccgccgagatccccgtgtacctggagatcgtggacatcaacgacaacaaccccatcttcgaccagcccagctaccaggaggccgtgttcgaggacgtgcccgtgggcaccatcatcctgaccgtgaccgccaccgacgccgacagcggcaacttcgccctgatcgagtacagcctgggcgacggcgagagcaagttcgccatcaaccccaccaccggcgacatctacgtgctgagcagcctggacagagagaagaaggaccactacatcctgaccgccctggccaaggacaaccccggcgacgtggccagcaacagaagagagaacagcgtgcaggtggtgatccaggtgctggacgtgaacgactgcagaccccagttcagcaagccccagttcagcaccagcgtgtacgagaacgagcccgccggcaccagcgtgatcaccatgatggccaccgaccaggacgagggccccaacggcgagctgacctacagcctggagggccccggcgtggaggccttccacgtggacatggacagcggcctggtgaccacccagagacccctgcagagctacgagaagttcagcctgaccgtggtggccaccgacggcggcgagccccccctgtggggcaccaccatgctgctggtggaggtgatcgacgtgaacgacaacagacccgtgttcgtgagaccccccaacggcaccatcctgcacatcagagaggagatccccctgagaagcaacgtgtacgaggtgtacgccaccgacaaggacgagggcctgaacggcgccgtgagatacagcttcctgaagaccgccggcaacagagactgggagttcttcatcatcgaccccatcagcggcctgatccagaccgcccagagactggacagagagagccaggccgtgtacagcctgatcctggtggccagcgacctgggccagcccgtgccctacgagaccatgcagcccctgcaggtggccctggaggacatcgacgacaacgagcccctgttcgtgagaccccccaagggcagcccccagtaccagctgctgaccgtgcccgagcacagccccagaggcaccctggtgggcaacgtgaccggcgccgtggacgccgacgagggccccaacgccatcgtgtactacttcatcgccgccggcaacgaggagaagaacttccacctgcagcccgacggctgcctgctggtgctgagagacctggacagagagagagaggccatcttcagcttcatcgtgaaggccagcagcaacagaagctggaccccccccagaggccccagccccaccctggacctggtggccgacctgaccctgcaggaggtgagagtggtgctggaggacatcaacgaccagccccccagattcaccaaggccgagtacaccgccggcgtggccaccgacgccaaggtgggcagcgagctgatccaggtgctggccctggacgccgacatcggcaacaacagcctggtgttctacagcatcctggccatccactacttcagagccctggccaacgacagcgaggacgtgggccaggtgttcaccatgggcagcatggacggcatcctgagaaccttcgacctgttcatggcctacagccccggctacttcgtggtggacatcgtggccagagacctggccggccacaacgacaccgccatcatcggcatctacatcctgagagacgaccagagagtgaagatcgtgatcaacgagatccccgacagagtgagaggcttcgaggaggagttcatccacctgctgagcaacatcaccggcgccatcgtgaacaccgacaacgtgcagttccacgtggacaagaagggcagagtgaacttcgcccagaccgagctgctgatccacgtggtgaacagagacaccaacagaatcctggacgtggacagagtgatccagatgatcgacgagaacaaggagcagctgagaaacctgttcagaaactacaacgtgctggacgtgcagcccgccatcagcgtgagactgcccgacgacatgagcgccctgcagatggccatcatcgtgctggccatcctgctgttcctggccgccatgctgttcgtgctgatgaactggtactacagaaccgtgcacaagagaaagctgaaggccatcgtggccggcagcgccggcaacagaggcttcatcgacatcatggacatgcccaacaccaacaagtacagcttcgacggcgccaaccccgtgtggctggaccccttctgcagaaacctggagctggccgcccaggccgagcacgaggacgacctgcccgagaacctgagcgagatcgccgacctgtggaacagccccaccagaacccacggcaccttcggcagagagcccgccgccgtgaagcccgacgacgacagatacctgagagccgccatccaggagtacgacaacatcgccaagctgggccagatcatcagagagggccccatcaagggcagcctgctgaaggtggtgctggaggactacctgagactgaagaagctgttcgcccagagaatggtgcagaaggccagcagctgccacagcagcatcagcgagctgatccagaccgagctggacgaggagcccggcgaccacagccccggccagggcagcctgagattcagacacaagccccccgtggagctgaagggccccgacggcatccacgtggtgcacggcagcaccggcaccctgctggccaccgacctgaacagcctgcccgaggaggaccagaagggcctgggcagaagcctggagaccctgaccgccgccgaggccaccgccttcgagagaaacgccagaaccgagagcgccaagagcacccccctgcacaagctgagagacgtgatcatggagacccccctggagatcaccgagctgtag

SEQ ID NO: 291440 - DNA, 1128 bp, Artificial Sequence
  derived and/or modified sequence
atgaagctggtgtggcccagcgccaagctgctgcaggccgccgccggcgccagcgccagagcctgcgacagcgtgaccagcaacgtgctgcccctgctgctggagcagttccacaagcacagccagagcagccagagaagaaccatcctggagatgctgctgggcttcctgaagctgcagcagaagtggagctacgaggacaaggaccagagacccctgaacggcttcaaggaccagctgtgcagcctggtgttcatggccctgaccgaccccagcacccagctgcagctggtgggcatcagaaccctgaccgtgctgggcgcccagcccgacctgctgagctacgaggacctggagctggccgtgggccacctgtacagactgagcttcctgaaggaggacagccagagctgcagagtggccgccctggaggccagcggcaccctggccgccctgtaccccgtggccttcagcagccacctggtgcccaagctggccgaggagctgagagtgggcgagagcaacctgaccaacggcgacgagcccacccagtgcagcagacacctgtgctgcctgcaggccctgagcgccgtgagcacccaccccagcatcgtgaaggagaccctgcccctgctgctgcagcacctgtggcaggtgaacagaggcaacatggtggcccagagcagcgacgtgatcgccgtgtgccagagcctgagacagatggccgagaagtgccagcaggaccccgagagctgctggtacttccaccagaccgccatcccctgcctgctggccctggccgtgcaggccagcatgcccgagaaggagcccagcgtgctgagaaaggtgctgctggaggacgaggtgctggccgccatggtgagcgtgatcggcaccgccaccacccacctgagccccgagctggccgcccagagcgtgacccacatcgtgcccctgttcctggacggcaacgtgagcttcctgcccgagaacagcttccccagcagattccagcccttccaggtgaccgacggcagcagcggccagagaagactgatcgccctgctgatggccttcgtgtgcagcctgcccagaaacggcagcagctggatgaacagctacagctag

SEQ ID NO: 291441 - DNA, 1128 bp, Artificial Sequence
  derived and/or modified sequence
atgaaacttgtgtggccatcagccaagcttctgcaggctgccgctggggcatctgccagagcctgcgattccgttacttccaacgtgctgccacttcttctggaacagttccataagcacagccagtcatctcagcgtcgcactatcctcgagatgctgctgggttttctcaagctgcagcagaaatggtcctatgaagataaggatcagagacccctgaacggttttaaggaccagctttgtagcctggttttcatggccctgacagacccatcaactcagttgcagctggtcggaatccggaccctcactgtgctcggtgcacagcctgatctcctctcctacgaagatttggaactcgccgtcggccatttgtaccggctttcattcctgaaggaggactcccagtcctgcagggttgctgcgctggaagcctcaggaactctagcagccctgtaccctgtggccttcagctcccaccttgtgcccaagctggccgaagagcttcgggtgggggagtctaaccttaccaacggtgatgagcctacccagtgctccagacacctgtgctgtctacaagcactcagcgctgtatcgacacacccgagcatcgtgaaggagactctcccactcctgcttcagcacctgtggcaggtgaatcggggcaacatggtcgcccaatcatcagacgtgatcgctgtgtgccagagcctccgccaaatggcagagaaatgtcaacaagatcctgagtcctgctggtatttccaccagactgcgattccatgcctgttagctttggccgtacaagcttctatgcctgagaaagagccaagtgtgcttcggaaagttctgcttgaggatgaagtgcttgccgccatggtgtctgttattggcacagctacaacccatttgtctcctgaattggccgcccagagtgtgacgcatattgtccctctttttctagacggcaatgtcagttttctgcccgagaatagcttcccaagcagatttcagccatttcaggtaactgacgggagtagtgggcagcgccggctcattgctctgctcatggcatttgtttgcagcttgccccggaacggctcatcctggatgaactcctattcatag

SEQ ID NO: 291442 - DNA, 1128 bp, Artificial Sequence
  derived and/or modified sequence
atgaagctggtgtggccctcagcaaaattgctgcaagctgccgccggcgccagcgcaagggcttgtgactctgtgacgtccaatgtgctccccctgctgctcgaacagtttcacaaacactctcagtcaagtcagaggcgcactatcttggaaatgctgctggggtttcttaaactgcagcagaagtggagttatgaagacaaggatcagcgccccctgaatggattcaaggaccagctgtgcagcttagtgtttatggccctgaccgacccttccacgcagctgcagctggtgggcattcgcacacttaccgtcctcggcgctcagccggatctgctgtcttacgaggatctagagctcgcagtggggcatctgtaccgactcagttttctcaaggaggattctcaaagttgtcgcgtcgctgctctggaagctagtgggaccctggccgcattgtacccagtggcgttctctagtcacttggtcccaaagctcgctgaagagttgagagtgggcgaatctaatctgacaaatggcgacgaaccgacccagtgttcacgtcacttatgttgtctgcaggcactgtccgcggtctctacacacccatccatcgttaaggagacgctccccctgctccttcagcatctttggcaggttaaccgcggcaacatggtggcccagtcttcagacgtgattgctgtgtgccagtctcttcggcagatggctgaaaagtgccagcaggaccccgaatcctgctggtactttcaccagactgccataccatgtctgcttgcattggctgttcaggcctcgatgccagagaaagagccatcagtgttgagaaaagtcctgctggaagacgaagtccttgccgcaatggtgagcgtgattggtaccgctacgacacacctctcacccgaactggctgcacagtcagtcacccatatagtgcctctgttcttagacggaaatgtgtcttttctgccggagaattctttccccagcaggttccagcccttccaggtcaccgacggcagcagcggccagcgacggctgatcgcgttgctgatggcatttgtgtgcagtctcccgcgaaacggatcgagctggatgaattcctatagttag

SEQ ID NO: 291443 - DNA, 1128 bp, Artificial Sequence
  derived and/or modified sequence
atgaagctggtgtggcccagcgccaagctgctgcaggccgctgctggggccagcgcccgggcctgtgacagcgtgaccagcaatgtgctgcccctgctgctggagcagttccacaagcacagccagagcagccagaggaggaccatcctggagatgctgctgggcttcctgaagctgcagcagaagtggagctatgaggacaaggaccagaggcccctgaatggcttcaaggaccagctgtgcagcctggtgttcatggccctgacagaccccagcacccagctgcagctggtgggcatccgcaccctgactgtgctgggcgcccagcctgacctgctgtcctatgaggacctggagctggccgtgggccacctgtaccgcctgtccttcctgaaggaggacagccagagctgccgggtggccgccctggaggccagcggcaccctggccgccctgtaccctgtggccttcagcagccacctggtgcccaagctggccgaggagctgcgggtgggggagagcaacctgaccaatggagatgagcccacccagtgcagccgccacctgtgctgcctgcaggccctgtctgctgtgtccacccaccccagcatcgtgaaggagaccctgcccctgctgctgcagcacctgtggcaggtgaacagaggcaacatggtggcccagagcagtgatgtgattgctgtgtgccagagcctgcggcagatggccgagaagtgccagcaggaccctgagagctgctggtacttccaccagacagccatcccctgcctgctggccctggccgtgcaggcctccatgcctgagaaggagcccagcgtgctgaggaaggtgctgctggaggatgaggtgctggccgccatggtgtctgtgattggaacagccaccacccacctgagccctgagctggccgcccagagcgtgacccacatcgtgcccctcttcctggatggaaatgtgtccttcctgcctgagaacagcttccccagccgcttccagcccttccaggtgacagatggcagcagcggccagaggcggctgattgccctgctgatggcctttgtgtgcagcctgcccagaaatggcagctcctggatgaacagctacagctag

SEQ ID NO: 291444 - DNA, 1128 bp, Artificial Sequence
  derived and/or modified sequence
atgaagctggtgtggcccagcgccaagctgctgcaggccgccgccggggcgagcgctagggcgtgtgattcagtgaccagcaatgtgctacccttgctgctggaacagttccataagcattcccagtccagccaacgcagaaccatcctagagatgctgttggggtttttgaaactacagcagaaatggagctacgaagataaagaccagcgcccgctcaatgggttcaaggaccagttatgcagtctcgtcttcatggcactgacagatccctcaacacagctgcagctggtggggatcaggacattgaccgtgctcggagctcagccagatctgttgtcctatgaggaccttgagctggcagtgggccacctctacagactgtcttttttaaaagaagactcccaatcgtgcagagttgccgctttggaggcttcggggactcttgcagctctttatcctgtggccttctcttctcatttggtgcctaaactggcagaagagttacgggtgggtgaatctaacttgactaacggcgacgagccaactcagtgctccagacacctgtgctgcctccaggctctatccgctgtttccacgcaccccagcattgttaaagaaactctcccgctactgctccagcatctgtggcaggtgaaccgcggcaatatggtggctcaatcctccgacgtcatcgccgtatgtcagagtctgaggcagatggccgagaagtgccagcaggaccccgagtcttgctggtattttcaccagactgccatcccatgcctccttgcactcgcagtacaggcttcgatgcccgaaaaggaaccatctgtgcttagaaaggtgctgcttgaagacgaggttttagctgccatggtatccgtgatagggaccgctaccacacacctctctcccgagctggccgcccagtctgtcacacacattgtgcccttattcttggatggtaatgtgtccttcctccctgagaattccttcccttctcgctttcaacctttccaggtgacagacggctctagtggtcagaggaggttgattgctcttctcatggctttcgtatgcagccttcccagaaacggctcgagttggatgaactcgtacagctag

SEQ ID NO: 291445 - DNA, 1128 bp, Artificial Sequence
  derived and/or modified sequence
atgaagctggtgtggcccagcgccaagctgctgcaggccgccgccggcgccagtgccagagcctgtgatagcgtgacgtctaacgtgctgcccttactcctggaacagttccacaagcactcccagtcctctcagagaagaaccatcttagaaatgctgctgggctttttgaagctgcagcagaagtggtcctacgaagataaagatcagcggcccctcaacggattcaaggaccaactgtgctccctggtgttcatggccttgacggacccttccacacagttgcagcttgtgggtattcgaacgttaaccgtactgggggctcagccagacttgctttcctatgaagatttggagctggcagttggacacctgtatcgactgagctttctgaaagaagactctcagagctgtagggttgcagccttagaagcaagcggaacactggcagccctgtatccagtggcattctcaagccatctggttccaaaactagccgaagagcttcgggtcggcgaaagtaacctgacaaatggggacgaaccgacacaatgttccaggcatctgtgctgcctacaagccctatccgcagtctctactcacccttcgatcgtcaaggaaaccctgccattactgctgcagcacttatggcaggttaacagggggaacatggtggcacagtcatccgacgtcatcgccgtttgtcagtcgttgcgccaaatggccgagaaatgtcagcaggatcctgaatcgtgctggtattttcatcaaactgccatcccctgcctccttgctttagccgtgcaggcatcaatgccagagaaagaacccagtgtccttcgcaaggtactgttagaggacgaagtgctcgctgcaatggtgagcgtcatcggcaccgccaccacacacctttcacccgaattggccgcgcagtccgtgacccacattgtcccattattcttggacggcaacgtcagttttttacctgaaaactccttccccagtcgattccaaccatttcaagtgacggatggtagcagtgggcaacggaggctcatagcattgctcatggctttcgtctgttcactgcccaggaacgggagctcctggatgaattcttactcctag

SEQ ID NO: 291446 - DNA, 1128 bp, Artificial Sequence
  derived and/or modified sequence
atgaagttggtatggcctagcgccaagcttcttcaagcagccgctggtgcctctgcgagggcctgtgatagcgtcacatccaacgtgctcccgctgctgctggagcaattccataagcatagccagtcctcacagcgtagaaccatcctggagatgttgttgggcttcctaaaattgcaacagaagtggagttacgaagataaggaccagaggcccctgaatggttttaaggaccagttatgctccttagtatttatggccttgacggatcccagcacacagcttcaactagtgggtatccggacactgaccgtactcggggcacaacccgacctgctctcctatgaggatttggagctggccgtgggccacttgtacagactttctttcctgaaggaagattcccagagttgtcgggtggccgctttggaggctagtggaacccttgccgcactatatccggtggcattcagcagccacctcgttccaaaactggctgaagaactcagggtgggcgaaagcaatctaaccaacggagacgagccaactcagtgctccaggcacctttgttgtcttcaggcattgagcgccgtgagcacccatcctagcattgtgaaggagacacttcctcttttgctccagcacctatggcaggtcaatcgaggcaatatggtggctcagtcttccgatgtgatcgctgtgtgtcaaagtctcaggcagatggccgaaaagtgccagcaggacccagaatcctgctggtactttcaccagacagctatcccgtgtttgcttgccctggccgttcaggcatcaatgccagaaaaggagcccagcgtcttacggaaagtgttgctcgaagatgaggtcctcgcagcaatggtttctgtgatcggtaccgccactacccatttatcaccagagttggcagctcagagcgtaacacatatcgtgccactgttcctcgacggcaatgtttcctttctgcccgagaactcatttccttcgcgctttcagccttttcaagtgactgatgggtcatcaggccagagacgtctgatcgcgctcctgatggcttttgtctgtagcctccctagaaatggatctagctggatgaattcctactcttag

SEQ ID NO: 291447 - DNA, 1128 bp, Artificial Sequence
  derived and/or modified sequence
atgaagctggtttggccaagcgctaaattgctgcaggcggcagctggcgcatctgctcgcgcatgcgactcagttaccagcaacgtgctaccactactcctggaacagttccacaagcacagccagagttcccagaggcgaacaattttggaaatgctgttggggttcctcaaactgcaacagaagtggtcttatgaagacaaggatcagagacctctcaacggctttaaggaccagctgtgttcgctcgtttttatggcccttactgacccctccacacagctccagctggtgggcataaggacactgaccgtcctgggcgctcagccagatctgcttagttatgaagatttggaactcgcagtgggacatttataccgcctgtcgttccttaaagaagatagtcagtcttgccgggtagccgctttggaagcatccggaactttggcagcactttacccagtagcctttagttcccacctggtacccaagttggctgaagaactgagggttggagaatcaaatctaactaatggtgacgagcctacccagtgtagccgtcacctctgctgtcttcaagccctttccgctgtgtctacacacccttcaatcgtgaaagagactttacccctgcttctccaacacctttggcaggttaataggggcaatatggtggcccaatcttccgacgtgattgccgtgtgccagagcttgaggcagatggctgaaaaatgtcaacaggatcccgaatcctgttggtacttccaccaaactgcaataccttgcctgctggctctggcggtgcaggcctcaatgcccgagaaagagcccagcgtgttgaggaaagtgttgctcgaagatgaagtgcttgcagctatggtgtcagtgataggcaccgctactacccatcttagccctgagttggcagctcaaagtgttacccatatagtccccttgtttctagatggcaacgtgtcttttctgccagagaattctttcccctccagatttcaaccattccaggtcactgacggttcaagtggccagcggaggctgatcgctttgttaatggctttcgtgtgtagcttaccaagaaatggttcctcgtggatgaacagctacagctag

SEQ ID NO: 291448 - protein, 248 aa, Artificial Sequence
  derived and/or modified sequence
MWLCPLALNLILMAASGAVCEVKDVCVGSPGIPGTPGSHGLPGRDGRDGLKGDPGPPGPMGPPGEMPCPPGNDGLPGAPGIPGECGEKGEPGERGPPGLPAHLDEELQATLHDFRHQILQTRGALSLQGSIMTVGEKVFSSNGQSITFDAIQEACARAGGRIAVPRNPEENEAIASFVKKYNTYAYVGLTEGPSPGDFRYSDGTPVNYTNWYRGEPAGRGKEQCVEMYTDGQWNDRNCLYSRLTICEF

SEQ ID NO: 291449 - protein, 263 aa, Artificial Sequence
  derived and/or modified sequence
MRPCQVPGAATGPRAMWLCPLALNLILMAASGAVCEVKDVCVGSPGIPGTPGSHGLPGRDGRDGLKGDPGPPGPMGPPGEMPCPPGNDGLPGAPGIPGECGEKGEPGERGPPGLPAHLDEELQATLHDFRHQILQTRGALSLQGSIMTVGEKVFSSNGQSITFDAIQEACARAGGRIAVPRNPEENEAIASFVKKYNTYAYVGLTEGPSPGDFRYSDGTPVNYTNWYRGEPAGRGKEQCVEMYTDGQWNDRNCLYSRLTICEF

SEQ ID NO: 291450 - DNA, 792 bp, Artificial Sequence
  derived and/or modified sequence
atgagaccctgccaggtgcccggcgccgccaccggccccagagccatgtggctgtgccccctggccctgaacctgatcctgatggccgccagcggcgccgtgtgcgaggtgaaggacgtgtgcgtgggcagccccggcatccccggcacccccggcagccacggcctgcccggcagagacggcagagacggcctgaagggcgaccccggcccccccggccccatgggcccccccggcgagatgccctgcccccccggcaacgacggcctgcccggcgcccccggcatccccggcgagtgcggcgagaagggcgagcccggcgagagaggcccccccggcctgcccgcccacctggacgaggagctgcaggccaccctgcacgacttcagacaccagatcctgcagaccagaggcgccctgagcctgcagggcagcatcatgaccgtgggcgagaaggtgttcagcagcaacggccagagcatcaccttcgacgccatccaggaggcctgcgccagagccggcggcagaatcgccgtgcccagaaaccccgaggagaacgaggccatcgccagcttcgtgaagaagtacaacacctacgcctacgtgggcctgaccgagggccccagccccggcgacttcagatacagcgacggcacccccgtgaactacaccaactggtacagaggcgagcccgccggcagaggcaaggagcagtgcgtggagatgtacaccgacggccagtggaacgacagaaactgcctgtacagcagactgaccatctgcgagttctag

SEQ ID NO: 291451 - DNA, 792 bp, Artificial Sequence
  derived and/or modified sequence
atgagaccatgtcaggtgcccggtgccgctaccggccctagggccatgtggctttgtccactggctctcaatctgattttaatggcagcgagtggcgccgtttgtgaggtgaaggacgtctgcgtcggcagccccgggatccccgggacccctggaagtcatggcttacctggccgagacggccgagacggattgaagggagacccagggccgcctggccctatgggcccaccaggagaaatgccatgccctcctggcaacgatggcctccctggtgcccctgggataccaggagaatgtggtgagaaaggcgagcctggggaaagaggaccgccggggctccctgcccatctcgatgaggagcttcaagcaaccttgcacgattttcgtcaccagatcctccagacacgcggcgcactgagcctgcagggctcgattatgactgtgggcgaaaaagtcttttcctcgaacgggcaatccattactttcgacgccattcaggaggcgtgtgctcgtgctggcgggagaatagccgttccacgcaaccccgaggaaaacgaagcaatagcatcttttgtcaagaaatacaatacttacgcttatgtgggcctaaccgaggggccctcccctggagattttagatacagcgatgggacccccgtgaattacactaactggtaccggggcgagccagctggccgggggaaagagcagtgcgtcgagatgtacacagacggccagtggaacgaccgaaattgcctgtactcccgcctgacgatctgtgagttttag

SEQ ID NO: 291452 - DNA, 792 bp, Artificial Sequence
  derived and/or modified sequence
atgaggccctgccaggtgcctggagctgccaccggcccccgggccatgtggctgtgccccctggccctgaacctgatcctgatggccgccagcggggctgtgtgtgaggtgaaggatgtgtgtgtgggcagccctggcatccctggcaccccaggcagccacggcctgcccggcagagatggaagagatggcctgaagggggaccccggccccccaggccccatgggccccccaggagagatgccctgccccccaggaaatgatggcctgcccggggcccctggcatccctggagaatgtggggagaagggggagcccggggagcggggccccccaggcctgcctgcccacctggatgaggagctgcaggccaccctgcatgacttccgccaccagatcctgcagaccaggggggccctgagcctgcagggcagcatcatgacagtgggggagaaggtgttcagcagcaatggccagagcatcacctttgatgccatccaggaggcctgtgcccgggccggcggcagaattgctgtgcccagaaatccagaagaaaatgaggccatcgccagctttgtgaagaagtacaacacctacgcctacgtgggcctgacagagggccccagccctggggacttccgctacagtgatggcacccctgtgaactacaccaactggtacagaggagagcccgccggccggggcaaggagcagtgtgtggagatgtacacagatggccagtggaatgacaggaactgcctgtacagccggctgaccatctgtgagttctag

SEQ ID NO: 291453 - DNA, 792 bp, Artificial Sequence
  derived and/or modified sequence
atgcggccctgccaggtgcccggcgccgccaccggcccccgggccatgtggctctgtcccctcgccctgaacttaatcctcatggcggccagcggggctgtatgtgaggtgaaagacgtctgcgtcggatcgccaggaattcctggtacaccaggttctcacggactgccgggcagggacggccgggacgggctcaagggagatccaggccctccaggcccaatggggcccccgggggaaatgccgtgcccgcctggcaacgatggcctgccaggcgccccgggtatccccggtgagtgcggagaaaagggtgagccaggggagcgcggcccccccggccttcccgcacacttggacgaggagctgcaagcaacccttcacgattttagacaccagatcctacaaacacgcggggccctctccttgcaggggagtataatgactgtaggcgaaaaagtgttcagctccaacgggcagagtataaccttcgatgctatccaggaggcctgcgcaagagccgggggtagaatagccgtcccgagaaatccagaagaaaacgaagctatcgccagcttcgttaaaaaatacaatacttacgcttatgtggggctcaccgaaggaccatctcctggggactttcggtactcagatggaactcccgttaattacactaactggtataggggcgaacctgcaggccgtggtaaagaacaatgcgtagagatgtacacagatggacagtggaacgataggaattgcctgtatagcagattaacaatttgcgaattttag

SEQ ID NO: 291454 - DNA, 792 bp, Artificial Sequence
  derived and/or modified sequence
atgagaccttgccaggtgcccggtgccgctacagggccaagggccatgtggctgtgccctctggcactcaaccttatcctgatggcagcttctggggctgtgtgcgaagtgaaagacgtctgcgtggggtctcctgggatcccgggtacccctgggagtcacggcttgccaggcagagacggacgggatggtctgaagggggatcccggtcctcccggacccatgggccctccaggagagatgccctgtccccctggtaatgatggcctgcccggagcgcctggcatccctggagagtgtggggagaaaggggaacccggagaacggggtcccccaggtcttccagcccacttagacgaagaattgcaggccaccctccacgatttcaggcatcagatcctgcaaacaagaggagccctgagtctccaaggcagtatcatgaccgttggagagaaagtttttagctccaacggtcagtcaataactttcgacgctatacaggaggcctgtgccagagccggagggagaatcgccgtgccaaggaatcccgaggaaaacgaagcgatagcttcttttgttaagaagtacaatacctatgcctacgtcgggctgaccgaggggccatccccaggcgactttcggtacagtgacggaactcctgtcaactacaccaactggtacaggggtgaaccagcgggacgcggaaaggaacaatgcgtggagatgtatacagatggtcagtggaacgacaggaattgcctgtactctagactgaccatctgcgagttctag

SEQ ID NO: 291455 - DNA, 865 bp, Artificial Sequence
  derived and/or modified sequence
gacttggaggcagagacccaagcagctggaggctctgtgtgtggcctggagaccccacaacctccagccggaggcctgaagcatgaggccatgccaggtgccaggagcagcgactggacccagagccatgtggctgtgccctctggccctcaacctcatcttgatggcagcctctggtgctgtgtgcgaagtgaaggacgtttgtgttggaagccctggtatccccggcactcctggatcccacggcctgccaggcagggacgggagagatggtctcaaaggagaccctggccctccaggccccatgggtccacctggagaaatgccatgtcctcctggaaatgatgggctgcctggagcccctggtatccctggagagtgtggagagaagggggagcctggcgagaggggccctccagggcttccagctcatctagatgaggagctccaagccacactccacgactttagacatcaaatcctgcagacaaggggagccctcagtctgcagggctccataatgacagtaggagagaaggtcttctccagcaatgggcagtccatcacttttgatgccattcaggaggcatgtgccagagcaggcggccgcattgctgtcccaaggaatccagaggaaaatgaggccattgcaagcttcgtgaagaagtacaacacatatgcctatgtaggcctgactgagggtcccagccctggagacttccgctactcagacgggacccctgtaaactacaccaactggtaccgaggggagcccgcaggtcggggaaaagagcagtgtgtggagatgtacacagatgggcagtggaatgacaggaactgcctgtactcccgactgaccatctag

SEQ ID NO: 291456 - DNA, 2160 bp, Artificial Sequence
  derived and/or modified sequence
gagacccaagcagctggaggctctgtgtgtgggtcgctgatttcttggagcctgaaaagaaagagcagcgactggacccagagccatgtggctgtgccctctggccctcaacctcatcttgatggcagcctctggtgctgtgtgcgaagtgaaggacgtttgtgttggaagccctggtatccccggcactcctggatcccacggcctgccaggcagggacgggagagatggtctcaaaggagaccctggccctccaggccccatgggtccacctggagaaatgccatgtcctcctggaaatgatgggctgcctggagcccctggtatccctggagagtgtggagagaagggggagcctggcgagaggggccctccagggcttccagctcatctagatgaggagctccaagccacactccacgactttagacatcaaatcctgcagacaaggggagccctcagtctgcagggctccataatgacagtaggagagaaggtcttctccagcaatgggcagtccatcacttttgatgccattcaggaggcatgtgccagagcaggcggccgcattgctgtcccaaggaatccagaggaaaatgaggccattgcaagcttcgtgaagaagtacaacacatatgcctatgtaggcctgactgagggtcccagccctggagacttccgctactcagacgggacccctgtaaactacaccaactggtaccgaggggagcccgcaggtcggggaaaagagcagtgtgtggagatgtacacagatgggcagtggaatgacaggaactgcctgtactcccgactgaccatctgtgagttctgagaggcatttaggccatgggacagggaggacgctctctggccttcggcctccatcctgaggctccacttggtctgtgagatgctagaactccctttcaacagaattcacttgtggctattgggactggaggcacccttagccacttcattcctctgatgggccctgactcttccccataatcactgaccagccttgacactccccttgcaaactctcccagcactgcaccccaggcagccactcttagccttggccttcgacatgagatggagccctccttattccccatctggtccagttccttcacttacagatggcagcagtgaggtcttggggtagaaggaccctccaaagtcacacaaagtgcctgcctcctggtcccctcagctctctctctgcaacccagtgccatcaggatgagcaatcctggccaagcataatgacagagagaggcagacttcggggaagccctgactgtgcagagctaaggacacagtggagattctctggcactctgaggtctctgtggcaggcctggtcaggctctccatgaggttagaaggccaggtagtgttccagcagggtggtggccaagccaaccccatgattgatgtgtacgattcactcctttgagtctttgaatggcaactcagccccctgacctgaagacagccagcctaggcctctagggtgacctagagccgccttcagatgtgacccgagtaactttcaactgatgaacaaatctgcaccctacttcagatttcagtgggcattcacaccaccccccacaccactggctctgctttctcctttcattaatccattcacccagatatttcattaaaattatcacgtgccaggtcttaggatatgtcgtggggtgggcaaggtaatcagtgacagttgaagatttttttttcccagagcttatgtcttcatctgtgaaatgggaataagatacttgttgctgtcacagttattaccatccccccagctaccaaaattactaccagaactgttactatacacagaggctattgactgagcacctatcatttgccaagaaccttgacaagcacttctaatacagcatattatgtactattcaatctttacacaatgtcacgggaccagtattgtttcctcattttttataaggacactgaagcttggaggagttaaatgttttgagtattattccagagagcaagtggcagaggctggatccaaacccatcttcctggacctgaagcttatgcttccagccaccccactcctgagctgaataaagatgatttaagcttaataaatcgtgaatgtgttca

SEQ ID NO: 291457 - DNA, 953 bp, Artificial Sequence
  derived and/or modified sequence
gaggcagagacccaagcagctggaggctctgtgtgtggcctggagaccccacaacctccagccggaggcctgaagcatgaggccatgccaggtgccaggagcagcgactggacccagagccatgtggctgtgccctctggccctcaacctcatcttgatggcagcctctggtgctgtgtgcgaagtgaaggacgtttgtgttggaagccctggtatccccggcactcctggatcccacggcctgccaggcagggacgggagagatggtctcaaaggagaccctggccctccaggccccatgggtccacctggagaaatgccatgtcctcctggaaatgatgggctgcctggagcccctggtatccctggagagtgtggagagaagggggagcctggcgagaggggccctccagggcttccagctcatctagatgaggagctccaagccacactccacgactttagacatcaaatcctgcagacaaggggagccctcagtctgcagggctccataatgacagtaggagagaaggtcttctccagcaatgggcagtccatcacttttgatgccattcaggaggcatgtgccagagcaggcggccgcattgctgtcccaaggaatccagaggaaaatgaggccattgcaagcttcgtgaagaagtacaacacatatgcctatgtaggcctgactgagggtcccagccctggagacttccgctactcagacgggacccctgtaaactacaccaactggtaccgaggggagcccgcaggtcggggaaaagagcagtgtgtggagatgtacacagatgggcagtggaatgacaggaactgcctgtactcccgactgaccatctgtgagttctgagaggcatttaggccatgggacagggaggacgctctctggccttcggcctccatcctgaggctccacttggtctgtgagatgctag

SEQ ID NO: 291458 - DNA, 2141 bp, Artificial Sequence
  derived and/or modified sequence
gacttggaggcagagacccaagcagctggaggctctgtgtgtgggagcagcgactggacccagagccatgtggctgtgccctctggccctcaacctcatcttgatggcagcctctggtgctgtgtgcgaagtgaaggacgtttgtgttggaagccctggtatccccggcactcctggatcccacggcctgccaggcagggacgggagagatggtctcaaaggagaccctggccctccaggccccatgggtccacctggagaaatgccatgtcctcctggaaatgatgggctgcctggagcccctggtatccctggagagtgtggagagaagggggagcctggcgagaggggccctccagggcttccagctcatctagatgaggagctccaagccacactccacgactttagacatcaaatcctgcagacaaggggagccctcagtctgcagggctccataatgacagtaggagagaaggtcttctccagcaatgggcagtccatcacttttgatgccattcaggaggcatgtgccagagcaggcggccgcattgctgtcccaaggaatccagaggaaaatgaggccattgcaagcttcgtgaagaagtacaacacatatgcctatgtaggcctgactgagggtcccagccctggagacttccgctactcagacgggacccctgtaaactacaccaactggtaccgaggggagcccgcaggtcggggaaaagagcagtgtgtggagatgtacacagatgggcagtggaatgacaggaactgcctgtactcccgactgaccatctgtgagttctgagaggcatttaggccatgggacagggaggacgctctctggccttcggcctccatcctgaggctccacttggtctgtgagatgctagaactccctttcaacagaattcacttgtggctattgggactggaggcacccttagccacttcattcctctgatgggccctgactcttccccataatcactgaccagccttgacactccccttgcaaactctcccagcactgcaccccaggcagccactcttagccttggccttcgacatgagatggagccctccttattccccatctggtccagttccttcacttacagatggcagcagtgaggtcttggggtagaaggaccctccaaagtcacacaaagtgcctgcctcctggtcccctcagctctctctctgcaacccagtgccatcaggatgagcaatcctggccaagcataatgacagagagaggcagacttcggggaagccctgactgtgcagagctaaggacacagtggagattctctggcactctgaggtctctgtggcaggcctggtcaggctctccatgaggttagaaggccaggtagtgttccagcagggtggtggccaagccaaccccatgattgatgtgtacgattcactcctttgagtctttgaatggcaactcagccccctgacctgaagacagccagcctaggcctctagggtgacctagagccgccttcagatgtgacccgagtaactttcaactgatgaacaaatctgcaccctacttcagatttcagtgggcattcacaccaccccccacaccactggctctgctttctcctttcattaatccattcacccagatatttcattaaaattatcacgtgccaggtcttaggatatgtcgtggggtgggcaaggtaatcagtgacagttgaagatttttttttcccagagcttatgtcttcatctgtgaaatgggaataagatacttgttgctgtcacagttattaccatccccccagctaccaaaattactaccagaactgttactatacacagaggctattgactgagcacctatcatttgccaagaaccttgacaagcacttctaatacagcatattatgtactattcaatctttacacaatgtcacgggaccagtattgtttcctcattttttataaggacactgaagcttggaggagttaaatgttttgagtattattccagagagcaagtggcagaggctggatccaaacccatcttcctggacctgaagcttatgcttccagccaccccactcctgagctgaataaagatgatttaagcttaataaatcgtgaatgtgttc

SEQ ID NO: 291459 - DNA, 527 bp, Artificial Sequence
  derived and/or modified sequence
gacccaagcagctggaggctctgtgtgtgggagcagcgactggacccagagccatgtggctgtgccctctggccctcaacctcatcttgatggcagcctctggtgctgtgtgcgaagtgaaggacgtttgtgttggaagccctggtatccccggcactcctggatcccacggcctgccaggcagggacgggagagatggtctcaaaggagaccctggccctccaggccccatgggtccacctggagaaatgccatgtcctcctggaaatgatgggctgcctggagcccctggtatccctggagagtgtggagagaagggggagcctggcgagaggggccctccagggcttccagctcatctagatgaggagctccaagccacactccacgactttagacatcaaatcctgcagacaaggggagccctcagtctgcagggctccataatgacagtaggagagaaggtcttctccagcaatgggcagtccatcacttttgatgccattcaggaggcatgtgccagagca

SEQ ID NO: 291460 - DNA, 1008 bp, Artificial Sequence
  derived and/or modified sequence
atgagcagcttcctgagcagcagattccccccccacatggtgcccccccaccacaccctgcacaccaccggcatcccccaccccgccatcgtgacccccaccgtgaagcaggagagcagccagagcgacgtgggcagcctgcacagcagcaagcaccaggacagcaagaaggaggaggagaagaagaagccccacatcaagaagcccctgaacgccttcatgctgtacatgaaggagatgagagccaaggtggtggccgagtgcaccctgaaggagagcgccgccatcaaccagatcctgggcagaagatggcacgccctgagcagagaggagcaggccaagtactacgagctggccagaaaggagagacagctgcacatgcagctgtaccccggctggagcgccagagacaactacggcaagaagaagaagagaaagagagacaagcagcccggcgagaccaacgagcacagcgagtgcttcctgaacccctgcctgagcctgccccccatcaccgacctgagcgcccccaagaagtgcagagccagattcggcctggaccagcagaacaactggtgcggcccctgcagaagaaagaagaagtgcgtgagatacatccagggcgagggcagctgcctgagcccccccagcagcgacggcagcctgctggacagccccccccccagccccaacctgctgggcagcccccccagagacgccaagagccagaccgagcagacccagcccctgagcctgagcctgaagcccgaccccctggcccacctgagcatgatgccccccccccccgccctgctgctggccgaggccacccacaaggccagcgccctgtgccccaacggcgccctggacctgccccccgccgccctgcagcccgccgcccccagcagcagcatcgcccagcccagcaccagcagcctgcacagccacagcagcctggccggcacccagccccagcccctgagcctggtgaccaagagcctggagtag

SEQ ID NO: 291461 - DNA, 1008 bp, Artificial Sequence
  derived and/or modified sequence
atgtccagttttcttagttcacgctttcctccccacatggtgcccccacatcacacccttcacaccactggcatccctcatcccgctatcgtgacccccacggtgaagcaggaatcttcgcaatccgacgtcggctctctccactccagcaagcaccaggattctaaaaaggaagaagagaagaagaaaccgcacatcaagaagcccctgaacgctttcatgctctatatgaaggaaatgagggccaaggtagttgcagagtgcaccctgaaagagtccgctgcaatcaaccagattcttgggcgtaggtggcacgctctttctagggaggagcaggcaaagtattacgagttagcaagaaaagagcggcagctgcatatgcagctttaccctggatggtcagcaagggacaactacggcaaaaaaaaaaagcgcaagagggataaacaaccaggtgaaaccaatgagcacagcgaatgctttctgaatccttgcttatctctaccgcctatcaccgatcttagcgcccctaagaagtgcagagcccgctttggtctggatcagcagaataattggtgtggtccgtgcaggcgcaaaaagaagtgcgtgaggtacattcagggcgaggggagctgtctgtcaccgccctccagtgatggaagcttgctggatagtcctcctccgagtcctaacttgctcggctccccaccccgtgacgctaaatctcaaactgagcagacacagccactgtctctaagcctgaaacccgatcccctcgcacacctcagcatgatgccccccccacctgctctcctgctggcagaggctacccacaaagcctccgccttgtgtccaaacggcgcgcttgaccttccacccgcagctctacagccagccgctccttctagttccatcgcccaaccttcaaccagtagtttacattctcattcctctcttgctgggactcagccccaaccccttagcctggtgactaagagtcttgagtag

SEQ ID NO: 291462 - DNA, 1008 bp, Artificial Sequence
  derived and/or modified sequence
atgagcagcttcctgagcagccgcttccccccccacatggtgcccccccaccacaccctgcacaccaccggcatcccccacccagccatcgtgacccccaccgtgaagcaggagagcagccagagtgatgtgggcagcctgcacagcagcaagcaccaggacagcaagaaggaggaggagaagaagaagccccacatcaagaagcccctgaatgccttcatgctgtacatgaaggagatgagggccaaggtggtggctgaatgtaccctgaaggagagcgctgccatcaaccagatcctgggccgccgctggcacgccctgagccgggaggagcaggccaagtactatgagctggccaggaaggagcggcagctgcacatgcagctgtacccaggctggagcgcccgggacaactacggcaagaagaagaagaggaagagggacaagcagcctggagagaccaatgagcacagcgagtgcttcctgaacccctgcctgagcctgccccccatcacagacctgagcgcccccaagaagtgccgggcccgcttcggcctggaccagcagaacaactggtgtggcccctgcaggaggaagaagaagtgtgtgcgctacatccagggcgagggcagctgcctgagcccccccagcagtgatggcagcctgctggacagccccccacccagccccaacctgctgggcagccccccaagagatgccaagagccagacagagcagacccagcccctgagcctgagcctgaagccagaccccctggcccacctgtccatgatgcctcctcctccagccctgctgctggccgaggccacccacaaggccagcgccctgtgccccaacggggccctggacctgcccccagctgccctgcagcctgctgcccccagcagcagcatcgcccagcccagcaccagcagcctgcacagccacagcagcctggccggcacccagccccagcccctgagcctggtgaccaagagcctggagtag

SEQ ID NO: 291463 - DNA, 1008 bp, Artificial Sequence
  derived and/or modified sequence
atgagcagcttcctgagcagccggttccccccccacatggtgcccccacatcacaccttgcataccacaggaattcctcatccagctattgttacacccactgtgaaacaggagtcaagtcagtccgacgtcggtagcctgcactcttctaaacaccaggattcaaaaaaggaggaagagaaaaagaaacctcatattaagaagcccctgaacgcatttatgctgtacatgaaagagatgcgcgctaaggtggttgcagaatgtaccctaaaagaatctgccgcaatcaaccaaatattaggacgtcgctggcacgcactgtcacgcgaggagcaggccaagtactacgagctagcgagaaaagaaagacagcttcatatgcagctgtacccggggtggtccgccagagacaattacggcaagaagaaaaagcggaaacgcgataagcagcccggcgagaccaacgagcattcagaatgttttctcaatccgtgcctgtcattgccaccgattacagacctgtcggctcctaagaaatgtagggctcggttcggcctggaccagcagaacaattggtgcggaccctgcagaagaaaaaagaaatgcgtgagatacattcagggcgaaggttcatgtctgagcccccccagcagcgacggcagtctcctcgactcgcctcctcccagtccaaacctattaggatcccctcctagagatgcaaaatctcagacggagcagacgcagccactttccctttccttgaaaccagacccacttgcacatctgagcatgatgccccccccccccgctctgctgttagctgaagcaactcataaagcctctgcactgtgtccaaacggcgctctcgatctaccacccgctgctctgcagccagccgctccctcttcatctatagctcagccatctactagttctctccacagtcactcgtctttagcaggaactcaaccacagccactttcactggtaacaaaatcactggaatag

SEQ ID NO: 291464 - DNA, 1008 bp, Artificial Sequence
  derived and/or modified sequence
atgtctagcttcctgagttcacggttcccgcctcacatggttcctcctcaccacaccctacataccacgggcatcccacatcctgccattgttactcccaccgtcaagcaggaatccagtcaatccgacgtgggatcacttcattccagcaaacaccaagattcaaagaaagaagaggagaagaagaaaccccacataaagaaaccactgaacgcatttatgctgtatatgaaggaaatgcgcgcaaaggtcgtggcagagtgtaccttaaaagagtctgccgcaatcaatcagattttggggcgacggtggcatgctttatcaagagaggagcaagcaaagtactacgagcttgccaggaaggagcggcagctccacatgcagctgtatcctggctggagtgcaagagacaactatggaaagaaaaagaaaaggaagagggacaaacaaccaggagaaaccaacgaacatagcgagtgcttcctgaacccatgcctctctctgcccccaatcacagacttgtcagccccaaaaaaatgcagggcccgtttcggcttagatcagcagaataactggtgtgggccttgtaggcggaaaaagaagtgcgtgaggtacatacagggtgagggatcatgcctgagtcctccttctagcgatggatcactgcttgattccccccctcccagtcctaatctgctcgggtcccccccacgagacgctaagagtcagaccgagcagactcagccactttccctcagcctgaaacccgatccactagctcacttgtctatgatgcccccacctcctgctttgctgctggctgaagcgacacacaaagcatctgctttatgccctaacggggctcttgatttgccacctgctgctctgcagcccgctgccccttcttctagcatagcccagccttctactagtagtctgcactcgcatagctccctcgccggtacccagccacaacccttgagcctagtgaccaaaagtctcgaatag

SEQ ID NO: 291465 - protein, 368 aa, Artificial Sequence
  derived and/or modified sequence
MQPGSSRCEEETPSLLWGLDPVFLAFAKLYIRDILDMKESRQVPGVFLYNGHPIKQVDVLGTVIGVRERDAFYSYGVDDSTGVINCICWKKLNTESVSAAPSAARELSLTSQLKKLQETIEQKTKIEIGDTIRVRGSIRTYREEREIHATTYYKVDDPVWNIQIARMLELPTIYRKVYDQPFHSSALEKEEALSNPGALDLPSLTSLLSEKAKEFLMENRVQSFYQQELEMVESLLSLANQPVIHSASSDQVNFKKDTTSKAIHSIFKNAIQLLQEKGLVFQKDDGFDNLYYVTREDKDLHRKIHRIIQQDCQKPNHMEKGCHFLHILACARLSIRPGLSEAVLQQVLELLEDQSDIVSTMEHYYTAF

SEQ ID NO: 291466 - DNA, 1107 bp, Artificial Sequence
  derived and/or modified sequence
atgcagcccggcagcagcagatgcgaggaggagacccccagcctgctgtggggcctggaccccgtgttcctggccttcgccaagctgtacatcagagacatcctggacatgaaggagagcagacaggtgcccggcgtgttcctgtacaacggccaccccatcaagcaggtggacgtgctgggcaccgtgatcggcgtgagagagagagacgccttctacagctacggcgtggacgacagcaccggcgtgatcaactgcatctgctggaagaagctgaacaccgagagcgtgagcgccgcccccagcgccgccagagagctgagcctgaccagccagctgaagaagctgcaggagaccatcgagcagaagaccaagatcgagatcggcgacaccatcagagtgagaggcagcatcagaacctacagagaggagagagagatccacgccaccacctactacaaggtggacgaccccgtgtggaacatccagatcgccagaatgctggagctgcccaccatctacagaaaggtgtacgaccagcccttccacagcagcgccctggagaaggaggaggccctgagcaaccccggcgccctggacctgcccagcctgaccagcctgctgagcgagaaggccaaggagttcctgatggagaacagagtgcagagcttctaccagcaggagctggagatggtggagagcctgctgagcctggccaaccagcccgtgatccacagcgccagcagcgaccaggtgaacttcaagaaggacaccaccagcaaggccatccacagcatcttcaagaacgccatccagctgctgcaggagaagggcctggtgttccagaaggacgacggcttcgacaacctgtactacgtgaccagagaggacaaggacctgcacagaaagatccacagaatcatccagcaggactgccagaagcccaaccacatggagaagggctgccacttcctgcacatcctggcctgcgccagactgagcatcagacccggcctgagcgaggccgtgctgcagcaggtgctggagctgctggaggaccagagcgacatcgtgagcaccatggagcactactacaccgccttctag

SEQ ID NO: 291467 - DNA, 1107 bp, Artificial Sequence
  derived and/or modified sequence
atgcagccaggctcatctcgctgcgaagaggagaccccttctctgctttggggcctggatcccgtcttcctggcttttgctaaactttacattagggacattcttgatatgaaagagtctcgccaggtgcccggcgtgttcctgtataacggccatccgatcaaacaggtggacgtcctggggacagtcatcggtgtgagagagagagatgcattttacagttacggtgtggacgatagtactggcgtcattaactgcatttgctggaagaagctgaatacagaatccgtaagcgctgctcctagcgccgctagagagctgtcccttaccagccagctgaagaaattgcaggagacgatagaacagaagacaaagattgagattggcgacacaatccgcgtgagagggagcataagaacctacagggaggaaagggaaattcatgccactacatactacaaggtcgacgatccagtgtggaacatccaaattgcccgcatgttagagttgccaacgatctatcggaaagtttacgatcagcccttccattcgagtgccctcgagaaggaagaggctctgtcgaaccccggtgcgctggacctcccaagcctcacatctctgctgtctgagaaggctaaggagttcctgatggaaaacagggtccagagcttttaccaacaagagctcgagatggtcgagtctctcttatcactagcaaaccaacccgtgattcatagcgcttcaagtgaccaggtgaacttcaagaaagacacaactagtaaagcgattcattctatattcaagaatgcaattcagcttctccaggagaagggcctcgtgttccagaaggatgatggcttcgataacctgtattatgtgacaagggaagataaagacctccaccgcaagatccatcggataatccagcaggattgtcagaaaccgaaccatatggaaaagggatgtcattttctccacatactggcctgtgcccgactttcaattagacctggactttctgaggcagtcttgcagcaggtgctggaattgctggaagaccagtccgacattgttagtaccatggagcactattacacggcattctag

SEQ ID NO: 291468 - DNA, 1107 bp, Artificial Sequence
  derived and/or modified sequence
atgcagcccggcagcagccgctgtgaggaggagacccccagcctgctgtggggcctggaccctgtgttcctggcctttgccaagctgtacatccgggacatcctggacatgaaggagagccggcaggtgcctggggtcttcctgtacaacggccaccccatcaagcaggtggatgtgctgggcaccgtcatcggcgtgcgggagagagatgccttctacagctatggagtggatgacagcactggagtcatcaactgcatctgctggaagaagctgaacacagagagcgtgtctgctgcccccagcgctgcccgggagctgagcctgaccagccagctgaagaagctgcaggagaccatcgagcagaagaccaagattgagatcggggacaccatccgggtgcggggcagcatccgcacctaccgggaggagcgggagatccacgccaccacctactacaaggtggatgatcctgtgtggaacatccagatcgccaggatgctggagctgcccaccatctacaggaaggtgtatgaccagcccttccacagcagcgccctggagaaggaggaggccctgagcaaccctggggccctggacctgcccagcctgaccagcctgctgtctgagaaggccaaggagttcctgatggagaacagagtgcagagcttctaccagcaggagctggagatggtggagagcctgctgagcctggccaaccagcccgtcatccacagcgccagcagtgaccaggtgaacttcaagaaggacaccaccagcaaggccatccacagcatcttcaagaatgccatccagctgctgcaggagaagggcctggtgttccagaaggatgatggctttgacaacctgtactacgtgacccgggaggacaaggacctgcacaggaagatccaccgcatcatccagcaggactgccagaagcccaaccacatggagaagggctgccacttcctgcacatcctggcctgtgcccggctgagcatccggcccggcctgtctgaggccgtgctgcagcaggtgctggagctgctggaggaccagagcgacatcgtgtccaccatggagcactactacacagccttctag

SEQ ID NO: 291469 - DNA, 1107 bp, Artificial Sequence
  derived and/or modified sequence
atgcagcccggcagcagccggtgcgaggaggagacccccagcctgttgtgggggctggatcctgtcttcctggcattcgccaagttgtatattcgggacattttagacatgaaagagtccagacaagtgcctggcgtattcctgtacaacgggcatcctatcaagcaagtagacgtgctaggcacagtgattggcgtgagggagagagatgcattctacagttacggcgtagacgactcgactggcgtcataaactgtatctgctggaagaagctaaataccgagtccgtctctgctgcacctagcgcggctcgggagctctcactcacgagtcagctgaagaaactccaagagactatcgaacaaaaaactaaaatcgaaataggagatacgatcagagtgcgaggcagcatccgcacatacagggaggaaagagagatacatgctaccacttactataaggtcgatgatcctgtctggaacatacagatcgcccggatgttagagttaccgaccatttacagaaaagtgtatgaccagccgtttcactcctctgctctggagaaggaagaagcccttagcaatccgggcgcattagatctgccaagccttacgagcttgctctctgagaaagctaaggaattcctgatggagaatcgagtgcagagtttctaccagcaggagctggaaatggttgaatcactcctgagcctagctaaccaacctgtgatccattccgcttcctccgatcaagtgaattttaagaaagacacaacgtctaaggctatccactcaatattcaaaaacgctatccagcttttgcaagagaaaggcttggtattccagaaggacgacggtttcgacaatttatattatgtgactagggaagataaggacctgcatagaaagatccatagaataatccagcaggactgtcagaagcccaatcacatggagaaggggtgtcactttctgcacattctggcatgcgcccgcctttcaattagacctggtctgagcgaggccgtcctacagcaggtgctggaacttcttgaggaccagagcgacatcgtgagcaccatggagcattactataccgctttctag

SEQ ID NO: 291470 - DNA, 1417 bp, Artificial Sequence
  derived and/or modified sequence
ccaactgctcctgcgccgggcggggtcgtcgccgccagcggctccgagcgccggaagggccaggtctcagggctcctggagctgcaggcggcgggaggggctacaaatgcttgactcagtgatgcagaacctttcagagttagctggaagccacagccctgcctcttgatgcagcctggatccagccggtgtgaagaggagaccccttccctcttgtggggtttggatcctgtgtttctagcctttgcaaaactctacatcagggatatcctggacatgaaggagtcccgccaggtgccaggtgtatttttgtacaatggacatccaataaaacaggtagatgtcttgggaactgtcattggagtgagagaaagagatgctttctacagttatggagtggatgacagcactggagttataaactgcatctgctggaaaaagttgaatactgagtctgtatcagctgctccaagtgcagcaagagagctcagcttaacctcacaacttaagaagctacaagagaccattgagcagaaaacaaagatagagatcggggacacgatccgagtcagaggcagtatccgcacatacagagaagagcgagagattcatgccaccacttactataaagtggacgacccagtgtggaacattcaaattgcaaggatgcttgagctgcccactatctacaggaaagtttatgaccagccttttcacagctcagccctagagaaagaagaggcactaagcaatccaggcgccctggacctccccagtctcacgagtttgctgagtgaaaaagccaaagaattcctcatggagaacagagtgcagagcttttaccagcaggagctggaaatggtggagtctttgctgtcccttgccaatcagcctgtgattcacagtgcctcctccgaccaagtgaattttaagaaggacaccacttccaaggcaattcatagtatatttaagaatgctatacaactgctgcaggaaaaaggacttgttttccagaaagatgatggttttgataacctatactatgtaaccagagaagacaaagacctgcacagaaagatccaccggatcattcagcaggactgccagaaaccaaatcacatggagaagggctgtcacttcctgcacatcttggcctgtgctcgcctgagcatccgcccgggcctgagcgaggctgtgctgcagcaagttctggagctcctggaggaccagagtgacattgtcagcacaatggagcactactacacagcgttctgagcagagacacgcagaccagctgaggaggacaaagataaggtggcattcacccccaggctctgactttcagcatcatgcaggggcttatctgtctggaggcagttacctcataataaactataaaatatagtcatcttgggaa

SEQ ID NO: 291471 - DNA, 1311 bp, Artificial Sequence
  derived and/or modified sequence
gtgtcccatctagatgcttgactcagtgatgcagaacctttcagagttagctggaagccacagccctgcctcttgatgcagcctggatccagccggtgtgaagaggagaccccttccctcttgtggggtttggatcctgtgtttctagcctttgcaaaactctacatcagggatatcctggacatgaaggagtcccgccaggtgccaggtgtatttttgtacaatggacatccaataaaacaggtagatgtcttgggaactgtcattggagtgagagaaagagatgctttctacagttatggagtggatgacagcactggagttataaactgcatctgctggaaaaagttgaatactgagtctgtatcagctgctccaagtgcagcaagagagctcagcttaacctcacaacttaagaagctacaagagaccattgagcagaaaacaaagatagagatcggggacacgatccgagtcagaggcagtatccgcacatacagagaagagcgagagattcatgccaccacttactataaagtggacgacccagtgtggaacattcaaattgcaaggatgcttgagctgcccactatctacaggaaagtttatgaccagccttttcacagctcagccctagagaaagaagaggcactaagcaatccaggcgccctggacctccccagtctcacgagtttgctgagtgaaaaagccaaagaattcctcatggagaacagagtgcagagcttttaccagcaggagctggaaatggtggagtctttgctgtcccttgccaatcagcctgtgattcacagtgcctcctccgaccaagtgaattttaagaaggacaccacttccaaggcaattcatagtatatttaagaatgctatacaactgctgcaggaaaaaggacttgttttccagaaagatgatggttttgataacctatactatgtaaccagagaagacaaagacctgcacagaaagatccaccggatcattcagcaggactgccagaaaccaaatcacatggagaagggctgtcacttcctgcacatcttggcctgtgctcgcctgagcatccgcccgggcctgagcgaggctgtgctgcagcaagttctggagctcctggaggaccagagtgacattgtcagcacaatggagcactactacacagcgttctgagcagagacacgcagaccagctgaggaggacaaagataaggtggcattcacccccaggctctgactttcagcatcatgcaggggcttatctgtctggaggcagttacctcataataaactataaaatata

SEQ ID NO: 291472 - DNA, 1107 bp, Artificial Sequence
  derived and/or modified sequence
atgcaacctggctcctcacggtgcgaggaagagactccctctttgctttggggactggacccggtctttctggcatttgccaagctgtatatcagggatatcctggatatgaaggagtctagacaggtgcccggagtgttcctgtacaatggacaccctattaagcaggtggacgttctgggcaccgtaatcggtgtgcgtgagcgggacgctttttactcatatggtgtagacgactcaaccggtgtgatcaactgcatttgctggaaaaaactgaacaccgagagtgtgagcgcagcgcctagtgctgctcgtgagttatcactgacctcccagttaaagaagttacaggagaccatagaacagaaaaccaagatcgagatcggagacacgattagagttcggggaagcattcggacttatcgagaggagcgcgagattcatgcaacaacctactacaaagttgatgaccctgtctggaacattcagattgccaggatgctcgagctgcctacaatctacaggaaagtttatgatcaacctttccactcctccgcccttgagaaagaagaggctttgtcgaaccccggagcactggatctgccgagcctcacatcacttctctctgaaaaggcgaaagagttcctgatggaaaatcgggtgcagtcgttctaccagcaggagcttgaaatggtggaaagcctcctatcccttgcaaatcagccagttatacattctgccagctcagatcaagtgaactttaagaaagatacaacaagcaaagctatccattccattttcaaaaacgcgatccagctgctccaagaaaaagggcttgtttttcagaaggatgacggtttcgacaatctatactacgtgacaagggaagataaagacctccaccgaaaaattcaccggatcatacaacaggattgtcagaagcccaaccacatggaaaaagggtgccattttctgcatatcctcgcctgcgcccgtctctcaattcgtcccggactgagcgaagctgtgcttcagcaagttttggagctgctggaggaccagtccgacatcgtatctacaatggagcactactacactgccttttag

SEQ ID NO: 291473 - DNA, 1107 bp, Artificial Sequence
  derived and/or modified sequence
atgcagcctggctccagtagatgcgaggaagagactcccagcctgctgtgggggcttgaccccgtctttctggcattcgccaagctctatatacgggacatccttgacatgaaggagagccgtcaggtgcctggagtgtttctttacaatggtcacccaatcaaacaggtagatgtactgggaaccgtgatcggtgttcgtgagagagatgccttttactcttatggtgttgatgatagcaccggtgtgatcaactgcatctgctggaagaaacttaacacagaatccgtttctgcagccccaagcgccgctcgcgaactcagcctgacatcgcaacttaagaagctgcaagagaccatcgaacagaagactaagatcgagatcggcgacacaatcagggtgagaggaagcattcgcacctaccgggaagaaagagagatccacgctacaacttattataaagtcgacgacccagtgtggaatatccagatagccaggatgctagagctgccaactatttaccgaaaggtttacgaccaacctttccatagcagcgcccttgagaaggaagaagcccttagcaatccgggcgccttagatctgcctagtctaacctctctgttatcagaaaaggcaaaggaattccttatggagaaccgagtgcagtctttttaccagcaggaactggaaatggtcgagagtcttctgagtttggctaaccagcccgtcatccactcagccagctctgaccaggttaacttcaagaaggatacaacatctaaggcgatccactccatcttcaagaacgccatccaacttctgcaggagaaaggactcgtatttcaaaaggacgacgggtttgataatctctattacgtaacacgtgaagacaaggacttgcaccggaagatccaccgcattattcagcaagactgccagaagcccaatcacatggagaagggttgccacttcctgcacatccttgcctgcgcgaggctcagcatcagacctgggttatccgaggccgtgcttcagcaagtgcttgagctcttagaggatcagagcgatattgtatccacaatggagcactactacacagccttttag

SEQ ID NO: 291474 - DNA, 1107 bp, Artificial Sequence
  derived and/or modified sequence
atgcagcccggcagcagccggtgcgaggaggagacccccagcctgttatggggtttggatccagttttcctcgcgtttgcaaagctttacatacgggatatcttagacatgaaggagagtcggcaagtgcccggggtcttcttatacaacggccatcctattaagcaggttgatgtccttggtaccgtgattggcgtccgtgagcgcgacgccttctattcgtacggggttgatgattctacaggagtcatcaattgtatctgctggaagaaattaaacacagagtctgtgtcagctgcaccaagtgccgcccgtgaactcagcctgacctctcaactaaagaaactccaagaaacaatcgagcagaagaccaaaattgaaattggagatacgattcgagtgagggggtcaattcgaacataccgcgaggaacgtgagatacacgctaccacatactacaaggtggatgatcctgtttggaacatccaaattgcccgcatgctcgagttgcctaccatctatcgcaaggtgtacgaccagccattccactcgtctgcgctggagaaggaggaggctctgtcgaaccccggggcgctagatctgccaagtctcactagcttgttatctgagaaggccaaggaattcctcatggaaaatagggtgcagagtttctatcaacaggaactggaaatggtggaatctttgctgtccctggcaaaccagcctgtcatccacagcgcatcttccgatcaagtgaactttaagaaggacaccacttcaaaggcgatacactcaatattcaagaacgctatccagctcctgcaagaaaaggggctggtcttccagaaggacgatgggttcgacaatctgtactacgtaacccgggaggataaggacctacatcggaaaatccaccggatcatccagcaggactgccagaaaccgaaccacatggaaaaggggtgccacttcttacacattctagcctgtgcccgcttgagcatccgaccagggctgagcgaagcggtactgcagcaggtgctggagttgctggaggatcagtcagatattgtctccacaatggagcattactacacagcattctag

SEQ ID NO: 291475 - DNA, 1107 bp, Artificial Sequence
  derived and/or modified sequence
atgcagccaggctcatctcgatgtgaagaagaaacccccagcctgctgtgggggctggaccccgtattcttagctttcgccaagctatatattcgagatatcctggacatgaaggagtcccggcaggttcctggcgtgtttctctacaatgggcacccaataaagcaagtcgacgttttggggaccgtcattggagtgagggaaagagatgccttttactcttatggcgtcgatgattcgactggcgtgattaattgcatctgctggaagaagctaaatacagagagtgtgagcgcggcaccatcagcggcaagagaactgtcgttaacatcccagcttaagaagctgcaggagacgatcgagcaaaaaacaaagatcgagattggagacacaatcagggttcgcggatcgatacgaacctacagagaggagagagaaatccacgccacaacctactacaaggttgatgatcctgtgtggaatatccagattgccaggatgttggagttgccgacaatctaccggaaggtctatgatcagcctttccattctagtgccctcgagaaggaggaagcactaagcaatccaggtgccctcgatctgccatccctcacctctcttcttagcgaaaaggcgaaagagtttcttatggagaacagagtccagtcgttctatcaacaggaattagagatggtcgagagtctcctcagtctggccaaccagcctgtcatacattccgcatccagcgaccaggtaaactttaagaaagataccacgagcaaagccattcattcgatattcaagaatgcaatacagctgcttcaggaaaaggggctggttttccaaaaggatgacggttttgacaatttatattatgtgacccgcgaagataaggatctccatagaaagatccaccgaattatccagcaagattgtcagaagccaaaccatatggagaagggctgccatttcttgcacattttggcctgcgctaggctgtctatcagacctgggttgtccgaggccgtgcttcagcaggtcttagagctcctggaagaccaaagcgacatcgtgagtacaatggagcattattatacagctttctag

SEQ ID NO: 291476 - protein, 234 aa, Artificial Sequence
  derived and/or modified sequence
MMIRIFPYGAIQFMAFEHYKTLITTKLGISGHVHRLMAGSMAGMTAVICTYPLDMVRVRLAFQVKGEHSYTGIIHAFKTIYAKEGGFFGFYRGLMPTILGMAPYAGVSFFTFGTLKSVGLSHAPTLLGRPSSDNPNVLVLKTHVNLLCGGVAGAIAQTISYPFDVTRRRMQLGTVLPEFEKCLTMRDTMKYVYGHHGIRKGLYRGLSLNYIRCIPSQAVAFTTYELMKQFFHLN

SEQ ID NO: 291477 - DNA, 705 bp, Artificial Sequence
  derived and/or modified sequence
atgatgatccggatcttcccttatggcgccatccagtttatggcgtttgagcactacaaaacgctgatcaccacaaagttggggattagtggccacgttcatcgcctgatggccggctccatggcaggaatgacggccgtcatatgtacatatccactcgacatggtgagggttcgtcttgccttccaggtgaaaggagagcattcctatactggtatcatccacgctttcaagacaatctacgcgaaagaggggggattcttcggattctatcgcggtttgatgccaaccatcctgggaatggccccctatgctggcgtctccttttttaccttcggaacgctcaagtccgtgggcctttcacacgctcccactctcctgggacggccatcttcagacaatcccaacgttctggtactgaaaacacacgtgaacttattgtgtggcggggttgccggggcaatcgcccagaccatcagttatcccttcgacgtcacacggcgcaggatgcagctgggaaccgtgctgcctgaattcgaaaaatgccttactatgcgggatactatgaaatatgtgtacgggcaccatgggatccgtaagggcttgtaccgaggactgtccctcaattacatccgttgcatcccatctcaagctgtggcatttacaacttatgaactgatgaagcagttttttcatctcaactag

SEQ ID NO: 291478 - DNA, 705 bp, Artificial Sequence
  derived and/or modified sequence
atgatgatccgcatcttcccctacggggccatccagttcatggcctttgagcactacaagaccctcatcaccaccaagctgggcatcagcggccacgtgcaccggctgatggccggctccatggccggcatgacagctgtgatctgcacctaccccctggacatggtgcgggtgcggctggccttccaggtgaagggggagcacagctacacaggcatcatccacgccttcaagaccatctatgccaaggagggcggcttcttcggcttctaccggggcctgatgcccaccatcctgggcatggccccctatgccggcgtgtccttcttcaccttcggcaccctgaagtctgtgggcctgagccacgcccccaccctgctgggccggcccagcagtgacaaccccaacgtgctggtgctgaagacccacgtgaacctgctgtgtggcggcgtggccggggccatcgcccagaccatctcctacccctttgatgtgaccaggaggaggatgcagctgggcaccgtgctgcctgagtttgagaagtgcctgaccatgagggacaccatgaagtatgtgtatggccaccacggcatcaggaagggcctgtaccggggcctgagcctgaactacatccgctgcatccccagccaggccgtggccttcaccacctatgagctgatgaagcagttcttccacctgaactag

SEQ ID NO: 291479 - DNA, 705 bp, Artificial Sequence
  derived and/or modified sequence
atgatgatccggatcttcccctacggcgccatccagttcatggcctttgagcactacaagaccctaatcacgacgaaattaggaatttcagggcacgttcacaggctgatggcgggatcgatggctggcatgacagcagtcatttgcacgtatccactggacatggttcgggtccgtctggcgttccaggtcaaaggagagcactcgtacaccgggattattcacgccttcaaaacaatttacgcaaaagaggggggattttttggattttatcggggtctcatgcctaccatcctcggaatggctccctatgcaggggtgagctttttcacttttggaactctcaaaagtgtaggcttgtctcatgctcctactcttttggggcgtcccagttctgacaatccgaatgtacttgtgctgaagacccatgtaaatctgttgtgcggaggtgtagctggcgccatcgcacagaccatatcctacccctttgatgtgacgagacgacggatgcaacttggcacagtcctgccagagttcgagaagtgtctgacaatgagggacaccatgaagtacgtgtacggacatcacggaattcggaaggggctgtaccgaggcctctccctaaattacataagatgcataccaagtcaggcagtagctttcactacctatgaacttatgaagcagttctttcacctaaactag

SEQ ID NO: 291480 - DNA, 705 bp, Artificial Sequence
  derived and/or modified sequence
atgatgattagaatctttccctacggtgccatacagttcatggcttttgagcattacaagactctcattacaaccaagctgggaattagcggccacgtccacagacttatggcaggctcaatggccggaatgactgccgtcatctgcacctatccactcgacatggtgcgggtgcgactcgctttccaggtgaagggggagcacagctatactgggatcatccatgccttcaagacaatttacgcaaaggaagggggattctttggcttctacagggggctgatgcctacgatcttagggatggcaccgtacgcaggcgtcagtttctttaccttcgggacactcaagagtgttggtctctcccacgctcccaccctcttggggagaccgagttcagacaatccgaacgtgcttgtgctaaagacccacgtgaatctgctgtgcggcggagtagcaggcgcaatagcccagacaatcagttatccattcgacgtcaccagacgacggatgcagctggggacagttctcccagaattcgaaaagtgcctgaccatgcgtgatactatgaagtatgtgtatgggcatcatggcatacgtaagggactctacagaggactgagcctcaattacatccgatgcatcccttcacaggccgtggctttcacaacatatgaactgatgaaacagttttttcatctgaactag

SEQ ID NO: 291481 - DNA, 705 bp, Artificial Sequence
  derived and/or modified sequence
atgatgatcagaatcttcccctacggcgccatccagttcatggccttcgagcactacaagaccctgatcaccaccaagctgggcatcagcggccacgtgcacagactgatggccggcagcatggccggcatgaccgccgtgatctgcacctaccccctggacatggtgagagtgagactggccttccaggtgaagggcgagcacagctacaccggcatcatccacgccttcaagaccatctacgccaaggagggcggcttcttcggcttctacagaggcctgatgcccaccatcctgggcatggccccctacgccggcgtgagcttcttcaccttcggcaccctgaagagcgtgggcctgagccacgcccccaccctgctgggcagacccagcagcgacaaccccaacgtgctggtgctgaagacccacgtgaacctgctgtgcggcggcgtggccggcgccatcgcccagaccatcagctaccccttcgacgtgaccagaagaagaatgcagctgggcaccgtgctgcccgagttcgagaagtgcctgaccatgagagacaccatgaagtacgtgtacggccaccacggcatcagaaagggcctgtacagaggcctgagcctgaactacatcagatgcatccccagccaggccgtggccttcaccacctacgagctgatgaagcagttcttccacctgaactag

SEQ ID NO: 291482 - protein, 588 aa, Artificial Sequence
  derived and/or modified sequence
MATTATCTRFTDDYQLFEELGKGAFSVVRRCVKKTSTQEYAAKIINTKKLSARDHQKLEREARICRLLKHPNIVRLHDSISEEGFHYLVFDLVTGGELFEDIVAREYYSEADASHCIHQILESVNHIHQHDIVHRDLKPENLLLASKCKGAAVKLADFGLAIEVQGEQQAWFGFAGTPGYLSPEVLRKDPYGKPVDIWACGVILYILLVGYPPFWDEDQHKLYQQIKAGAYDFPSPEWDTVTPEAKNLINQMLTINPAKRITADQALKHPWVCQRSTVASMMHRQETVECLRKFNARRKLKGAILTTMLVSRNFSVGRQSSAPASPAASAAGLAGQAAKSLLNKKSDGGVKKRKSSSSVHLMPQSNNKNSLVSPAQEPAPLQTAMEPQTTVVHNATDGIKGSTESCNTTTEDEDLKAAPLRTGNGSSVPEGRSSRDRTAPSAGMQPQPSLCSSAMRKQEIIKITEQLIEAINNGDFEAYTKICDPGLTSFEPEALGNLVEGMDFHKFYFENLLSKNSKPIHTTILNPHVHVIGEDAACIAYIRLTQYIDGQGRPRTSQSEETRVWHRRDGKWLNVHYHCSGAPAAPLQ

SEQ ID NO: 291483 - DNA, 1767 bp, Artificial Sequence
  derived and/or modified sequence
atggctaccactgcaacatgcactcgatttacagacgattatcagctctttgaagagcttggaaagggcgctttctctgtcgtgagacgatgtgttaaaaagacatccacccaggaatatgccgctaagatcatcaatactaaaaaactatctgcaagggaccaccaaaagctcgaaagagaagcaaggatttgtagattactcaagcacccgaacatagtacggttgcacgactcgatttctgaggaaggctttcactacttagtctttgacttggtgacaggcggggagctgttcgaggatatcgtggcccgcgaatattattccgaagcagacgcttcacattgcatccatcaaatactggagtctgtgaaccacatccatcagcacgacattgtgcacagagaccttaagcctgaaaatttgctgctcgcatctaaatgcaagggagctgctgtgaagttggctgacttcggcctggccatagaagttcagggagaacaacaggcctggtttggatttgctgggacaccgggttacctgtcacccgaagtgctgcggaaagacccttacggaaagccagtggacatatgggcttgcggggttatcttgtacattctgttagttggttacccacccttttgggatgaggaccagcacaagctctatcaacagattaaagctggtgcttatgacttcccttcacctgaatgggacacagttaccccagaggccaagaatctaatcaaccagatgttgacaataaaccctgcaaagcggattactgccgatcaggcgctgaagcacccatgggtgtgccagcggtccaccgtcgcttccatgatgcataggcaagaaactgtggagtgccttcgaaagttcaacgctagacgaaagttgaaaggagcaatccttacaacgatgctggtgtcacgtaacttcagtgtgggaagacagtcctcagctcccgccagtcccgcagcctccgccgctggtcttgctggacaggctgcaaagagtctgctgaataaaaagagcgacggcggggtgaagaagcgcaaatctagcagtagtgtccacctcatgccacagtctaataataagaacagtctggtctccccagcgcaggaacctgccccccttcagacagccatggaacctcagaccacagtggtccataacgccactgacggtattaagggctccacagaatcctgcaacaccaccacggaggatgaggatctaaaggctgcccctctgcggacaggtaatggaagctcagttcccgagggacgctcatctcgagacaggactgctccatccgctggaatgcagccccaaccttccctgtgttcatcggctatgagaaagcaggagataataaagattacagagcagctcatagaggccattaacaatggtgactttgaggcctacacgaaaatatgcgaccccgggttgacaagttttgaaccggaggccctgggtaatcttgtggagggtatggacttccacaagttttatttcgagaatctgctctccaaaaacagtaaacccattcatacgacgatcctgaatccacatgtccatgtgatcggcgaggacgcggcgtgtatcgcctatatcaggttgacacagtacatagatgggcagggcagaccccggacctcccagtctgaagagaccagggtgtggcatagacgcgatgggaaatggctcaacgtgcactaccattgttcaggggccccggcagctccactccagtag

SEQ ID NO: 291484 - DNA, 1767 bp, Artificial Sequence
  derived and/or modified sequence
atggccaccacagccacctgcacccgcttcacagatgactaccagctgtttgaggagctgggcaagggggccttctctgtggtgagaagatgtgtgaagaagaccagcacccaggagtatgctgccaagatcatcaacaccaagaagctgagcgcccgggaccaccagaagctggagcgggaggcccgcatctgccgcctgctgaagcaccccaacatcgtgcggctgcatgacagcatcagcgaggagggcttccactacctggtgtttgacctggtgactggaggagagctgtttgaggacatcgtggcccgggagtactacagcgaggctgatgccagccactgcatccaccagatcctggagagcgtgaaccacatccaccagcacgacatcgtgcaccgggacctgaagccagagaacctgctgctggccagcaaatgtaaaggagctgctgtgaagctggccgactttggcctggccatcgaggtgcagggcgagcagcaggcctggtttggatttgctggcaccccaggctacctgagccctgaggtgctgaggaaggacccctacggcaagcctgtggacatctgggcctgtggggtcatcctgtacatcctgctggtgggctacccacccttctgggatgaggaccagcacaagctgtaccagcagatcaaggccggggcctatgacttccccagccctgagtgggacacagtgaccccagaggccaagaacctgatcaaccagatgctgaccatcaacccagccaagaggatcacagctgaccaggccctgaagcacccctgggtgtgccagaggagcacagtggcctccatgatgcaccggcaggagaccgtggagtgcctgaggaagttcaatgcccggaggaagctgaagggggccatcctgaccaccatgctggtgtccaggaacttctctgtgggccggcagagcagcgccccagccagccctgctgccagcgctgctggcctggccggccaggccgccaagagcctgctgaacaagaagagtgatggaggagtgaagaagaggaagagcagcagctctgtgcacctgatgccccagagcaacaacaagaacagcctggtgtccccagcccaggagcccgcccccctgcagacagccatggagccccagaccaccgtggtgcacaatgccacagatggcatcaagggcagcacagagagctgcaacaccaccacagaagatgaggacctgaaggccgcccccctgaggactggaaatggcagctctgtgcctgagggccgcagcagccgggacagaacagcccccagcgctggcatgcagccccagcccagcctgtgcagcagcgccatgaggaagcaggagatcatcaagatcacagagcagctgattgaggccatcaacaatggagactttgaggcctacaccaagatctgtgaccccggcctgaccagctttgagcctgaggccctgggcaacctggtggagggcatggacttccacaagttctactttgagaacctgctgagcaagaacagcaagcccatccacaccaccatcctgaacccccacgtgcacgtgattggagaagatgctgcctgcatcgcctacatccggctgacccagtacattgatggccagggccggcccaggaccagccagagcgaggagaccagggtgtggcacagaagagatggcaagtggctgaatgtgcactaccactgcagcggggccccagctgcccccctgcagtag

SEQ ID NO: 291485 - DNA, 1767 bp, Artificial Sequence
  derived and/or modified sequence
atggccaccaccgccacctgcacccggttcaccgacgactaccagctcttcgaagaactcggcaaaggagcgtttagcgtcgtgcgcagatgtgtgaaaaaaaccagcacacaggagtacgctgcgaaaattatcaacacaaaaaagctttcagcgagagaccaccagaagctcgaacgggaggcccggatttgtagacttctaaagcacccgaacattgtccgcctgcatgactctatcagtgaggagggcttccactacctggtttttgacctggtgacaggcggtgaactatttgaagacatcgtggcaagagagtattactccgaagcagatgcctcccactgtattcaccagatcttggagtctgtgaatcatatccatcagcatgacatcgttcaccgcgaccttaagccggaaaatttactcttagcctcgaagtgtaaaggcgctgcggtgaaacttgccgacttcgggctggctatagaagttcaaggcgagcagcaggcttggtttggcttcgccgggacgcctggatatctgagcccagaggtgctgagaaaggacccctacggcaaacccgtggatatctgggcgtgcggtgtgattctctacatactgctggtcggataccccccattttgggacgaggaccagcataaactttaccagcagatcaaagcgggggcatacgatttcccatcccccgagtgggacactgttacacccgaagccaaaaacttaattaaccagatgctgactataaaccctgctaaacgcatcaccgctgatcaagccctcaaacacccctgggtgtgtcaacgtagcaccgtcgcttccatgatgcatcgtcaggaaaccgtcgagtgcttaaggaaattcaatgccaggaggaaacttaagggcgccatcctgacgacaatgttggtgtcacggaacttcagtgtaggacgccagtctagcgcgcctgcctcacccgccgctagcgccgctggcctggctgggcaggcagcaaaaagcctgttgaacaagaaatcggatggaggcgtcaaaaaaagaaagtccagcagcagcgtgcatttgatgccacagtctaacaacaaaaattccctcgtaagcccagcacaggagcccgccccactccagaccgccatggagcctcagactaccgttgtccacaatgcgaccgacgggatcaaaggctcaacagaaagctgcaacactaccaccgaggatgaggacctgaaagccgcacccctgaggactggaaatggttcctcagtgccagaaggaagaagttcccgtgacagaactgctccgtccgccggaatgcagccccagccctctctttgctcttcagcaatgcgtaagcaggagatcattaaaatcacagagcagctgattgaagcaattaataacggcgacttcgaggcctacacaaaaatttgcgatcccggactgacctcttttgagccagaagctttagggaacctggtggaagggatggacttccacaaattctactttgaaaatttgctgagcaagaacagcaagccaattcacaccactattctaaatccgcacgtgcacgtgataggggaagatgcagcttgcatcgcctatatccggctcactcagtatattgacggacaaggccgacctcgtaccagtcagagcgaggagacacgcgtgtggcacagacgagatggcaaatggctaaacgtccactatcattgctccggggcccctgccgcccccctccaatag

SEQ ID NO: 291486 - DNA, 1767 bp, Artificial Sequence
  derived and/or modified sequence
atggccaccaccgccacatgtacacgctttaccgacgattaccaattgttcgaagaattgggtaaaggcgctttcagcgttgtgcgtagatgcgtgaagaaaaccagcacgcaagaatatgctgcaaagatcatcaataccaagaagctgtccgcgagggatcaccagaagctagagcgcgaggctagaatatgcagactcttaaagcatcccaacatcgtaaggttacatgacagtatcagtgaggaaggctttcactacttggtcttcgacttggttaccggcggtgaactcttcgaagatattgtggctcgcgaatactactctgaggccgacgccagccactgcatccatcagatcctggagtctgtcaaccatatccaccagcatgacatcgtgcacagggacttaaaacctgaaaatctactgctggccagcaaatgtaagggagcagcagtcaaactggccgactttggcctggccattgaagtccagggcgagcagcaggcctggtttggttttgccggtactccaggctatctctcccccgaggtgctgcgcaaggacccctatggtaaacccgtagatatatgggcctgtggtgtcattctgtacattctgctggtgggctaccctcccttttgggatgaagaccagcataaactttaccagcagataaaagctggggcatatgatttccccagccccgagtgggataccgtgacccctgaagcgaaaaaccttattaatcaaatgctcaccattaacccagcaaaacgtataaccgcagatcaggcattaaaacatccttgggtctgtcaacgatccacagtagcttctatgatgcacaggcaggaaaccgtggaatgcctccgaaaattcaacgctcggcgaaagctgaaaggggctatcttaactacaatgctggtgtcacggaatttttcggtcggccgtcagtcctcagcccctgctagtcccgctgcatccgcggctggactggccggacaagctgccaaatcactgctaaataagaagagcgacgggggtgtaaagaagagaaaatcctcctcaagcgtgcatctcatgccccagagcaacaacaaaaattctcttgtgagccccgctcaggagccagctcctctacagactgcgatggaaccccagaccaccgtcgttcacaacgcaaccgatggcatcaagggcagtacagaatcctgcaacaccacgaccgaggacgaagatcttaaggcggctcctctcagaaccggaaacgggtccagcgtgcctgagggcagaagctcccgggatagaaccgccccatcagctggcatgcagccgcaaccgagtctctgttcatctgctatgcgtaaacaggaaatcatcaaaataacagagcagctcatagaagccatcaataacggggattttgaggcatacactaaaatctgtgaccccggtctcactagtttcgagccagaggccctgggaaatctggtagaaggcatggactttcataaattctactttgagaaccttctgtctaaaaactcaaaaccaatccataccaccattctcaacccgcacgttcatgtcataggggaggacgcggcttgtatcgcctatattagacttacacaatatatcgacggacagggcagaccgaggactagccagtcggaggaaaccagagtctggcatcggcgtgacggcaagtggctaaatgttcactatcactgttcaggggcaccagcagcacctttacagtag

SEQ ID NO: 291487 - DNA, 3908 bp, Artificial Sequence
  derived and/or modified sequence
ggtaaagtctcgcggtgctgccgggctcagccccgtctcctcctcttgctccctcggccgggcggcggtgactgtgcaccgacgtcggcgcgggctgcaccgccgcgtccgcccgcccgccagcatggccaccaccgccacctgcacccgtttcaccgacgactaccagctcttcgaggagcttggcaagggtgctttctctgtggtccgcaggtgtgtgaagaaaacctccacgcaggagtacgcagcaaaaatcatcaataccaagaagttgtctgcccgggatcaccagaaactagaacgtgaggctcggatatgtcgacttctgaaacatccaaacatcgtgcgcctccatgacagtatttctgaagaagggtttcactacctcgtgtttgaccttgttaccggcggggagctgtttgaagacattgtggccagagagtactacagtgaagcagatgccagccactgtatacatcagattctggagagtgttaaccacatccaccagcatgacatcgtccacagggacctgaagcctgagaacctgctgctggcgagtaaatgcaagggtgccgccgtcaagctggctgattttggcctagccatcgaagtacagggagagcagcaggcttggtttggttttgctggcaccccaggttacttgtcccctgaggtcttgaggaaagatccctatggaaaacctgtggatatctgggcctgcggggtcatcctgtatatcctcctggtgggctatcctcccttctgggatgaggatcagcacaagctgtatcagcagatcaaggctggagcctatgatttcccatcaccagaatgggacacggtaactcctgaagccaagaacttgatcaaccagatgctgaccataaacccagcaaagcgcatcacggctgaccaggctctcaagcacccgtgggtctgtcaacgatccacggtggcatccatgatgcatcgtcaggagactgtggagtgtttgcgcaagttcaatgcccggagaaaactgaagggtgccatcctcacgaccatgcttgtctccaggaacttctcagttggcaggcagagctccgcccccgcctcgcctgccgcgagcgccgccggcctggccgggcaagctgccaaaagcctattgaacaagaagtcggatggcggtgtcaagaaaaggaagtcgagttccagcgtgcacctaatgccacagagcaacaacaaaaacagtctcgtaagcccagcccaagagcccgcgcccttgcagacggccatggagccacaaaccactgtggtacacaacgctacagatgggatcaagggctccacagagagctgcaacaccaccacagaagatgaggacctcaaagctgccccgctccgcactgggaatggcagctcggtgcctgaaggacggagctcccgggacagaacagccccctctgcaggcatgcagccccagccttctctctgctcctcagccatgcgaaaacaggagatcattaagattacagaacagctgattgaagccatcaacaatggggactttgaggcctacacgaagatttgtgatccaggcctcacttcctttgagcctgaggcccttggtaacctcgtggaggggatggatttccataagttttactttgagaatctcctgtccaagaacagcaagcctatccataccaccatcctaaacccacacgtccacgtgattggggaggacgcagcgtgcatcgcctacatccgcctcacccagtacatcgacgggcagggtcggcctcgcaccagccagtcagaagagacccgggtctggcaccgtcgggatggcaagtggctcaatgtccactatcactgctcaggggcccctgccgcaccgctgcagtgagctcagccacaggggctttaggagattccagccggaggtccaaccttcgcagccagtggctctggagggcctgagtgacagcggcagtcctgtttgtttgaggtttaaaacaattcaattacaaaagcggcagcagccaatgcacgcccctgcatgcagccctcccgcccgcccttcgtgtctgtctctgctgtaccgaggtgttttttacatttaagaaaaaaaaaaaagaaaaaaagattgtttaaaaaaaaaaggaatccataccatgatgcgttttaaaaccaccgacagcccttgggttggcaagaaggcaggagtatgtatgaggtccatcctggcatgagcagtggctcacccaccggccttgaagaggtgagcttggcctctctggtccccatggacttagggggaccaggcaagaactctgacagagctttgggggccgtgatgtgattgcagctcctgaggtggcctgcttaccccaggtctaggaatgaacttctttggaacttgcataggcgcctagaatggggctgatgagaacatcgtgaccatcagacctacttgggagagaacgcagagctcccagcctgctgtggaggcagctgagaagtggtggcctcaggactgagagcccggacgttgctgtactgtcttgtttagtgtagaagggaagagaattggtgctgcagaagtgtacccgccatgaagccgatgagaaacctcgtgttagtctgacatgcactcactcatccatttctataggatgcacaatgcatgtgggccctaatattgaggccttatccctgcagctaggagggggaggggttgttgctgctttgcttcgtgttttcttctaacctggcaaggagagagccaggccctggtcagggctcccgtgccgcctttggcggttctgtttctgtgctgatctggaccatctttgtcttgccttttcacggtagtggtccccatgctgaccctcatctgggcctgggccctctgccaagtgcccctgtgggatgggaggagtgaggcagtgggagaagaggtggtggtcgtttctatgcattcaggctgcctttggggctgcctcccttcttattcttccttgctgcacgtccatctcttttcctgtctttgagattgacctgactgctctggcaagaagaagaggtgtccttacagaggcctctttactgaccaactgaagtatagacttactgctggacaatctgcatgggcatcacccctccccgcatgtaacccaaaagaggtgtccagagccaaggcttctaccttcattgtccctctctgtgctcaaggagttccattccaggaggaagagatctataccctaagcagatagcaaagaagataatggaggagcaattggtcatggccttggtttccctcaaaacaacgctgcagatttatctgcacaaacatctccacttttgggggaaaggtgggtagattccagttccctggactaccttcaggaggcacgagagctgggagaagaggcaaagctacaggtttacttgggagccagctgagaagagagcagactcacaggtgctggtgcttggatttagccaggctcctccgagcacctcatgcatgtcccagcccctgggccctagccctttcctgccctgcagtctgcagtgccagcacgcaaatcccttcaccacagggtttcgttttgctggcttgaagacaaatggtcttagaattcattgagacccatagcttcatatggctgctccagccccacttcttagcattcttactcctcttctggggctaatgtcagcatctatagacaatagactattaaaaaatcaccttttaaacaagaaacggaaggcatttgatgcagaatttttgcatgacaacatagaaataatttaaaaatagtgtttgttctgaatgttggtagacccttcatagctttgttacaatgaaaccttgaactgaaaatatttaataaaataacctttaaacagtc

SEQ ID NO: 291488 - DNA, 1767 bp, Artificial Sequence
  derived and/or modified sequence
atggccaccaccgccacctgcaccagattcaccgacgactaccagctgttcgaggagctgggcaagggcgccttcagcgtggtgagaagatgcgtgaagaagaccagcacccaggagtacgccgccaagatcatcaacaccaagaagctgagcgccagagaccaccagaagctggagagagaggccagaatctgcagactgctgaagcaccccaacatcgtgagactgcacgacagcatcagcgaggagggcttccactacctggtgttcgacctggtgaccggcggcgagctgttcgaggacatcgtggccagagagtactacagcgaggccgacgccagccactgcatccaccagatcctggagagcgtgaaccacatccaccagcacgacatcgtgcacagagacctgaagcccgagaacctgctgctggccagcaagtgcaagggcgccgccgtgaagctggccgacttcggcctggccatcgaggtgcagggcgagcagcaggcctggttcggcttcgccggcacccccggctacctgagccccgaggtgctgagaaaggacccctacggcaagcccgtggacatctgggcctgcggcgtgatcctgtacatcctgctggtgggctacccccccttctgggacgaggaccagcacaagctgtaccagcagatcaaggccggcgcctacgacttccccagccccgagtgggacaccgtgacccccgaggccaagaacctgatcaaccagatgctgaccatcaaccccgccaagagaatcaccgccgaccaggccctgaagcacccctgggtgtgccagagaagcaccgtggccagcatgatgcacagacaggagaccgtggagtgcctgagaaagttcaacgccagaagaaagctgaagggcgccatcctgaccaccatgctggtgagcagaaacttcagcgtgggcagacagagcagcgcccccgccagccccgccgccagcgccgccggcctggccggccaggccgccaagagcctgctgaacaagaagagcgacggcggcgtgaagaagagaaagagcagcagcagcgtgcacctgatgccccagagcaacaacaagaacagcctggtgagccccgcccaggagcccgcccccctgcagaccgccatggagccccagaccaccgtggtgcacaacgccaccgacggcatcaagggcagcaccgagagctgcaacaccaccaccgaggacgaggacctgaaggccgcccccctgagaaccggcaacggcagcagcgtgcccgagggcagaagcagcagagacagaaccgcccccagcgccggcatgcagccccagcccagcctgtgcagcagcgccatgagaaagcaggagatcatcaagatcaccgagcagctgatcgaggccatcaacaacggcgacttcgaggcctacaccaagatctgcgaccccggcctgaccagcttcgagcccgaggccctgggcaacctggtggagggcatggacttccacaagttctacttcgagaacctgctgagcaagaacagcaagcccatccacaccaccatcctgaacccccacgtgcacgtgatcggcgaggacgccgcctgcatcgcctacatcagactgacccagtacatcgacggccagggcagacccagaaccagccagagcgaggagaccagagtgtggcacagaagagacggcaagtggctgaacgtgcactaccactgcagcggcgcccccgccgcccccctgcagtag

SEQ ID NO: 291489 - protein, 558 aa, Artificial Sequence
  derived and/or modified sequence
MATTATCTRFTDDYQLFEELGKGAFSVVRRCVKKTSTQEYAAKIINTKKLSARDHQKLEREARICRLLKHPNIVRLHDSISEEGFHYLVFDLVTGGELFEDIVAREYYSEADASHCIHQILESVNHIHQHDIVHRDLKPENLLLASKCKGAAVKLADFGLAIEVQGEQQAWFGFAGTPGYLSPEVLRKDPYGKPVDIWACGVILYILLVGYPPFWDEDQHKLYQQIKAGAYDFPSPEWDTVTPEAKNLINQMLTINPAKRITADQALKHPWVCQRSTVASMMHRQETVECLRKFNARRKLKGAILTTMLVSRNFSAAKSLLNKKSDGGVKKRKSSSSVHLMPQSNNKNSLVSPAQEPAPLQTAMEPQTTVVHNATDGIKGSTESCNTTTEDEDLKGSVPEGRSSRDRTAPSAGMQPQPSLCSSAMRKQEIIKITEQLIEAINNGDFEAYTKICDPGLTSFEPEALGNLVEGMDFHKFYFENLLSKNSKPIHTTILNPHVHVIGEDAACIAYIRLTQYIDGQGRPRTSQSEETRVWHRRDGKWLNVHYHCSGAPAAPLQ

SEQ ID NO: 291490 - protein, 180 aa, Artificial Sequence
  derived and/or modified sequence
MATTATCTRFTDDYQLFEELGKGAFSVVRRCVKKTSTQEYAAKIINTKKLSARDHQKLEREARICRLLKHPNIATIHGGIHDASSGDCGVFAQVQCPEKTEGCHPHDHACLQELLSCQKPIEQEVGWRCQATEQQQKQSRKPSPRARALADGHGATNHCGTQRYRWDQGLHRELQHHHRR

SEQ ID NO: 291491 - DNA, 1677 bp, Artificial Sequence
  derived and/or modified sequence
atggccaccacggctacgtgcacaagattcaccgacgattaccaacttttcgaggagctgggaaaaggagccttctcagtggtgaggcgatgcgtgaagaagacatccacacaagagtacgctgctaaaatcatcaacacaaagaaacttagcgcgcgcgaccaccaaaagctcgagcgcgaagcccgaatctgtcgcttattgaagcaccccaatatcgttcggctgcatgactccatttccgaggagggattccactacctggtcttcgacttggtcactggcggcgaactctttgaggatatagttgctagggaatattactctgaagctgatgcgtcacattgtattcatcagatcctcgagtctgtcaaccatatccatcagcacgatattgtgcatcgggatctgaaaccagaaaatctgttgttggcttccaagtgtaagggcgccgcagttaagctggccgatttcgggttggccatagaagtccagggcgagcagcaagcatggttcgggttcgctgggacccctgggtatctcagtcccgaagtgttaagaaaggatccgtatggcaagcccgtagacatctgggcatgcggggtgatcctgtacatactcctcgtgggttatcccccgttctgggatgaggaccagcacaagctttatcagcagattaaggcaggcgcatacgatttcccatcccccgaatgggacacagtaaccccagaggcaaaaaacctgatcaaccaaatgctgacaatcaaccccgccaagagaataacagccgatcaggcccttaaacacccatgggtctgtcagcgaagtactgttgcctcaatgatgcatcggcaagagactgtggaatgcttgcgcaagtttaatgcgcggcgcaaactcaagggtgccatcctgaccacgatgctcgtgtctaggaacttttcggctgctaagtcattgttaaataagaaaagcgacggaggggtgaaaaagcgcaagtctagcagctccgtgcatctgatgccacagagcaacaacaaaaattctcttgttagccctgctcaagaacccgcccctctccagaccgctatggagccccagacaactgtcgtgcacaatgcgactgatgggataaaggggtcaacagaatcatgtaacacgacaaccgaggacgaagacctcaaaggctccgtgcctgagggtcggagctcccgggaccgtaccgcccccagcgcagggatgcagccgcaaccttctttatgtagtagcgcaatgaggaagcaagagatcatcaagattacagagcaactgattgaggcaattaataacggggacttcgaagcctatactaaaatttgcgatccaggtttaacttcttttgaaccagaggcattagggaatcttgtcgaaggaatggactttcacaaattttatttcgagaacctgcttagcaagaactccaagcccatccataccaccatcttgaacccacacgtgcatgttattggagaggacgccgcatgcattgcatatatccgacttacccagtatatcgacggacagggccgaccccggacctctcagtctgaagagacaagagtgtggcacaggcgcgacgggaagtggttgaacgtgcactatcactgttctggtgcaccagccgccccactccagtag

SEQ ID NO: 291492 - DNA, 1677 bp, Artificial Sequence
  derived and/or modified sequence
atggccaccacagccacctgcacccgcttcacagatgactaccagctgtttgaggagctgggcaagggggccttctctgtggtgagaagatgtgtgaagaagaccagcacccaggagtatgctgccaagatcatcaacaccaagaagctgagcgcccgggaccaccagaagctggagcgggaggcccgcatctgccgcctgctgaagcaccccaacatcgtgcggctgcatgacagcatcagcgaggagggcttccactacctggtgtttgacctggtgactggaggagagctgtttgaggacatcgtggcccgggagtactacagcgaggctgatgccagccactgcatccaccagatcctggagagcgtgaaccacatccaccagcacgacatcgtgcaccgggacctgaagccagagaacctgctgctggccagcaaatgtaaaggagctgctgtgaagctggccgactttggcctggccatcgaggtgcagggcgagcagcaggcctggtttggatttgctggcaccccaggctacctgagccctgaggtgctgaggaaggacccctacggcaagcctgtggacatctgggcctgtggggtcatcctgtacatcctgctggtgggctacccacccttctgggatgaggaccagcacaagctgtaccagcagatcaaggccggggcctatgacttccccagccctgagtgggacacagtgaccccagaggccaagaacctgatcaaccagatgctgaccatcaacccagccaagaggatcacagctgaccaggccctgaagcacccctgggtgtgccagaggagcacagtggcctccatgatgcaccggcaggagaccgtggagtgcctgaggaagttcaatgcccggaggaagctgaagggggccatcctgaccaccatgctggtgtccaggaacttctctgctgccaagagcctgctgaacaagaagagtgatggcggcgtgaagaagaggaagagcagcagctctgtgcacctgatgccccagagcaacaacaagaacagcctggtgtccccagcccaggagcccgcccccctgcagacagccatggagccccagaccaccgtggtgcacaatgccacagatggcatcaagggcagcacagagagctgcaacaccaccacagaagatgaggacctgaagggctctgtgcctgagggccgcagcagccgggacagaacagcccccagcgctggcatgcagccccagcccagcctgtgcagcagcgccatgaggaagcaggagatcatcaagatcacagagcagctgattgaggccatcaacaatggagactttgaggcctacaccaagatctgtgaccccggcctgaccagctttgagcctgaggccctgggcaacctggtggagggcatggacttccacaagttctactttgagaacctgctgagcaagaacagcaagcccatccacaccaccatcctgaacccccacgtgcacgtgattggagaagatgctgcctgcatcgcctacatccggctgacccagtacattgatggccagggccggcccaggaccagccagagcgaggagaccagggtgtggcacagaagagatggcaagtggctgaatgtgcactaccactgcagcggggccccagctgcccccctgcagtag

SEQ ID NO: 291493 - DNA, 1677 bp, Artificial Sequence
  derived and/or modified sequence
atggccaccaccgccacctgcacccggttcaccgacgactaccagctgttcgaagaactgggaaagggggcgttctccgttgtccgacggtgcgtcaaaaaaacctcaacgcaagagtatgcggccaagattattaatacaaaaaaattaagtgctagagatcaccagaagctcgagagggaggcccgaatttgtcggctgctgaaacatcccaacatagttagactgcacgattccatctccgaggagggatttcactacctggtgttcgacttagtcactggcggagaactgttcgaagatatcgtggcccgcgagtattactccgaagccgatgcttcccattgtatacatcaaatcctcgagagcgtgaaccacattcaccagcacgacattgtgcacagagacttgaagcctgagaacctgttactggccagcaaatgcaagggtgcagccgtgaaactggcggactttggtttagccatagaagtgcagggcgaacaacaagcgtggtttggcttcgccggaaccccaggatatctttcccctgaggtcctgagaaaagacccatatggtaagccggtggatatctgggcgtgcggtgtgatcctctacatcttgctggtgggctatccccccttctgggacgaggatcaacataaactgtaccagcaaataaaagccggagcctatgattttcccagccctgaatgggacactgtgacccctgaggctaagaatctcatcaaccagatgttgacaataaatccagctaaacgtattaccgctgaccaggctttgaaacacccgtgggtgtgccagcggtcaaccgtcgcctcaatgatgcatcgtcaggagacggtggagtgcctgagaaaatttaatgcacgcagaaaattgaagggggctatcctcactaccatgttggtttctcgaaacttttccgccgctaaatccttgctcaacaagaagagtgatgggggcgttaaaaagcgaaaatccagctcaagcgtccacctgatgcctcaatcaaataataagaattcgcttgtcagtcctgcacaggagcctgcccccctccagactgccatggagccacagaccaccgtggttcacaatgcaaccgatggaatcaagggcagcacagaatcttgtaacacgactactgaagatgaagatcttaagggtagcgtgcccgagggccgaagctcacgggaccgaaccgccccctcagccgggatgcagccccaaccgtctctgtgttcctccgccatgcgtaagcaggaaatcataaaaatcacagagcagcttatcgaagctattaacaatggcgacttcgaggcatacactaaaatctgcgatccggggttaacctctttcgaaccggaagccctgggcaacctagtagagggcatggacttccacaagttttacttcgaaaacctcctgagcaaaaattcgaagccaatacataccactatactcaatcctcacgtccacgttattggggaagacgccgcttgtattgcctacataaggctcacacagtacattgacggacagggtagacctcgtacttcacaatctgaggaaaccagagtctggcaccgacgcgacgggaaatggctgaatgtacactaccactgtagcggtgcccccgccgctccactgcagtag

SEQ ID NO: 291494 - DNA, 1677 bp, Artificial Sequence
  derived and/or modified sequence
atggcaaccacagcaacttgcaccagattcactgatgattatcagctctttgaggagctaggcaagggagcgttctcagttgtgaggcgctgtgtcaagaaaacatcaacccaagaatacgcagccaaaattataaacaccaaaaaactgtcagcccgagaccatcagaagctcgaaagggaggccaggatttgcagactactgaaacaccccaatattgtgcggttgcacgattccatatctgaggagggtttccattacctcgtctttgacttggtgacaggcggagagttgtttgaagacattgtcgccagggaatattattcagaggctgatgcgagccattgcatccaccagatactggagtcagtgaaccacatccaccagcatgatattgtccatagagatctgaaacccgagaatctgctactggcttcgaagtgtaagggtgcagccgtcaaactagctgacttcgggctcgctatcgaagtacagggggagcagcaggcctggtttggcttcgctggaacacccggatacttatctcccgaggttctcaggaaggacccttacggcaaacctgtagatatctgggcctgtggggttatcctctacattctcctggttgggtatccccctttttgggacgaagaccagcacaaattgtaccagcaaatcaaagccggagcatacgattttcccagcccagaatgggacactgtgacacctgaggcaaagaacctgattaatcagatgctgacaataaatccagcaaagagaatcactgctgatcaggcactgaaacacccatgggtttgccagcggtccaccgtcgcatccatgatgcaccgtcaggaaaccgtcgaatgcctgagaaagtttaatgctcgcaggaagctgaaaggggcaattctgaccaccatgctggtgagtcgcaattttagcgctgccaagtccctgctgaataaaaaaagtgacggcggagtcaagaaacgaaaatctagcagcagcgtacacctgatgccacaatcaaataacaagaattctctggtttccccagctcaggaacccgctccactgcaaacagctatggaaccacaaaccaccgtggtgcacaacgcgacagatggcatcaaagggtctacagaaagctgcaacaccaccaccgaggacgaggacttgaaaggatcagtaccagaaggccgaagtagccgggaccggacagcaccgagcgcaggcatgcaaccccagccatcactgtgctcttcagcaatgcgtaaacaagaaatcattaaaattacagagcaattaatcgaagcaattaataatggtgacttcgaggcatataccaagatctgcgacccaggcctgacatccttcgaaccagaagcccttggcaacctggttgagggaatggactttcataaattttattttgaaaatttgctctcaaaaaattctaagccgatacacaccaccatccttaatcctcatgttcatgttatcggagaagatgccgcttgcattgcatacatccgtttaacacaatacatcgacgggcaggggaggcctcgcacttcccaaagcgaagagaccagggtgtggcaccgacgggacggaaaatggctgaacgtgcattatcactgttcaggggcacccgctgccccactccagtag

SEQ ID NO: 291495 - DNA, 3818 bp, Artificial Sequence
  derived and/or modified sequence
ggtaaagtctcgcggtgctgccgggctcagccccgtctcctcctcttgctccctcggccgggcggcggtgactgtgcaccgacgtcggcgcgggctgcaccgccgcgtccgcccgcccgccagcatggccaccaccgccacctgcacccgtttcaccgacgactaccagctcttcgaggagcttggcaagggtgctttctctgtggtccgcaggtgtgtgaagaaaacctccacgcaggagtacgcagcaaaaatcatcaataccaagaagttgtctgcccgggatcaccagaaactagaacgtgaggctcggatatgtcgacttctgaaacatccaaacatcgtgcgcctccatgacagtatttctgaagaagggtttcactacctcgtgtttgaccttgttaccggcggggagctgtttgaagacattgtggccagagagtactacagtgaagcagatgccagccactgtatacatcagattctggagagtgttaaccacatccaccagcatgacatcgtccacagggacctgaagcctgagaacctgctgctggcgagtaaatgcaagggtgccgccgtcaagctggctgattttggcctagccatcgaagtacagggagagcagcaggcttggtttggttttgctggcaccccaggttacttgtcccctgaggtcttgaggaaagatccctatggaaaacctgtggatatctgggcctgcggggtcatcctgtatatcctcctggtgggctatcctcccttctgggatgaggatcagcacaagctgtatcagcagatcaaggctggagcctatgatttcccatcaccagaatgggacacggtaactcctgaagccaagaacttgatcaaccagatgctgaccataaacccagcaaagcgcatcacggctgaccaggctctcaagcacccgtgggtctgtcaacgatccacggtggcatccatgatgcatcgtcaggagactgtggagtgtttgcgcaagttcaatgcccggagaaaactgaagggtgccatcctcacgaccatgcttgtctccaggaacttctcagctgccaaaagcctattgaacaagaagtcggatggcggtgtcaagaaaaggaagtcgagttccagcgtgcacctaatgccacagagcaacaacaaaaacagtctcgtaagcccagcccaagagcccgcgcccttgcagacggccatggagccacaaaccactgtggtacacaacgctacagatgggatcaagggctccacagagagctgcaacaccaccacagaagatgaggacctcaaaggctcggtgcctgaaggacggagctcccgggacagaacagccccctctgcaggcatgcagccccagccttctctctgctcctcagccatgcgaaaacaggagatcattaagattacagaacagctgattgaagccatcaacaatggggactttgaggcctacacgaagatttgtgatccaggcctcacttcctttgagcctgaggcccttggtaacctcgtggaggggatggatttccataagttttactttgagaatctcctgtccaagaacagcaagcctatccataccaccatcctaaacccacacgtccacgtgattggggaggacgcagcgtgcatcgcctacatccgcctcacccagtacatcgacgggcagggtcggcctcgcaccagccagtcagaagagacccgggtctggcaccgtcgggatggcaagtggctcaatgtccactatcactgctcaggggcccctgccgcaccgctgcagtgagctcagccacaggggctttaggagattccagccggaggtccaaccttcgcagccagtggctctggagggcctgagtgacagcggcagtcctgtttgtttgaggtttaaaacaattcaattacaaaagcggcagcagccaatgcacgcccctgcatgcagccctcccgcccgcccttcgtgtctgtctctgctgtaccgaggtgttttttacatttaagaaaaaaaaaaaagaaaaaaagattgtttaaaaaaaaaaggaatccataccatgatgcgttttaaaaccaccgacagcccttgggttggcaagaaggcaggagtatgtatgaggtccatcctggcatgagcagtggctcacccaccggccttgaagaggtgagcttggcctctctggtccccatggacttagggggaccaggcaagaactctgacagagctttgggggccgtgatgtgattgcagctcctgaggtggcctgcttaccccaggtctaggaatgaacttctttggaacttgcataggcgcctagaatggggctgatgagaacatcgtgaccatcagacctacttgggagagaacgcagagctcccagcctgctgtggaggcagctgagaagtggtggcctcaggactgagagcccggacgttgctgtactgtcttgtttagtgtagaagggaagagaattggtgctgcagaagtgtacccgccatgaagccgatgagaaacctcgtgttagtctgacatgcactcactcatccatttctataggatgcacaatgcatgtgggccctaatattgaggccttatccctgcagctaggagggggaggggttgttgctgctttgcttcgtgttttcttctaacctggcaaggagagagccaggccctggtcagggctcccgtgccgcctttggcggttctgtttctgtgctgatctggaccatctttgtcttgccttttcacggtagtggtccccatgctgaccctcatctgggcctgggccctctgccaagtgcccctgtgggatgggaggagtgaggcagtgggagaagaggtggtggtcgtttctatgcattcaggctgcctttggggctgcctcccttcttattcttccttgctgcacgtccatctcttttcctgtctttgagattgacctgactgctctggcaagaagaagaggtgtccttacagaggcctctttactgaccaactgaagtatagacttactgctggacaatctgcatgggcatcacccctccccgcatgtaacccaaaagaggtgtccagagccaaggcttctaccttcattgtccctctctgtgctcaaggagttccattccaggaggaagagatctataccctaagcagatagcaaagaagataatggaggagcaattggtcatggccttggtttccctcaaaacaacgctgcagatttatctgcacaaacatctccacttttgggggaaaggtgggtagattccagttccctggactaccttcaggaggcacgagagctgggagaagaggcaaagctacaggtttacttgggagccagctgagaagagagcagactcacaggtgctggtgcttggatttagccaggctcctccgagcacctcatgcatgtcccagcccctgggccctagccctttcctgccctgcagtctgcagtgccagcacgcaaatcccttcaccacagggtttcgttttgctggcttgaagacaaatggtcttagaattcattgagacccatagcttcatatggctgctccagccccacttcttagcattcttactcctcttctggggctaatgtcagcatctatagacaatagactattaaaaaatcaccttttaaacaagaaacggaaggcatttgatgcagaatttttgcatgacaacatagaaataatttaaaaatagtgtttgttctgaatgttggtagacccttcatagctttgttacaatgaaaccttgaactgaaaatatttaataaaataacctttaaacagtc

SEQ ID NO: 291496 - DNA, 1677 bp, Artificial Sequence
  derived and/or modified sequence
atggccaccaccgccacctgcaccagattcaccgacgactaccagctgttcgaggagctgggcaagggcgccttcagcgtggtgagaagatgcgtgaagaagaccagcacccaggagtacgccgccaagatcatcaacaccaagaagctgagcgccagagaccaccagaagctggagagagaggccagaatctgcagactgctgaagcaccccaacatcgtgagactgcacgacagcatcagcgaggagggcttccactacctggtgttcgacctggtgaccggcggcgagctgttcgaggacatcgtggccagagagtactacagcgaggccgacgccagccactgcatccaccagatcctggagagcgtgaaccacatccaccagcacgacatcgtgcacagagacctgaagcccgagaacctgctgctggccagcaagtgcaagggcgccgccgtgaagctggccgacttcggcctggccatcgaggtgcagggcgagcagcaggcctggttcggcttcgccggcacccccggctacctgagccccgaggtgctgagaaaggacccctacggcaagcccgtggacatctgggcctgcggcgtgatcctgtacatcctgctggtgggctacccccccttctgggacgaggaccagcacaagctgtaccagcagatcaaggccggcgcctacgacttccccagccccgagtgggacaccgtgacccccgaggccaagaacctgatcaaccagatgctgaccatcaaccccgccaagagaatcaccgccgaccaggccctgaagcacccctgggtgtgccagagaagcaccgtggccagcatgatgcacagacaggagaccgtggagtgcctgagaaagttcaacgccagaagaaagctgaagggcgccatcctgaccaccatgctggtgagcagaaacttcagcgccgccaagagcctgctgaacaagaagagcgacggcggcgtgaagaagagaaagagcagcagcagcgtgcacctgatgccccagagcaacaacaagaacagcctggtgagccccgcccaggagcccgcccccctgcagaccgccatggagccccagaccaccgtggtgcacaacgccaccgacggcatcaagggcagcaccgagagctgcaacaccaccaccgaggacgaggacctgaagggcagcgtgcccgagggcagaagcagcagagacagaaccgcccccagcgccggcatgcagccccagcccagcctgtgcagcagcgccatgagaaagcaggagatcatcaagatcaccgagcagctgatcgaggccatcaacaacggcgacttcgaggcctacaccaagatctgcgaccccggcctgaccagcttcgagcccgaggccctgggcaacctggtggagggcatggacttccacaagttctacttcgagaacctgctgagcaagaacagcaagcccatccacaccaccatcctgaacccccacgtgcacgtgatcggcgaggacgccgcctgcatcgcctacatcagactgacccagtacatcgacggccagggcagacccagaaccagccagagcgaggagaccagagtgtggcacagaagagacggcaagtggctgaacgtgcactaccactgcagcggcgcccccgccgcccccctgcagtag

SEQ ID NO: 291497 - protein, 412 aa, Artificial Sequence
  derived and/or modified sequence
GSNAGGGQGGCQGLTCDSESVGTLDILDQTQACPVSLASSSARPPCPPPGPCAEPSGCIAMAVWSPLVMPGRREGCCHTPVTNEETEAREAKGQKLRPCHTLGVHVCLSLFRSELLGLLKTYNCYHEGKSFQLRHREEEGTLIIEGLLNIAWGLRRPIRLQMQDDREQVHLPSTSWMPRRPSCPLKEPSPQNGNITAQGPSIQPVHKAESSTDSSGPLEEAEEAPQLMRTKSDASCMSQRRPKCRAPGEAQRIRRHRFSINGHFYNHKTSVFTPAYGSVTNVRVNSTMTTLQVLTLLLNKFRVEDGPSEFALYIVHESGERTKLKDCEYPLISRILHGPCEKIARIFLMEADLGVEVPHEVAQYIKFEMPVLDSFVEKLKEEEEREIIKLTMKFQALRLTMLQRLEQLVEAK

SEQ ID NO: 291498 - DNA, 1239 bp, Artificial Sequence
  derived and/or modified sequence
ggcagcaacgccggcggcggccagggcggctgccagggcctgacctgcgacagcgagagcgtgggcaccctggacatcctggaccagacccaggcctgccccgtgagcctggccagcagcagcgccagacccccctgccccccccccggcccctgcgccgagcccagcggctgcatcgccatggccgtgtggagccccctggtgatgcccggcagaagagagggctgctgccacacccccgtgaccaacgaggagaccgaggccagagaggccaagggccagaagctgagaccctgccacaccctgggcgtgcacgtgtgcctgagcctgttcagaagcgagctgctgggcctgctgaagacctacaactgctaccacgagggcaagagcttccagctgagacacagagaggaggagggcaccctgatcatcgagggcctgctgaacatcgcctggggcctgagaagacccatcagactgcagatgcaggacgacagagagcaggtgcacctgcccagcaccagctggatgcccagaagacccagctgccccctgaaggagcccagcccccagaacggcaacatcaccgcccagggccccagcatccagcccgtgcacaaggccgagagcagcaccgacagcagcggccccctggaggaggccgaggaggccccccagctgatgagaaccaagagcgacgccagctgcatgagccagagaagacccaagtgcagagcccccggcgaggcccagagaatcagaagacacagattcagcatcaacggccacttctacaaccacaagaccagcgtgttcacccccgcctacggcagcgtgaccaacgtgagagtgaacagcaccatgaccaccctgcaggtgctgaccctgctgctgaacaagttcagagtggaggacggccccagcgagttcgccctgtacatcgtgcacgagagcggcgagagaaccaagctgaaggactgcgagtaccccctgatcagcagaatcctgcacggcccctgcgagaagatcgccagaatcttcctgatggaggccgacctgggcgtggaggtgccccacgaggtggcccagtacatcaagttcgagatgcccgtgctggacagcttcgtggagaagctgaaggaggaggaggagagagagatcatcaagctgaccatgaagttccaggccctgagactgaccatgctgcagagactggagcagctggtggaggccaagtag

SEQ ID NO: 291499 - DNA, 1239 bp, Artificial Sequence
  derived and/or modified sequence
ggcagcaacgcgggcggcggccaaggcggatgccaggggctgacttgtgactccgagagtgtcgggaccttggacatcttggaccagactcaggcttgtcctgtgtctctggcatcttcctcggctagaccgccctgcccccctcccggaccttgcgcggagccctcaggatgtatcgccatggccgtttggagtcctcttgtgatgccaggccgcagagagggctgttgccatacacctgtgactaatgaggagaccgaagcaagagaagccaaagggcagaagctgagaccctgccacacactgggagttcatgtgtgtctgagcctgtttagatctgaacttttggggctgcttaagacctataactgttatcatgaagggaaaagcttccagctccgtcaccgggaggaggagggcacactaatcatcgaaggcctgctcaacatcgcatgggggttgagacgtccaatacgtttgcaaatgcaagacgacagagaacaggtccatcttccttcaacttcgtggatgccccgcaggcccagttgtccgctgaaggagccgtcaccccaaaatgggaatataaccgctcaaggcccatctattcagccagtccataaagctgagagctctacagatagttctggccctctcgaagaagctgaagaagcaccacagcttatgaggaccaagagtgacgcctcctgtatgagccagcgccgacctaagtgtagagccccaggcgaagcacagcgtatccgtcgtcaccgatttagcatcaacggccacttttacaatcataaaaccagcgtgttcacgccagcatacgggtccgttacaaatgtccgagttaactctactatgaccaccctacaggtactcactttgctactcaataaattcagagttgaggacgggccctcggaattcgccttgtacatcgtgcatgaatccggtgagaggactaagctcaaggattgcgagtacccgctgataagccggatcctgcacgggccctgcgagaaaatcgctcgcatctttttgatggaggccgacttgggcgtcgaggtgcctcatgaagtggcgcaatacattaaatttgaaatgcctgtcctcgactccttcgtggagaagctgaaagaggaagaagagcgtgagattatcaagttgacgatgaaattccaagcactgcgtctcactatgctccagagactggagcaactggtagaagccaagtag

SEQ ID NO: 291500 - DNA, 1239 bp, Artificial Sequence
  derived and/or modified sequence
ggcagcaatgctgggggcggccagggcggctgccagggcctgacctgtgacagcgagagcgtgggcaccctggacatcctggaccagacccaggcctgccctgtgtccctggccagcagcagcgcccggcccccctgccccccacctggcccctgtgccgagcccagcggctgcatcgccatggctgtgtggagccccctggtgatgcctggccggcgggagggctgctgccacacccctgtgaccaatgaggagacagaggcccgggaggccaagggccagaagctgcggccctgccacaccctgggcgtgcacgtgtgcctgagcctcttccgctctgagctgctgggcctgctgaagacctacaactgctaccacgagggcaagagcttccagctgcggcaccgggaggaggagggcaccctcatcatcgagggcctgctgaacatcgcctggggcctgcggcggcccatccggctgcagatgcaggatgaccgggagcaggtgcacctgcccagcacctcctggatgccccggcggcccagctgccccctgaaggagcccagcccccagaatggaaacatcacagcccagggccccagcatccagcctgtgcacaaggccgagagcagcacagacagcagcggccccctggaggaggccgaggaggccccccagctgatgaggaccaagagtgatgccagctgcatgagccagaggcggcccaagtgccgggcccctggagaggcccagaggatccgccgccaccgcttcagcatcaatggccacttctacaaccacaagaccagcgtcttcaccccagcctacggctctgtgaccaacgtgcgggtgaacagcaccatgaccaccctgcaggtgctgaccctgctgctgaacaagttccgggtggaggatggccccagcgagtttgccctgtacatcgtgcatgagagcggggagaggaccaagctgaaggactgtgagtaccccctcatcagccgcatcctgcacggcccctgtgagaagatcgcccgcatcttcctgatggaggccgacctgggcgtggaggtgccccatgaggtggcccagtacatcaagtttgagatgcctgtgctggacagctttgtggagaagctgaaggaggaggaggagcgggagatcatcaagctgaccatgaagttccaggccctgcggctgaccatgctgcagaggctggagcagctggtggaggccaagtag

SEQ ID NO: 291501 - DNA, 1239 bp, Artificial Sequence
  derived and/or modified sequence
ggcagcaacgccggcggcggccagggcggctgccagggcctgacctgcgatagtgagtcagtcggcactctggatatactcgaccagactcaagcgtgtccagtctccttagcatcatcctctgcccgccctccgtgtcctccacctggcccctgcgcagagccatccggttgcatagcaatggccgtgtggtcccctctggtgatgccaggtaggcgcgagggatgttgccatactccagtgacaaacgaggaaactgaggctcgggaggccaaaggacagaagttgcgtccctgtcatacactcggcgtgcatgtttgtttgtctctgttccggtcagagctcttagggttattgaagacatacaactgctatcacgaggggaagagtttccaactgcggcaccgtgaagaggaggggactctgataatagaaggcttacttaatattgcttggggcctgcgacgacccattagacttcaaatgcaggatgaccgagagcaggtgcacctcccatccacttcctggatgccacggagaccatcatgtccgcttaaggaaccaagcccacagaacggcaacatcacagcacaaggaccttcaatccagccagtgcataaggctgagtcctcaactgattctagtggcccactagaagaagccgaagaggcgccgcagcttatgagaacaaagtctgatgcgagctgcatgtcccaacgccgccccaagtgtcgcgcaccaggcgaggcccaaaggattcgcagacatagattttcaatcaacgggcacttctataaccacaagacctccgttttcactccagcctatggatctgttacaaacgttcgtgtgaactctacaatgacaactctccaagtgctcacacttttgttaaataagttcagggtggaagacggacctagcgaatttgcactgtacattgtacacgagtctggcgagaggactaaactaaaggactgcgaatacccccttatttctagaatcctccacgggccatgcgagaaaatcgctcgcattttcctcatggaagctgacttaggggtggaggtgccacacgaagtggcacagtacattaaattcgaaatgccagtgctggatagctttgtggaaaagttgaaggaggaagaggaaagggagataatcaaacttaccatgaaatttcaagctctccgactgacaatgctgcagcggttagaacagctggtggaagctaaatag

SEQ ID NO: 291502 - DNA, 1239 bp, Artificial Sequence
  derived and/or modified sequence
ggttccaatgccggaggcggacaaggtggttgtcaaggccttacttgcgatagtgagtctgttggcacactggacatactggaccagacccaggcttgtcctgtaagcctcgcctccagtagtgctaggcccccatgcccgccacccggaccatgtgccgaaccttctggttgtattgctatggctgtctggtcccctcttgttatgccaggcagacgcgaaggttgctgccatacccccgttacaaacgaggaaacagaagctagagaggccaaaggccagaagttacgtccttgccacaccctcggagtgcatgtgtgtctaagtctattccggtctgaactgctggggctgctaaagacgtataactgctatcatgagggaaaaagttttcagcttaggcatcgagaagaggaaggaaccctgatcattgagggcttactgaacatcgcctggggactgcggaggcccatcaggttacagatgcaggacgacagggagcaggtgcacctgccctccaccagctggatgcctcggaggcccagttgccctctgaaggaaccgtcaccccagaacggtaacatcaccgctcagggcccaagcattcagcctgtgcataaagcagagtcttctaccgatagctccggtccactggaggaagccgaagaagcccctcaattgatgaggacaaagtctgatgcctcttgtatgtcgcagcgacgccctaagtgtagagcgcctggagaggcacagaggattcggaggcacagattttctatcaacggacatttctacaatcacaagacctcagtcttcactcctgcttacggcagcgtgaccaacgtcagggtcaattccactatgaccaccctccaggtgcttaccctcctgctcaataagtttagagttgaggacggcccatctgaattcgctttgtatatagtccatgagagcggggaacgcacgaaactgaaagattgcgagtatccactgatttctagaatccttcacggaccttgtgagaaaatcgccaggattttcctgatggaagccgaccttggagtggaggtgccacatgaagtggcccaatatattaagttcgaaatgccggtgctggatagctttgtggaaaagctgaaagaagaagaagaaagggagatcataaaacttactatgaaattccaggccctcaggctcaccatgctgcagagactcgagcagctggtagaggccaagtag

SEQ ID NO: 291503 - DNA, 2630 bp, Artificial Sequence
  derived and/or modified sequence
ggaagcaacgcaggtggagggcagggaggctgccagggccttacctgtgatagtgaaagtgtcggcaccctggacatcctggaccagacgcaggcctgtcccgtgagtctcgcctcctcctcagcccgacccccatgccccccaccagggccatgtgcagaaccatccgggtgcattgcgatggcagtctggtctcctctggttatgcctggccggcgagaagggtgctgtcacactcctgttacaaatgaggaaacagaggccagggaagccaaaggccagaagctgaggccctgccacaccctaggagtacatgtgtgtctttccctttttaggtcggagctcttaggcctgctgaaaacctacaactgctaccatgagggcaagagcttccagctgagacaccgtgaggaagaagggactctgatcatcgaggggctcctcaacattgcctgggggctgaggcggcccatccggctgcagatgcaggatgaccgggagcaggtgcacctcccctccacctcatggatgcccagacggcctagctgccctctaaaggagccatcgccccagaacgggaacatcacagcccaggggccaagcattcagccagtgcacaaggctgagagttccacagacagctcggggcccctggaggaggcagaggaggccccccagctgatgcggaccaagagcgacgccagttgcatgagccagaggaggcccaagtgccgcgcccccggtgaggcccagcgcatccggcgacaccggttctctatcaacggccacttctacaatcataagacctccgtgtttactccagcctatggatccgtgaccaatgtgagggtcaacagcaccatgacaaccctgcaggtgctcaccctgctgctgaacaaatttagggtggaagatggccccagtgagttcgcactctacatcgttcacgagtctggggagcggacaaaattaaaagactgcgagtacccgctgatttccagaatcctgcatgggccatgtgagaagatcgccaggatcttcctgatggaagctgacttgggcgtggaagtcccccatgaagtcgctcagtacattaagtttgaaatgccggtgctggacagttttgttgaaaaattaaaagaagaggaagaaagagaaataatcaaactgaccatgaagttccaagccctgcgtctgacgatgctgcagcgcctggagcagctggtggaggccaagtaactggccaacacctgcctcttccaaagtccccagcagtggcaggtgtacactgagccctggttgctggccccggccggtcacattgactgatggccaccgcctgacgaatcgagtgcctgtgtgtctacctctctgaagcctgagcaccatgattcccacagccagctcttggctccaagatgagcacccacaggaagccgacccaggcctgaggggccaggaacttgctgggtcagatctgtgtggccagccctgtccacaccatgcctctcctgcactggagagcagtgctggcccagcccctgcggcttaggcttcatctgcttgcacattgcctgtcccagagcccctgtgggtccacaagcccctgtcctcttccttcatatgagattcttgtctgccctcatatcacgctgccccacaggaatgctgctgggaaaagcagggcctgccagcaggtatgagatctagcctgctttcagccatcaccttgccacagtgtccccggcttctaagcctccaatatcaccctgtgagcctcgcacagctcagccccaacacagaggtgagaccaggaataaggccacaagtatctcactttctctgcagaaatcaatctttacttcatcagagagacctaaagcgattcttacaaggagcttgctgcaagaaacacggtcattcaatcacattgaggagggtccacatggcattgagagggtgctgcccgctcaatgcccagcagcagctctggaaggcagtgctcagccccatcaccactgtcccgtggatgcctgtgtacctcttgccttttctgggcttgcgtttctctcctctagtgggtggggatgactttcaatgactttcaatacttcccctgaaggaagaatgataaggagaaatgtctgttttgaggaaagggctttgaattccccagatactgaacaatttgtgtttgtgactgatggagaatttcaggaatgaatgagaaagcctttgcgaaactatgcaacagtttacatcagtcatgtgaagtatttgtctaaaacagagcaaactgaagaccaaattattctcctgttgaggtccgtggatggcagatttaaagggaagaaccacaaaggcttgcaaagataggagaggctccatctctaatgcatgtagaagctccttacgggtgcccatcaagagcatagcttggaagccaccatgctgtgcggaactgcgtcagggcaaatgtcacagcaggatttccccaacccagctccatcatcacagacacagagagctgcaggggaggcctgcccactgttttgtcgactctgccctcctctggcagcatagatccttaggtgctcaataaaggtgtgctgtattgaactgaagaagtg

SEQ ID NO: 291504 - DNA, 4747 bp, Artificial Sequence
  derived and/or modified sequence
atggccgcggggggcagcggctgcacttcctcagcgggcggcggtggccggggagttaatcctcgacgcacgggtcccgtttccctctgtgcggcggccggcgggaccataagggcttaactcatatatttaacccccctccaaaaaggtttgaaagtattcttgaagggctgtttggacctgcattattaaaagatctcagtttatttaaagactgtgaacctgaaagcatttctgattggacttttgatgaaaactgtttattctgttgcttgagaagagataaagtaaagggacacttagtcggtctggatgaaccagcttcgggagctgggcaagaagctctgcttaaacaagagcaagcaaaaatcattcgattcgagagacaagcagaagaattcctcaatgcagtcttttatagaaaagacagtccctgggtctccgaccccaatattcccctagtggcccgtgagatcatgcagcgaatgatccaacaatttgctgctgaatatacctcaaaaaatagctctactcaggaccccagccagcccaatagcacaaagaaccaaagcctgccgaaagcatctccagtcaccacctctcccacggctgcaactactcagaaccctgtgctcagcaaacttctcatggctgaccaagactcacctctggaccttactgtcagaaagtctcagtcagaacctagcgaacaagacggtgtacttgatctgtccactaagaaaagtccatgtgctggcagcacttccctgagccactctccaggctgctccagtactcaagggaacgggcgacctgggagacccagccagtaccgcccagacggacttcggagtggtgatggggtacctccaagaagcttacaggatggaaccagggaaggttttggacactccacatcactcaaagttccactggctcgatccctgcagattagtgaagaactactgagcagaaaccaattgtccacagctgccagccttgggccatctggattacagaatcatggacaacacttaatattatccagggaagcctcttgggcaaaaccacattacgagttcaacctcagccgtatgaagttcaggggaaatggtgcactcagcaacatcagtgaccttccttttcttgcagaaaactctgcctttccaaaaatggcacttcaagcaaaacaagatggaaaaaaggatgtgagccattcatctcctgtagatttaaagataccacaagttcgaggaatggatctttcttgggagtctcgcactggtgatcagtacagctatagctctttggtaatgggttcacaaacggagagcgcgcttagtaaaaaattaagggctattcttccaaaacaaagtagaaaaagcatgttagatgctggacccgattcttggggctcagatgctgagcagtctacctctggacagccatatcccacatcggatcaagaaggagaccctggctccaagcagcctcggaagaaaagagggcgttacagacagtacaacagtgagatactggaggaagcaatctcagtggttatgagtggaaaaatgagtgtttccaaagctcagagtatttatgggattccccacagtacactggagtacaaagtaaaggagaggctgggcactttgaaaaaccctccaaagaaaaagatgaaattaatgaggtcggaggggccagatgtttctgtaaagattgaattagatccccagggagaggcagcacaaagtgcaaatgaatcaaaaaacgagtaggaatactgtagagtgccaattactgtacaaactgggtgagcactactgcatcattgttcagctatcattgcttgcacgtaatttcatttactgtgacacttgcttctttgcagattttgcattgacttgtgtgtacagagatgaaatgtgcattctgaatgttgcatattttaaatttttcatgtgcagtatggctcggaatatgtttggccttttgcatgtttctctacaaaagagaattgagttacctcacagagaacagatacatggaagtggactccttgcctgtagagcctgcatgcttttttgtttttttttgttgttgttgttttttcttaagttatatttgtttttactttttaaaaaagaagaggaaacaaagcccccttttagaaactacgtctgtcatactgggagctttatcactgcaaattggaaagccatcttatacaaaattattcacatttttcatctacgattcaactaatcgaaggattaaactaaagaaaaaactaagaagaacaatgaacctttgactttgagaaatttggttattcactgacataattattgggtcatttatagttacattttataattttcttctcactattaaatttatttaaattagcaagctattagtgctcacccagaggggaaggtggtggaaaatgtgcacacactaccttcagaaatgcttcagttaattactttgaacactacctttgctgtaatttcatttgagattttctaagggtagaatttggtctcaccaacaagtgaggatatagccttatctcatggaggacgagctccgtatttactcaggagcagtcagggtacattacataaaacaatggaggatgcctcattttagcaaactaggtttctttgtattcttcagtccttttacagaattgatgtgctaactgaatatcattgcagcaactagactaagatattcaagatctctttattggggatgggagaaatagggaaagaaatgtgtataagtaattatgatattgcaaaagtgatacttagattttacagcctcagtagtctgcccagtgtccacattaatgaaggatccatgtttgtagtgagagaaaaaaaccccaaggtaacccgatatgatttaggatgcatatcagttctaacaattcaatcagaagtcaagctcattggaattccttttttaactgatccaaatactagtagaagggggagggagaggtgttgggttttttttttaagtttttatttaattttgttggttagaatttttttctgtttttggcatcctacataataccccccttcttgactttttctgataattagctgatattcatggttgtttagcacacagttcaggacctttgagatcatgtttgtataagcactccttgaagaatatctaagctttttctgagatgggcttttaaaattataataagggaagtttattttctgcggtttttgcaagaataagcaaagcccatggaatttaatttttcattgtgatcagattaaaattactatttgtgcaaaacaaattccacaccacatgtactgtatattctaatctgctgagaaaggtggtcaggcccttctaaatgcttaaccaaaaacaaacattattggagtttcagtgtaaaataaaattaaaattggagggttggttagattgatttcagatggatactaacagtttgaggggaggtccagatatttccaaggcataaattcttgcctggaaactttggagcaattaattaaattaggttaagttttccctcagcaacctgtgtgttcaaaggttaggcacaccattgctgttactaaaatacatgcactgctcattcttgacatagcttgggtgtgggttcctcttgttttggttattttgtgtagcagtttaatcagtggataactgagcctgtttcctcttagctttctagacttcttaacagaaaaaacagtttgggttcaatagcattttatgattctacaatattttgtcacctagctggaagttgcaataaaaattccttatgaaatatatggttttcatctgtaattgaaggaaatcatagaaagtttgctgaaagcaaagggctaagcttatgaaggaatgcctcctttgttacacactcaagaatttgtcagcacacaattaattgcagccatagtacctttttgcgtaatgtttgggatattcagtagcccaggattgctacaaaaaggtcctttgagaaaattaatttgtgcttgcttttatcccctctcagaaagacatcactaaaggcccattaaaaatctggccctaaaagttcaacttttgtagagtttattgttcagagaggtttaatcctatgtggtagtctatataagtgatgtatgagttgagttatgtaaattttgtcattgtagtgtacatggagtgatcattttactaacataaatattttctatgtgtgtttcagtggatgacaatcgagcagcagaagaatggtgtgcctaccctttaatgctgcagtttaagagaacttgtattgtgtcatttcagattgtaggctgagagttgtaaatagtgaaaatttgagtacttctattatttgttttggttagaaagtgaatttaaaaaacaaaccaaactctaaactttctcagattaaaagtcctgagacctgaagattgtaatattcatgtctgtgaagcttttaaacattacacttgagatcagtcatgacttgatattcaggtaaattttcttttccaagaagcttttgaataagcatatttcctccaaaggtctctctctttctctctctttttttgagtgtagattattttaaagcactaattgcattacattggtaactgcaatataaaatagccattattgttttgtgaagcatggttgaaattagctagtggtcccttttgaatttcatgagcctctc

SEQ ID NO: 291505 - DNA, 10390 bp, Artificial Sequence
  derived and/or modified sequence
gcgaagcgtgaggtggagatgggggcggagggagctggagctgtcacagtccccgggtgcgcctgaccgagccaagtggggtgtcatggccgcggggggcagcggctgcacttcctcagcgggcggcggtggccggggagttaatcctcgacgcacgggtcggtgtgtcccgtttccctctgtgcggcggccggcgggaccataagggcttaactcatatatttaacccccctccaaaaaggtttgaaagtattcttgaagggctgtttggacctgcattattaaaagatctcagtttatttaaagactgtgaacctgaaagcatttctgattggacttttgatgaaaactgtttattctgttgcttgagaagagataaagtaaagggacacttagtcggtctggatgaaccagcttcgggagctgggcaagaagctctgcttaaacaagagcaagcaaaaatcattcgattcgagagacaagcagaagaattcctcaatgcagtcttttatagaaaagacagtccctgggtctccgaccccaatattcccctagtggcccgtgagatcatgcagcgaatgatccaacaatttgctgctgaatatacctcaaaaaatagctctactcaggaccccagccagcccaatagcacaaagaaccaaagcctgccgaaagcatctccagtcaccacctctcccacggctgcaactactcagaaccctgtgctcagcaaacttctcatggctgaccaagactcacctctggaccttactgtcagaaagtctcagtcagaacctagcgaacaagacggtgtacttgatctgtccactaagaaaagtccatgtgctggcagcacttccctgagccactctccaggctgctccagtactcaagggaacgggcgacctgggagacccagccagtaccgcccagacggacttcggagtggtgatggggtacctccaagaagcttacaggatggaaccagggaaggttttggacactccacatcactcaaagttccactggctcgatccctgcagattagtgaagaactactgagcagaaaccaattgtccacagctgccagccttgggccatctggattacagaatcatggacaacacttaatattatccagggaagcctcttgggcaaaaccacattacgagttcaacctcagccgtatgaagttcaggggaaatggtgcactcagcaacatcagtgaccttccttttcttgcagaaaactctgcctttccaaaaatggcacttcaagcaaaacaagatggaaaaaaggatgtgagccattcatctcctgtagatttaaagataccacaagttcgaggaatggatctttcttgggagtctcgcactggtgatcagtacagctatagctctttggtaatgggttcacaaacggagagcgcgcttagtaaaaaattaagggctattcttccaaaacaaagtagaaaaagcatgttagatgctggacccgattcttggggctcagatgctgagcagtctacctctggacagccatatcccacatcggatcaagaaggagaccctggctccaagcagcctcggaagaaaagagggcgttacagacagtacaacagtgagatactggaggaagcaatctcagtggttatgagtggaaaaatgagtgtttccaaagctcagagtatttatgggattccccacagtacactggagtacaaagtaaaggagaggctgggcactttgaaaaaccctccaaagaaaaagatgaaattaatgaggtcggaggggccagatgtttctgtaaagattgaattagatccccagggagaggcagcacaaagtgcaaatgaatcaaaaaacgagtaggaatactgtagagtgccaattactgtacaaactgggtgagcactactgcatcattgttcagctatcattgcttgcacgtaatttcatttactgtgacacttgcttctttgcagattttgcattgacttgtgtgtacagagatgaaatgtgcattctgaatgttgcatattttaaatttttcatgtgcagtatggctcggaatatgtttggccttttgcatgtttctctacaaaagagaattgagttacctcacagagaacagatacatggaagtggactccttgcctgtagagcctgcatgcttttttgtttttttttgttgttgttgttttttcttaagttatatttgtttttactttttaaaaaagaagaggaaacaaagcccccttttagaaactacgtctgtcatactgggagctttatcactgcaaattggaaagccatcttatacaaaattattcacatttttcatctacgattcaactaatcgaaggattaaactaaagaaaaaactaagaagaacaatgaacctttgactttgagaaatttggttattcactgacataattattgggtcatttatagttacattttataattttcttctcactattaaatttatttaaattagcaagctattagtgctcacccagaggggaaggtggtggaaaatgtgcacacactaccttcagaaatgcttcagttaattactttgaacactacctttgctgtaatttcatttgagattttctaagggtagaatttggtctcaccaacaagtgaggatatagccttatctcatggaggacgagctccgtatttactcaggagcagtcagggtacattacataaaacaatggaggatgcctcattttagcaaactaggtttctttgtattcttcagtccttttacagaattgatgtgctaactgaatatcattgcagcaactagactaagatattcaagatctctttattggggatgggagaaatagggaaagaaatgtgtataagtaattatgatattgcaaaagtgatacttagattttacagcctcagtagtctgcccagtgtccacattaatgaaggatccatgtttgtagtgagagaaaaaaaccccaaggtaacccgatatgatttaggatgcatatcagttctaacaattcaatcagaagtcaagctcattggaattccttttttaactgatccaaatactagtagaagggggagggagaggtgttgggttttttttttaagtttttatttaattttgttggttagaatttttttctgtttttggcatcctacataataccccccttcttgactttttctgataattagctgatattcatggttgtttagcacacagttcaggacctttgagatcatgtttgtataagcactccttgaagaatatctaagctttttctgagatgggcttttaaaattataataagggaagtttattttctgcggtttttgcaagaataagcaaagcccatggaatttaatttttcattgtgatcagattaaaattactatttgtgcaaaacaaattccacaccacatgtactgtatattctaatctgctgagaaaggtggtcaggcccttctaaatgcttaaccaaaaacaaacattattggagtttcagtgtaaaataaaattaaaattggagggttggttagattgatttcagatggatactaacagtttgaggggaggtccagatatttccaaggcataaattcttgcctggaaactttggagcaattaattaaattaggttaagttttccctcagcaacctgtgtgttcaaaggttaggcacaccattgctgttactaaaatacatgcactgctcattcttgacatagcttgggtgtgggttcctcttgttttggttattttgtgtagcagtttaatcagtggataactgagcctgtttcctcttagctttctagacttcttaacagaaaaaacagtttgggttcaatagcattttatgattctacaatattttgtcacctagctggaagttgcaataaaaattccttatgaaatatatggttttcatctgtaattgaaggaaatcatagaaagtttgctgaaagcaaagggctaagcttatgaaggaatgcctcctttgttacacactcaagaatttgtcagcacacaattaattgcagccatagtacctttttgcgtaatgtttgggatattcagtagcccaggattgctacaaaaaggtcctttgagaaaattaatttgtgcttgcttttatcccctctcagaaagacatcactaaaggcccattaaaaatctggccctaaaagttcaacttttgtagagtttattgttcagagaggtttaatcctatgtggtagtctatataagtgatgtatgagttgagttatgtaaattttgtcattgtagtgtacatggagtgatcattttactaacataaatattttctatgtgtgtttcagtggatgacaatcgagcagcagaagaatggtgtgcctaccctttaatgctgcagtttaagagaacttgtattgtgtcatttcagattgtaggctgagagttgtaaatagtgaaaatttgagtacttctattatttgttttggttagaaagtgaatttaaaaaacaaaccaaactctaaactttctcagattaaaagtcctgagacctgaagattgtaatattcatgtctgtgaagcttttaaacattacacttgagatcagtcatgacttgatattcaggtaaattttcttttccaagaagcttttgaataagcatatttcctccaaaggtctctctctttctctctctttttttgagtgtagattattttaaagcactaattgcattacattggtaactgcaatataaaatagccattattgttttgtgaagcatggttgaaattagctagtggtcccttttgaatttcatgagcctctcaaaaaagaaaaacttaaaaaaaaaaaaaaaaaaaaacaaaaagctgctggaatatttcaaaagatatatattttaccttattataggttttgtaaagttagtttgtaatattcaggtgcacttttaatgttaaattttgtgttcagagttccattataccatgtatttctcggaggtggctcatcacacggctggtggcagtcttggtgccgcagtgattccttaatatttgatttctctcttgatttgccactattctgtattggcactttcagtgtagatattctagtttggggatgtcctcacaatgtgtaatagagattggtctattagcatgcttaatttctgctaatcagagttttgcatggcccaaacaacagttgaccatttttatggtatgggaaagtgtagttcacaactgtctttgtcacgaaagccgtttttcctcacattttccagtaggcagataacattacttaaattattaatatataacactcttggaactattgataggaaataatgtatttaaaataattttttgcattttcagagaccttgatgttatagggtagataagctatggcactataaaatcaaaaacactaattctgtggaaggatatctagttggtatttttatctttagctttctcatttctgagacagcatagtcatccagcttgatggtaatgtagtatattactttgttcagtgggcttataagtgactctgaattatgtttgtgatgagctatacactttttttctgttccccaaataccatgaaggacaaggtcactctttcaggaaaaataatttatatttgtgtataatactttttaatattaagtttgttgttctgaagtttagatgttgcttgataaacctttgctgcagcagatcatgaatatgagtaaggctttgtgtgataataggggtccttatgtgaagttaattactgttcagttctggtgagcaagctcaacaagtgtgaagtgtgtattagctttatttggtacacttttactttacaatatcgaagtgcttttagaactctggttatcttatataaaccattacctcaaccaattggcatttcttttccccaacatttaccttagctataatatgagctatgtgggatcagatggtaaaactataaaaggcacaatgagaagtttagttcccaagttttggagagaactctaaattagactaaaaacaactacctgttaacaccaatatcataactaccttctgtcgttaggcagtacatagcaacctttgagctgctagtgagctatctgttctccccctacccccaagtaagcacacagtgccaggcctggttctaagcctttgtgattctcttacatctcattgacccataatagtgaagcatggattcatttattttcataagacaaattgagtcagctcgatgtcagaagttgaaaatattttgagtagtttaacagttatatgagagattggcatcattttctttaacagcttttatctttgtagatttccttttgagacatgtatttttgcttttataatcctttcattaaatgccagaggttgttttcatattaatcactcttttctgtatattcaggttgctgtcattggtgatagaatatggcaatagacagaattgtgctccactttatgttttttaggagatattgaaagttataggttaaattttggccttcttgaagatatcaaagattgttttccttgttacctttaattagaatttggtcttcattaatgctttggtcaggctagcattactaaaaacttgatggcttcagcagaacagcccgtttaggagactattaagctatctagggattttttttcaaattaattgctttcaaaatctgaaaaggaaaaaagtataattgtggtacaaagaagacagatctccaggctctttcttctcagtttattttggtttaattctgtactggagacttgaataggatttgtgaacatggtgatggaaagaaaaatagaggacattatttgtgtaccctcattcctgaataatcttgcagtcaccttttaaagaagcagacattagccctgtaacacaacactgtagctataaactctaagtgttaggaaggagattggggtggggagggtggagtaggatggaaaaagcatgtagacttctgagaagaggctaaaaattctgccctataatactaaaaatgagtcacaagataatgtggtgaagttaggccatcttgatttgatagaaaaatcttttacattgtttaaaaatgagaatcgaggctaattaatgttgatttgacaatagaacatgagctaattctgcaaccgtttggggggtaattttatggtttccagttcatttagagctgtatcaagaaaagctaaaaagcaagcacttttagttaatcatagatttattggatatagcaaatattattataatatttaatctctattatttgaatgtggaaatgaactcttttaccccatcttgaactgtcattgaacatgctcaagatgatcaacactggaaatgaccctacacacataccaaaaaaatctaaagcagtaagacatatttgaagatccatacctcttaaactttttagatttgtcttgggaaagaatttatgaacctgtaaccagtattagtgcagtcttgggttccttgttctgcataattgcaccctttctcaggtatgtcctgacaacataaattttaaaataatctcattagagattagattctcagtggatagtgtgtaaggggactaggggtggggggttgggggtagttggacacaggacactgacacagtagagcagggatttttaacagtcaatagccaaatagaatttcaatctagaatatttttaccccctcagaatgagtgaaacaacttctattatttggtgtacccggtgctacactcctaaaagtcttttttttttttcatccaggtgacgttttttatttttcctgcttggtggtggaaggttatatagtaaacttcactgtcattaagaaagcgcttgtccaaaatgtttaaagtactagaaaagggataattcagcactttttctgttacaacactaaagtcttaatttatcttcagagtcttaggtactgtaagtttttggatgattatttaaaaatataaaacatactacataatatggggtcagatcacatttatataaataattcttattttaaaaaagacaataacattttgtacctttctagcaattccaagtgattgcctcattttctcttgttaagcatttcaagcttaagaatttggaatttgagagaaggtgagggggaaaattccctaaaataaaaatttgtttcaaaccattttagaaaaataaatcactaggaaaataggtagggattctctccccctttaagtcttcagggaatgagcagtatttagaatctttggctgaaattcaagcctttttactttgtaaatttttaatattaattcactgacatgctttttacaccagaggactgaaaatggatcttaatgtttttaagttgtggaagggtatatttctaaaatgaggggggatgattaactaggttagtattaccagcattagtaagtttaaggaattttagtatgtaatagcaaagtgtttgattaaaagtctaatcctatattactagtcaaaattagttacattctgatctaggaaagataatagtcattggatattgatatgctgtgctgtcagaaaaccagactaagatagaaacctttatctgactcccacatgttgcttgttgtgatgggatgtatactttacagcagcttattgctgctttgaaaaaaaatgtataaactatacatttggagtgtttgcatataattctttataacctccacttaaagctgtcagacattggtattttatcagtccacattgttgaataaaactaatgttcttaggaatccagcttgtacacactgtttaaaaaccctcagggacagtttacacactcttctcactcaattcaggtactttgatgctattcttaaacctaacagtgacttgtatttttctgttttgcttttatttcaacgtgctggtagcacatctgatgaatgtcaacttaaaaaactcagttcaggtatccaggtataactcagccaaacagattttaaagctgcatataactctccagcacatggtgcctcacactcttatagtggcattctatatattcagttattactactgagcagataatatgggggttcctgttaacagtgtattttttaaaaaaagcgcataaatgtatagccagcacactacacacacacacacaaacatgcacagttaaactatatatttttaaatgccactaatagccagcacaactaaaacaaaagacattcctaactgctctgtaagctgttaacagatgcagttccttcttgatgtggctcttgcttcttcacgataactactactaaattcaagcactggtccttgggtgtctgacctctacattctagtttatgcaatgtctttagagaattttgtgcactggccactgtgatggaaccattgggccaggagtgctttgagtttatcagtagtgattctgccaaagttggtgttgtaacatgagtatgtaaaatgtcaaaaaaattagcagaggtctaggtctgcatatcagcagacagttttgtccgtgtattttgtagccttgaagttctcagtgacaagttttttctgatgcgaagttctaattccagtgttttagtcctttgcatctttaatgttaagacttgcctctttaaaattgcttttgttttctgcagtactatctgtggttaacaaaatagattatttctctgctttaatatttgatatcttacatctaaaataaattctctccacatataaaacccatagcctttggagatatggaaaatggtatctttcagatttctagaagttcaagtgtcatacaacaaaacaggaaccccctttactcttatggacctcatttcaatatactgtttacagtttgatggaattgtataatttaatatttctcttgtactgtagtttatatttatttacagatttttttgtactgtgtgatttgaactttttgttccttgctatgatcaatgtttatgtagtagagcacttatgatcacaaattaagttttttggtttgattgcactacattaaattttttaatgcagttctgatttttgactggactaaaactgtgtcttaatgtatgtgatgagtacttaaaattttaatccatgtggtccccccccttttttttttttttgcattgtatgtcaaaagcgcttgttctttcgtgcatgtgtaagatttaatggttccattgtattatttgaccatgacattttggagaaacattcccagctgtaatgttgtgtatggtagttctcactggatgctagagttttcaaaaccactattcttctaataaattttgttgtgaaaaactgtt

SEQ ID NO: 291506 - DNA, 4834 bp, Artificial Sequence
  derived and/or modified sequence
gggccgggcgggcggcagaagatggcgagggtgtgtaggcggcagcaatgctccgttgagagacgcggctttcggcaagaactggattcgtggcgccacaagctcattcactgtgtaggtcccgtttccctctgtgcggcggccggcgggaccataagggcttaactcatatatttaacccccctccaaaaaggtttgaaagtattcttgaagggctgtttggacctgcattattaaaagatctcagtttatttaaagactgtgaacctgaaagcatttctgattggacttttgatgaaaactgtttattctgttgcttgagaagagataaagtaaagggacacttagtcggtctggatgaaccagcttcgggagctgggcaagaagctctgcttaaacaagagcaagcaaaaatcattcgattcgagagacaagcagaagaattcctcaatgcagtcttttatagaaaagacagtccctgggtctccgaccccaatattcccctagtggcccgtgagatcatgcagcgaatgatccaacaatttgctgctgaatatacctcaaaaaatagctctactcaggaccccagccagcccaatagcacaaagaaccaaagcctgccgaaagcatctccagtcaccacctctcccacggctgcaactactcagaaccctgtgctcagcaaacttctcatggctgaccaagactcacctctggaccttactgtcagaaagtctcagtcagaacctagcgaacaagacggtgtacttgatctgtccactaagaaaagtccatgtgctggcagcacttccctgagccactctccaggctgctccagtactcaagggaacgggcgacctgggagacccagccagtaccgcccagacggacttcggagtggtgatggggtacctccaagaagcttacaggatggaaccagggaaggttttggacactccacatcactcaaagttccactggctcgatccctgcagattagtgaagaactactgagcagaaaccaattgtccacagctgccagccttgggccatctggattacagaatcatggacaacacttaatattatccagggaagcctcttgggcaaaaccacattacgagttcaacctcagccgtatgaagttcaggggaaatggtgcactcagcaacatcagtgaccttccttttcttgcagaaaactctgcctttccaaaaatggcacttcaagcaaaacaagatggaaaaaaggatgtgagccattcatctcctgtagatttaaagataccacaagttcgaggaatggatctttcttgggagtctcgcactggtgatcagtacagctatagctctttggtaatgggttcacaaacggagagcgcgcttagtaaaaaattaagggctattcttccaaaacaaagtagaaaaagcatgttagatgctggacccgattcttggggctcagatgctgagcagtctacctctggacagccatatcccacatcggatcaagaaggagaccctggctccaagcagcctcggaagaaaagagggcgttacagacagtacaacagtgagatactggaggaagcaatctcagtggttatgagtggaaaaatgagtgtttccaaagctcagagtatttatgggattccccacagtacactggagtacaaagtaaaggagaggctgggcactttgaaaaaccctccaaagaaaaagatgaaattaatgaggtcggaggggccagatgtttctgtaaagattgaattagatccccagggagaggcagcacaaagtgcaaatgaatcaaaaaacgagtaggaatactgtagagtgccaattactgtacaaactgggtgagcactactgcatcattgttcagctatcattgcttgcacgtaatttcatttactgtgacacttgcttctttgcagattttgcattgacttgtgtgtacagagatgaaatgtgcattctgaatgttgcatattttaaatttttcatgtgcagtatggctcggaatatgtttggccttttgcatgtttctctacaaaagagaattgagttacctcacagagaacagatacatggaagtggactccttgcctgtagagcctgcatgcttttttgtttttttttgttgttgttgttttttcttaagttatatttgtttttactttttaaaaaagaagaggaaacaaagcccccttttagaaactacgtctgtcatactgggagctttatcactgcaaattggaaagccatcttatacaaaattattcacatttttcatctacgattcaactaatcgaaggattaaactaaagaaaaaactaagaagaacaatgaacctttgactttgagaaatttggttattcactgacataattattgggtcatttatagttacattttataattttcttctcactattaaatttatttaaattagcaagctattagtgctcacccagaggggaaggtggtggaaaatgtgcacacactaccttcagaaatgcttcagttaattactttgaacactacctttgctgtaatttcatttgagattttctaagggtagaatttggtctcaccaacaagtgaggatatagccttatctcatggaggacgagctccgtatttactcaggagcagtcagggtacattacataaaacaatggaggatgcctcattttagcaaactaggtttctttgtattcttcagtccttttacagaattgatgtgctaactgaatatcattgcagcaactagactaagatattcaagatctctttattggggatgggagaaatagggaaagaaatgtgtataagtaattatgatattgcaaaagtgatacttagattttacagcctcagtagtctgcccagtgtccacattaatgaaggatccatgtttgtagtgagagaaaaaaaccccaaggtaacccgatatgatttaggatgcatatcagttctaacaattcaatcagaagtcaagctcattggaattccttttttaactgatccaaatactagtagaagggggagggagaggtgttgggttttttttttaagtttttatttaattttgttggttagaatttttttctgtttttggcatcctacataataccccccttcttgactttttctgataattagctgatattcatggttgtttagcacacagttcaggacctttgagatcatgtttgtataagcactccttgaagaatatctaagctttttctgagatgggcttttaaaattataataagggaagtttattttctgcggtttttgcaagaataagcaaagcccatggaatttaatttttcattgtgatcagattaaaattactatttgtgcaaaacaaattccacaccacatgtactgtatattctaatctgctgagaaaggtggtcaggcccttctaaatgcttaaccaaaaacaaacattattggagtttcagtgtaaaataaaattaaaattggagggttggttagattgatttcagatggatactaacagtttgaggggaggtccagatatttccaaggcataaattcttgcctggaaactttggagcaattaattaaattaggttaagttttccctcagcaacctgtgtgttcaaaggttaggcacaccattgctgttactaaaatacatgcactgctcattcttgacatagcttgggtgtgggttcctcttgttttggttattttgtgtagcagtttaatcagtggataactgagcctgtttcctcttagctttctagacttcttaacagaaaaaacagtttgggttcaatagcattttatgattctacaatattttgtcacctagctggaagttgcaataaaaattccttatgaaatatatggttttcatctgtaattgaaggaaatcatagaaagtttgctgaaagcaaagggctaagcttatgaaggaatgcctcctttgttacacactcaagaatttgtcagcacacaattaattgcagccatagtacctttttgcgtaatgtttgggatattcagtagcccaggattgctacaaaaaggtcctttgagaaaattaatttgtgcttgcttttatcccctctcagaaagacatcactaaaggcccattaaaaatctggccctaaaagttcaacttttgtagagtttattgttcagagaggtttaatcctatgtggtagtctatataagtgatgtatgagttgagttatgtaaattttgtcattgtagtgtacatggagtgatcattttactaacataaatattttctatgtgtgtttcagtggatgacaatcgagcagcagaagaatggtgtgcctaccctttaatgctgcagtttaagagaacttgtattgtgtcatttcagattgtaggctgagagttgtaaatagtgaaaatttgagtacttctattatttgttttggttagaaagtgaatttaaaaaacaaaccaaactctaaactttctcagattaaaagtcctgagacctgaagattgtaatattcatgtctgtgaagcttttaaacattacacttgagatcagtcatgacttgatattcaggtaaattttcttttccaagaagcttttgaataagcatatttcctccaaaggtctctctctttctctctctttttttgagtgtagattattttaaagcactaattgcattacattggtaactgcaatataaaatagccattattgttttgtgaagcatggttgaaattagctagtggtcccttttgaatttcatgagcctctcaaaaaagaaaaacttaaaaaaaaaaaaaaaaaaaaacaaaaa

SEQ ID NO: 291507 - DNA, 7777 bp, Artificial Sequence
  derived and/or modified sequence
gcgcggggccgcggcggaggctgggccgggcgggcggcagaagatggcgagggtgtgtaggcggcagcaatgctccgttgagagacgcggctttcggcaagaactggattcgtggcgccacaagctcattcactgtgtaggtcccgtttccctctgtgcggcggccggcgggaccataagggcttaactcatatatttaacccccctccaaaaaggtttgaaagtattcttgaagggctgtttggacctgcattattaaaagatctcagtttatttaaagactgtgaacctgaaagcatttctgattggacttttgatgaaaactgtttattctgttgcttgagaagagataaagtaaagggacacttagtcggtctggatgaaccagcttcgggagctgggcaagaagctctgcttaaacaagagcaagcaaaaatcattcgattcgagagacaagcagaagaattcctcaatgcagtcttttatagaaaagacagtccctgggtctccgaccccaatattcccctagtggcccgtgagatcatgcagcgaatgatccaacaatttgctgctgaatatacctcaaaaaatagctctactcaggaccccagccagcccaatagcacaaagaaccaaagcctgccgaaagcatctccagtcaccacctctcccacggctgcaactactcagaaccctgtgctcagcaaacttctcatggctgaccaagactcacctctggaccttactgtcagaaagtctcagtcagaacctagcgaacaagacggtgtacttgatctgtccactaagaaaagtccatgtgctggcagcacttccctgagccactctccaggctgctccagtactcaagggaacgggcgacctgggagacccagccagtaccgcccagacggacttcggagtggtgatggggtacctccaagaagcttacaggatggaaccagggaaggttttggacactccacatcactcaaagttccactggctcgatccctgcagattagtgaagaactactgagcagaaaccaattgtccacagctgccagccttgggccatctggattacagaatcatggacaacacttaatattatccagggaagcctcttgggcaaaaccacattacgagttcaacctcagccgtatgaagttcaggggaaatggtgcactcagcaacatcagtgaccttccttttcttgcagaaaactctgcctttccaaaaatggcacttcaagcaaaacaagatggaaaaaaggatgtgagccattcatctcctgtagatttaaagataccacaagttcgaggaatggatctttcttgggagtctcgcactggtgatcagtacagctatagctctttggtaatgggttcacaaacggagagcgcgcttagtaaaaaattaagggctattcttccaaaacaaagtagaaaaagcatgttagatgctggacccgattcttggggctcagatgctgagcagtctacctctggacagccatatcccacatcggatcaagaaggagaccctggctccaagcagcctcggaagaaaagagggcgttacagacagtacaacagtgagatactggaggaagcaatctcagtggttatgagtggaaaaatgagtgtttccaaagctcagagtatttatgggattccccacagtacactggagtacaaagtaaaggagaggctgggcactttgaaaaaccctccaaagaaaaagatgaaattaatgagtggatgacaatcgagcagcagaagaatggtgtgcctaccctttaatgctgcagtttaagagaacttgtattgtgtcatttcagattgtaggctgagagttgtaaatagtgaaaatttgagtacttctattatttgttttggttagaaagtgaatttaaaaaacaaaccaaactctaaactttctcagattaaaagtcctgagacctgaagattgtaatattcatgtctgtgaagcttttaaacattacacttgagatcagtcatgacttgatattcaggtaaattttcttttccaagaagcttttgaataagcatatttcctccaaaggtctctctctttctctctctttttttgagtgtagattattttaaagcactaattgcattacattggtaactgcaatataaaatagccattattgttttgtgaagcatggttgaaattagctagtggtcccttttgaatttcatgagcctctcaaaaaagaaaaacttaaaaaaaaaaaaaaaaaaaaacaaaaagctgctggaatatttcaaaagatatatattttaccttattataggttttgtaaagttagtttgtaatattcaggtgcacttttaatgttaaattttgtgttcagagttccattataccatgtatttctcggaggtggctcatcacacggctggtggcagtcttggtgccgcagtgattccttaatatttgatttctctcttgatttgccactattctgtattggcactttcagtgtagatattctagtttggggatgtcctcacaatgtgtaatagagattggtctattagcatgcttaatttctgctaatcagagttttgcatggcccaaacaacagttgaccatttttatggtatgggaaagtgtagttcacaactgtctttgtcacgaaagccgtttttcctcacattttccagtaggcagataacattacttaaattattaatatataacactcttggaactattgataggaaataatgtatttaaaataattttttgcattttcagagaccttgatgttatagggtagataagctatggcactataaaatcaaaaacactaattctgtggaaggatatctagttggtatttttatctttagctttctcatttctgagacagcatagtcatccagcttgatggtaatgtagtatattactttgttcagtgggcttataagtgactctgaattatgtttgtgatgagctatacactttttttctgttccccaaataccatgaaggacaaggtcactctttcaggaaaaataatttatatttgtgtataatactttttaatattaagtttgttgttctgaagtttagatgttgcttgataaacctttgctgcagcagatcatgaatatgagtaaggctttgtgtgataataggggtccttatgtgaagttaattactgttcagttctggtgagcaagctcaacaagtgtgaagtgtgtattagctttatttggtacacttttactttacaatatcgaagtgcttttagaactctggttatcttatataaaccattacctcaaccaattggcatttcttttccccaacatttaccttagctataatatgagctatgtgggatcagatggtaaaactataaaaggcacaatgagaagtttagttcccaagttttggagagaactctaaattagactaaaaacaactacctgttaacaccaatatcataactaccttctgtcgttaggcagtacatagcaacctttgagctgctagtgagctatctgttctccccctacccccaagtaagcacacagtgccaggcctggttctaagcctttgtgattctcttacatctcattgacccataatagtgaagcatggattcatttattttcataagacaaattgagtcagctcgatgtcagaagttgaaaatattttgagtagtttaacagttatatgagagattggcatcattttctttaacagcttttatctttgtagatttccttttgagacatgtatttttgcttttataatcctttcattaaatgccagaggttgttttcatattaatcactcttttctgtatattcaggttgctgtcattggtgatagaatatggcaatagacagaattgtgctccactttatgttttttaggagatattgaaagttataggttaaattttggccttcttgaagatatcaaagattgttttccttgttacctttaattagaatttggtcttcattaatgctttggtcaggctagcattactaaaaacttgatggcttcagcagaacagcccgtttaggagactattaagctatctagggattttttttcaaattaattgctttcaaaatctgaaaaggaaaaaagtataattgtggtacaaagaagacagatctccaggctctttcttctcagtttattttggtttaattctgtactggagacttgaataggatttgtgaacatggtgatggaaagaaaaatagaggacattatttgtgtaccctcattcctgaataatcttgcagtcaccttttaaagaagcagacattagccctgtaacacaacactgtagctataaactctaagtgttaggaaggagattggggtggggagggtggagtaggatggaaaaagcatgtagacttctgagaagaggctaaaaattctgccctataatactaaaaatgagtcacaagataatgtggtgaagttaggccatcttgatttgatagaaaaatcttttacattgtttaaaaatgagaatcgaggctaattaatgttgatttgacaatagaacatgagctaattctgcaaccgtttggggggtaattttatggtttccagttcatttagagctgtatcaagaaaagctaaaaagcaagcacttttagttaatcatagatttattggatatagcaaatattattataatatttaatctctattatttgaatgtggaaatgaactcttttaccccatcttgaactgtcattgaacatgctcaagatgatcaacactggaaatgaccctacacacataccaaaaaaatctaaagcagtaagacatatttgaagatccatacctcttaaactttttagatttgtcttgggaaagaatttatgaacctgtaaccagtattagtgcagtcttgggttccttgttctgcataattgcaccctttctcaggtatgtcctgacaacataaattttaaaataatctcattagagattagattctcagtggatagtgtgtaaggggactaggggtggggggttgggggtagttggacacaggacactgacacagtagagcagggatttttaacagtcaatagccaaatagaatttcaatctagaatatttttaccccctcagaatgagtgaaacaacttctattatttggtgtacccggtgctacactcctaaaagtcttttttttttttcatccaggtgacgttttttatttttcctgcttggtggtggaaggttatatagtaaacttcactgtcattaagaaagcgcttgtccaaaatgtttaaagtactagaaaagggataattcagcactttttctgttacaacactaaagtcttaatttatcttcagagtcttaggtactgtaagtttttggatgattatttaaaaatataaaacatactacataatatggggtcagatcacatttatataaataattcttattttaaaaaagacaataacattttgtacctttctagcaattccaagtgattgcctcattttctcttgttaagcatttcaagcttaagaatttggaatttgagagaaggtgagggggaaaattccctaaaataaaaatttgtttcaaaccattttagaaaaataaatcactaggaaaataggtagggattctctccccctttaagtcttcagggaatgagcagtatttagaatctttggctgaaattcaagcctttttactttgtaaatttttaatattaattcactgacatgctttttacaccagaggactgaaaatggatcttaatgtttttaagttgtggaagggtatatttctaaaatgaggggggatgattaactaggttagtattaccagcattagtaagtttaaggaattttagtatgtaatagcaaagtgtttgattaaaagtctaatcctatattactagtcaaaattagttacattctgatctaggaaagataatagtcattggatattgatatgctgtgctgtcagaaaaccagactaagatagaaacctttatctgactcccacatgttgcttgttgtgatgggatgtatactttacagcagcttattgctgctttgaaaaaaaatgtataaactatacatttggagtgtttgcatataattctttataacctccacttaaagctgtcagacattggtattttatcagtccacattgttgaataaaactaatgttcttaggaatccagcttgtacacactgtttaaaaaccctcagggacagtttacacactcttctcactcaattcaggtactttgatgctattcttaaacctaacagtgacttgtatttttctgttttgcttttatttcaacgtgctggtagcacatctgatgaatgtcaacttaaaaaactcagttcaggtatccaggtataactcagccaaacagattttaaagctgcatataactctccagcacatggtgcctcacactcttatagtggcattctatatattcagttattactactgagcagataatatgggggttcctgttaacagtgtattttttaaaaaaagcgcataaatgtatagccagcacactacacacacacacacaaacatgcacagttaaactatatatttttaaatgccactaatagccagcacaactaaaacaaaagacattcctaactgctctgtaagctgttaacagatgcagttccttcttgatgtggctcttgcttcttcacgataactactactaaattcaagcactggtccttgggtgtctgacctctacattctagtttatgcaatgtctttagagaattttgtgcactggccactgtgatggaaccattgggccaggagtgctttgagtttatcagtagtgattctgccaaagttggtgttgtaacatgagtatgtaaaatgtcaaaaaaattagcagaggtctaggtctgcatatcagcagacagttttgtccgtgtattttgtagccttgaagttctcagtgacaagttttttctgatgcgaagttctaattccagtgttttagtcctttgcatctttaatgttaagacttgcctctttaaaattgcttttgttttctgcagtactatctgtggttaacaaaatagattatttctctgctttaatatttgatatcttacatctaaaataaattctctccacatataaaacccatagcctttggagatatggaaaatggtatctttcagatttctagaagttcaagtgtcatacaacaaaacaggaaccccctttactcttatggacctcatttcaatatactgtttacagtttgatggaattgtataatttaatatttctcttgtactgtagtttatatttatttacagatttttttgtactgtgtgatttgaactttttgttccttgctatgatcaatgtttatgtagtagagcacttatgatcacaaattaagttttttggtttgattgcactacattaaattttttaatgcagttctgatttttgactggactaaaactgtgtcttaatgtatgtgatgagtacttaaaattttaatccatgtggtccccccccttttttttttttttgcattgtatgtcaaaagcgcttgttctttcgtgcatgtgtaagatttaatggttccattgtattatttgaccatgacattttggagaaacattcccagctgtaatgttgtgtatggtagttctcactggatgctagagttttcaaaaccactattcttctaataaattttgttgtg

SEQ ID NO: 291508 - DNA, 3138 bp, Artificial Sequence
  derived and/or modified sequence
atgctgaccgtgcaggtgaagaccagcagcgccatcgagctgcccgacagcctggccttcctgtggatcatccccatgtggtactgcgagggcaaggagctggagaacagccccgacatccacatcgtgcaggccggcaacctgcacagcctgaccatcgccgaggccttcgaggaggacaccggcagatacagctgcttcgccagcaacatctacggcaccgacagcaccagcgccgagatctacatcgagggcgtgagcagcagcgacagcgagggcgaccccaacaaggaggagatgaacagaatccagaagcccaacgaggtgagcagcccccccaccaccagcgccgtgatcccccccgccgtgccccaggcccagcacctggtggcccagcccagagtggccaccatccagcagtgccagagccccaccaactacctgcagggcctggacggcaagcccatcatcgccgcccccgtgttcaccaagatgctgcagaacctgagcgccagcgagggccagctggtggtgttcgagtgcagagtgaagggcgcccccagccccaaggtggagtggtacagagagggcaccctgatcgaggacagccccgacttcagaatcctgcagaagaagcccagaagcatggccgagcccgaggagatctgcaccctggtgatcgccgaggtgttcgccgaggacagcggctgcttcacctgcaccgccagcaacaagtacggcaccgtgagcagcatcgcccagctgcacgtgagaggcaacgaggacctgagcaacaacggcagcctgcacagcgccaacagcaccaccaacctggccgccatcgagccccagcccagccccccccacagcgagccccccagcgtggagcagccccccaagcccaagctggagggcgtgctggtgaaccacaacgagcccagaagcagcagcagaatcggcctgagagtgcacttcaacctgcccgaggacgacaagggcagcgaggccagcagcgaggccggcgtggtgaccaccagacagaccagacccgacagcttccaggagagattcaacggccaggccaccaagacccccgagcccagcagccccgtgaaggagcccccccccgtgctggccaagcccaagctggacagcacccagctgcagcagctgcacaaccaggtgctgctggagcagcaccagctgcagaaccccccccccagcagccccaaggagttccccttcagcatgaccgtgctgaacagcaacgccccccccgccgtgaccaccagcagcaagcaggtgaaggcccccagcagccagaccttcagcctggccagacccaagtacttcttccccagcaccaacaccaccgccgccaccgtggcccccagcagcagccccgtgttcaccctgagcagcaccccccagaccatccagagaaccgtgagcaaggagagcctgctggtgagccaccccagcgtgcagaccaagagccccggcggcctgagcatccagaacgagcccctgccccccggccccaccgagcccacccccccccccttcaccttcagcatccccagcggcaaccagttccagcccagatgcgtgagccccatccccgtgagccccaccagcagaatccagaaccccgtggccttcctgagcagcgtgctgcccagcctgcccgccatcccccccaccaacgccatgggcctgcccagaagcgcccccagcatgcccagccagggcctggccaagaagaacaccaagagcccccagcccgtgaacgacgacaacatcagagagaccaagaacgccgtgatcagagacctgggcaagaagatcaccttcagcgacgtgagacccaaccagcaggagtacaagatcagcagcttcgagcagagactgatgaacgagatcgagttcagactggagagaacccccgtggacgagagcgacgacgagatccagcacgacgagatccccaccggcaagtgcatcgcccccatcttcgacaagagactgaagcacttcagagtgaccgagggcagccccgtgaccttcacctgcaagatcgtgggcatccccgtgcccaaggtgtactggttcaaggacggcaagcagatcagcaagagaaacgagcactgcaagatgagaagagagggcgacggcacctgcagcctgcacatcgagagcaccaccagcgacgacgacggcaactacaccatcatggccgccaacccccagggcagaatcagctgcagcggccacctgatggtgcagagcctgcccatcagaagcagactgaccagcgccggccagagccacagaggcagaagcagagtgcaggagagagacaaggagcccctgcaggagagattcttcagaccccacttcctgcaggcccccggcgacatggtggcccacgagggcagactgtgcagactggactgcaaggtgagcggcctgcccccccccgagctgacctggctgctgaacggccagcccgtgctgcccgacgccagccacaagatgctggtgagagagaccggcgtgcacagcctgctgatcgaccccctgacccagagagacgccggcacctacaagtgcatcgccaccaacaagaccggccagaacagcttcagcctggagctgagcgtggtggccaaggaggtgaagaaggcccccgtgatcctggagaagctgcagaactgcggcgtgcccgagggccaccccgtgagactggagtgcagagtgatcggcatgcccccccccgtgttctactggaagaaggacaacgagaccatcccctgcaccagagagagaatcagcatgcaccaggacaccaccggctacgcctgcctgctgatccagcccgccaagaagagcgacgccggctggtacaccctgagcgccaagaacgaggccggcatcgtgagctgcaccgccagactggacatctacgcccagtggcaccaccagatccccccccccatgagcgtgagacccagcggcagcagatacggcagcctgaccagcaagggcctggacatcttcagcgccttcagcagcatggagagcaccatggtgtacagctgcagcagcagaagcgtggtggagagcgacgagctgtag

SEQ ID NO: 291509 - DNA, 4596 bp, Artificial Sequence
  derived and/or modified sequence
atataggaatggtgcttctcctgagacagaggttttgtttagttttttcatctgatactggatatgtcaagatgaatctatgaacttcaagcaaaacttattgaagctttggtatatgtgagtaatttgttttagagaactggagcctatagcgatataaaaaaatagcaaatgcaaacattttatatgaatctactagcatggaaattctcccatgcttaccgtccaagtgaagacttcctctgccatagaacttccagattccttggcattcctgtggatcatcccaatgtggtactgtgaaggcaaggagcttgaaaattccccagatattcacatcgtccaggcaggaaatctgcactcactgaccattgcggaagcctttgaagaggacacaggacgctattcctgctttgcttctaacatctatgggacagattcgacttctgctgagatttatatagaaggggtttcttcttctgactcagaaggcgaccctaacaaggaagagatgaatcgaatccagaagccaaatgaggtgtcatctcctcccactacctctgcagtcattcctccagcagtaccccaagcccagcatttggtggcccaacctcgtgtggcaaccatccagcagtgtcagagccccaccaattacttgcagggattggatggaaaacctatcattgcagctcctgtgtttacaaagatgctacaaaatttgtcagcttctgagggtcagctggttgtctttgaatgcagagtaaaaggagctccatctcctaaggttgagtggtatagagaagggactttaatagaagattctccagattttaggattttacagaaaaaacctcgatccatggcagagccagaggagatttgcaccttggtcattgctgaggtgtttgcagaagattctgggtgcttcacatgtactgcaagcaacaaatacggcacagtgtcaagcattgcacagctgcacgtgagaggaaatgaggacctcagcaacaacgggtctcttcactcagccaactctaccaccaacctggcagctattgagccacagccctccccaccccactcagagcctccatctgtggaacaaccccccaaacccaaactcgagggggttctggtgaaccacaatgagccccggtccagctccaggattgggcttcgtgtgcacttcaacctgcctgaagatgacaaaggaagtgaagcatcctccgaggctggtgtggtgaccaccagacagaccaggcccgattctttccaggagaggttcaacggacaggcaacaaaaaccccagagccttcttcccccgtgaaagagccccctccagttctggccaaacccaaacttgattccactcagttacaacagcttcataaccaagtcttactggaacaacaccaattgcaaaacccacctccttcatctcctaaggagtttcctttcagcatgactgttttgaactccaatgctcccccagcggtgacaacatccagtaagcaggtgaaggctccttcatcacagacgttcagcttggcccggccgaagtatttcttcccctccacgaacaccaccgcagcaactgtggccccttccagctctccggtgttcactttgagcagcactcctcaaactattcagaggacagtgagcaaagaaagcctcttagtgtctcacccctctgtgcaaaccaaatctccaggagggctttccatccaaaatgagccactcccaccaggcccaacagaaccaacaccaccaccattcacattttccatccccagcggaaaccagtttcagccccgctgtgtgtccccaattcctgtctctcctaccagccggattcagaacccagtggctttcctcagctctgttctgccttctctccctgccatcccacccacaaatgccatggggctgcctagaagtgcaccatccatgccatcccagggattagcgaagaaaaatacaaagtctcctcaaccagtgaatgatgataacattcgtgaaactaagaacgcagtgattcgagacttggggaaaaaaataactttcagtgatgtcagaccaaaccagcaggagtacaaaatttcaagctttgagcagaggctgatgaatgaaatagagtttcgcttggaacgtactcctgttgatgaatcagatgatgaaattcaacatgatgagatccccacgggcaagtgtattgctcccatctttgacaagagactcaagcacttccgggtcacagaaggctctccagttacattcacctgcaaaattgttgggatacctgttccaaaggtttactggttcaaagatgggaagcagatttctaagagaaatgagcactgcaaaatgaggcgagaaggagatgggacatgctctctgcacattgaatccactaccagtgatgacgatggcaactacaccatcatggcagccaacccccaggggagaatcagctgttctggccacttgatggtacaaagtttgcccattcgcagtcggctaacctctgctggtcagtctcacaggggaagatcccgagtgcaagaaagagacaaagagcccctacaggaacgctttttccgaccacatttcctgcaggctcctggggatatggtagctcatgaggggcgcctctgtcggctggactgtaaggtgagtggtttaccgcccccggagctgacatggctactcaatggccaacctgtgctaccagatgcctcccacaagatgctggtcagggagaccggagtccactctctgctcattgacccactcactcagcgcgacgcagggacctataagtgcatcgctaccaacaaaaccgggcagaattcttttagtctggagctctctgtagtagccaaagaggtgaagaaagcacctgtgatcctggagaaactacagaactgcggtgttcccgaaggccaccccgtgagactggagtgccgcgtgataggcatgcccccacctgtgttctactggaagaaagacaatgagaccatcccttgcaccagagagaggatcagtatgcaccaggacacaacagggtatgcctgccttctcattcagccagccaagaaatcagacgctggatggtacacgttgtcagccaagaatgaagccggcatcgtgtcgtgcactgccaggctggatatatacgctcagtggcaccatcagatcccaccgcccatgtctgtccggcccagtggcagtcgctacggatctctcaccagtaaaggacttgacatattttctgccttttcctccatggaaagcacgatggtgtattcatgctcttctcggagtgtagtggagagtgatgaactttaagaatgtctaggtacctgctgtgtaagagagcggactgtggagggggaatgagaacaagccagacttggtggtttccaagcaaccgaagttgagtaagttcccacactgctggacctgtggcaaagagtgctttgaataagtcagctagggattcttgcagtctcagctgagggagaaaggtagggctgtgccttctaaagattccaacagagatgtgagaagataatacagatgaaccaaagatgtcacacagttgccatccactgctttgggaaaaaactagcatgctcccctgctccctgttgtgttagggatgtttaggtcatactaggagcaattaggagccatatgcctgggctgagaagagctaggcagtagtgaccttaggatatgactaactcaccaaacaatgccaaggagaaaggcggacaggtcaccatcacctttcatcgattacatgtatagcagtagttttggtgaattcaccaaatcagcttccacttagcattaggaggtcatgccatacaactcacgtatgcgggcaaacacttttgatttgcatatcctgggtgtactgagccacataataaggtgtcaaaatgtgcttgagattccaaaaacttgctgaaacacttgatattgcacagtgcacttattttgtggccaaagcatggccttaccagcttgtctgcactattttcttttgggtggtgactgtttttttctgactttgcatatccctagacactagaactaaaggattggtaataaaccaatcagaaagaaatcctctgtggggtcactttaaaaactactagcttcaactaccacttacaaaatgtgcaagagtcatcatttgcccataaaatacacctcatgggctcctacccctttccccaaaagtctgaaagtgtaggaggaaggaagagatacaaacaaggagaggaaatgatgggagagtgttgtttttgtcacttgccccagcagagcaggggttttggaaggagaggtctttaatagctttgaaatgctttgagatcattggtcaaattgcattttctatgtagagaatattctgctaggtggaaaagttgggagaaaggggaatatgcatctttattctaatcaccaattcaaaccctgcctcttaaggaatttttagacttaagttcactgtgatatccctagtacctagaagagtacctagcacaaagtagacattcaataaatatttgctggttgaa

SEQ ID NO: 291510 - DNA, 3138 bp, Artificial Sequence
  derived and/or modified sequence
atgctgaccgtgcaggtgaagaccagcagcgccatcgagctgcccgacagcctggccttcctgtggatcatccccatgtggtactgcgagggcaaggagctggagaacagccccgacatccacatcgtgcaggccggcaacctgcacagcctgaccatcgccgaggccttcgaggaggacaccggcagatacagctgcttcgccagcaacatctacggcaccgacagcaccagcgccgagatctacatcgagggcgtgagcagcagcgacagcgagggcgaccccaacaaggaggagatgaacagaatccagaagcccaacgaggtgagcagcccccccaccaccagcgccgtgatcccccccgccgtgccccaggcccagcacctggtggcccagcccagagtggccaccatccagcagtgccagagccccaccaactacctgcagggcctggacggcaagcccatcatcgccgcccccgtgttcaccaagatgctgcagaacctgagcgccagcgagggccagctggtggtgttcgagtgcagagtgaagggcgcccccagccccaaggtggagtggtacagagagggcaccctgatcgaggacagccccgacttcagaatcctgcagaagagacccgtgtgcatggagcacatcgaggagatctgcaccctggtgatcgccgaggtgttcgccgaggacagcggctgcttcacctgcaccgccagcaacaagtacggcaccgtgagcagcatcgcccagctgcacgtgagaggcaacgaggacctgagcaacaacggcagcctgcacagcgccaacagcaccaccaacctggccgccatcgagccccagcccagccccccccacagcgagccccccagcgtggagcagccccccaagcccaagctggagggcgtgctggtgaaccacaacgagcccagaagcagcagcagaatcggcctgagagtgcacttcaacctgcccgaggacgacaagggcagcgaggccagcagcgaggccggcgtggtgaccaccagacagaccagacccgacagcttccaggagagattcaacggccaggccaccaagacccccgagcccagcagccccgtgaaggagcccccccccgtgctggccaagcccaagctggacagcacccagctgcagcagctgcacaaccaggtgctgctggagcagcaccagctgcagaaccccccccccagcagccccaaggagttccccttcagcatgaccgtgctgaacagcaacgccccccccgccgtgaccaccagcagcaagcaggtgaaggcccccagcagccagaccttcagcctggccagacccaagtacttcttccccagcaccaacaccaccgccgccaccgtggcccccagcagcagccccgtgttcaccctgagcagcaccccccagaccatccagagaaccgtgagcaaggagagcctgctggtgagccaccccagcgtgcagaccaagagccccggcggcctgagcatccagaacgagcccctgccccccggccccaccgagcccacccccccccccttcaccttcagcatccccagcggcaaccagttccagcccagatgcgtgagccccatccccgtgagccccaccagcagaatccagaaccccgtggccttcctgagcagcgtgctgcccagcctgcccgccatcccccccaccaacgccatgggcctgcccagaagcgcccccagcatgcccagccagggcctggccaagaagaacaccaagagcccccagcccgtgaacgacgacaacatcagagagaccaagaacgccgtgatcagagacctgggcaagaagatcaccttcagcgacgtgagacccaaccagcaggagtacaagatcagcagcttcgagcagagactgatgaacgagatcgagttcagactggagagaacccccgtggacgagagcgacgacgagatccagcacgacgagatccccaccggcaagtgcatcgcccccatcttcgacaagagactgaagcacttcagagtgaccgagggcagccccgtgaccttcacctgcaagatcgtgggcatccccgtgcccaaggtgtactggttcaaggacggcaagcagatcagcaagagaaacgagcactgcaagatgagaagagagggcgacggcacctgcagcctgcacatcgagagcaccaccagcgacgacgacggcaactacaccatcatggccgccaacccccagggcagaatcagctgcagcggccacctgatggtgcagagcctgcccatcagaagcagactgaccagcgccggccagagccacagaggcagaagcagagtgcaggagagagacaaggagcccctgcaggagagattcttcagaccccacttcctgcaggcccccggcgacatggtggcccacgagggcagactgtgcagactggactgcaaggtgagcggcctgcccccccccgagctgacctggctgctgaacggccagcccgtgctgcccgacgccagccacaagatgctggtgagagagaccggcgtgcacagcctgctgatcgaccccctgacccagagagacgccggcacctacaagtgcatcgccaccaacaagaccggccagaacagcttcagcctggagctgagcgtggtggccaaggaggtgaagaaggcccccgtgatcctggagaagctgcagaactgcggcgtgcccgagggccaccccgtgagactggagtgcagagtgatcggcatgcccccccccgtgttctactggaagaaggacaacgagaccatcccctgcaccagagagagaatcagcatgcaccaggacaccaccggctacgcctgcctgctgatccagcccgccaagaagagcgacgccggctggtacaccctgagcgccaagaacgaggccggcatcgtgagctgcaccgccagactggacatctacgcccagtggcaccaccagatccccccccccatgagcgtgagacccagcggcagcagatacggcagcctgaccagcaagggcctggacatcttcagcgccttcagcagcatggagagcaccatggtgtacagctgcagcagcagaagcgtggtggagagcgacgagctgtag

SEQ ID NO: 291511 - DNA, 3138 bp, Artificial Sequence
  derived and/or modified sequence
atgctcacggtgcaggtgaaaacgagtagtgcaatcgagttacctgactctttggctttcttatggatcataccaatgtggtactgcgagggaaaggagctggaaaacagccctgacatccacattgtgcaggccggcaacctccacagtttgaccatcgccgaagcctttgaagaagatacaggccgctatagctgtttcgccagtaacatatacggcacagactctacttccgctgaaatctacattgaaggcgtgagctcaagtgactccgagggtgacccaaataaggaagagatgaatagaattcagaaaccaaatgaagtgtcctcaccccccacgacttctgccgtgatccctcccgctgtaccacaggcccaacacctggtggcccagcctagagtggccaccatccagcaatgccagtcccccacaaactatctgcaagggctggacgggaagccaattatcgctgctcccgtgtttaccaaaatgctccagaatctgtccgcctcagagggacagttagtggttttcgaatgtcgtgtcaaaggcgccccaagcccaaaagttgagtggtacagagaaggcaccctgatcgaagacagcccagattttcggatcttgcagaagaaaccgcgatctatggcagagcctgaagaaatttgtactctcgtgatcgccgaagtgttcgccgaggactcaggttgttttacttgtactgcttctaataagtacggtacggtcagctcaattgcacagctgcatgtgagggggaacgaggatcttagcaataacggtagcttgcacagtgccaactcgactaccaacttggcagccattgaaccacagccttctcccccacacagcgagccaccatccgttgaacaaccacccaagcccaaattagaaggggtgttagtgaatcacaatgagccccgctcaagcagtcgcatcggtctgagggtgcacttcaatcttccagaagatgataaaggctccgaagcctcatcagaagcaggtgtcgtgacaacacgccagaccagacctgacagcttccaggaacgatttaacggacaggcgactaaaactccagagccctcaagtcccgtcaaggaacccccccctgtcctagccaaacccaaactcgacagtacccagctccagcagctccacaaccaagttctgctggaacagcaccagctgcagaacccccctccctcctcacctaaggagttccccttcagtatgacagtactcaactcgaacgctccacctgccgtgaccacaagctccaagcaggtgaaggcgccatcttcgcagacgttcagcctagccaggcccaaatatttcttcccatcaacaaacacgactgcagccaccgtcgcccctagctcttcaccagtatttactctgtcttctacccctcagactatccaacggaccgtgtcaaaagaatctctgctggtttcccatccttcagtgcagactaaatcgccaggaggactgagtatacagaatgaacccctgccacctggccctactgaacctactccacctcccttcacattctctattccctctggcaatcagttccagccacgctgcgtcagcccgatcccagtttcacctacctccaggatccagaaccccgtggcgttcctgtcaagcgtactcccttctctgcccgccataccaccaaccaatgccatgggactgccccggtccgctcccagcatgccctcacagggcctggccaaaaagaataccaaatctcctcagccagtgaacgacgataacatcagggagaccaagaacgctgtgataagagatctgggcaaaaagataaccttttccgatgtgcgtcccaaccaacaggagtataagatcagttcttttgagcagcggctcatgaacgagatagagttcaggctggagcgtacgccagtagatgaatctgatgacgaaattcaacacgacgaaatcccaactggcaaatgtattgctcctattttcgacaaacggctcaagcactttcgcgtgacagaagggtcacccgtcacttttacctgtaaaatcgtgggaatccctgttccgaaggtgtactggttcaaagacggcaagcagatctctaaacggaacgaacactgcaaaatgcgacgcgaaggtgatggtacctgttccctacatatcgaaagtaccactagtgatgatgatggcaactacaccatcatggccgctaatccccaggggcggatcagctgcagtgggcacctaatggtgcaatctttgccgattaggagccgcctgacctctgccggccagtcacaccgcggtcgcagtcgcgtccaggaaagagacaaggaaccccttcaggagcggtttttccgaccacacttcttgcaagcgccaggcgacatggtcgctcacgagggtcgactttgcagactcgattgcaaggtttcaggattgcctccgccggagctgacttggttacttaacggacagcctgtactccctgatgcatcacataaaatgctcgtgcgtgagacaggcgtgcatagcctgcttatagacccactgacgcagcgtgacgctgggacgtataagtgtatcgccactaataaaacgggacagaacagcttctcattggagctgtcagttgtcgcaaaggaggtgaagaaagcaccagtcattctggagaagcttcaaaactgcggcgtacctgagggccaccctgtccggcttgaatgtagggtcatcggaatgcctccaccagtattttattggaagaaggacaacgaaacgattccctgcactcgcgagagaatatcaatgcatcaggatactaccgggtacgcatgcctgctgatacagccggccaaaaagtcagatgccggatggtacaccctgagcgctaagaacgaggccggaattgtttcgtgcaccgcccgtctggatatttatgcccagtggcaccatcagatcccccctcctatgtcagtgcggccatcaggctcccggtacggatctctcacttccaaaggtcttgacatattttcagcattctcctcgatggaatccactatggtttactcatgttcatctcgtagcgtagtcgaatctgatgaactgtag

SEQ ID NO: 291512 - DNA, 3138 bp, Artificial Sequence
  derived and/or modified sequence
atgctcactgtgcaagtaaagacttcgtccgcaattgagctacctgattctttagccttcctgtggattattccaatgtggtactgcgaggggaaagagctggagaatagcccagacattcacattgtgcaggcagggaatctgcacagtctcactatcgcagaggcgtttgaagaggacaccggcaggtacagctgctttgcctccaacatatatggaaccgattcaacgagcgctgagatctatatcgagggagtttctagtagcgatagtgagggtgaccccaacaaagaggagatgaaccggatccaaaagccaaatgaggtgagctcgcctcccaccacctccgcggtgatcccaccagctgtgcctcaagcgcagcatctggtggctcagcctagagtggcaactattcagcagtgtcagtcccccaccaactaccttcaaggcctcgacggtaagccaatcattgctgccccagtcttcacaaagatgctgcagaatttatctgcttctgagggtcaacttgttgtgttcgaatgcagagtcaaaggggcgccttcccccaaggttgaatggtatcgtgagggtaccctcatcgaagactcaccggacttccgcattctccagaaacgaccggtttgcatggaacatattgaagagatttgcacactggtgatagctgaagtgtttgcggaggatagcggctgctttacatgtacggcttctaacaaatacgggactgtgtccagcattgcacagctgcatgtacggggcaacgaagatctgtcgaacaatggcagcctccattctgcaaactccaccactaacctagccgctatcgagcctcagccgagccctccacattccgagccaccttccgtggaacaacccccgaagccgaagctcgaaggggtgctggtcaaccataacgagcctcgatctagcagtcgtattgggctgcgcgtgcacttcaacctaccagaagacgataagggctcggaggcgtcctctgaagcaggagttgtgacgacaaggcagacgaggccggattccttccaggaaaggttcaacgggcaggctacaaagaccccagagccaagctctcccgtaaaggagcctccccccgtgctggccaagcccaaattggacagcacccaactgcagcagctgcacaaccaggttctgctggagcaacatcagttgcagaatccccctccaagctcccccaaggaatttccatttagcatgacagtgctcaacagcaatgcccccccagctgtaacgacctcctcaaagcaggtgaaggcaccgtcatcccagactttttccttggccagacccaaatatttcttcccgtccacaaacaccacagccgctacggtcgccccaagcagtagtcccgtgtttaccctctcctcaactcctcagactatccagcggacagtctcgaaggaaagccttcttgtatcacatccttctgtacagactaagtcacccgggggactgagtattcagaacgaacctctgcctccgggtcccactgaacccacccctccaccattcaccttttcaatcccttctggaaaccagttccagcctaggtgtgtgagcccaattcccgtctcgccaacctccaggattcagaatccggtcgccttcttaagctccgtcctccctagtttgcccgcaatacctccaactaatgccatgggcctgccccgttctgccccatctatgccttcacagggtttggctaagaaaaacactaaaagtccgcagcccgttaatgacgacaacatccgcgaaaccaagaatgctgtcattcgcgacttggggaagaagatcacattcagtgatgtaagaccgaatcagcaggaatacaaaatttccagttttgagcaacgcctcatgaacgagatcgaatttcgcctcgagcgtactcccgtagacgagagcgatgatgagatccagcacgacgagatccccaccgggaagtgtattgctcctatttttgataaacggctgaagcatttcagggtgaccgagggttccccagtcacatttacctgtaaaatcgtggggatcccggtgcctaaggtttactggttcaaggatggcaaacaaatcagtaagaggaatgagcattgtaagatgaggcgagagggtgacggaacgtgttcactgcatatagagagcaccaccagcgatgatgatggcaactatactatcatggcagcgaatcctcagggtaggatctcctgcagcggccaccttatggttcagtctctccccattcgctcaaggctgaccagcgccggccagtcgcaccggggcaggtcacgcgtccaggaacgtgataaagaacctctgcaggaaaggtttttccgaccacacttcttgcaggcccccggagatatggtcgcccatgagggtagactatgccgactcgactgcaaggtgagcggtctacctcctcccgaacttacctggctgctcaatggacagcctgtgctccctgatgcttcccataagatgctggtcagggagaccggcgtccactcactattgattgaccccctgacccagagggacgcggggacatataagtgcatagcaaccaataaaacagggcagaacagtttcagcttagagttgtcggtggtggctaaagaggtgaagaaagcaccggtcatcctggagaagctccagaactgcggcgttcccgagggtcatccggtgcgcttagaatgcagagtaattggaatgccccccccggtattctactggaaaaaggacaacgagaccattccatgcactcgggaacgaattagcatgcatcaggataccaccggttacgcatgtctccttatccagccagccaaaaagagtgatgctggctggtacacattgtccgccaagaatgaggccggtatagtttcctgcaccgcaaggctagatatctatgcccagtggcatcaccagatccctccccccatgagtgttcggccctccggcagccgctatgggagccttaccagtaagggccttgacatctttagtgctttttctagcatggagtccaccatggtctacagctgcagctctcggagtgttgtcgaaagcgacgagctttag

SEQ ID NO: 291513 - DNA, 3138 bp, Artificial Sequence
  derived and/or modified sequence
atgctgactgtgcaggtgaagaccagcagcgccatcgagctgcctgacagcctggccttcctgtggatcatccccatgtggtactgtgagggcaaggagctggagaacagcccagacatccacatcgtgcaggccggcaacctgcacagcctgaccatcgccgaggcctttgaggaggacaccggccgctacagctgctttgccagcaacatctacggcacagacagcaccagcgctgagatctacattgaaggagtgagcagcagtgacagcgagggggaccccaacaaggaggagatgaaccgcatccagaagcccaatgaggtgagcagcccccccaccaccagcgctgtgatccccccagctgtgccccaggcccagcacctggtggcccagccccgggtggccaccatccagcagtgccagagccccaccaactacctgcagggcctggatggcaagcccatcatcgccgcccctgtgttcaccaagatgctgcagaacctgagcgccagcgagggccagctggtggtgtttgagtgccgggtgaagggggcccccagccccaaggtggagtggtaccgggagggcaccctgattgaggacagcccagacttccgcatcctgcagaagaagcccaggtccatggccgagcctgaggagatctgcaccctggtgattgctgaggtgtttgctgaagattctggctgcttcacctgcacagccagcaacaagtatggcaccgtgagcagcatcgcccagctgcacgtgagaggaaatgaagacctgagcaacaacggcagcctgcacagcgccaacagcaccaccaacctggccgccatcgagccccagcccagccccccccacagcgagccccccagcgtggagcagccccccaagcccaagctggagggcgtgctggtgaaccacaatgagcccaggagcagcagcagaattggcctgcgggtgcacttcaacctgcctgaagatgacaagggcagcgaggccagcagcgaggccggcgtggtgaccacccggcagaccaggccagacagcttccaggagcgcttcaacggccaggccaccaagaccccagagcccagcagccctgtgaaggagcccccacctgtgctggccaagcccaagctggacagcacccagctgcagcagctgcacaaccaggtgctgctggagcagcaccagctgcagaaccccccacccagcagccccaaggagttccccttctccatgacagtgctgaacagcaatgcccctcctgctgtgaccaccagcagcaagcaggtgaaggcccccagcagccagaccttcagcctggcccggcccaagtacttcttccccagcaccaacaccacagctgccaccgtggcccccagcagcagccctgtgttcaccctgagcagcaccccccagaccatccagaggacagtgtccaaggagagcctgctggtgagccaccccagcgtgcagaccaagagccctgggggcctgagcatccagaatgagcccctgcccccaggccccacagagcccaccccaccacccttcaccttcagcatccccagcggcaaccagttccagccccgctgtgtgagccccatccctgtgagccccaccagccgcatccagaaccctgtggccttcctgagctctgtgctgcccagcctgcctgccatcccccccaccaatgccatgggcctgcccaggtctgcccccagcatgcccagccagggcctggccaagaagaacaccaagagcccccagcctgtgaatgatgacaacatccgggagaccaagaatgctgtgatccgggacctgggcaagaagatcaccttcagtgatgtgcggcccaaccagcaggagtacaagatcagcagctttgagcagaggctgatgaatgaaattgagttccggctggagaggacccctgtggatgaaagtgatgatgagatccagcatgatgagatccccaccgggaagtgcatcgcccccatctttgacaagaggctgaagcacttccgggtgacagagggcagccctgtgaccttcacctgcaagatcgtgggcatccctgtgcccaaggtgtactggttcaaggatggcaagcagatcagcaagagaaatgagcactgcaagatgaggcgggagggagatggcacctgcagcctgcacatcgagagcaccaccagtgatgatgatggcaactacaccatcatggccgccaacccccagggccgcatcagctgcagcggccacctgatggtgcagagcctgcccatccgcagccggctgaccagcgctggccagagccaccggggccgcagccgggtgcaggagcgggacaaggagcccctgcaggagcgcttcttccggccccacttcctgcaggcccctggggacatggtggcccacgagggccgcctgtgccgcctggactgcaaggtgtctggcctgcccccacctgagctgacctggctgctgaatggccagcctgtgctgcctgatgccagccacaagatgctggtgcgggagactggagtgcacagcctgctgattgaccccctgacccagagagatgctggcacctacaagtgcatcgccaccaacaagacaggccagaacagcttcagcctggagctgtctgtggtggccaaggaggtgaagaaggcccctgtgatcctggagaagctgcagaactgtggggtgcctgagggccaccctgtgcggctggagtgccgggtgattggcatgcctcctcctgtgttctactggaagaaggacaatgagaccatcccctgcacccgggagcgcatctccatgcaccaggacaccaccggctacgcctgcctgctgatccagcctgccaagaagagtgatgctggctggtacaccctgagcgccaagaatgaagctggcatcgtgtcctgcacagcccggctggacatctatgcccagtggcaccaccagatccccccacccatgtctgtgcggcccagcggcagccgctatggcagcctgaccagcaagggcctggacatcttcagcgccttcagctccatggagagcaccatggtgtacagctgcagcagccgctctgtggtggagagtgatgagctgtag

SEQ ID NO: 291514 - DNA, 3138 bp, Artificial Sequence
  derived and/or modified sequence
atgctgactgtgcaggtgaagaccagcagcgccatcgagctgcctgacagcctggccttcctgtggatcatccccatgtggtactgtgagggcaaggagctggagaacagcccagacatccacatcgtgcaggccggcaacctgcacagcctgaccatcgccgaggcctttgaggaggacaccggccgctacagctgctttgccagcaacatctacggcacagacagcaccagcgctgagatctacattgaaggagtgagcagcagtgacagcgagggggaccccaacaaggaggagatgaaccgcatccagaagcccaatgaggtgagcagcccccccaccaccagcgctgtgatccccccagctgtgccccaggcccagcacctggtggcccagccccgggtggccaccatccagcagtgccagagccccaccaactacctgcagggcctggatggcaagcccatcatcgccgcccctgtgttcaccaagatgctgcagaacctgagcgccagcgagggccagctggtggtgtttgagtgccgggtgaagggggcccccagccccaaggtggagtggtaccgggagggcaccctgattgaggacagcccagacttccgcatcctgcagaagaggcctgtgtgcatggagcacatcgaggagatctgcaccctggtgattgctgaggtgtttgctgaagattctggctgcttcacctgcacagccagcaacaagtatggcaccgtgagcagcatcgcccagctgcacgtgagaggaaatgaagacctgagcaacaacggcagcctgcacagcgccaacagcaccaccaacctggccgccatcgagccccagcccagccccccccacagcgagccccccagcgtggagcagccccccaagcccaagctggagggcgtgctggtgaaccacaatgagcccaggagcagcagcagaattggcctgcgggtgcacttcaacctgcctgaagatgacaagggcagcgaggccagcagcgaggccggcgtggtgaccacccggcagaccaggccagacagcttccaggagcgcttcaacggccaggccaccaagaccccagagcccagcagccctgtgaaggagcccccacctgtgctggccaagcccaagctggacagcacccagctgcagcagctgcacaaccaggtgctgctggagcagcaccagctgcagaaccccccacccagcagccccaaggagttccccttctccatgacagtgctgaacagcaatgcccctcctgctgtgaccaccagcagcaagcaggtgaaggcccccagcagccagaccttcagcctggcccggcccaagtacttcttccccagcaccaacaccacagctgccaccgtggcccccagcagcagccctgtgttcaccctgagcagcaccccccagaccatccagaggacagtgtccaaggagagcctgctggtgagccaccccagcgtgcagaccaagagccctgggggcctgagcatccagaatgagcccctgcccccaggccccacagagcccaccccaccacccttcaccttcagcatccccagcggcaaccagttccagccccgctgtgtgagccccatccctgtgagccccaccagccgcatccagaaccctgtggccttcctgagctctgtgctgcccagcctgcctgccatcccccccaccaatgccatgggcctgcccaggtctgcccccagcatgcccagccagggcctggccaagaagaacaccaagagcccccagcctgtgaatgatgacaacatccgggagaccaagaatgctgtgatccgggacctgggcaagaagatcaccttcagtgatgtgcggcccaaccagcaggagtacaagatcagcagctttgagcagaggctgatgaatgaaattgagttccggctggagaggacccctgtggatgaaagtgatgatgagatccagcatgatgagatccccaccgggaagtgcatcgcccccatctttgacaagaggctgaagcacttccgggtgacagagggcagccctgtgaccttcacctgcaagatcgtgggcatccctgtgcccaaggtgtactggttcaaggatggcaagcagatcagcaagagaaatgagcactgcaagatgaggcgggagggagatggcacctgcagcctgcacatcgagagcaccaccagtgatgatgatggcaactacaccatcatggccgccaacccccagggccgcatcagctgcagcggccacctgatggtgcagagcctgcccatccgcagccggctgaccagcgctggccagagccaccggggccgcagccgggtgcaggagcgggacaaggagcccctgcaggagcgcttcttccggccccacttcctgcaggcccctggggacatggtggcccacgagggccgcctgtgccgcctggactgcaaggtgtctggcctgcccccacctgagctgacctggctgctgaatggccagcctgtgctgcctgatgccagccacaagatgctggtgcgggagactggagtgcacagcctgctgattgaccccctgacccagagagatgctggcacctacaagtgcatcgccaccaacaagacaggccagaacagcttcagcctggagctgtctgtggtggccaaggaggtgaagaaggcccctgtgatcctggagaagctgcagaactgtggggtgcctgagggccaccctgtgcggctggagtgccgggtgattggcatgcctcctcctgtgttctactggaagaaggacaatgagaccatcccctgcacccgggagcgcatctccatgcaccaggacaccaccggctacgcctgcctgctgatccagcctgccaagaagagtgatgctggctggtacaccctgagcgccaagaatgaagctggcatcgtgtcctgcacagcccggctggacatctatgcccagtggcaccaccagatccccccacccatgtctgtgcggcccagcggcagccgctatggcagcctgaccagcaagggcctggacatcttcagcgccttcagctccatggagagcaccatggtgtacagctgcagcagccgctctgtggtggagagtgatgagctgtag

SEQ ID NO: 291515 - DNA, 3138 bp, Artificial Sequence
  derived and/or modified sequence
atgctgaccgtgcaggtgaagaccagcagcgccatcgagctgcccgactcactggcgttcttatggataatcccaatgtggtactgcgaggggaaggaacttgagaattctccagatattcatattgtccaggccggcaatctgcacagtctcactatcgcggaagcgtttgaggaagatactgggagatatagttgcttcgcttccaacatttacgggaccgatagtaccagcgcagagatctacatcgagggcgtctcaagttccgacagtgagggcgaccccaataaagaggaaatgaatcgaatacaaaagcccaacgaagtgtcaagcccacccaccacctcagctgtcattcctcctgcggtgccccaggcgcagcacctagttgctcagcctcgcgttgctacaatccagcagtgtcagtcccccacaaactatttacaaggtctcgacggaaagccaattatagccgctccagtttttactaagatgttacaaaacctttctgcctctgaagggcagctggtggtgttcgagtgccgagttaagggcgcacccagccctaaagtcgaatggtatagagagggcactctgatcgaggactcccccgattttcggatcctgcagaaaaaaccaaggagcatggccgaaccagaggaaatttgcactctggtgattgccgaggtgttcgcagaagatagtggctgcttcacctgtaccgcttccaacaagtatgggaccgttagctccatcgcccagctgcatgtgcgaggcaacgaggatctgtctaacaacggctccctccattcagcgaattccaccacaaatctggccgccattgagccgcagccaagcccaccgcactccgaacccccatccgtggagcaacctcccaaacccaaacttgagggagttctggtcaaccacaacgagccccgctcctcctcccgaatcggcctgcgcgtccacttcaatctccctgaggacgacaaaggatcggaggcctcatccgaggccggggtggtgacaacccgccagactaggccagatagcttccaggagcggtttaacgggcaggctactaagactcccgaacctagctcccccgtaaaagagccgccgcctgtactggctaaaccaaagctagattctacgcagctgcagcagctgcacaatcaggtgctgttagagcagcaccagttacaaaaccccccaccttcaagtcctaaggagtttcccttctcgatgacggtgttgaactctaatgcgcccccagctgtaacaacctcttcaaagcaggtgaaagcgccttcttctcagacattcagcttggcccggcccaaatatttttttccctcaacaaatacaaccgctgcaaccgtcgcgccatccagctccccggtcttcaccctgagctcaactcctcagactatccagaggaccgtgtccaaggagtcactgctggttagccaccctagtgtccagactaaatctcccggcggcctgagcattcaaaatgaacccctcccaccgggccctactgagcccactccgcctccttttactttcagtatcccatctggtaaccagttccagccccggtgtgtcagccccatccctgtctcacccacctcacgaatccagaacccggtggcatttctctctagcgtgctcccttcactgcctgcaatcccccccaccaatgcgatgggactcccacggtctgccccttccatgccttcacagggcttagctaagaaaaacaccaagagtccacagcctgtgaatgatgacaacatacgggagacaaagaacgctgtaattcgcgatctgggaaagaagataactttctccgatgtccggcccaatcagcaagaatataagatctcgagttttgagcagcgcctgatgaacgaaatcgagtttcggcttgaacggactccagtagatgaaagcgacgatgagatccagcacgatgaaatacctactgggaagtgcattgctcccatctttgataaacgcctgaagcatttccgcgtcacggagggcagcccagtaaccttcacgtgcaagatcgttggcatcccagtgcctaaggtgtactggtttaaggacgggaagcagatctcaaagaggaacgagcactgtaaaatgcggagagagggcgacggcacatgttcactacatattgagtctactacttccgacgatgatggcaattacaccattatggctgccaacccgcagggacgcatttcctgctctggccatttaatggttcagtccttgcccattagatcacggcttacgagcgccggccagtcccatcgcggaaggagccgagtccaggaacgggacaaagagcccttgcaggagcgctttttccgccctcattttttgcaggccccgggtgacatggtggcccacgaagggcggttatgccgcctggactgtaaggtttccgggctgccacctcctgagcttacctggttgcttaacggacagccggtcttgccagatgcctcccataaaatgctcgtgcgtgaaactggagtccactccttactaatcgaccccctgacccagcgggacgctggcacctacaaatgcattgcgacaaacaaaacgggacagaatagcttttcactggagctctctgtggtcgcaaaggaggttaaaaaggccccagtgattctggaaaaactccaaaattgcggcgttccggaaggtcacccggtgcggttagaatgcagggttattggcatgccaccacctgtgttttattggaaaaaggacaatgagaccatcccctgtaccagggagaggatatctatgcaccaggacacaactggttacgcttgcctcctgattcagccagccaagaaaagcgatgccggttggtacacactctcagctaagaacgaggccggcattgtgtcttgcactgcgagacttgacatctacgctcagtggcaccaccagatcccgcctcccatgagtgtcaggccatctggctcgaggtacggcagtctcaccagcaagggcctggacatattttctgcttttagcagtatggagagtacaatggtatattcctgctcctcccggagtgtagtggaatctgatgagctttag

SEQ ID NO: 291516 - DNA, 3138 bp, Artificial Sequence
  derived and/or modified sequence
atgctgaccgtgcaggtgaagaccagcagcgccatcgagctgcccgatagcctggcctttctgtggattatccctatgtggtactgcgaaggcaaggaactagagaacagcccagacattcacattgtgcaggccgggaaccttcacagtctgactatcgccgaggctttcgaggaagataccggacgctacagctgctttgccagcaacatttatggtaccgactctaccagcgcggaaatctacattgaaggggtttctagcagtgattccgagggggacccgaataaggaggagatgaaccgaatccagaaacccaacgaggtgagcagccctcctacaacatcagctgtgattcctccggctgtgcctcaggcccagcatctagtggcacagccaagggtggcaacaatccagcagtgccagtccccaacgaactacctgcaagggctggacgggaagcctataatcgcagcaccggtatttactaagatgctgcagaatttgtctgcttcggagggccagttagtggtgtttgagtgtcgagttaaaggagctccgagcccgaaggtggagtggtacagggagggaaccctaatagaagatagtccagatttccgaattctgcagaaaaggccagtttgcatggagcacatcgaagagatctgtacactggttatcgccgaagtcttcgcagaagacagtgggtgcttcacatgtacagctagcaataaatatggtactgtttcttctattgctcagctgcacgtcaggggcaacgaagacctttccaataatggctctttacattcagccaactcaaccaccaacttggccgctatcgagccacagccctccccaccccattccgagccgccatcagtggagcagcccccgaagcccaaacttgagggggtccttgtgaaccataacgagcctagatcaagctcacggataggccttcgggtgcatttcaacctgcccgaggatgataaaggtagcgaagcttcctcagaggccggcgtggtcacaacgaggcagacacggccagattctttccaagaacggttcaacggacaggcaaccaaaactcccgagcctagttcccccgtgaaggagccccctccagtgctagctaagcccaagctcgactccacccagctgcagcagctgcataaccaggtgctcctggaacaacatcagctgcaaaatcctcctccttcatctcctaaagaattccctttttcaatgaccgttctcaactcgaacgctcctccagccgtgacaaccagctccaaacaggtcaaggctccctccagccagaccttctctctggccaggccaaagtatttttttccatccactaatacaactgcagcaaccgtagctcctagctcctcgcccgtgttcacactgagttccaccccacaaacaatacagcgaaccgtttcaaaagagagcctactggtgagccatccatccgtccagacgaaatccccaggaggcctttccatacagaacgagcccctcccaccagggcccaccgagcccaccccaccccctttcaccttctcaattccttctggaaaccagttccagccgagatgcgtcagcccaattcctgttagtcctacgtcccgcatccagaacccggtagcttttttgtcctcagtgctcccaagcctgcctgccatccctcctaccaatgccatgggattgcctcgctctgcaccatcgatgccttctcaagggctggcgaagaagaatacaaaaagtccccagcccgtgaatgacgacaatatccgcgaaacaaaaaatgcggttattcgtgacctggggaaaaaaattactttctctgatgtgcggcctaaccagcaggaatacaaaatctcttcatttgaacagcgcttgatgaacgagattgaattcagactggagcggaccccagtcgatgagagtgatgatgagatccaacatgatgagatccccaccggaaagtgcatcgcgcctatctttgataaaaggttgaaacactttagagtcactgagggttcccccgtgacatttacctgtaaaattgtgggaatccccgtcccaaaggtgtactggttcaaagatggcaagcagatcagtaaacgtaacgaacactgcaaaatgcgcagagaaggggatggaacctgcagtctccatatcgagtccacaacatccgacgacgacggtaattacaccattatggccgccaacccgcagggtaggatcagctgctctgggcacctgatggtccagtctctgccgattaggtcccgtctaacgagcgctggacagtcacacagaggtaggtcaagagtgcaggaacgtgacaaagagccattgcaggagcgcttttttagacctcacttcctccaggcccccggggatatggtagcccacgagggcagactctgccggctcgactgcaaggtatccggtttacctcctcctgagcttacatggctactgaatgggcaacctgtactccccgatgcctcccacaaaatgctcgttagggaaacaggggtgcattctcttcttattgatcctctgactcaaagagatgccggtacttataagtgcatcgcaaccaacaaaaccgggcagaattctttttccctggaactaagcgtggtcgctaaggaagtcaagaaagcacctgtgatcttagagaaactccaaaattgtggagtgcccgagggtcatcccgtccgactagagtgtagggtgattggtatgccacctcccgttttctattggaaaaaagataacgagacgatcccgtgcactagagagcggatctctatgcaccaggatacaaccggttatgcctgcctgctcattcagcctgccaaaaaaagtgacgcaggttggtacaccctgtccgctaaaaatgaagcagggattgtctcatgcactgccagactggatatttacgcacagtggcaccatcagattccccccccaatgagcgtgagaccatccgggagtcgatatggatcactgaccagtaaggggcttgatatattttctgctttctcctctatggagtctaccatggtgtattcatgttccagcaggtccgtggttgagtctgatgagctatag

SEQ ID NO: 291517 - DNA, 3138 bp, Artificial Sequence
  derived and/or modified sequence
atgctaacagttcaggttaaaaccagttctgccatcgagttgccagacagtctcgcctttctgtggatcattcccatgtggtattgtgaaggtaaggaactggagaattccccggatattcatatcgtccaggctgggaatctgcacagcttgaccatagccgaggccttcgaagaagatacaggaaggtactcctgcttcgcatcaaatatctacgggaccgactcaacctcagccgagatttacattgagggcgtgtcctcatccgatagcgagggtgaccccaataaggaagaaatgaatcgaatccagaagcccaacgaggtgtcctctcctcctaccactagtgccgtcattccgcctgctgtcccacaggcgcagcacctggtggcgcaaccaagagtggccaccatacagcagtgtcagtcacccaccaactatctccaaggtctggacggaaagccgataattgccgcacctgtgtttacaaagatgttgcaaaacctgagtgctagtgaggggcagctggtggtgtttgagtgtcgcgtcaaaggagcgccatccccaaaagtggagtggtatcgcgagggcacacttatcgaagatagccctgacttccgtatcttacagaagaaacctagaagtatggctgagcccgaagaaatttgtaccctggtgattgcggaagtctttgctgaggacagcgggtgctttacatgtacggcctccaacaaatatggaaccgtctcatctatcgcgcagctccacgtgcgcggaaatgaagacctctctaataatggttcactgcatagtgcaaactcaactactaatctcgctgccattgagccgcagcccagccctccacacagcgagcctccatccgtcgagcagcctcctaagcccaagttggaaggggttcttgtgaaccacaatgaaccccgttcatcatcccgcattggactcagagtccacttcaacctgcctgaggatgataaagggagcgaagcctcttctgaagcgggagtcgtgaccaccagacagacccgccctgattcgtttcaggaacggttcaacgggcaagccactaagacaccagagccaagcagtcccgtaaaagaacccccacctgttttagcaaagccaaaattggactccacgcagttacagcagctacacaatcaagtcctcctggagcaacatcagctacagaatcccccaccctcatcacctaaagaatttcccttctctatgacggtgctgaacagtaatgccccacccgctgtgaccaccagctctaagcaagtgaaggctcctagctcgcagacttttagcctggcaagacctaaatatttcttcccaagcaccaacacaaccgccgcaacagtggcgccttcatcatccccggtgttcacacttagttctacaccacagactatccaacgcacagtgtctaaagagtcgctgcttgtgagccatccttcagtccaaactaaatcccctggcggtctgtctatacagaatgagccattgcctcccggaccaactgaacccaccccccctccttttaccttcagtatacccagcggaaaccaatttcaacccaggtgcgtcagcccgattcccgtgtcaccaaccagcagaatccagaatcccgtggcctttctttcctctgtgctgccaagcttgccagccattcctccaactaacgccatgggtctgcctcggtcagcgccttcaatgccaagtcaggggcttgccaagaagaacaccaagtccccgcagccggtgaacgacgacaacatcagggaaactaaaaacgctgtgatacgcgacctgggcaagaaaattaccttttctgacgtccgtcctaatcagcaagaatataaaatcagctcctttgaacagaggttgatgaatgaaatcgagttccgcctagagagaactccagtggacgaaagcgatgacgagatacagcatgacgaaatccctacaggaaaatgcatcgctcctatatttgataagcggttgaaacattttcgagtgactgagggttcgccagtgactttcacgtgcaaaattgttgggatccctgtgcccaaagtgtactggtttaaggacgggaaacagataagcaagcggaatgaacattgcaaaatgcgaagggaaggagacgggacctgctctcttcacattgaaagcacaacttcagatgatgacggcaattacacgataatggcagccaatccacaggggagaatctcatgcagcgggcacctgatggtccagtccctaccaataaggtcacggctcacatccgccggtcagagtcaccggggacgatccagggtgcaggagcgcgataaggaaccactacaggagaggttctttagaccccatttcctgcaagccccaggagacatggtggctcacgaaggcagactctgccggcttgattgcaaggttagtgggctgcctccgccagaattgacctggctgctgaatggccagccagtcctgcctgatgcctcccacaagatgctggtaagagaaactggagtacatagcctcttgattgaccctttgactcagcgggatgccggaacgtacaagtgcatagctaccaataaaacgggacagaatagcttctctttggagctgtctgtggtagctaaagaagtcaagaaggctcctgtgatcctagaaaagttgcaaaactgtggcgtccctgagggccacccagtcaggcttgagtgccgggtaattgggatgcctcctcccgtgttttactggaagaaagacaacgaaactatcccctgtacaagggaacggatatccatgcaccaagacacaaccggctacgcatgccttctaatccagcccgctaagaaatcagacgcaggctggtatacactctccgccaagaatgaagccggtattgtgtcatgtactgctcggctggatatctacgcacaatggcaccaccagatcccaccacctatgtcagtacgcccttcaggctccaggtacggaagtctgacttcaaaagggttggacattttcagcgcattttcttccatggagagtactatggtgtatagctgctcttcacgttctgtggtagagagtgacgagctgtag

SEQ ID NO: 291518 - DNA, 3138 bp, Artificial Sequence
  derived and/or modified sequence
atgctgactgtgcaagtgaagacctcaagcgcaattgagctacctgacagcctggccttcctgtggattatcccaatgtggtactgcgaaggaaaggaattggaaaattctccagacattcacattgtacaggccggaaatcttcattccctgactattgcggaggcgtttgaggaggatacaggcagatatagttgcttcgccagcaacatatatggaacagactcgacttccgctgaaatctacattgagggcgtaagcagcagtgactctgaaggggaccccaataaagaggagatgaatagaatccagaagccgaatgaggtctcaagcccaccaacaacgtcagcggtgatacccccagcagtgcctcaggcgcaacatctggttgctcagcctcgggttgccaccatccagcagtgccagagcccaacaaattatttgcagggtctggatgggaaacctatcatcgctgcgcctgtctttacaaaaatgctgcagaacctgtctgcctctgagggacagcttgttgtcttcgaatgccgtgtgaagggggctccatcgcctaaagtggagtggtaccgcgaggggactttgatcgaagactcacctgacttccgcattctgcagaagcgaccagtgtgtatggagcacatagaagagatttgtacactggtgatcgcagaggttttcgccgaggactcgggctgtttcacctgcaccgcctctaataaatacggtactgtttctagcatcgcacagcttcacgttcgtggaaacgaggacctgtctaataatggcagcctgcatagcgctaatagtactaccaacctggcggcaattgagccgcaaccttcacctccacattcggaaccgccatcagttgaacagcctcctaaacccaagctggaaggcgtcctggtgaatcataatgagcccagatcctcaagtagaataggtctgcgggtacactttaacctgccggaggatgacaaaggctcagaagcctcttcggaggcgggagtggtgacgacacgtcaaaccaggcctgatagtttccaggaacggttcaatggtcaagcaactaagacccccgagccgtcaagccctgttaaggaacccccaccagtactggccaaacccaaactggactccacccagcttcagcagctccataatcaggtattactggaacagcatcagctgcagaatcctccgccttcaagcccaaaagaatttcccttctccatgactgttctgaacagcaatgcccctccagccgttaccacctctagcaaacaggtcaaagccccaagttctcagacattctctttggctaggcctaagtatttttttccatctactaacactaccgcagctacggtcgcaccctcttcatctcctgtgtttaccctgtctagcactccacagactattcagcggacggtaagcaaggagtctctgctggtttctcacccctcagtccagaccaagagtcctggtggcctatctatccagaacgagcctcttcctcctggcccaacggaaccgaccccaccccctttcactttctcaatccccagtggcaaccagttccagcccaggtgcgtcagtcccatccctgtgtctcctacaagtcggattcagaaccctgtagcttttctatcttccgtcctgccctccctacctgctattccacccactaacgccatggggcttcccagaagcgctccttcgatgccaagccagggactggccaagaaaaatacaaagtctccccagccagtcaatgatgataacatccgagaaactaaaaacgcggtcataagggacctcggaaagaagataaccttcagcgacgtcaggccaaatcagcaggagtacaaaatatccagtttcgagcagagattaatgaatgaaatcgagttcaggctggaacgcaccccggtcgatgagtccgacgacgaaattcagcacgacgagattcccacaggcaaatgcattgcacctatctttgataagcgtctgaagcatttccgggtcacagaggggtcacctgtgacctttacttgcaagatcgtgggcattcccgtgccgaaagtgtactggtttaaagacggaaagcagatcagcaaacgcaacgagcattgtaaaatgcgcagagaaggagacggcacctgctctttgcatatagaaagtactacttcagacgacgatggcaattataccattatggcagccaatccacaaggcagaatcagctgctccggccatctgatggttcagtccctgcctattcgctcaagactgacgagtgccggtcagtcacaccggggacggtctcgtgtgcaggagagagacaaggagccactccaagaacgcttcttcaggccccactttctgcaggcccctggcgacatggttgctcatgaaggccgactctgccgcctcgattgtaaggtgtcaggcctccctccaccggagttaacttggctcctgaacgggcagcccgtgctgccagatgcgtcacataaaatgctggtgagggaaacgggggtgcactccctgctcatcgaccccctcacgcaacgagacgcaggcacttacaaatgcattgcgaccaacaaaaccggccagaacagcttttctttagagttaagcgtcgtcgctaaggaggttaaaaaggcccctgtgatactcgaaaagctgcagaactgcggcgttcctgaaggtcatccagtacgtctagaatgtcgtgtgatcggtatgccccctccagttttctattggaaaaaagacaacgagactatcccatgcactcgtgagcgcattagtatgcaccaggatacaacagggtatgcctgcctgctaattcagcctgccaaaaagagcgatgcgggatggtatactttatctgctaaaaacgaggccggtatcgtcagttgcacggcccgactcgacatttacgcccagtggcatcatcagattcccccacctatgtctgtgagaccaagtggctcacgatatggctctctgacctccaaaggactggacatcttttcggccttcagcagcatggaatccaccatggtctattcatgttctagcagatccgtggtcgaatcagatgaactttag

SEQ ID NO: 291519 - DNA, 4384 bp, Artificial Sequence
  derived and/or modified sequence
atgcttaccgtccaagtgaagacttcctctgccatagaacttccagattccttggcattcctgtggatcatcccaatgtggtactgtgaaggcaaggagcttgaaaattccccagatattcacatcgtccaggcaggaaatctgcactcactgaccattgcggaagcctttgaagaggacacaggacgctattcctgctttgcttctaacatctatgggacagattcgacttctgctgagatttatatagaaggggtttcttcttctgactcagaaggcgaccctaacaaggaagagatgaatcgaatccagaagccaaatgaggtgtcatctcctcccactacctctgcagtcattcctccagcagtaccccaagcccagcatttggtggcccaacctcgtgtggcaaccatccagcagtgtcagagccccaccaattacttgcagggattggatggaaaacctatcattgcagctcctgtgtttacaaagatgctacaaaatttgtcagcttctgagggtcagctggttgtctttgaatgcagagtaaaaggagctccatctcctaaggttgagtggtatagagaagggactttaatagaagattctccagattttaggattttacagaaaaggcctgtctgcatggagcatatagaggagatttgcaccttggtcattgctgaggtgtttgcagaagattctgggtgcttcacatgtactgcaagcaacaaatacggcacagtgtcaagcattgcacagctgcacgtgagaggaaatgaggacctcagcaacaacgggtctcttcactcagccaactctaccaccaacctggcagctattgagccacagccctccccaccccactcagagcctccatctgtggaacaaccccccaaacccaaactcgagggggttctggtgaaccacaatgagccccggtccagctccaggattgggcttcgtgtgcacttcaacctgcctgaagatgacaaaggaagtgaagcatcctccgaggctggtgtggtgaccaccagacagaccaggcccgattctttccaggagaggttcaacggacaggcaacaaaaaccccagagccttcttcccccgtgaaagagccccctccagttctggccaaacccaaacttgattccactcagttacaacagcttcataaccaagtcttactggaacaacaccaattgcaaaacccacctccttcatctcctaaggagtttcctttcagcatgactgttttgaactccaatgctcccccagcggtgacaacatccagtaagcaggtgaaggctccttcatcacagacgttcagcttggcccggccgaagtatttcttcccctccacgaacaccaccgcagcaactgtggccccttccagctctccggtgttcactttgagcagcactcctcaaactattcagaggacagtgagcaaagaaagcctcttagtgtctcacccctctgtgcaaaccaaatctccaggagggctttccatccaaaatgagccactcccaccaggcccaacagaaccaacaccaccaccattcacattttccatccccagcggaaaccagtttcagccccgctgtgtgtccccaattcctgtctctcctaccagccggattcagaacccagtggctttcctcagctctgttctgccttctctccctgccatcccacccacaaatgccatggggctgcctagaagtgcaccatccatgccatcccagggattagcgaagaaaaatacaaagtctcctcaaccagtgaatgatgataacattcgtgaaactaagaacgcagtgattcgagacttggggaaaaaaataactttcagtgatgtcagaccaaaccagcaggagtacaaaatttcaagctttgagcagaggctgatgaatgaaatagagtttcgcttggaacgtactcctgttgatgaatcagatgatgaaattcaacatgatgagatccccacgggcaagtgtattgctcccatctttgacaagagactcaagcacttccgggtcacagaaggctctccagttacattcacctgcaaaattgttgggatacctgttccaaaggtttactggttcaaagatgggaagcagatttctaagagaaatgagcactgcaaaatgaggcgagaaggagatgggacatgctctctgcacattgaatccactaccagtgatgacgatggcaactacaccatcatggcagccaacccccaggggagaatcagctgttctggccacttgatggtacaaagtttgcccattcgcagtcggctaacctctgctggtcagtctcacaggggaagatcccgagtgcaagaaagagacaaagagcccctacaggaacgctttttccgaccacatttcctgcaggctcctggggatatggtagctcatgaggggcgcctctgtcggctggactgtaaggtgagtggtttaccgcccccggagctgacatggctactcaatggccaacctgtgctaccagatgcctcccacaagatgctggtcagggagaccggagtccactctctgctcattgacccactcactcagcgcgacgcagggacctataagtgcatcgctaccaacaaaaccgggcagaattcttttagtctggagctctctgtagtagccaaagaggtgaagaaagcacctgtgatcctggagaaactacagaactgcggtgttcccgaaggccaccccgtgagactggagtgccgcgtgataggcatgcccccacctgtgttctactggaagaaagacaatgagaccatcccttgcaccagagagaggatcagtatgcaccaggacacaacagggtatgcctgccttctcattcagccagccaagaaatcagacgctggatggtacacgttgtcagccaagaatgaagccggcatcgtgtcgtgcactgccaggctggatatatacgctcagtggcaccatcagatcccaccgcccatgtctgtccggcccagtggcagtcgctacggatctctcaccagtaaaggacttgacatattttctgccttttcctccatggaaagcacgatggtgtattcatgctcttctcggagtgtagtggagagtgatgaactttaagaatgtctaggtacctgctgtgtaagagagcggactgtggagggggaatgagaacaagccagacttggtggtttccaagcaaccgaagttgagtaagttcccacactgctggacctgtggcaaagagtgctttgaataagtcagctagggattcttgcagtctcagctgagggagaaaggtagggctgtgccttctaaagattccaacagagatgtgagaagataatacagatgaaccaaagatgtcacacagttgccatccactgctttgggaaaaaactagcatgctcccctgctccctgttgtgttagggatgtttaggtcatactaggagcaattaggagccatatgcctgggctgagaagagctaggcagtagtgaccttaggatatgactaactcaccaaacaatgccaaggagaaaggcggacaggtcaccatcacctttcatcgattacatgtatagcagtagttttggtgaattcaccaaatcagcttccacttagcattaggaggtcatgccatacaactcacgtatgcgggcaaacacttttgatttgcatatcctgggtgtactgagccacataataaggtgtcaaaatgtgcttgagattccaaaaacttgctgaaacacttgatattgcacagtgcacttattttgtggccaaagcatggccttaccagcttgtctgcactattttcttttgggtggtgactgtttttttctgactttgcatatccctagacactagaactaaaggattggtaataaaccaatcagaaagaaatcctctgtggggtcactttaaaaactactagcttcaactaccacttacaaaatgtgcaagagtcatcatttgcccataaaatacacctcatgggctcctacccctttccccaaaagtctgaaagtgtaggaggaaggaagagatacaaacaaggagaggaaatgatgggagagtgttgtttttgtcacttgccccagcagagcaggggttttggaaggagaggtctttaatagctttgaaatgctttgagatcattggtcaaattgcattttctatgtagagaatattctgctaggtggaaaagttgggagaaaggggaatatgcatctttattctaatcaccaattcaaaccctgcctcttaaggaatttttagacttaagttcactgtgatatccctagtacctagaagagtacctagcacaaagtagacattcaataaatatttgctggttgaatg

SEQ ID NO: 291520 - protein, 149 aa, Artificial Sequence
  derived and/or modified sequence
GDPVALNYTFYQVISASSQTPLALRSLQNRCLVPGYYSTHLQRWLTYYPSGQLLIVDGQELRTNPAASMESIQKFLGITPFLNYTRTLRFDDDKGFWCQGLEGGKTRCLGRSKGRRYPDMDTEVSKARGRGIPLHFQDLILCPTSYHFC

SEQ ID NO: 291521 - protein, 191 aa, Artificial Sequence
  derived and/or modified sequence
MPRSLWLGCSSLADSMPSLRCLYNPGTGALTAFQNSSEREDCNNGEPPRKIIPEKNSLRQTYNSCARLCLNQETVCLASTAMKTENCVAKTKLANGTSSMIVPKQRKLSASYEKEKELCVKYFEQWSESDQVEFVEHLISQMCHYQHGHINSYLKPMLQRDFITALPARGLDHIAENILSYLDAKSLCAAE

SEQ ID NO: 291522 - DNA, 655 bp, Artificial Sequence
  derived and/or modified sequence
actgaaaagcggaggaagctctctggagaaacgccgtgaggccgctggcggggccttcctggtgtcagggttaccgtgctctatgcccaggtctctgtggctgggctgctccagcctggcggacagcatgccttcgctgcgatgcctgtataacccagggactggcgcactcacagctttccagaattcctcagagagagaagactgtaataatggcgaaccccctaggaagataataccagagaagaattcacttagacagacatacaacagctgtgccagactctgcttaaaccaagaaacagtatgtttagcaagcactgctatgaagactgagaattgtgtggccaaaacaaaacttgccaatggcacttccagtatgattgtgcccaagcaacggaaactctcagcaagctatgaaaaggaaaaggaactgtgtgtcaaatactttgagcagtggtcagagtcagatcaagtggaatttgtggaacatcttatatcccaaatgtgtcattaccaacatgggcacataaactcgtatcttaaacctatgttgcagagagatttcataactgctctgccagctcggggattggatcatattgctgagaacattctgtcatacctggatgccaaatcactatgtgctgctgaa

SEQ ID NO: 291523 - DNA, 522 bp, Artificial Sequence
  derived and/or modified sequence
tgtcacacagataaatatgagtcacaggagtttgttgtacatagtattacatcacccagaaatcatgccaccctcaaagcctcatccacctgtcgtgggcaaagtgactcatcacagcattgaattatactgggatctggaaaagaaagccaaacgccaaggacctcaagagcagtggttcaggttctcgattgaagaagaagaccccaaaatgcacacttatggtatcatttatacgggatatgcaacgaagcatgttgttgaaggtctggaaccaaggacgctgtacagatttcgcctgaaggtcaccagcccctctggggagtgtgagtacagcccactcgtctcagtgtctacaaccagtagcatttggcttggaggagagcccataagtagtgagcacttgcaccgggctgtcagtgtgaatgatgaagatttgctggtccgaatacttcaaggagggtgagagaactctgtcagttgttttttttcccccatgcctataaagtgcatagaaataca

SEQ ID NO: 291524 - DNA, 949 bp, Artificial Sequence
  derived and/or modified sequence
gttccttcttccacatgtatccctcagtatctagaaccctgaaattggtttctctaagaaaaccaagaggcccataaggaaatcatgccaccctcaaagcctcatccacctgtcgtgggcaaagtgactcatcacagcattgaattatactgggatctggaaaagaaagccaaacgccaaggacctcaagagcagtggttcaggttctcgattgaagaagaagaccccaaaatgcacacttatggtatcatttatacgggatatgcaacgaagcatgttgttgaaggtctggaaccaaggacgctgtacagatttcgcctgaaggtcaccagcccctctggggagtgtgagtacagcccactcgtctcagtgtctacaaccagtagcatttggcttggaggagagcccataagtagtgagcacttgcaccgggctgtcagtgtgaatgatgaagatttgctggtccgaatacttcaaggaggccgtgttaaggttgatgttcccaataagtttggctttaccgctctgatggttgctgcccagaaaggatacaccagtctaatgctggcgtgctatgcgggacacctagatgttgtgaaatatctccgaagacatggcgcttcttggcaggctagagacctgggaggctgtacagctctgcactgggctgcagatggaggccactgcagtgtgattgagtggatgataaaggatggctgtgaggtagacgtcgtggacactggttcaggatggaccccactcatgagagtctctgcggtgtcgggaaatcagagggtggcctctcttctaattgatgctggggccaatgtgaatgtgaaggacagaaatggaaagacgccccttatgagtgtagtctccttattagaagaaaggaaaaaaaagcagaggccaaagaagtcttgtgtctgctgatgagagcaccactcat

SEQ ID NO: 291525 - DNA, 672 bp, Artificial Sequence
  derived and/or modified sequence
agtgtctggttcagtagttccttcttccacatgtatccctcagtatctagaaccctgaaattggtttctctaagaaaaccaagaggcccataagggtaatgtatactgttgatttttatggttatttttcaaaaactaatattttaaacatatcaaaattatttcaaatggtaatgtactcaatgtaccatttggtttaagatgttaacattttgccatatatgtcataaagtcttttcatgaagaaatcaaaccttacaaatatactgaaatcatgccaccctcaaagcctcatccacctgtcgtgggcaaagtgactcatcacagcattgaattatactgggatctggaaaagaaagccaaacgccaaggacctcaagagcagtggttcaggttctcgattgaagaagaagaccccaaaatgcacacttatggtatcatttatacgggatatgcaacgaagcatgttgttgaaggtctggaaccaaggacgctgtacagatttcgcctgaaggtcaccagcccctctggggagtgtgagtacagcccactcgtctcagtgtctacaaccagtagcatttggcttggaggagagcccataagtagtgagcacttgcaccgggctgtcagtgtgaatgatgaagatttgctggtccgaatacttcaaggagg

SEQ ID NO: 291526 - protein, 133 aa, Artificial Sequence
  derived and/or modified sequence
MPPSKPHPPVVGKVTHHSIELYWDLEKKAKRQGPQEQWFRFSIEEEDPKMHTYGIIYTGYATKHVVEGLEPRTLYRFRLKVTSPSGECEYSPLVSVSTTSSIWLGGEPISSEHLHRAVSVNDEDLLVRILQGG

SEQ ID NO: 291527 - protein, 282 aa, Artificial Sequence
  derived and/or modified sequence
MPPSKPHPPVVGKVTHHSIELYWDLEKKAKRQGPQEQWFRFSIEEEDPKMHTYGIIYTGYATKHVVEGLEPRTLYRFRLKVTSPSGECEYSPLVSVSTTSSIWLGGEPISSEHLHRAVSVNDEDLLVRILQGGRVKVDVPNKFGFTALMVAAQKGYTSLMLACYAGHLDVVKYLRRHGASWQARDLGGCTALHWAADGGHCSVIEWMIKDGCEVDVVDTGSGWTPLMRVSAVSGNQRVASLLIDAGANVNVKDRNGKTPLMSVVSLLEERKKKQRPKKSCVC

SEQ ID NO: 291528 - protein, 146 aa, Artificial Sequence
  derived and/or modified sequence
MPPSKPHPPVVGKVTHHSIELYWDLEKKAKRQGPQEQWFRFSIEEEDPKMHTYGIIYTGYATKHVVEGLEPRTLYRFRLKVTSPSGECEYSPLVSVSTTSEYSDRPHSPLSRSMEMTSNLEKIFCLSFGLTRSRNDTIFKHCNNIC

SEQ ID NO: 291529 - DNA, 402 bp, Artificial Sequence
  derived and/or modified sequence
atgccaccctcgaagcctcatccaccggtggttgggaaggtcacccatcactcaattgagctttactgggatcttgaaaagaaagcaaaaagacagggccctcaggaacaatggtttcgcttctccatcgaggaagaggatcccaaaatgcacacatacggcataatatatacaggctatgcaacaaaacacgtcgtggaaggactggagcctagaacattgtatcgctttcgccttaaggtgacttcaccttctggagaatgcgagtattctcctttagtctctgtctccaccaccagttccatatggctgggcggggagccaatttctagcgagcaccttcaccgcgctgtgtcagttaacgacgaggatctgctcgtacgcatcctgcagggagggtag

SEQ ID NO: 291530 - DNA, 849 bp, Artificial Sequence
  derived and/or modified sequence
atgccaccttccaaacctcatcctcccgtagtcggtaaggtcacacaccattccattgagctttattgggatctcgagaagaaggcgaagagacaaggtccccaggagcagtggtttcggtttagtatcgaggaagaggaccctaaaatgcacacatacggcatcatctatacaggttatgcaaccaagcacgtagtcgaaggtttagagccccgtactctctaccgatttcgcctgaaagtgacatccccttcgggcgaatgcgaatactcccccctcgtgagcgttagtacaactagctccatttggttgggcggcgagccaatcagctcagaacatcttcacagggctgttagcgtaaacgacgaagatcttctagtgcgcatccttcagggcggacgcgtgaaggtggacgttcccaacaaattcggatttactgcattaatggtggcagcccagaaagggtacacctcactgatgttagcttgctatgctggacacttagacgtggttaaatacttgcgccgccacggagccagttggcaggctcgtgatctagggggctgcaccgccctgcactgggctgcagacggcggtcactgctctgtcatcgaatggatgattaaggacgggtgtgaggtcgatgtggtggacaccgggtcaggctggacaccgctcatgcgggttagcgctgtgagcggcaaccaacgggtcgcctctctgctcatcgacgcgggagctaacgtcaatgtgaaggacaggaacgggaagactcccctgatgagcgtcgtgtcgctccttgaggagcgcaaaaaaaaacagagacccaaaaaaagctgtgtgtgctag

SEQ ID NO: 291531 - DNA, 402 bp, Artificial Sequence
  derived and/or modified sequence
atgccgcctagcaagccacatccccccgtggttggcaaagtaacccaccactcaatcgaactttattgggatctcgaaaagaaagccaaaagacagggcccccaggagcaatggttcaggttttcaattgaggaggaggatccaaagatgcacacttatggaatcatatacacaggatacgctacaaagcacgtagtggaaggactcgaacctcggaccctgtaccggtttagacttaaggtgacaagcccatcaggagaatgcgaatatagtcctctggtatcagtatcaacaaccagttccatatggttggggggggaacccattagcagcgagcatttgcatcgggcagtctcagttaatgatgaggacctcctggtacggattctgcagggcggctag

SEQ ID NO: 291532 - DNA, 402 bp, Artificial Sequence
  derived and/or modified sequence
atgccacccagcaagccccacccccctgtggtgggcaaggtgacccaccacagcattgagctgtactgggacctggagaagaaggccaagaggcagggcccccaggagcagtggttccgcttcagcattgaggaggaggaccccaagatgcacacctacggcatcatctacacaggctacgccaccaagcacgtggtggagggcctggagcccaggaccctgtaccgcttccggctgaaggtgaccagccccagcggagaatgtgagtacagccccctggtgtctgtgtccaccaccagcagcatctggctgggcggggagcccatcagcagcgagcacctgcacagagctgtgtctgtgaatgatgaggacctgctggtgcgcatcctgcagggcggctag

SEQ ID NO: 291533 - DNA, 849 bp, Artificial Sequence
  derived and/or modified sequence
atgccacccagcaagccccacccccctgtggtgggcaaggtgacccaccacagcattgagctgtactgggacctggagaagaaggccaagaggcagggcccccaggagcagtggttccgcttcagcattgaggaggaggaccccaagatgcacacctacggcatcatctacacaggctacgccaccaagcacgtggtggagggcctggagcccaggaccctgtaccgcttccggctgaaggtgaccagccccagcggagaatgtgagtacagccccctggtgtctgtgtccaccaccagcagcatctggctgggcggggagcccatcagcagcgagcacctgcacagagctgtgtctgtgaatgatgaggacctgctggtgcgcatcctgcagggcggccgggtgaaggtggatgtgcccaacaagtttggcttcaccgccctgatggtggccgcccagaagggctacaccagcctgatgctggcctgctacgccggccacctggatgtggtgaagtacctgcggagacatggagcctcctggcaggcccgggacctgggcggctgcacagccctgcactgggccgcagatggcggccactgcagcgtcatcgagtggatgatcaaggatggctgtgaggtggatgtggtggacaccggcagcggctggacccccctgatgagggtgtctgctgtgtctggcaaccagagggtggccagcctgctgattgatgctggggccaacgtgaatgtgaaggacagaaatggcaagacccccctgatgtctgtggtgtccctgctggaggagaggaagaagaagcagaggcccaagaagagctgtgtgtgctag

SEQ ID NO: 291534 - DNA, 402 bp, Artificial Sequence
  derived and/or modified sequence
atgccccccagcaagccccacccccccgtggtgggcaaggtgacccaccacagcatagaactgtactgggatcttgaaaagaaggctaagagacagggaccacaggagcagtggttccggttttcaattgaggaggaggacccgaagatgcatacgtacggcatcatctacacaggatacgctactaaacacgtggtcgaggggctcgagccccgtactttatacaggtttaggctaaaggtgacctccccttcaggcgagtgcgagtatagtccactggtgtctgtttccaccacgagtagcatctggctgggaggggagccaatttcctcggaacatctccatcgggctgtctctgtgaatgatgaagatttactggtgcggatcttgcaaggcggctag

SEQ ID NO: 291535 - DNA, 849 bp, Artificial Sequence
  derived and/or modified sequence
atgccccccagcaagccccacccccccgtggtgggcaaggtgacccatcactcaatcgaactgtattgggacctcgagaaaaaagccaagcgacaaggcccccaagagcaatggttccgttttagtatcgaggaggaggaccccaagatgcatacatacggcatcatctacactgggtatgctaccaagcacgttgttgagggcttggaaccaagaactctgtacaggttccgtctcaaggttacttccccaagcggtgaatgcgagtatagccctctggtttcagtcagtacaacctctagcatctggcttggcggggaaccgatttcttcagagcatttgcaccgggccgtgtccgtgaacgacgaagatttgttagtgagaatactgcagggtgggcgggtgaaggtcgacgtacccaacaaattcggattcaccgccctcatggttgcagcccagaagggatacacaagtttgatgctggcgtgctacgccggccacctggatgttgtaaagtacttacgcagacacggtgcctcctggcaagcacgagatttggggggctgcaccgccctgcactgggccgcagacggggggcactgttctgtgatcgagtggatgattaaggatggttgtgaggtagacgttgttgacaccgggagcggctggacccccttaatgcgggtatcggccgtgagcggcaaccagagagtcgcttcattgctcatcgacgccggcgcaaacgttaatgtgaaagaccggaacggaaaaacccctctgatgtcggtggtcagcttgttggaagagagaaaaaagaagcagcggccaaaaaaatcttgtgtatgctag

SEQ ID NO: 291536 - DNA, 402 bp, Artificial Sequence
  derived and/or modified sequence
atgccccccagcaagccccacccccccgtggtgggcaaggtgacccatcacagtatcgagttatattgggatctagagaaaaaagccaagcgccaggggcctcaggaacagtggttccgtttctcgatcgaagaagaggatcccaagatgcacacctatggcattatctacaccggatacgccaccaagcatgtcgttgagggactcgagcccaggacgctgtaccggttcaggcttaaggtgacaagcccctctggcgagtgtgaatattcaccactcgtgtcggtgtccaccacctcatcgatctggttggggggtgagcctatatccagtgagcatctccacagagctgtctccgtgaatgacgaggatttgttagtcagaatcctgcaggggggatag

SEQ ID NO: 291537 - DNA, 402 bp, Artificial Sequence
  derived and/or modified sequence
atgcctccctctaaaccccaccctcctgttgttggcaaggtcacccatcacagcatagaactctattgggatctggagaagaaggcaaagagacagggtccacaagaacagtggtttcggttctcaatagaggaagaggaccccaagatgcatacctatggaataatctacaccggatacgctacgaaacatgttgtggagggcctcgagccccgtaccttgtatagattccggctgaaggttactagccccagcggcgaatgtgagtactctccgctggtcagtgtttcaaccacttcctccatctggctggggggtgaacccattagttcagagcacctgcacagagctgtctcagtgaacgatgaagacctgcttgtgcgaatcctgcaggggggttag

SEQ ID NO: 291538 - DNA, 849 bp, Artificial Sequence
  derived and/or modified sequence
atgcctccatcaaaaccacacccaccggtcgtggggaaagtcactcaccacagcatcgagctctactgggacctcgagaaaaaagccaagcggcagggcccacaggagcaatggtttcggttctctatcgaagaagaggaccctaagatgcacacatacggcattatttatacagggtacgcaaccaaacatgtcgtggaagggctggaacctcgcacactgtatcgattccgactcaaggtcacctccccgtcgggggagtgcgaatatagtccgctagtcagcgtaagcaccacatcaagcatttggttaggaggcgagccaatatcatctgagcatctgcaccgcgctgtctccgtcaatgatgaggaccttctcgtccgcatcctacaaggtggcagagtaaaagtggatgttccaaacaagtttggcttcactgcacttatggttgctgcgcagaagggatacacctctctgatgctggcctgttatgcgggtcacctcgacgtcgtcaaatacttgaggcgccatggcgcttcatggcaggctagagacttaggcggttgcaccgcactgcactgggctgcggatggaggtcattgtagtgtgattgaatggatgatcaaagacggctgcgaggtcgatgtggtcgatacgggatctggttggaccccacttatgcgggtgtccgccgtctctgggaatcagcgagtggcctcccttttgatagacgcgggagcaaatgtgaacgtcaaagaccggaacggcaaaactcccctcatgtcagtcgtatcactcctggaggaacgaaagaaaaagcaacgacctaaaaagagttgtgtgtgctag

SEQ ID NO: 291539 - DNA, 402 bp, Artificial Sequence
  derived and/or modified sequence
atgcctccctccaaacctcatccccctgtggtcggaaaggttactcatcactccatcgaactatattgggatctggaaaagaaggcaaaaaggcagggccctcaagagcagtggttccgcttctccattgaggaggaagatcccaagatgcatacctatgggattatctacaccggatacgcgaccaaacatgtcgtggaaggactggagcccagaacactgtataggttcagactaaaagtcacgtcaccgtccggcgaatgtgaatattcccctcttgtgtcagtgtccacaacctcttccatctggctgggcggagagccaatcagctccgagcacctccaccgcgcagtgtccgtcaacgacgaggacttgttagtgagaattcttcagggtggttag

SEQ ID NO: 291540 - DNA, 402 bp, Artificial Sequence
  derived and/or modified sequence
atgccccccagcaagccccacccccccgtggtgggcaaggtgacccaccacagcatcgagctgtactgggacctggagaagaaggccaagagacagggcccccaggagcagtggttcagattcagcatcgaggaggaggaccccaagatgcacacctacggcatcatctacaccggctacgccaccaagcacgtggtggagggcctggagcccagaaccctgtacagattcagactgaaggtgaccagccccagcggcgagtgcgagtacagccccctggtgagcgtgagcaccaccagcagcatctggctgggcggcgagcccatcagcagcgagcacctgcacagagccgtgagcgtgaacgacgaggacctgctggtgagaatcctgcagggcggctag

SEQ ID NO: 291541 - DNA, 849 bp, Artificial Sequence
  derived and/or modified sequence
atgccccccagcaagccccacccccccgtggtgggcaaggtgacccaccacagcatcgagctgtactgggacctggagaagaaggccaagagacagggcccccaggagcagtggttcagattcagcatcgaggaggaggaccccaagatgcacacctacggcatcatctacaccggctacgccaccaagcacgtggtggagggcctggagcccagaaccctgtacagattcagactgaaggtgaccagccccagcggcgagtgcgagtacagccccctggtgagcgtgagcaccaccagcagcatctggctgggcggcgagcccatcagcagcgagcacctgcacagagccgtgagcgtgaacgacgaggacctgctggtgagaatcctgcagggcggcagagtgaaggtggacgtgcccaacaagttcggcttcaccgccctgatggtggccgcccagaagggctacaccagcctgatgctggcctgctacgccggccacctggacgtggtgaagtacctgagaagacacggcgccagctggcaggccagagacctgggcggctgcaccgccctgcactgggccgccgacggcggccactgcagcgtgatcgagtggatgatcaaggacggctgcgaggtggacgtggtggacaccggcagcggctggacccccctgatgagagtgagcgccgtgagcggcaaccagagagtggccagcctgctgatcgacgccggcgccaacgtgaacgtgaaggacagaaacggcaagacccccctgatgagcgtggtgagcctgctggaggagagaaagaagaagcagagacccaagaagagctgcgtgtgctag

SEQ ID NO: 291542 - protein, 124 aa, Artificial Sequence
  derived and/or modified sequence
MPPSKPHPPVVGKVTHHSIELYWDLEKKAKRQGPQEQWFRFSIEEEDPKMHTYGIIYTGYATKHVVEGLEPRTLYRFRLKVTSPSGECEYSPLVSVSTTREPISSEHLHRAVSVNDEDLLVRIL

SEQ ID NO: 291543 - DNA, 1020 bp, Artificial Sequence
  derived and/or modified sequence
atgcccccaagcaagcctcatccccccgtagtgggaaaagtgacccatcacagtattgaactatattgggatctggagaagaaggctaaacggcagggcccccaggaacaatggttccgtttctctatcgaagaagaagatcctaaaatgcacacttacggtatcatttacactggttatgctacaaagcacgtggtggagggcctggagcccaggaccctgtatcggtttcgattgaaagtgacctctccgtcaggcgagtgtgagtatagccccctggtgtctgtttcaaccacacgggagccgattagcagcgaacacctgcatagggccgtgagtgttaatgatgaggacctcttagtccgtattcttcagggggggagggtcaaagtcgatgtcccaaataagtttgggtttacagccttaatggtggccgcccagaaaggatatacgcgactggtgaagattttggtgagcaacggtacagacgtcaatcttaagaacggctccggtaaagacagtctgatgctcgcatgctacgcagggcacctggacgttgttaagtacctgcggagacatggggcctcttggcaggctcgagacctcggaggctgtacagccctacactgggctgctgacggggggcactgctccgtcattgagtggatgatcaaagacggctgcgaggtcgatgtggtcgacacaggatctggctggactcccctgatgcgtgtgtccgcagtgagcgggaatcagagggttgcctccttactgattgatgcaggagcgaacgtgaacgtcaaggatagaaacgggaagacacccctgatggttgcagtgctgaataaccacgaggaactcgtgcaactcctcctcgataaaggcgctgacgcctcagttaagaacgagtttggaaaaggagtgctggagatggctcgggtctttgatagacaatctgtcgtgagcctgcttgaagagcgtaagaagaagcagcgaccaaaaaaatcttgtgtttgctag

SEQ ID NO: 291544 - DNA, 1020 bp, Artificial Sequence
  derived and/or modified sequence
atgccacccagcaagccccacccccctgtggtgggcaaggtgacccaccacagcattgagctgtactgggacctggagaagaaggccaagaggcagggcccccaggagcagtggttccgcttcagcattgaggaggaggaccccaagatgcacacctacggcatcatctacacaggctacgccaccaagcacgtggtggagggcctggagcccaggaccctgtaccgcttccggctgaaggtgaccagccccagcggagaatgtgagtacagccccctggtgtctgtgtccaccacccgggagcccatcagcagcgagcacctgcacagagctgtgtctgtgaatgatgaggacctgctggtgcgcatcctgcagggcggccgggtgaaggtggatgtgcccaacaagtttggcttcaccgccctgatggtggccgcccagaagggctacacccggctggtgaagatcctggtgtccaatggaacagatgtgaacctgaagaatggcagcggcaaggacagcctgatgctggcctgctacgccggccacctggatgtggtgaagtacctgcggagacatggagcctcctggcaggcccgggacctgggcggctgcacagccctgcactgggccgcagatggcggccactgcagcgtcatcgagtggatgatcaaggatggctgtgaggtggatgtggtggacaccggcagcggctggacccccctgatgagggtgtctgctgtgtctggcaaccagagggtggccagcctgctgattgatgctggggccaacgtgaatgtgaaggacagaaatggcaagacccccctgatggtggccgtgctgaacaaccacgaggagctggtgcagctgctgctggacaagggagcagatgcctctgtgaagaatgaatttgggaagggcgtgctggagatggcccgggtgtttgaccggcagagcgtggtgtccctgctggaggagaggaagaagaagcagaggcccaagaagagctgtgtgtgctag

SEQ ID NO: 291545 - DNA, 1020 bp, Artificial Sequence
  derived and/or modified sequence
atgccccccagcaagccccacccccccgtggtgggcaaggtgacccatcactccatcgagctgtactgggacctagagaaaaaggccaaacggcagggccctcaagaacagtggttcagattctcaatcgaggaggaggaccctaaaatgcacacctatggcatcatctacaccggatacgctacaaagcacgtcgtcgaaggccttgaaccaagaacactctataggtttagactgaaagttaccagccctagtggcgagtgtgagtatagccccctggtgagcgtgagtaccacccgcgaacccatttcatccgaacacctgcaccgtgcagtttcagtaaacgatgaggatctgctggtgcggatcttgcagggagggcgagtaaaggtcgatgtccctaataagttcggttttactgctttgatggtcgctgctcaaaaaggatacaccagacttgtcaaaatactggtaagcaatggaaccgatgtgaacctgaagaacggctccggcaaggactctttgatgctggcttgttacgctggacacctcgacgtcgtgaaatatcttcgacggcacggggccagctggcaggcgagagacttgggtggatgtaccgccctgcactgggctgccgacggcggtcattgcagcgtcattgagtggatgatcaaggacggttgcgaggtcgacgtagtcgacaccggcagtgggtggacaccactgatgagggtatccgctgtgagtggaaaccagagagtggcctcactcctgatcgatgctggcgctaatgttaacgttaaagataggaacggcaagaccccgctcatggtggctgtactgaacaatcacgaggagctggtccagctgttgctggataaaggcgcggacgctagcgttaaaaacgagtttggcaaaggggtactggaaatggcccgggtgtttgatcgacagtcagttgtcagcctcctggaggaaaggaagaagaaacagcgcccgaaaaagtcctgcgtgtgttag

SEQ ID NO: 291546 - DNA, 1020 bp, Artificial Sequence
  derived and/or modified sequence
atgcccccttcaaaaccccacccacctgtggtcggaaaagttacccatcactccattgaactctactgggacctcgagaaaaaagctaagcgccaaggcccacaagagcagtggttccgcttctctatcgaagaggaagaccccaagatgcacacctacggaatcatctacacagggtatgcaactaagcacgtggtggaaggtctggaaccacgaacactgtataggttccggttaaaagtaacttccccatcgggagaatgcgaatactcccctctggtgtctgtaagtaccacacgcgagccgatttcttctgaacatctccaccgggctgtgagtgtgaatgacgaagacctattggtcaggatcctgcaggggggtagggtgaaagtcgacgtacctaataaatttggctttactgccctgatggttgcagcccagaagggttataccagacttgtgaaaatcctcgtgtcaaacggaaccgatgtgaacctcaaaaacggtagcggaaaggactctctgatgcttgcctgctatgccggacatctggatgttgtgaagtacctgagaaggcacggagccagctggcaggccagggatctagggggatgcaccgccctgcactgggctgcagacggaggccattgttccgtgatcgagtggatgattaaagacggatgtgaagttgatgtagtggatacaggttccggctggacccctctgatgcgtgttagcgctgtgagtggcaaccagcgagtagcctccttgctgatcgacgctggagccaacgtgaatgttaaagaccgtaatggaaagacacccctcatggtggccgtattaaacaatcatgaagagttagtgcagctgctgctggataaaggggcagatgccagcgtgaagaacgaatttggcaagggagtcctggagatggccagggtattcgaccggcagagtgtggtgtcccttctagaagaacggaagaaaaagcagcgaccaaagaagagctgcgtttgctag

SEQ ID NO: 291547 - DNA, 1020 bp, Artificial Sequence
  derived and/or modified sequence
atgccccccagcaagccccacccccccgtggtgggcaaggtgacccaccacagcatcgagctgtactgggacctggagaagaaggccaagagacagggcccccaggagcagtggttcagattcagcatcgaggaggaggaccccaagatgcacacctacggcatcatctacaccggctacgccaccaagcacgtggtggagggcctggagcccagaaccctgtacagattcagactgaaggtgaccagccccagcggcgagtgcgagtacagccccctggtgagcgtgagcaccaccagagagcccatcagcagcgagcacctgcacagagccgtgagcgtgaacgacgaggacctgctggtgagaatcctgcagggcggcagagtgaaggtggacgtgcccaacaagttcggcttcaccgccctgatggtggccgcccagaagggctacaccagactggtgaagatcctggtgagcaacggcaccgacgtgaacctgaagaacggcagcggcaaggacagcctgatgctggcctgctacgccggccacctggacgtggtgaagtacctgagaagacacggcgccagctggcaggccagagacctgggcggctgcaccgccctgcactgggccgccgacggcggccactgcagcgtgatcgagtggatgatcaaggacggctgcgaggtggacgtggtggacaccggcagcggctggacccccctgatgagagtgagcgccgtgagcggcaaccagagagtggccagcctgctgatcgacgccggcgccaacgtgaacgtgaaggacagaaacggcaagacccccctgatggtggccgtgctgaacaaccacgaggagctggtgcagctgctgctggacaagggcgccgacgccagcgtgaagaacgagttcggcaagggcgtgctggagatggccagagtgttcgacagacagagcgtggtgagcctgctggaggagagaaagaagaagcagagacccaagaagagctgcgtgtgctag

SEQ ID NO: 291548 - protein, 479 aa, Artificial Sequence
  derived and/or modified sequence
MEKGLTLPQDCRDFVHSLKMRSKYALFLVFVVIVFVFIEKENKIISRVSDKLKQIPQALADANSTDPALILAENASLLSLSELDSAFSQLQSRLRNLSLQLGVEPAMEAAGEEEEEQRKEEEPPRPAVAGPRRHVLLMATTRTGSSFVGEFFNQQGNIFYLFEPLWHIERTVSFEPGGANAAGSALVYRDVLKQLFLCDLYVLEHFITPLPEDHLTQFMFRRGSSRSLCEDPVCTPFVKKVFEKYHCKNRRCGPLNVTLAAEACRRKEHMALKAVRIRQLEFLQPLAEDPRLDLRVIQLVRDPRAVLASRMVAFAGKYKTWKKWLDDEGQDGLREEEVQRLRGNCESIRLSAELGLRQPAWLRGRYMLVRYEDVARGPLQKAREMYRFAGIPLTPQVEDWIQKNTQAAHDGSGIYSTQKNSSEQFEKWRFSMPFKLAQVVQAACGPAMRLFGYKLARDAAALTNRSVSLLEERGTFWVT

SEQ ID NO: 291549 - DNA, 1440 bp, Artificial Sequence
  derived and/or modified sequence
atggaaaaggggcttactctaccccaggactgccgagactttgttcacagcctgaaaatgagatccaaatatgcgctgttccttgtcttcgtggtcattgtatttgtcttcatcgaaaaggagaacaaaattatttctagagtttcggataaactgaaacaaatcccacaggccctcgctgacgctaacagcactgaccctgctctgatcctcgccgaaaacgctagccttctttccctatcagagctggattctgccttttcccagttacaaagtcgcctgagaaatctgagcttgcagctgggagtggagcccgccatggaggccgccggagaagaggaggaggaacagcggaaggaggaagagcctccacggccagctgtggctggacccagacgtcatgttctcctaatggccactaccaggacgggctcatctttcgtcggggagtttttcaatcaacagggcaatatcttctacctcttcgagccactatggcatatcgagcgtaccgttagcttcgagccggggggagcaaacgcagccggctcggccttggtctacagagacgtgctcaaacagctgttcttatgcgatctatacgtgctcgagcactttattaccccactcccagaggatcatctgactcagttcatgttcagaagaggtagctctaggtctctctgcgaggatccggtttgcactcctttcgtaaagaaggtcttcgaaaagtaccattgtaaaaatcgcaggtgtggtcccttgaacgtcaccctcgccgcagaggcgtgccgcaggaaggagcacatggccctgaaagctgtcaggattcgccagctcgagtttctgcagcctctggcggaggatcctcggcttgatctgcgtgtcatccagctggtgcgcgaccccagagcagttctcgcaagcagaatggtcgccttcgctggaaaatacaagacatggaagaaatggctcgacgatgaaggccaggacggattacgggaggaagaagtacagaggcttcgaggcaattgcgagtccattcgattatcagcagagctcggactcaggcagccggcttggctccgtgggaggtatatgctcgtaaggtatgaagatgtcgcccgtggccccctacagaaagcgcgtgaaatgtacaggtttgccggaattcccctgaccccacaggttgaggactggattcagaaaaatacccaggccgcccatgatggttccggtatttacagcacgcagaaaaattcgtctgagcaatttgaaaagtggcgcttcagcatgccatttaagctggcccaggtggttcaggctgcatgcggacctgccatgcgacttttcggctacaagttggcccgggatgctgcggctttaacgaatagaagcgtgtcgctccttgaggaacgggggacgttctgggtaacttag

SEQ ID NO: 291550 - DNA, 1440 bp, Artificial Sequence
  derived and/or modified sequence
atggagaagggcctgaccctgccccaggactgccgggactttgtgcacagcctgaagatgaggagcaaatatgccctcttcctggtgtttgtggtgattgtgtttgtgttcatcgagaaggagaacaagatcatcagccgggtgtctgacaagctgaagcagatcccccaggccctggctgatgccaacagcacagatcctgccctgatcctggctgaaaatgccagcctgctgagcctgtctgagctggacagcgccttcagccagctgcagagccggctgaggaacctgagcctgcagctgggcgtggagcccgccatggaggccgccggggaggaggaggaggagcagaggaaggaggaggagccccccaggcctgctgtggccggcccccggcggcacgtgctgctgatggccaccaccaggacaggcagcagctttgtgggggagttcttcaaccagcagggcaacatcttctacctgtttgagcccctgtggcacatcgagaggacagtgtcctttgagcccggcggggccaatgctgctggcagcgccctggtgtacagagatgtgctgaagcagctgttcctgtgtgacctgtatgtgctggagcacttcatcacccccctgcctgaggaccacctgacccagttcatgttcagaagaggcagcagccgcagcctgtgtgaggaccctgtgtgcaccccatttgtgaagaaggtgtttgagaagtaccactgcaagaacagaagatgtggccccctgaatgtgaccctggccgctgaggcctgcaggaggaaggagcacatggccctgaaggctgtgcgcatccggcagctggagttcctgcagcccctggccgaggacccccggctggacctgcgggtcatccagctggtgcgggaccccagggctgtgctggccagcaggatggtggcctttgctgggaagtacaagacctggaagaagtggctggatgatgagggccaggacggcctgcgggaggaggaggtgcagaggctgcggggcaactgtgagagcatccggctgtctgctgagctgggcctgcggcagcctgcctggctgcggggccgctacatgctggtgcgctatgaagatgtggcccggggccccctgcagaaggcccgggagatgtacagatttgctggcatccccctgaccccccaggtggaggactggatccagaagaacacccaggccgcccatgatggcagcggcatctacagcacccagaagaacagcagcgagcagtttgagaagtggaggttctccatgcccttcaagctggcccaggtggtgcaggccgcctgtggccctgccatgaggctgtttggctacaagctggccagagatgctgctgccctgaccaacagatctgtgtccctgctggaggagcggggcaccttctgggtgacctag

SEQ ID NO: 291551 - DNA, 1440 bp, Artificial Sequence
  derived and/or modified sequence
atggagaagggcctgaccctgccccaggactgccgggacttcgtgcactccctaaaaatgagatcaaaatatgcactatttctcgtcttcgtagtcatcgttttcgtgtttatagagaaagaaaacaagatcatcagccgagtgagcgataaactcaagcagatcccccaagcccttgctgacgcaaactcaactgacccggccttaatcctcgccgagaatgccagcctcttgagcttgtccgagctggactctgccttcagccagttacaatctcgcctcaggaatctcagtcttcagcttggtgttgagcccgccatggaagccgcgggggaggaagaagaagagcagcggaaagaggaagagccgcccaggcccgcggtggcaggcccacggcggcatgtgctgctcatggcaacaacgaggaccggttcctccttcgttggcgagttctttaaccagcagggaaacattttctacttatttgaacctctgtggcatattgagaggaccgtgtccttcgagccaggcggtgcgaatgctgccggttccgccttagtgtacagagacgtcctcaagcaattgttcctgtgtgatctctatgtgctggagcactttattaccccactaccagaagatcacctgacacagttcatgttcaggagaggctctagccgatccctttgcgaggatccggtgtgtacaccctttgtaaaaaaagttttcgaaaagtatcattgtaagaatcgtcgctgtgggccgttgaacgtgaccctggctgccgaagcttgcaggcggaaagagcacatggcgctcaaagctgttcgaattagacaactcgagttcctgcagcccttagctgaagaccctagattggacctaagagtgatccagctcgtgagagatcccagagcggtgttagcttctaggatggtcgcatttgcaggcaagtacaagacatggaaaaagtggcttgatgatgaaggtcaggacggcttgcgcgaagaggaggtgcagcggctgaggggaaattgtgagagcatccgtctgagcgcagaactgggactgcggcagccagcttggcttaggggtagatacatgctcgtgcgctacgaggatgtagctcgtggcccacttcagaaagctagggagatgtatcggttcgccggaattcccttgactccgcaggtggaagactggatccagaagaatactcaagctgctcacgatggcagcgggatatactcaactcagaagaatagttcagagcagtttgagaaatggcgattctccatgccatttaagcttgctcaggtggtacaagcagcatgtggccctgccatgcgcttattcggatacaaactcgctcgggatgctgccgccctcacaaatcggagtgtttcactcttggaagaaagggggaccttctgggttacctag

SEQ ID NO: 291552 - DNA, 1440 bp, Artificial Sequence
  derived and/or modified sequence
atggaaaagggcctaacactcccccaagactgccgagacttcgttcattctctgaagatgcgatccaaatatgccttattcctggtcttcgttgttatagtgtttgttttcatcgagaaggagaataagattatatccagggtcagcgataaactcaaacagatacctcaggcactggccgacgctaattccaccgaccctgccctcatcctcgccgagaatgccagtttgctatccctttctgagctcgactcggcgttttcgcaactgcagagtcgactcagaaacctgtccctgcagctcggtgtcgagccggcaatggaggctgctggtgaggaagaagaggaacagagaaaagaggaggagcccccacggccagcggtggctggtcctagaaggcacgttcttctgatggctactactcggacaggttcttccttcgtgggtgagtttttcaaccagcaaggtaatattttctatttgttcgaacccctgtggcacattgaaagaacagtgagctttgaaccaggtggagctaacgctgctggatctgcccttgtatacagagacgtgctgaaacagctttttctgtgtgatttgtatgttctggagcacttcatcactcctctgccagaagatcacctgactcaatttatgttccgccgtggctcctcaaggtccctgtgtgaggaccctgtttgtacccccttcgtgaaaaaggttttcgaaaagtaccactgcaaaaaccggaggtgcgggcctttaaacgtgacgcttgcagctgaggcctgcaggaggaaggagcatatggctttgaaggcagtaaggattcgccaactggagtttctgcagcccttggcagaagatccccgtctggatctccgcgtcatccagctcgtgagggatcccagagccgtgttagcttctcggatggtggccttcgcgggtaaatacaaaacatggaaaaagtggctggacgacgaggggcaagacggacttcgagaagaggaggtacagcggcttaggggaaactgcgaatccatccgactgagcgcagaattgggcctccgacaacctgcatggctccggggacggtacatgctggtgagatatgaggacgtggccaggggacctctgcagaaagccagggaaatgtatagatttgcaggcattcccctaaccccacaggtagaggactggattcaaaagaacacgcaggcggctcatgacggatccggaatatactctacccagaagaattctagcgaacagtttgagaagtggcgattttctatgccattcaagctcgcacaggtggtgcaagcagcctgcgggccagccatgagactctttgggtacaaactcgcccgtgacgcggctgcactgactaaccggtcagtaagcctccttgaggagcgaggcacattttgggtcacatag

SEQ ID NO: 291553 - DNA, 6970 bp, Artificial Sequence
  derived and/or modified sequence
gccttggacgcggttcaggaatccgccgccgctagccggctcgggcctgagcggggagggcgccaggcaggacctctcgcaggctcgctgcgcaggacggcgcccgcctggcgccgcttcccttccagcgtgccgaccggccccgcagcgcctccatccctccggcccgccccggagaagacgcacagctcgggccgcgcgggcgccggggccgcggaaccgcttctgccgggatcttccaggaggaaagcgaagttgcgagcggatgctgcccgcgccggaccccagccgcggagggtcggggccgccggtggagtctcggcggccggggacaagggtgtcccccacctgaagacggcaagctgggtcctgagtgatgcccctcagctgagtgtccaaggctggcccgaggagcccccacggccccacctttccccatggagaaaggactcactttgccccaggactgccgggactttgtgcacagcctgaagatgagaagcaaatacgcccttttcttggtttttgtggtgatagtttttgtcttcatcgaaaaggaaaataaaatcatatcaagggtctcagacaagctgaagcagattccccaagctctagcagatgccaacagcaccgacccagccctgatcttagctgagaacgcatctctcttgtccctgagcgagctcgattcagccttctcccagcttcagagccgtctccgcaacctcagcttgcagctgggcgtggagccagccatggaggccgcaggggaggaagaggaagagcagagaaaggaggaggagccgcccagaccggccgtggcggggccccggcgccacgtgctgctcatggccaccacgcgcaccggctcctcgttcgtgggcgagttcttcaaccagcagggcaacatcttctacctcttcgagccgctgtggcacatcgagcgcacagtgtccttcgagccggggggcgccaacgccgcgggctcggccctggtgtaccgcgacgtgctcaagcagctcttcctgtgcgacctgtacgtgctggagcacttcatcacgccgctgcccgaggaccacctgactcagttcatgttccgccggggctccagccgctccctgtgcgaggaccccgtctgtacgcccttcgtcaagaaggtcttcgagaagtaccactgcaagaaccgccgctgcggccccctcaacgtgacgctggccgcagaggcctgccgccgcaaggagcacatggccctcaaggcggtgcgcatccggcagctggagttcctgcagccgctggccgaggacccccgcctggacctgcgcgtcatccagctggtgcgcgacccccgggccgtgctggcctcgcgcatggtggccttcgccggcaagtataagacctggaagaagtggctggacgacgagggccaggacggcctgagggaagaggaggtgcagcggctgcggggcaactgcgagagcatccgcctgtccgcggagctggggctgcggcagcccgcctggctgcggggccgctacatgctggtgcgctacgaggacgtggcacgcgggccgctgcagaaggcccgcgagatgtaccgcttcgccggcatccccctgaccccgcaggtggaagactggatccaaaagaacacgcaggcggcccacgacggcagcggcatctactccacgcagaagaactcctcggagcagttcgagaagtggcgcttcagcatgcccttcaagctggcccaggtggtgcaggccgcctgcggccctgccatgcgcctcttcggctacaaactggcgcgggacgccgccgccctcaccaaccgctcagtcagcctgctggaggagaggggcaccttctgggtcacgtaggggggccggggccccgtatgcccctcctcgtgaaaggcctgccccgtctttctgccgcagccctcgcagagggcgggtgcacagcgccatgagcgggcagcgcctcctgtagcagtagggcccccagccagcgctccagccaaagcggcggccccagggttaattgcggagaacaggacagtgcccggtccccttgagggccatcacacccagacccaacgggttgcagcctcctgagcaggcctaggcaggcccgggcctgttggcaagcttcgatctcacacacacagaaacatacattcgtgcctggagaccctgcaggccagagtccaaatatttaacaatcagaaggggcaaggctctgaccagtgacagtcagacctcctgctttatttggtgttaaccgtttcttgtctggatggtgaagtctggaatctgggtgggtccttggaggaggggctaggacagccgtgggtgtcaaaggtggcatttgaggctcgtttgaggtgacagtggctgtttaccaactagtacagagcgattcagcgttttcatgaatgggttggctgtgctggttactgatgaatatgggccccttatagagctgcaaaacacacacatgcgtatagacatacatacatgtacaccatacatagacaagcatcataaaggcacaagtgcacacacatctatgcagacaagcttcctcgctgcttatgcccacagggtttttctgtatgacacacctcagaggagcctgtgcttaacatttgtaggattatttcgagggcagggcaggggaaagaaacgcgttaaagggccatgacatgacacagttccctggccgggtttggactgaacagtggattcagaactgcagcgttcaaagcccctgcccgccttagattctcatggctacctcctctgacccatccacatccttgcggctggcaggcaggatgttttgaaatggtgcagccaaaggccccgtctagcttggctggctcccgaacatgtccatatttgaaggctgcctcaggcctggcaggcagaagcagctgtggtccctggaggcaaaaggcagctcacggggccttccatttccagccaggcctcatctggggtagggccaagaggaaagtacagagtgcccgtgggggagaagtcccaccaggatgccccccctcccctgagaagcccgccttctccctcgtggacaggagtcagccagttggttgctgtggttacagccagtgcctggaattcctccttagggccctgggaagagtattgcttaacgcaggatgtgctgggtgttttgtttcgggcttttatttatggcttggtgtctttcttgtttcatggctgtgtttttgcttttgtttctgtaggagcgcctcttccaagcagtggaggcctgagggcttgagggaggctggggaaaaccagcagggagcacttggctcctggcagagggagaggacaggaggaggagccttccccaggaggaacgaggagaggtggccacgtggcaggccacagtgccctatgggcttttctgtttgaaccccatgtgggatgaatctcaaagccaccagcgttcttgcctagtgtccagagcagcagagatttgcagccctcgcccctccctgagaagaagctggatttgaaaatccctcacaggccctaacatgtttcctgggtgggcaggggcctcatgacaagcgacaagtgtacccagagtagaaggccttccccactcccacctcaaacccaggagcagaactcagtatccagagcttacaaggagctgcaagggtttgccgagggctgcccagctctgcttctggtttcctggacaatttctctgtcagatacggcccattgtaaacccagagggctgcattttgggttgagtaatatggacaccatggaagtacaggatctgagtccaacattgccatgggggagggaagagtgtgtcctggcaggaagccaccattggagaaggtgaggccagtaaccatctcatgggattcgctataatcagcctatttgagctgctgggtctctgtcactgtggactccagtcattcaaggaggtctccactcttgggttttttttattttcttttcttttgctattttgcctgaacaccccaacactcttggttttagagtccaagagtaagttgtgcagagacatggttctaatttggagttcaaaggaacaccagctctgaaaacatgaccgtggggccaggatgtttctggcaggcccagaagtgctggccgttcttccccagcctccccactgctccctcctctgttccccatgtggaggtcggaggggctgggactggggagggggcagccacctccatccaaggctcttcctaggggccctgctaatgtggacagtagactttatccctccttcttactctgggccaagacctcccactccgccctctgaggatggtaccaagaatgggcctttgggacttctcaggacattgacaatgtgcacactgcaggttgacttaatttatttattttttgaaaagaagagacagaaaataccttattatctgcagggactcaaagctgtacccaaatcaagaaagacaaaataacaatagaaaccattcacacactccgttcatgcatggacaccagaagacgattcagaacacaagaggagaatgagctggagcgccagcaccacgatggccccaggacgttgtttaagatctgagatcccttggtttctctcttgttgatctgagatgctacatcagggcccttgctgctgtattacctctgcccgggtgtttgagacaggtcacaagcgcgtggatgtttcctggaagtgtattcccctggggctcagcgatgctctgggaacccttggggtttggggaaggacagtgtggtgtgactattggcttgaaacgttatggatatggttggagtcacccatgtggatatgattttcagcttggagctgggatggagaagatggaagcactggtggccgggcctctttttccagcgaggccagccctggcttctcctctgttccagcttgtctgccagaagccttcccctgcaaggtgcccacctgcccggagacagagggagcagctgaggcctctctccactggccgccagcctccctagcacaaggggaccattcagcaatgagtgtttactcatgttctttcttgttgatgagttctgcggcccagcatatagaaatggctcagaacgttccaggccttggtgagacacagcagcgtccaatgctcacaggctgtccccactctgcctgttcccatcttcccctcgggacctgtttataaattgaggaatggatgagggccctggagggtccttgggagtagttagtggagggcaggattctcaggtccccatagagagggaaagagaagaccagatgtgcatagaagccagtctctgtcacatacaccgcaggtggtcaccgagttattttccaaaagctgaggaacataaagcaaatttaggcttttgtccttctgcaatacatgcacttgaaaataaacagaaaagagatgtttaataacaagtttacttccggtctgctagcaccctcagcctgggagctactgccagaggctggcgtagtggggcagctgctgaccaaaccccacagaacagagggcaccaggcatcacacgacatctttccctcccatctctgccatctgtctgtctggcaatggaaggagcttcagcaggaggtccttcccagaaggttgattcttggcctgggtggtagaggagatatcctgaccctaaagtcttccagccccgggtcatcctctcctatactagggcctattgaccgtagaggccaggtgcggtggctcatacctgtaatcccagcagttggggaggccaaggtgggaggattgcttgagcccaagagttggagaccagcctgggcaacatggtgagaccaattgactgtagggcttgtcccttgctaagacaggagcagaagactggatggctgtgtcctcaaggcagtcccctcccatccccattcccaaagtcagaaagtgaagccagatctcaagggctgatacctgaggcaaggagagctaaggggagagaaattggggctgagtggaagcagatgcctgcacaagccaagtgtgtcttattgatctgtacaagctgatagaaggaccatctgctgaaatccagggctcctgagttggtgggtttgcttgtgaagcttctaggacaaggcgcagccagatggaagggagagggtccagggcttcctaaatgcagccgcatcacctgtcaactcgctgcagtttcagagacagtggaagctgctctttacctcaaaagcacaaagcagaattggcaacttcacttgtctcaagagctccaagatcctttggtctcgtgtcctttggcaccccgtaactggactggggacaaatttgttacgtgtttccaaggctacagacatggcgccatcctcacaggcctagctcatgtcatggatcaggtgctttgctggggggatacaatgacccatgtggtctgcgtcttctgccattggcttgaactgggcaccccctgaagtctccatctcagctgtatattctagtccaaattttcctggctcccctgctccctcccaggtcctgcacactgtctttttgccaacacctcagccctgtttgctatttcatgtctgcatggtacgagacaccccttcacggcatacactgccatggtatgtacatatgcatccacgtgtgtgtatgtgtagcatgtagctcattctgctcagcctctggcgccgttccacattgctcccagccccattgctgtcactgtcgtcccagatgtccttgccatggccacagacaatctgccgtctcctggaaacgctggggctgcccttcagagagctggcagccccagcagtcagggcctgctttgcagaatagaatgtgaacccaactcctgatggcctacttgacttatttaattaaagatgaaatcatgcaatgagcaaaacctgca

SEQ ID NO: 291554 - DNA, 1440 bp, Artificial Sequence
  derived and/or modified sequence
atggagaagggcctgaccctgccccaggactgcagagacttcgtgcacagcctgaagatgagaagcaagtacgccctgttcctggtgttcgtggtgatcgtgttcgtgttcatcgagaaggagaacaagatcatcagcagagtgagcgacaagctgaagcagatcccccaggccctggccgacgccaacagcaccgaccccgccctgatcctggccgagaacgccagcctgctgagcctgagcgagctggacagcgccttcagccagctgcagagcagactgagaaacctgagcctgcagctgggcgtggagcccgccatggaggccgccggcgaggaggaggaggagcagagaaaggaggaggagccccccagacccgccgtggccggccccagaagacacgtgctgctgatggccaccaccagaaccggcagcagcttcgtgggcgagttcttcaaccagcagggcaacatcttctacctgttcgagcccctgtggcacatcgagagaaccgtgagcttcgagcccggcggcgccaacgccgccggcagcgccctggtgtacagagacgtgctgaagcagctgttcctgtgcgacctgtacgtgctggagcacttcatcacccccctgcccgaggaccacctgacccagttcatgttcagaagaggcagcagcagaagcctgtgcgaggaccccgtgtgcacccccttcgtgaagaaggtgttcgagaagtaccactgcaagaacagaagatgcggccccctgaacgtgaccctggccgccgaggcctgcagaagaaaggagcacatggccctgaaggccgtgagaatcagacagctggagttcctgcagcccctggccgaggaccccagactggacctgagagtgatccagctggtgagagaccccagagccgtgctggccagcagaatggtggccttcgccggcaagtacaagacctggaagaagtggctggacgacgagggccaggacggcctgagagaggaggaggtgcagagactgagaggcaactgcgagagcatcagactgagcgccgagctgggcctgagacagcccgcctggctgagaggcagatacatgctggtgagatacgaggacgtggccagaggccccctgcagaaggccagagagatgtacagattcgccggcatccccctgaccccccaggtggaggactggatccagaagaacacccaggccgcccacgacggcagcggcatctacagcacccagaagaacagcagcgagcagttcgagaagtggagattcagcatgcccttcaagctggcccaggtggtgcaggccgcctgcggccccgccatgagactgttcggctacaagctggccagagacgccgccgccctgaccaacagaagcgtgagcctgctggaggagagaggcaccttctgggtgacctag

SEQ ID NO: 291555 - protein, 297 aa, Artificial Sequence
  derived and/or modified sequence
MEDYTKIEKIGEGTYGVVYKGRHKTTGQVVAMKKIRLESEEEGVPSTAIREISLLKELRHPNIVSLQDVLMQDSRLYLIFEFLSMDLKKYLDSIPPGQYMDSSLVKSYLYQILQGIVFCHSRRVLHRDLKPQNLLIDDKGTIKLADFGLARAFGIPIRVYTHEVVTLWYRSPEVLLGSARYSTPVDIWSIGTIFAELATKKPLFHGDSEIDQLFRIFRALGTPNNEVWPEVESLQDYKNTFPKWKPGSLASHVKNLDENGLDLLSKMLIYDPAKRISGKMALNHPYFNDLDNQIKKM

SEQ ID NO: 291556 - protein, 297 aa, Artificial Sequence
  derived and/or modified sequence
MEDYTKIEKIGEGTYGVVYKGRHKTTGQVVAMKKIRLESEEEGVPSTAIREISLLKELRHPNIVSLQDVLMQDSRLYLIFEFLSMDLKKYLDSIPPGQYMDSSLVKSYLYQILQGIVFCHSRRVLHRDLKPQNLLIDDKGTIKLADFGLARAFGIPIRVYTHEAITLWYRSPEVLLGSARYSTPVDIWSIGTIFAELATKKPLFHGDSEIDQLFRIFRALGTPNNEVWPEVESLQDYKNTFPKWKPGSLASHVKNLDENGLDLLSKMLIYDPAKRISGKMALNHPYFNDLDNQIKKM

SEQ ID NO: 291557 - protein, 189 aa, Artificial Sequence
  derived and/or modified sequence
MEDYTKIEKIGEGTYGVVYKGRHKTTGQVVAMKKIRLESEEEGVPSTAIREISLLKELRHPNIVSLQDVLMQDSRLYLIFEFLSMDLKKYLDSIPPGQYMDSSLVKSYLYQILQGIVFCHSRRVLHRDLKPQNLLIDDKGTIKLADFGLARAFGIPIRVYTHEAITLWYRSPEVLLGSARYSTPVDIWS

SEQ ID NO: 291558 - DNA, 894 bp, Artificial Sequence
  derived and/or modified sequence
atggaggactacaccaagatcgagaagatcggcgagggcacctacggcgtggtgtacaagggcagacacaagaccaccggccaggtggtggccatgaagaagatcagactggagagcgaggaggagggcgtgcccagcaccgccatcagagagatcagcctgctgaaggagctgagacaccccaacatcgtgagcctgcaggacgtgctgatgcaggacagcagactgtacctgatcttcgagttcctgagcatggacctgaagaagtacctggacagcatcccccccggccagtacatggacagcagcctggtgaagagctacctgtaccagatcctgcagggcatcgtgttctgccacagcagaagagtgctgcacagagacctgaagccccagaacctgctgatcgacgacaagggcaccatcaagctggccgacttcggcctggccagagccttcggcatccccatcagagtgtacacccacgaggtggtgaccctgtggtacagaagccccgaggtgctgctgggcagcgccagatacagcacccccgtggacatctggagcatcggcaccatcttcgccgagctggccaccaagaagcccctgttccacggcgacagcgagatcgaccagctgttcagaatcttcagagccctgggcacccccaacaacgaggtgtggcccgaggtggagagcctgcaggactacaagaacaccttccccaagtggaagcccggcagcctggccagccacgtgaagaacctggacgagaacggcctggacctgctgagcaagatgctgatctacgaccccgccaagagaatcagcggcaagatggccctgaaccacccctacttcaacgacctggacaaccagatcaagaagatgtag

SEQ ID NO: 291559 - DNA, 894 bp, Artificial Sequence
  derived and/or modified sequence
atggaggactacaccaagatcgagaagatcggcgagggcacctacggcgtggtgtacaagggcagacacaagaccaccggccaggtggtggccatgaagaagatcagactggagagcgaggaggagggcgtgcccagcaccgccatcagagagatcagcctgctgaaggagctgagacaccccaacatcgtgagcctgcaggacgtgctgatgcaggacagcagactgtacctgatcttcgagttcctgagcatggacctgaagaagtacctggacagcatcccccccggccagtacatggacagcagcctggtgaagagctacctgtaccagatcctgcagggcatcgtgttctgccacagcagaagagtgctgcacagagacctgaagccccagaacctgctgatcgacgacaagggcaccatcaagctggccgacttcggcctggccagagccttcggcatccccatcagagtgtacacccacgaggccatcaccctgtggtacagaagccccgaggtgctgctgggcagcgccagatacagcacccccgtggacatctggagcatcggcaccatcttcgccgagctggccaccaagaagcccctgttccacggcgacagcgagatcgaccagctgttcagaatcttcagagccctgggcacccccaacaacgaggtgtggcccgaggtggagagcctgcaggactacaagaacaccttccccaagtggaagcccggcagcctggccagccacgtgaagaacctggacgagaacggcctggacctgctgagcaagatgctgatctacgaccccgccaagagaatcagcggcaagatggccctgaaccacccctacttcaacgacctggacaaccagatcaagaagatgtag

SEQ ID NO: 291560 - DNA, 570 bp, Artificial Sequence
  derived and/or modified sequence
atggaggactacaccaagatcgagaagatcggcgagggcacctacggcgtggtgtacaagggcagacacaagaccaccggccaggtggtggccatgaagaagatcagactggagagcgaggaggagggcgtgcccagcaccgccatcagagagatcagcctgctgaaggagctgagacaccccaacatcgtgagcctgcaggacgtgctgatgcaggacagcagactgtacctgatcttcgagttcctgagcatggacctgaagaagtacctggacagcatcccccccggccagtacatggacagcagcctggtgaagagctacctgtaccagatcctgcagggcatcgtgttctgccacagcagaagagtgctgcacagagacctgaagccccagaacctgctgatcgacgacaagggcaccatcaagctggccgacttcggcctggccagagccttcggcatccccatcagagtgtacacccacgaggccatcaccctgtggtacagaagccccgaggtgctgctgggcagcgccagatacagcacccccgtggacatctggagctag

SEQ ID NO: 291561 - DNA, 1913 bp, Artificial Sequence
  derived and/or modified sequence
agcgcggtgagtttgaaactgctcgcacttggcttcaaagctggctcttggaaattgagcggagagcgacgcggttgttgtagctgccgctgcggccgccgcggaataataagccgggatctaccatacccattgactaactatggaagattataccaaaatagagaaaattggagaaggtacctatggagttgtgtataagggtagacacaaaactacaggtcaagtggtagccatgaaaaaaatcagactagaaagtgaagaggaaggggttcctagtactgcaattcgggaaatttctctattaaaggaacttcgtcatccaaatatagtcagtcttcaggatgtgcttatgcaggattccaggttatatctcatctttgagtttctttccatggatctgaagaaatacttggattctatccctcctggtcagtacatggattcttcacttgttaagagttatttataccaaatcctacaggggattgtgttttgtcactctagaagagttcttcacagagacttaaaacctcaaaatctcttgattgatgacaaaggaacaattaaactggctgattttggccttgccagagcttttggaatacctatcagagtatatacacatgaggtagtaacactctggtacagatctccagaagtattgctggggtcagctcgttactcaactccagttgacatttggagtataggcaccatatttgctgaactagcaactaagaaaccacttttccatggggattcagaaattgatcaactcttcaggattttcagagctttgggcactcccaataatgaagtgtggccagaagtggaatctttacaggactataagaatacatttcccaaatggaaaccaggaagcctagcatcccatgtcaaaaacttggatgaaaatggcttggatttgctctcgaaaatgttaatctatgatccagccaaacgaatttctggcaaaatggcactgaatcatccatattttaatgatttggacaatcagattaagaagatgtagctttctgacaaaaagtttccatatgttatatcaacagatagttgtgtttttattgttaactcttgtctatttttgtcttatatatatttctttgttatcaaacttcagctgtacttcgtcttctaatttcaaaaatataacttaaaaatgtaaatattctatatgaatttaaatataattctgtaaatgtgtgtaggtctcactgtaacaactatttgttactataataaaactataatattgatgtcaggaatcaggaaaaaatttgagttggcttaaatcatctcagtccttatggcagttttattttcctgtagttggaactactaaaatttaggaaaatgctaagttcaagtttcgtaatgctttgaagtatttttatgctctgaatgtttaaatgttctcatcagtttcttgccatgttgttaactatacaacctggctaaagatgaatatttttctactggtattttaatttttgacctaaatgtttaagcattcggaatgagaaaactatacagatttgagaaatgatgctaaatttataggagttttcagtaacttaaaaagctaacatgagagcatgccaaaatttgctaagtcttacaaagatcaagggctgtccgcaacagggaagaacagttttgaaaatttatgaactatcttatttttaggtaggttttgaaagctttttgtctaagtgaattcttatgccttggtcagagtaataactgaaggagttgcttatcttggctttcgagtctgagtttaaaactacacattttgacatagtgtttattagcagccatctaaaaaggctctaatgtatatttaactaaaattactagctttgggaattaaactgtttaacaaataa

SEQ ID NO: 291562 - DNA, 1948 bp, Artificial Sequence
  derived and/or modified sequence
gctggctcttggaaattgagcggagagcgacgcggttgttgtagctgccgctgcggccgccgcggaataataagccgggtacagtggctggggtcagggtcgtgtctaggggacggccgagggcctcggagggcgagtattgaggaacggggtcctctaagaaggccggactggaggatctaccatacccattgactaactatggaagattataccaaaatagagaaaattggagaaggtacctatggagttgtgtataagggtagacacaaaactacaggtcaagtggtagccatgaaaaaaatcagactagaaagtgaagaggaaggggttcctagtactgcaattcgggaaatttctctattaaaggaacttcgtcatccaaatatagtcagtcttcaggatgtgcttatgcaggattccaggttatatctcatctttgagtttctttccatggatctgaagaaatacttggattctatccctcctggtcagtacatggattcttcacttgttaagagttatttataccaaatcctacaggggattgtgttttgtcactctagaagagttcttcacagagacttaaaacctcaaaatctcttgattgatgacaaaggaacaattaaactggctgattttggccttgccagagcttttggaatacctatcagagtatatacacatgaggcaataacactctggtacagatctccagaagtattgctggggtcagctcgttactcaactccagttgacatttggagtataggcaccatatttgctgaactagcaactaagaaaccacttttccatggggattcagaaattgatcaactcttcaggattttcagagctttgggcactcccaataatgaagtgtggccagaagtggaatctttacaggactataagaatacatttcccaaatggaaaccaggaagcctagcatcccatgtcaaaaacttggatgaaaatggcttggatttgctctcgaaaatgttaatctatgatccagccaaacgaatttctggcaaaatggcactgaatcatccatattttaatgatttggacaatcagattaagaagatgtagctttctgacaaaaagtttccatatgttatatcaacagatagttgtgtttttattgttaactcttgtctatttttgtcttatatatatttctttgttatcaaacttcagctgtacttcgtcttctaatttcaaaaatataacttaaaaatgtaaatattctatatgaatttaaatataattctgtaaatgtgtgtaggtctcactgtaacaactatttgttactataataaaactataatattgatgtcaggaatcaggaaaaaatttgagttggcttaaatcatctcagtccttatggcagttttattttcctgtagttggaactactaaaatttaggaaaatgctaagttcaagtttcgtaatgctttgaagtatttttatgctctgaatgtttaaatgttctcatcagtttcttgccatgttgttaactatacaacctggctaaagatgaatatttttctactggtattttaatttttgacctaaatgtttaagcattcggaatgagaaaactatacagatttgagaaatgatgctaaatttataggagttttcagtaacttaaaaagctaacatgagagcatgccaaaatttgctaagtcttacaaagatcaagggctgtccgcaacagggaagaacagttttgaaaatttatgaactatcttatttttaggtaggttttgaaagctttttgtctaagtgaattcttatgccttggtcagagtaataactgaaggagttgcttatcttggctttcgagtctgagtttaaaactacacattttgacatagtgtttattagcagccatctaaaaaggctctaatgtatatttaactaaaattactagctttg

SEQ ID NO: 291563 - DNA, 723 bp, Artificial Sequence
  derived and/or modified sequence
agccgccctttcctctttctttcgcgctctagccacccgggaaggcctgcccagcgtagctgggctctgattggctgctttgaaagtctacgggctacccgattggtgaatccggggccctttagcgcggatctaccatacccattgactaactatggaagattataccaaaatagagaaaattggagaaggtacctatggagttgtgtataagggtagacacaaaactacaggtcaagtggtagccatgaaaaaaatcagactagaaagtgaagaggaaggggttcctagtactgcaattcgggaaatttctctattaaaggaacttcgtcatccaaatatagtcagtcttcaggatgtgcttatgcaggattccaggttatatctcatctttgagtttctttccatggatctgaagaaatacttggattctatccctcctggtcagtacatggattcttcacttgttaagagttatttataccaaatcctacaggggattgtgttttgtcactctagaagagttcttcacagagacttaaaacctcaaaatctcttgattgatgacaaaggaacaattaaactggctgattttggccttgccagagcttttggaatacctatcagagtatatacacatgaggcaataacactctggtacagatctccagaagtattgctggggtcagctcgttactcaactccagttgacatttggagtat

SEQ ID NO: 291564 - DNA, 894 bp, Artificial Sequence
  derived and/or modified sequence
atggaggattacacgaaaatagagaaaatcggggaggggacatatggagtggtgtacaagggcagacacaagaccaccgggcaggtagtcgccatgaagaagattagactcgagtctgaggaggaaggggtgccaagcactgccatcagggaaatctccctgctgaaggaattgcgccaccccaatatcgtcagcctacaggacgtgctcatgcaggactccagattgtacctgattttcgagtttttgagcatggaccttaaaaagtacttagatagcatccctccgggacagtacatggacagcagtttggtcaagagctatctctaccaaatcttgcagggcatcgttttttgccacagtcgtagggtcttacaccgggatctgaagccacagaatctcctgattgatgataagggcaccataaaattggccgatttcgggctagcgagagcgttcggaattcctatccgggtgtacacgcacgaggttgtgacgctgtggtacagatctcccgaagttctattggggtccgcacgttattcgacccccgtggatatctggtccattgggaccatcttcgccgaattagccaccaagaagcctcttttccatggagactccgaaatcgatcagttgttcagaattttcagagctctcggaacacctaataacgaggtttggcccgaggtggagagcttgcaagattacaaaaatacctttcctaaatggaaaccgggatccctggcaagccacgtgaaaaacctggacgagaacgggcttgacttgctgtcaaaaatgttgatctacgaccccgccaaaaggattagcggaaagatggcattaaatcatccttactttaatgatctggacaatcagatcaagaaaatgtag

SEQ ID NO: 291565 - DNA, 894 bp, Artificial Sequence
  derived and/or modified sequence
atggaagactacacaaagatcgagaagatcggggagggcacctacggtgtagtctacaagggtagacataaaacaactggtcaggttgtcgcaatgaagaagatccgtctggagagtgaggaagaaggtgtcccaagcacagcaatccgggagattagcctcctcaaagagctccgacacccaaacatagtttccttgcaggatgtacttatgcaggacagccggttatacctgattttcgagttcctgagtatggatctcaaaaagtaccttgactcaattccccccggacagtatatggactcgagcttagttaagtcctatctatatcagatcctgcagggaattgtgttttgccattcacggagggtcttgcaccgcgatcttaagccacagaatctgctcatcgacgataaggggactattaaactcgcagatttcggcctcgcccgcgcctttggcattcctatacgggtgtatacccatgaggccattaccctgtggtacagatcaccggaagtgctgttgggctctgctaggtactctactcctgtcgacatatggagcatcggaaccatttttgcagaacttgccaccaagaaacctctttttcatggcgattccgagattgaccaacttttcagaatctttagggcgctcgggacaccaaataatgaggtctggccagaagttgagtccctgcaggactataaaaatactttccctaagtggaaaccaggctctttggcctcacacgtaaagaatcttgacgagaatgggctcgacctgctgtctaaaatgctaatttatgacccggcaaaaagaatatctggcaaaatggccttgaaccatccctattttaacgacttggataatcaaatcaaaaagatgtag

SEQ ID NO: 291566 - DNA, 570 bp, Artificial Sequence
  derived and/or modified sequence
atggaggactacactaaaatcgagaagatcggtgagggcacttatggcgtagtgtataaggggcgacacaagactacaggccaggtggtggccatgaaaaaaatccgcttagagagcgaggaagagggcgtgccttcaactgccattcgcgaaatctcactgctcaaggaactgaggcaccctaatatcgtgagcctgcaggatgtactgatgcaggattcaagactgtaccttattttcgaattcctctccatggatcttaagaagtacctcgacagcatacctcctggccaatacatggatagctcactggttaagagctacctgtatcaaatcctccagggcattgtcttttgccattccagacgggttctgcaccgggacctgaagccccagaatttattaatcgatgataaggggaccatcaaattggccgacttcggcctggcccgcgctttcggaataccaatcagggtgtacactcacgaggcaataacattatggtataggagcccagaggtactcctcgggagtgcacggtacagcacacccgtcgatatctggagctag

SEQ ID NO: 291567 - DNA, 894 bp, Artificial Sequence
  derived and/or modified sequence
atggaggactacaccaagattgagaagatcggggagggcacctatggagtggtgtacaagggccgccacaagaccaccggccaggtggtggccatgaagaagatccggctggagagcgaggaggagggcgtgcccagcacagccatccgggagatcagcctgctgaaggagctgcggcaccccaacatcgtgtccctgcaggatgtgctgatgcaggacagccggctgtacctgatctttgagttcctgtccatggacctgaagaagtacctggacagcatccccccaggccagtacatggacagcagcctggtgaagagctacctgtaccagatcctgcagggcatcgtgttctgccacagccggcgggtgctgcaccgggacctgaagccccagaacctgctgattgatgacaagggcaccatcaagctggccgactttggcctggcccgggccttcggcatccccatccgggtgtacacccatgaggtggtgaccctgtggtaccgcagccctgaggtgctgctgggcagcgcccgctacagcacccctgtggacatctggagcatcggcaccatctttgctgagctggccaccaagaagcccctcttccatggagacagcgagattgaccagctgttccgcatcttccgggccctgggcacccccaacaatgaggtgtggccagaggtggagagcctgcaggactacaagaacaccttccccaagtggaagccaggcagcctggccagccacgtgaagaacctggatgaaaatggcctggacctgctgagcaagatgctgatctatgaccctgccaagaggatcagcggcaagatggccctgaaccacccctacttcaatgacctggacaaccagatcaagaagatgtag

SEQ ID NO: 291568 - DNA, 894 bp, Artificial Sequence
  derived and/or modified sequence
atggaggactacaccaagattgagaagatcggggagggcacctatggagtggtgtacaagggccgccacaagaccaccggccaggtggtggccatgaagaagatccggctggagagcgaggaggagggcgtgcccagcacagccatccgggagatcagcctgctgaaggagctgcggcaccccaacatcgtgtccctgcaggatgtgctgatgcaggacagccggctgtacctgatctttgagttcctgtccatggacctgaagaagtacctggacagcatccccccaggccagtacatggacagcagcctggtgaagagctacctgtaccagatcctgcagggcatcgtgttctgccacagccggcgggtgctgcaccgggacctgaagccccagaacctgctgattgatgacaagggcaccatcaagctggccgactttggcctggcccgggccttcggcatccccatccgggtgtacacccatgaggccatcaccctgtggtaccgcagccctgaggtgctgctgggcagcgcccgctacagcacccctgtggacatctggagcatcggcaccatctttgctgagctggccaccaagaagcccctcttccatggagacagcgagattgaccagctgttccgcatcttccgggccctgggcacccccaacaatgaggtgtggccagaggtggagagcctgcaggactacaagaacaccttccccaagtggaagccaggcagcctggccagccacgtgaagaacctggatgaaaatggcctggacctgctgagcaagatgctgatctatgaccctgccaagaggatcagcggcaagatggccctgaaccacccctacttcaatgacctggacaaccagatcaagaagatgtag

SEQ ID NO: 291569 - DNA, 570 bp, Artificial Sequence
  derived and/or modified sequence
atggaggactacaccaagattgagaagatcggggagggcacctatggagtggtgtacaagggccgccacaagaccaccggccaggtggtggccatgaagaagatccggctggagagcgaggaggagggcgtgcccagcacagccatccgggagatcagcctgctgaaggagctgcggcaccccaacatcgtgtccctgcaggatgtgctgatgcaggacagccggctgtacctgatctttgagttcctgtccatggacctgaagaagtacctggacagcatccccccaggccagtacatggacagcagcctggtgaagagctacctgtaccagatcctgcagggcatcgtgttctgccacagccggcgggtgctgcaccgggacctgaagccccagaacctgctgattgatgacaagggcaccatcaagctggccgactttggcctggcccgggccttcggcatccccatccgggtgtacacccatgaggccatcaccctgtggtaccgcagccctgaggtgctgctgggcagcgcccgctacagcacccctgtggacatctggagctag

SEQ ID NO: 291570 - DNA, 894 bp, Artificial Sequence
  derived and/or modified sequence
atggaggactacaccaagatcgagaagatcggcgagggcacctacggcgtcgtatataaggggaggcataagactaccggccaggtagttgcaatgaagaagatccgcctggagtctgaggaggaaggcgtaccgtctaccgccatccgagaaatctctctcctgaaggagctaaggcatcccaatatagtgtccctgcaagacgtgttgatgcaggatagtcgtctgtacctaatctttgaattccttagcatggacctgaagaaatacttagactccatccctcctggccagtacatggactcctccctggtcaaatcatacctctaccagatactgcagggcattgtattctgtcacagccggagggtgcttcaccgggatcttaagccacagaatctcctgatagacgacaaaggcacaatcaagttggccgactttggactcgctagagcttttggcatccctatacgcgtctacacccatgaggtggttacactgtggtacagatctccggaggtccttctcggtagtgcgagatattcaacaccagtggatatctggagtattggcactatctttgcggagctggccacaaagaaaccacttttccatggcgactcagagatagaccagctgttccgtattttccgggcactgggcacgcccaacaatgaagtctggcctgaggttgagagcttgcaagattacaagaacaccttccctaaatggaagcccggatccctcgccagtcacgtgaaaaatctcgatgaaaacgggctagatctgctctcgaagatgctgatatacgaccccgccaagcggatttcgggcaaaatggcccttaatcacccttattttaatgacttggacaaccaaatcaagaagatgtag

SEQ ID NO: 291571 - DNA, 894 bp, Artificial Sequence
  derived and/or modified sequence
atggaggactacaccaagatcgagaagatcggcgagggcacctacggggtggtgtataaggggcgacataagacaacggggcaggtggttgcgatgaagaagatccggctcgaaagcgaagaagaaggggtgccgtccaccgccatcagggagatatcccttctcaaagaactcaggcacccaaatatagtctctctgcaggacgtcctaatgcaggactcaagattatatcttatcttcgagttcctctctatggaccttaagaagtacttggattctataccgccaggccagtatatggattccagcttggtaaagtcatacttgtaccagatactccagggaatagtgttctgccatagccgcagggtactgcatcgagatcttaagcctcagaatttattaatcgatgacaagggcactatcaagctcgctgatttcgggctggccagggcgtttggtattccaatccgggtctacacccacgaagccatcactctgtggtatcgcagccccgaagtacttctaggctccgccaggtactccactccagtggatatctggtcaattggaactatttttgccgaactggcgactaagaaaccccttttccatggggactccgagatcgatcaactgttcaggatatttagagcactaggaacgccaaataatgaggtgtggccggaggtggagagtctgcaagactacaagaacaccttcccaaagtggaagcctggaagcctggctagccacgtgaagaaccttgacgagaatggcctcgatctcttaagtaagatgctgatctatgacccggcaaagcggatttccggtaagatggcattgaaccacccatactttaatgacctggacaaccagattaaaaaaatgtag

SEQ ID NO: 291572 - DNA, 570 bp, Artificial Sequence
  derived and/or modified sequence
atggaggactacaccaagatcgagaagatcggcgagggcacctacggagtcgtgtacaagggacggcacaagaccacaggtcaggtcgtagctatgaagaagattcgcttggagtcagaagaggaaggtgtaccctccactgccataagggaaattagtctattgaaggagttacggcaccccaatatcgttagtctgcaggacgttttgatgcaggactcaaggttgtacttaatcttcgagtttcttagtatggacctgaaaaaatatcttgattccattccccctgggcagtatatggactcctctctcgtgaagagttatttataccaaatcctgcaaggtatcgtgttttgccattcaagaagggtgctccatcgcgatctaaagcctcagaacctgcttatcgatgacaagggaactattaaactcgctgatttcggcttggcccgtgcattcgggattcccataagagtatacacacacgaggcaatcaccctctggtatcgatcacccgaggttcttctgggctctgcaagatactctacacccgttgacatctggtcatag

SEQ ID NO: 291573 - DNA, 894 bp, Artificial Sequence
  derived and/or modified sequence
atggaggactataccaaaattgagaagattggggaggggacgtatggagtggtctacaagggtaggcacaaaaccactggccaggtggtagccatgaagaagattcgcttggagagtgaggaggaaggggtcccctctacggccattcgggaaatttcgctcctgaaggagttgagacacccaaatatcgtgtcactacaggatgtactgatgcaggattcccggttgtacttaattttcgagttcctgtctatggacttgaagaagtatctggacagtattcctccaggtcagtacatggactcttccttagtaaagagctatctctaccagatcctgcaggggatcgtattttgccactccaggcgcgttctgcacagagacctgaaaccgcagaatctgctgatcgatgataagggaactataaagttagcagatttcggcctggcaagagcatttgggatccctatacgggtttatactcatgaagtagtgactctgtggtaccgaagccctgaggtgctgctgggatcagccagatacagcacgccagtggatatttggtcaatcggcaccattttcgccgagctggccaccaagaagccgctgttccatggtgacagtgagatcgaccagctctttcgaatctttcgggcacttgggactcctaacaacgaggtgtggcccgaggtggaatccctacaggattataaaaatacgttcccaaaatggaagccgggtagtttagctagccatgtcaagaatctcgacgaaaatggtctcgacctcttgtcaaagatgctgatatacgaccctgcaaagaggatcagcggaaagatggcgctcaatcacccctatttcaacgatctagataatcaaataaagaagatgtag

SEQ ID NO: 291574 - DNA, 894 bp, Artificial Sequence
  derived and/or modified sequence
atggaggattataccaagatcgaaaagattggagaaggcacatacggcgtggtctacaaagggagacataagaccaccggacaagtagtggccatgaagaagattcgtctggaaagtgaggaagagggcgtgccctccactgccatcagagagataagtttattaaaggagctgcgacatccaaatattgtctctcttcaggatgtgctcatgcaggacagtcgcctgtacctgatcttcgagttcctctctatggacctcaagaaatacctggactccatcccccctggccagtatatggatagttccctggtgaagagctacctgtatcagattcttcaaggcatcgtgttctgccattcccgcagagtcctgcaccgagacttgaaaccacagaacttgttaattgatgacaaaggcacgataaaattagctgacttcggcttggctcgggcttttggaatacctatccgcgtttatacacacgaggcaattacactgtggtatcgatctcctgaagtgctactgggctctgctagatacagcacccctgttgacatctggagcataggcaccatttttgccgagctggcgaccaaaaaacctctgttccacggcgatagcgagatcgaccagttatttcggatctttagggcactgggaaccccaaataatgaagtctggcccgaagtcgaaagtcttcaggactataaaaacaccttccccaaatggaaacccggatctttggcaagtcacgtgaagaaccttgacgagaatgggttggatctgctatctaaaatgctgatatacgatccagccaaaagaattagcggaaaaatggctcttaaccatccttacttcaacgatttggacaatcagattaagaagatgtag

SEQ ID NO: 291575 - DNA, 570 bp, Artificial Sequence
  derived and/or modified sequence
atggaagattacaccaaaatcgaaaagattggtgagggcacttacggcgtggtgtacaagggccgacataagacaactgggcaggtggtcgccatgaaaaagatccgacttgagagcgaagaagagggagtgccttctactgcgattcgggaaatctccctgctgaaagagttgcgccaccctaacattgtgtccctgcaggacgtactgatgcaggactcacggctatatctgattttcgaatttttatccatggatctgaaaaagtaccttgactccatcccaccaggccagtacatggatagcagcctcgtgaaaagttacctctaccaaatcttgcagggtatagtattctgtcattcccggagagtcctgcacagagatcttaagccacagaacttgctgatcgacgataaaggtaccatcaaactagcagacttcggtctcgcaagagctttcgggatccctatcagagtttatacacacgaggcgattaccctttggtaccggtctcccgaggtgctccttggcagcgctcgctactcaaccccagtcgatatctggtcgtag

SEQ ID NO: 291576 - protein, 289 aa, Artificial Sequence
  derived and/or modified sequence
MWRLTARRELLSLPATSLADQDIFNAVIKEHPGLVQRLPCVWNVQLSDHTLAERCYSEASDLKVIHWNSPKKLRVKNKHVEFFRNFYLTFLEYDGNLLRRELFVCPSQPPPGAEQLQQALAQLDEEDPCFEFRQQQLTVHRVHVTFLPHEPPPPRPHDVTLVAQLSMDRLQMLEALCRHWPGPMSLALYLTDAEAQQFLHFVEASPVLAARQDVAYHVVYREGPLYPVNQLRNVALAQALTPYVFLSDIDFLPAYSLYDYLREARAGFNSSSTCGCAHPSHQARWPMVV

SEQ ID NO: 291577 - DNA, 870 bp, Artificial Sequence
  derived and/or modified sequence
atgtggaggctgacagcccgacgcgaactcttgtccctgccggctacgagtcttgctgatcaggacatttttaatgctgtcatcaaagaacaccccggtctggtacagaggcttccatgtgtgtggaatgtacagctatctgatcatacgctagccgaacggtgttactcagaagcttccgacctgaaggtcatccactggaatagccctaaaaaattaagagtgaagaataaacacgtggagttttttcgaaatttctatttgacctttctagagtatgacggaaacctgcttcgcagggagctgttcgtctgcccctcccagcctcccccgggagcagaacagctgcagcaggctttggctcagctcgacgaggaggatccctgcttcgaatttcggcaacaacaactgacggttcaccgagttcatgtgactttccttccccacgaacccccacctcctcgcccccacgacgtgactcttgtcgcgcagctgagtatggacagactccagatgcttgaggccttgtgtaggcattggccgggacccatgtcgctcgccctgtacttaacagatgcggaggctcagcaattcctgcatttcgtcgaggcaagccccgtattggcagctaggcaagatgtggcttaccatgttgtgtacagggaaggcccactttacccggtcaaccagctgcggaacgtggcactcgcacaggccttaacgccatacgttttcctgagcgatattgattttcttcctgcatacagtctttacgattacttgcgcgaggcacgagctggatttaactcatcaagtacctgcgggtgcgctcatccatctcaccaggcccggtggcccatggtcgtctag

SEQ ID NO: 291578 - DNA, 1788 bp, Artificial Sequence
  derived and/or modified sequence
gcgagcgcagggcccagcccgggagccgctggagcagggcctgcgatggagcctgcagccccgggtcgcgtccctccctgagcgcccccgtcggcggccatgctgccccgagggcgcccccgggcgctgggggccgccgcgctgttgctgctgctgctgctgctcggattcctcctgttcggtggggacctggggtgtgagcgccgcgagcctggcgggcgagcgggggccccgggatgcttccccggcccgctcatgccacgtgtccccccagacgggaggctgcggagagccgccgccctcgacggagacccgggggccggccccggggaccacaaccgctccgactgcggcccgcagccgccgccgccgcccaagtgcgagctcttgcatgtggccatcgtgtgtgcggggcataactccagccgagacgtcatcaccctggtgaagtccatgctcttctacaggaaaaatccactgcacctccacttggtgactgacgccgtggccagaaacatcctggagacgctcttccacacatggatggtgcctgctgtccgtgtcagcttttatcatgccgaccagctcaagccccaggtctcctggatccccaacaagcactactccggcctctatgggctaatgaagctggtgctgcccagtgccttgcctgctgagctggcccgcgtcattgtcctggacacggatgtcaccttcgcctctgacatctcggagctctgggccctctttgctcacttttctgacacgcaggcgatcggtcttgtggagaaccagagtgactggtacctgggcaacctctggaagaaccacaggccctggcctgccttgggccggggatttaacacaggtgtgatcctgctgcggctggaccggctccggcaggctggctgggagcagatgtggaggctgacagccaggcgggagctccttagcctgcctgccacctcactggctgaccaggacatcttcaacgctgtgatcaaggagcacccggggctagtgcagcgtctgccttgtgtctggaatgtgcagctgtcagatcacacactggccgagcgctgctactctgaggcgtctgacctcaaggtgatccactggaactcaccaaagaagcttcgggtgaagaacaagcatgtggaattcttccgcaatttctacctgaccttcctggagtacgatgggaacctgctgcggagagagctctttgtgtgccccagccagcccccacctggtgctgagcagttgcagcaggccctggcacaactggacgaggaagacccctgctttgagttccggcagcagcagctcactgtgcaccgtgtgcatgtcactttcctgccccatgaaccgccacccccccggcctcacgatgtcacccttgtggcccagctgtccatggaccggctgcagatgttggaagccctgtgcaggcactggcctggccccatgagcctggccttgtacctgacagacgcagaagctcagcagttcctgcatttcgtcgaggcctcaccagtgcttgctgcccggcaggacgtggcctaccatgtggtgtaccgtgaggggcccctataccccgtcaaccagcttcgcaacgtggccttggcccaggccctcacgccttacgtcttcctcagtgacattgacttcctgcctgcctattctctctacgactacctcagggaggccagggccggcttcaacagcagctccacctgtggttgtgcccacccgtcgcatcaggcaagatggcccatggtggtctag

SEQ ID NO: 291579 - DNA, 870 bp, Artificial Sequence
  derived and/or modified sequence
atgtggaggctgacagcccggcgggagctgctgagcctgcctgccaccagcctggccgaccaggacatcttcaatgctgtgatcaaggagcaccctggcctggtgcagaggctgccctgtgtgtggaatgtgcagctgagtgaccacaccctggccgagcgctgctacagcgaggccagtgacctgaaggtgatccactggaacagccccaagaagctgcgggtgaagaacaagcacgtggagttcttcaggaacttctacctgaccttcctggagtatgatggcaacctgctgcggcgggagctgtttgtgtgccccagccagcccccacctggagctgagcagctgcagcaggccctggcccagctggatgaggaggacccctgctttgagttccggcagcagcagctgactgtgcaccgggtgcacgtgaccttcctgccccatgagcccccaccaccccggccccatgatgtgaccctggtggcccagctgtccatggaccggctgcagatgctggaggccctgtgccgccactggccaggccccatgagcctggccctgtacctgacagatgctgaggcccagcagttcctgcactttgtggaggccagccctgtgctggccgcccggcaggatgtggcctaccacgtggtgtaccgggagggccccctgtaccctgtgaaccagctgagaaatgtggccctggcccaggccctgaccccctacgtgttcctgagtgacatcgacttcctgcctgcctacagcctgtatgactacctgcgggaggcccgggccggcttcaacagcagcagcacctgtggctgtgcccaccccagccaccaggcccgctggcccatggtggtgtag

SEQ ID NO: 291580 - DNA, 870 bp, Artificial Sequence
  derived and/or modified sequence
atgtggcggctgaccgcccggcgggagctgctgagcctgcccgccactagcctggctgaccaggatatttttaacgcagttatcaaagagcatcccggacttgtgcaaaggctcccatgcgtgtggaacgtacagctgtccgaccatacactggctgagcgatgctatagcgaagcatctgatctaaaagtgatacattggaatagccccaaaaaactccgggtcaagaacaagcatgtcgagttcttccggaacttttacctcaccttcctggaatacgatgggaatcttctgcggcgcgagttattcgtgtgtccgtcacaaccaccccctggagcagagcagctgcagcaggcccttgcccagctagatgaggaggatccctgttttgagttccgccagcagcaattaaccgtgcatcgcgttcatgtcaccttcctcccccacgaaccgccgccaccacgcccccacgacgtaaccctggtcgctcagctctctatggatcgcctgcaaatgcttgaggccttatgccggcactggcccggaccgatgagtcttgctctgtatctcaccgatgccgaggctcagcaatttcttcatttcgtggaggcctcccccgtcctggccgctagacaggatgtagcttaccacgtggtatacagggagggcccactgtaccctgtaaaccagctgcggaatgtggctcttgcccaggccctgacaccgtatgtgttcctgtctgatattgattttctgcccgcctattccctttacgattacctgcgcgaggcccgggccgggttcaacagcagtagcacttgcggctgtgcccatccgtctcaccaggcaaggtggccgatggtggtgtag

SEQ ID NO: 291581 - DNA, 870 bp, Artificial Sequence
  derived and/or modified sequence
atgtggcgactgactgcgaggcgcgagctcctcagcctgcccgctacttcactagcagaccaagacatctttaatgcagtcatcaaagaacacccagggctcgtccagagactcccatgtgtgtggaatgtacagctttccgaccacacgcttgccgagcgctgttatagcgaagcgtcagacctaaaagtcatccactggaactcccctaaaaagttaagggtcaagaacaaacacgtcgaattcttccgcaatttttatcttaccttcctagagtatgacggaaacttgctgagacgggaactgttcgtctgcccttcccagccaccccctggtgctgaacagttacagcaggctctggcccagctggatgaggaggacccatgttttgaattccgccaacagcagctcactgtccatagggtgcatgttacattcctgccacatgagcctccaccacctcgccctcatgacgtgacgctggtcgcacagctgtcaatggacaggctgcagatgttagaggcgctgtgcagacattggcccggaccaatgtcgctagccctttatttgacagatgccgaggcccagcagttcctgcatttcgttgaagcgagtcccgtactcgccgctaggcaggatgtcgcctatcacgtcgtatatcgggagggtccactatatcccgtcaatcaactgcgaaatgtcgcactggctcaggccctgactccctacgtgttcctctctgatatcgattttctccctgcttacagcctttacgactacctccgcgaagccagagcaggtttcaatagtagttccacctgtggttgcgcccatccatcccatcaggctcgctggccaatggttgtttag

SEQ ID NO: 291582 - DNA, 870 bp, Artificial Sequence
  derived and/or modified sequence
atgtggagactgaccgccagaagagagctgctgagcctgcccgccaccagcctggccgaccaggacatcttcaacgccgtgatcaaggagcaccccggcctggtgcagagactgccctgcgtgtggaacgtgcagctgagcgaccacaccctggccgagagatgctacagcgaggccagcgacctgaaggtgatccactggaacagccccaagaagctgagagtgaagaacaagcacgtggagttcttcagaaacttctacctgaccttcctggagtacgacggcaacctgctgagaagagagctgttcgtgtgccccagccagcccccccccggcgccgagcagctgcagcaggccctggcccagctggacgaggaggacccctgcttcgagttcagacagcagcagctgaccgtgcacagagtgcacgtgaccttcctgccccacgagccccccccccccagaccccacgacgtgaccctggtggcccagctgagcatggacagactgcagatgctggaggccctgtgcagacactggcccggccccatgagcctggccctgtacctgaccgacgccgaggcccagcagttcctgcacttcgtggaggccagccccgtgctggccgccagacaggacgtggcctaccacgtggtgtacagagagggccccctgtaccccgtgaaccagctgagaaacgtggccctggcccaggccctgaccccctacgtgttcctgagcgacatcgacttcctgcccgcctacagcctgtacgactacctgagagaggccagagccggcttcaacagcagcagcacctgcggctgcgcccaccccagccaccaggccagatggcccatggtggtgtag

SEQ ID NO: 291583 - protein, 396 aa, Artificial Sequence
  derived and/or modified sequence
MEVKNFAVWDYVVFAALFFISSGIGVFFAIKERKKATSREFLVGGRQMSFGPVGLSLTASFMSAVTVLGTPSEVYRFGASFLVFFIAYLFVILLTSELFLPVFYRSGITSTYEYLQLRFNKPVRYAATVIYIVQTILYTGVVVYAPALALNQVTGFDLWGSVFATGIVCTFYCTLGGLKAVVWTDAFQMVVMIVGFLTVLIQGSTHAGGFHNVLEQSTNGSRLHIFDFDVDPLRRHTFWTITVGGTFTWLGIYGVNQSTIQRCISCKTEKHAKLALYFNLLGLWIILVCAVFSGLIMYSHFKDCDPWTSGIISAPDQLMPYFVMEIFATMPGLPGLFVACAFSGTLSTVASSINALATVTFEDFVKSCFPHLSDKLSTWISKGLCRYSWWTFYSIS

SEQ ID NO: 291584 - DNA, 1191 bp, Artificial Sequence
  derived and/or modified sequence
atggaggtgaagaacttcgccgtgtgggactacgtggtgttcgccgccctgttcttcatcagcagcggcatcggcgtgttcttcgccatcaaggagagaaagaaggccaccagcagagagttcctggtgggcggcagacagatgagcttcggccccgtgggcctgagcctgaccgccagcttcatgagcgccgtgaccgtgctgggcacccccagcgaggtgtacagattcggcgccagcttcctggtgttcttcatcgcctacctgttcgtgatcctgctgaccagcgagctgttcctgcccgtgttctacagaagcggcatcaccagcacctacgagtacctgcagctgagattcaacaagcccgtgagatacgccgccaccgtgatctacatcgtgcagaccatcctgtacaccggcgtggtggtgtacgcccccgccctggccctgaaccaggtgaccggcttcgacctgtggggcagcgtgttcgccaccggcatcgtgtgcaccttctactgcaccctgggcggcctgaaggccgtggtgtggaccgacgccttccagatggtggtgatgatcgtgggcttcctgaccgtgctgatccagggcagcacccacgccggcggcttccacaacgtgctggagcagagcaccaacggcagcagactgcacatcttcgacttcgacgtggaccccctgagaagacacaccttctggaccatcaccgtgggcggcaccttcacctggctgggcatctacggcgtgaaccagagcaccatccagagatgcatcagctgcaagaccgagaagcacgccaagctggccctgtacttcaacctgctgggcctgtggatcatcctggtgtgcgccgtgttcagcggcctgatcatgtacagccacttcaaggactgcgacccctggaccagcggcatcatcagcgcccccgaccagctgatgccctacttcgtgatggagatcttcgccaccatgcccggcctgcccggcctgttcgtggcctgcgccttcagcggcaccctgagcaccgtggccagcagcatcaacgccctggccaccgtgaccttcgaggacttcgtgaagagctgcttcccccacctgagcgacaagctgagcacctggatcagcaagggcctgtgcagatacagctggtggaccttctacagcatcagctag

SEQ ID NO: 291585 - DNA, 1191 bp, Artificial Sequence
  derived and/or modified sequence
atggaggtgaagaacttcgctgtctgggattatgtcgtctttgccgctttatttttcattagctccggcattggggtcttcttcgccatcaaggaacgcaagaaagctacaagtagagaattcttggtgggcggcaggcagatgtccttcgggccggtggggctgtctctcactgcgtccttcatgtccgctgtgaccgtgctgggcaccccctctgaagtgtatcgctttggcgcctcattccttgtcttcttcatcgcatacttgtttgtcatcctgctcacttcagaacttttcctgcctgtcttttataggagcgggattaccagtacatacgaatatctgcagttacgatttaataaacctgtcaggtatgcggcaactgtgatatacattgtccagacaattttgtatactggagtggtcgtctacgcacctgcactcgcactgaatcaggttaccgggtttgatctgtggggatccgtgttcgccactggtatagtttgcactttctactgcactttgggaggccttaaggccgtcgtttggacagacgcttttcagatggtcgtgatgatcgtgggcttccttactgttctaatccaggggtccacgcatgctgggggcttccataacgtgctcgagcaatctacgaacgggtcccggctacatatcttcgacttcgatgttgatccgttaaggcggcatactttttggaccataacagtaggcgggacgtttacatggctggggatatatggggttaaccaaagtaccatccaacgctgtatcagctgcaaaactgagaaacacgctaaacttgctctctatttcaacctgttggggttatggattattttggtgtgcgctgtgttcagtggcttgataatgtacagccatttcaaggactgcgacccatggacttccggtatcatctctgcacccgatcagctgatgccatatttcgttatggaaattttcgctaccatgccaggccttccaggcctgttcgtggcgtgcgcattttccggaaccctttcgacagtcgccagttcaataaatgccctggctacagtcacatttgaggacttcgtgaaaagctgtttcccgcaccttagcgataaattgagcacatggataagtaaaggactttgtcgctactcttggtggaccttttattcgatcagctag

SEQ ID NO: 291586 - DNA, 1191 bp, Artificial Sequence
  derived and/or modified sequence
atggaggtgaagaactttgctgtgtgggactatgtggtgtttgctgccctcttcttcatcagcagcggcatcggggtcttctttgccatcaaggagaggaagaaggccaccagccgggagttcctggtgggcggccggcagatgagctttggacctgtgggcctgagcctgacagccagcttcatgtctgctgtgacagtgctgggcacccccagcgaggtgtacagatttggagccagcttcctggtgttcttcatcgcctacctgtttgtgatcctgctgaccagcgagctgttcctgcctgtgttctaccgcagcggcatcaccagcacctatgagtacctgcagctgcgcttcaacaagcctgtgcgctatgctgccaccgtcatctacatcgtgcagaccatcctgtacacaggagtggtggtgtatgccccagccctggccctgaaccaggtgacaggctttgacctgtggggctctgtgtttgccactggaattgtgtgcaccttctactgcaccctgggcggcctgaaggctgtggtgtggacagatgccttccagatggtggtgatgattgtgggcttcctgactgtgctgatccagggcagcacccatgctgggggcttccacaacgtgctggagcagagcaccaacggcagccggctgcacatctttgattttgatgtggaccccctgcggcggcacaccttctggaccatcaccgtgggcggcaccttcacctggctgggcatctatggagtgaaccagagcaccatccagcgctgcatcagctgcaagacagagaagcacgccaagctggccctgtacttcaacctgctgggcctgtggatcatcctggtgtgtgctgtgttttctggcctcatcatgtacagccacttcaaggactgtgacccctggaccagcggcatcatcagcgccccagaccagctgatgccctactttgtgatggagatctttgccaccatgcctggcctgcccggcctgtttgtggcctgtgccttcagcggcaccctgagcacagtggccagcagcatcaatgccctggccaccgtgacctttgaggactttgtgaagagctgcttcccccacctgagtgacaagctgagcacctggatcagcaagggcctgtgccgctacagctggtggaccttctacagcatctcctag

SEQ ID NO: 291587 - DNA, 1191 bp, Artificial Sequence
  derived and/or modified sequence
atggaggtgaagaacttcgccgtgtgggactacgtggtgttcgccgctttgttctttatctcatcgggcatcggggtgttctttgctatcaaagagcgtaaaaaagctaccagcagggagtttcttgtggggggccgccagatgtcttttggcccagttgggctgtctttaaccgcctcatttatgtccgccgtcacagtcttgggaacaccctccgaggtctatcggttcggcgcctcatttctggtgtttttcatcgcctatttgttcgtgatcctgctaacctcagagctcttccttccagttttctatcggagcggcattaccagcacctatgaatatctgcaattacgctttaataaacccgtgcgctacgccgccaccgtcatctatatagtgcagaccatcctctacacaggtgttgtcgtctacgcccctgctttggccctgaatcaagtcaccggattcgatctatggggcagtgtttttgctacggggatcgtctgcaccttctactgcacacttggaggactgaaagctgtggtatggacagatgcattccaaatggtggtgatgatcgtcggcttccttaccgttctcatccaagggagtactcatgcaggaggcttccataatgtgctggagcagtctactaatgggagtagactacatatattcgacttcgacgtggatccattaagacggcatactttttggactattacagtaggaggcacatttacttggcttggcatctatggagtgaaccagagcaccatccagcggtgtatttcatgtaagactgaaaagcacgcaaagctggccctctactttaatctactgggcctgtggatcattctcgtgtgtgccgtgttttctgggctgataatgtacagccactttaaagattgcgatccatggacatcaggcattatctccgcgccagatcagctgatgccttatttcgtgatggagattttcgctaccatgcctggccttccaggtctgttcgtagcctgcgctttcagtggcactctctcaacagttgcttcatcaatcaatgccctggccactgtgactttcgaggactttgttaaaagttgttttcctcacctgtctgacaaactatcaacctggattagtaaagggctgtgcaggtactcatggtggaccttctattccattagctag

SEQ ID NO: 291588 - DNA, 1191 bp, Artificial Sequence
  derived and/or modified sequence
atggaggttaagaattttgccgtgtgggattacgttgtgttcgctgccctgtttttcataagctctggcatcggagtgtttttcgctattaaagaacgaaagaaagcgacttccagggagtttttagtcgggggtcgccagatgtccttcggcccagttggattgtcactgactgcatcatttatgagtgccgtgaccgtgcttgggaccccctccgaggtataccgctttggagcttctttcctcgttttttttatcgcctacttgttcgttattcttctgacctctgagctgtttctccctgtgttctataggtctggaattacctccacctacgaatacttgcagctgagatttaacaagcctgtgcgttatgccgcaacggtgatctatattgtgcagacaatcctctacactggcgtagtggtctatgctccggcactcgcccttaatcaagtcacgggatttgatctctggggctcagtcttcgccactggtatcgtctgcaccttctactgtaccttgggaggcctgaaagctgtggtgtggacggacgctttccagatggtggttatgatcgtgggctttctcactgtactgatccagggttcaacccacgcaggcggatttcataacgtgctggagcagtcgaccaacggttccagactgcacatttttgattttgacgtggatccacttcgcaggcatacattctggaccattaccgtgggtggcacattcacttggctgggcatctatggcgttaatcagtctactattcaacggtgtatctcctgcaagaccgagaagcacgcaaaattggccctctatttcaacctgttgggattatggatcattctggtgtgcgctgtattctcaggactgatcatgtacagtcactttaaagattgtgacccatggacttccggcattatcagcgcgcctgatcagctgatgccttattttgtgatggagatctttgctaccatgcctggattgcctggattgtttgttgcctgtgcgttcagtgggaccctcagtaccgtcgcaagcagtatcaacgcactggctacggtgacgtttgaagacttcgtcaagtcttgctttcctcacttatctgacaagttgtccacttggatttccaaagggctgtgtagatattcttggtggacattctattccataagctag

SEQ ID NO: 291589 - DNA, 2269 bp, Artificial Sequence
  derived and/or modified sequence
ctttaggagaggagcagacagctcttagctagggtcagatttcaaattctcatctcttggtgccaataccaccaccagattcttctttgaagtcaacttttgagatcttcactaagtacacgttggtgtctgaagattcacacgagtgcctctggtaatcattttcttcagggaatcacagtctctcctctcagcaaagcatccactgtactgaactttgcttttggaaacatcttcttcctgagacctcgttgaaagaaactctctggtgtcatactttccaatatggaggtgaagaactttgcagtttgggattatgttgtatttgcagccctctttttcatttcctctggaattggggtgttctttgccattaaggagagaaaaaaggcaacttcccgagagttcctggttgggggaaggcaaatgagctttggccctgtcggcttgtctctgacagccagcttcatgtcagctgtcacggtcctggggaccccttctgaagtctaccgctttggggcatccttcctagtcttcttcattgcttacctatttgtcatcctcttaacatcagagctctttctccctgtgttctacagatctggtatcaccagcacttatgagtacttacaactacgattcaacaaaccagttcgctatgctgccacggtcatctacattgtacagacgattctctacacaggagtggtggtgtatgctcctgccctggcactcaatcaagtgactgggtttgatctctggggctctgtgtttgcaacaggaattgtttgcacattctactgtaccctgggaggattaaaagcagtggtgtggacagatgcatttcagatggttgtcatgattgtgggcttcttaacggttctcattcaaggatcaactcatgctgggggattccacaatgtattagagcaatcaacaaatggatctcgactacatatatttgactttgatgtagatcctctcaggcgacacactttttggactatcacagtgggaggaacttttacttggctcggaatctatggggtcaatcaatcaactattcagcgatgcatctcttgcaaaacagaaaagcatgctaagcttgccttgtattttaacttgctgggtctctggatcattctggtgtgtgctgtcttctctggcttaatcatgtactctcactttaaagactgtgacccttggacttctggcatcatctcagcaccagaccagctgatgccgtactttgtcatggagatatttgccacaatgccaggactgccaggactttttgtggcttgtgccttcagtggaactctgagcaccgtggcttccagcatcaatgccttggcaacagtgacctttgaggattttgtcaagagctgttttcctcatctctccgacaagctgagcacctggatcagtaaaggcttatgtaggtacagctggtggactttctattccatatcatgaaatgtacatgtggtagatgtcaaaatcctgcatgtgctattcaggacacacttataaacacaaatgcactgtgagatatgtgaagaatcccacacatagattcttacacttccaaagatccagcagggtatcaggaaagaatgactagctagtttaccttaactgcctttattttcagatactcttctatacttaccctacactctagacgaggcttatccaacccacggcctgtgggccgcatacggcccaggatggctttgaatgcagcccaacacaaattcgtaaactttcttaaaacattctggaatttttttgtaattttttaaatcttagcagctatcattagtgtttgtgtattttatgtgtactccaaggcaactccttctttcaacgtggcccagggaggccaaaagattggacacccctgcaaactaatcacatcaatctctcttgattacactgtgtgatggtcatattagtctctctacatgggaagatgttgtgcttactatggccagtcactttgacaaagaaaagccaaattcttttctaaagaattgttccttattaccaaactcccagtaaccccctcaaagaataattgccccttgcttaatcatgcaattgcatattatgtttatactcacttcagcacttatcagagataattgcagtttcacaaggtttactttttaaagtataaacaaattatgtatttacttactaatagaaaatataggtaatttggggaaatttatgtacattgttaaataaaattatatctatctaa

SEQ ID NO: 291590 - protein, 170 aa, Artificial Sequence
  derived and/or modified sequence
MYCQFASFQYTCQPCRGQRMLCTRDSECCGDQLCVWGHCTKMATRGSNGTICDNQRDCQPGLCCAFQRGLLFPVCTPLPVEGELCHDPASRLLDLITWELEPDGALDRCPCASGLLCQPHSHSLVYVCKPTFVGSRDQDGEILLPREVPDEYLAASWRRCARSWRTWRGA

SEQ ID NO: 291591 - protein, 350 aa, Artificial Sequence
  derived and/or modified sequence
MQRLGATLLCLLLAAAVPTAPAPAPTATSAPVKPGPALSYPQEEATLNEMFREVEELMEDTQHKLRSAVEEMEAEEAAAKASSEVNLANLPPSYHNETNTDTKVGNNTIHVHREIHKITNNQTGQMVFSETVITSVGDEEGRRSHECIIDEDCGPSMYCQFASFQYTCQPCRGQRMLCTRDSECCGDQLCVWGHCTKMATRGSNGTICDNQRDCQPGLCCAFQRGLLFPVCTPLPVEGELCHDPASRLLDLITWELEPDGALDRCPCASGLLCQPHSHSLVYVCKPTFVGSRDQDGEILLPREVPDEYEVGSFMEEVRQELEDLERSLTEEMALREPAAAAAALLGGEEI

SEQ ID NO: 291592 - protein, 293 aa, Artificial Sequence
  derived and/or modified sequence
MEDTQHKLRSAVEEMEAEEAAAKASSEVNLANLPPSYHNETNTDTKVGNNTIHVHREIHKITNNQTGQMVFSETVITSVGDEEGRRSHECIIDEDCGPSMYCQFASFQYTCQPCRGQRMLCTRDSECCGDQLCVWGHCTKMATRGSNGTICDNQRDCQPGLCCAFQRGLLFPVCTPLPVEGELCHDPASRLLDLITWELEPDGALDRCPCASGLLCQPHSHSLVYVCKPTFVGSRDQDGEILLPREVPDEYEVGSFMEEVRQELEDLERSLTEEMALREPAAAAAALLGGEEI

SEQ ID NO: 291593 - protein, 322 aa, Artificial Sequence
  derived and/or modified sequence
MQRLGATLLCLLLAAAVPTAPAPAPTATSAPVKPGPALSYPQEEATLNEMFREVEELMEDTQHKLRSAVEEMEAEEAAAKASSEVNLANLPPSYHNETNTDTKVGNNTIHVHREIHKECIIDEDCGPSMYCQFASFQYTCQPCRGQRMLCTRDSECCGDQLCVWGHCTKMATRGSNGTICDNQRDCQPGLCCAFQRGLLFPVCTPLPVEGELCHDPASRLLDLITWELEPDGALDRCPCASGLLCQPHSHSLVYVCKPTFVGSRDQDGEILLPREVPDEYEVGSFMEEVRQELEDLERSLTEEMALREPAAAAAALLGGEEI

SEQ ID NO: 291594 - protein, 235 aa, Artificial Sequence
  derived and/or modified sequence
MQRLGATLLCLLLAAAVPTAPAPAPTATSAPVKPGPALSYPQEEATLNEMFREVEELMEDTQHKLRSAVEEMEAEEAAAKASSEVNLANLPPSYHNETNTDTKVGNNTIHVHREIHKITNNQTGQMVFSETVITSVGDEEGRRSHECIIDEDCGPSMYCQFASFQYTCQPCRGQRMLCTRDSECCGDQLCVWGHCTKMATRGSNGTICDNQRDCQPGLCCAFQRGLLFPVCTPLP

SEQ ID NO: 291595 - DNA, 513 bp, Artificial Sequence
  derived and/or modified sequence
atgtactgccagttcgccagcttccagtacacctgccagccctgcagaggccagagaatgctgtgcaccagagacagcgagtgctgcggcgaccagctgtgcgtgtggggccactgcaccaagatggccaccagaggcagcaacggcaccatctgcgacaaccagagagactgccagcccggcctgtgctgcgccttccagagaggcctgctgttccccgtgtgcacccccctgcccgtggagggcgagctgtgccacgaccccgccagcagactgctggacctgatcacctgggagctggagcccgacggcgccctggacagatgcccctgcgccagcggcctgctgtgccagccccacagccacagcctggtgtacgtgtgcaagcccaccttcgtgggcagcagagaccaggacggcgagatcctgctgcccagagaggtgcccgacgagtacctggccgccagctggagaagatgcgccagaagctggagaacctggagaggcgcctag

SEQ ID NO: 291596 - DNA, 1053 bp, Artificial Sequence
  derived and/or modified sequence
atgcagagactgggcgccaccctgctgtgcctgctgctggccgccgccgtgcccaccgcccccgcccccgcccccaccgccaccagcgcccccgtgaagcccggccccgccctgagctacccccaggaggaggccaccctgaacgagatgttcagagaggtggaggagctgatggaggacacccagcacaagctgagaagcgccgtggaggagatggaggccgaggaggccgccgccaaggccagcagcgaggtgaacctggccaacctgccccccagctaccacaacgagaccaacaccgacaccaaggtgggcaacaacaccatccacgtgcacagagagatccacaagatcaccaacaaccagaccggccagatggtgttcagcgagaccgtgatcaccagcgtgggcgacgaggagggcagaagaagccacgagtgcatcatcgacgaggactgcggccccagcatgtactgccagttcgccagcttccagtacacctgccagccctgcagaggccagagaatgctgtgcaccagagacagcgagtgctgcggcgaccagctgtgcgtgtggggccactgcaccaagatggccaccagaggcagcaacggcaccatctgcgacaaccagagagactgccagcccggcctgtgctgcgccttccagagaggcctgctgttccccgtgtgcacccccctgcccgtggagggcgagctgtgccacgaccccgccagcagactgctggacctgatcacctgggagctggagcccgacggcgccctggacagatgcccctgcgccagcggcctgctgtgccagccccacagccacagcctggtgtacgtgtgcaagcccaccttcgtgggcagcagagaccaggacggcgagatcctgctgcccagagaggtgcccgacgagtacgaggtgggcagcttcatggaggaggtgagacaggagctggaggacctggagagaagcctgaccgaggagatggccctgagagagcccgccgccgccgccgccgccctgctgggcggcgaggagatctag

SEQ ID NO: 291597 - DNA, 882 bp, Artificial Sequence
  derived and/or modified sequence
atggaggacacccagcacaagctgagaagcgccgtggaggagatggaggccgaggaggccgccgccaaggccagcagcgaggtgaacctggccaacctgccccccagctaccacaacgagaccaacaccgacaccaaggtgggcaacaacaccatccacgtgcacagagagatccacaagatcaccaacaaccagaccggccagatggtgttcagcgagaccgtgatcaccagcgtgggcgacgaggagggcagaagaagccacgagtgcatcatcgacgaggactgcggccccagcatgtactgccagttcgccagcttccagtacacctgccagccctgcagaggccagagaatgctgtgcaccagagacagcgagtgctgcggcgaccagctgtgcgtgtggggccactgcaccaagatggccaccagaggcagcaacggcaccatctgcgacaaccagagagactgccagcccggcctgtgctgcgccttccagagaggcctgctgttccccgtgtgcacccccctgcccgtggagggcgagctgtgccacgaccccgccagcagactgctggacctgatcacctgggagctggagcccgacggcgccctggacagatgcccctgcgccagcggcctgctgtgccagccccacagccacagcctggtgtacgtgtgcaagcccaccttcgtgggcagcagagaccaggacggcgagatcctgctgcccagagaggtgcccgacgagtacgaggtgggcagcttcatggaggaggtgagacaggagctggaggacctggagagaagcctgaccgaggagatggccctgagagagcccgccgccgccgccgccgccctgctgggcggcgaggagatctag

SEQ ID NO: 291598 - DNA, 969 bp, Artificial Sequence
  derived and/or modified sequence
atgcagagactgggcgccaccctgctgtgcctgctgctggccgccgccgtgcccaccgcccccgcccccgcccccaccgccaccagcgcccccgtgaagcccggccccgccctgagctacccccaggaggaggccaccctgaacgagatgttcagagaggtggaggagctgatggaggacacccagcacaagctgagaagcgccgtggaggagatggaggccgaggaggccgccgccaaggccagcagcgaggtgaacctggccaacctgccccccagctaccacaacgagaccaacaccgacaccaaggtgggcaacaacaccatccacgtgcacagagagatccacaaggagtgcatcatcgacgaggactgcggccccagcatgtactgccagttcgccagcttccagtacacctgccagccctgcagaggccagagaatgctgtgcaccagagacagcgagtgctgcggcgaccagctgtgcgtgtggggccactgcaccaagatggccaccagaggcagcaacggcaccatctgcgacaaccagagagactgccagcccggcctgtgctgcgccttccagagaggcctgctgttccccgtgtgcacccccctgcccgtggagggcgagctgtgccacgaccccgccagcagactgctggacctgatcacctgggagctggagcccgacggcgccctggacagatgcccctgcgccagcggcctgctgtgccagccccacagccacagcctggtgtacgtgtgcaagcccaccttcgtgggcagcagagaccaggacggcgagatcctgctgcccagagaggtgcccgacgagtacgaggtgggcagcttcatggaggaggtgagacaggagctggaggacctggagagaagcctgaccgaggagatggccctgagagagcccgccgccgccgccgccgccctgctgggcggcgaggagatctag

SEQ ID NO: 291599 - DNA, 708 bp, Artificial Sequence
  derived and/or modified sequence
atgcagagactgggcgccaccctgctgtgcctgctgctggccgccgccgtgcccaccgcccccgcccccgcccccaccgccaccagcgcccccgtgaagcccggccccgccctgagctacccccaggaggaggccaccctgaacgagatgttcagagaggtggaggagctgatggaggacacccagcacaagctgagaagcgccgtggaggagatggaggccgaggaggccgccgccaaggccagcagcgaggtgaacctggccaacctgccccccagctaccacaacgagaccaacaccgacaccaaggtgggcaacaacaccatccacgtgcacagagagatccacaagatcaccaacaaccagaccggccagatggtgttcagcgagaccgtgatcaccagcgtgggcgacgaggagggcagaagaagccacgagtgcatcatcgacgaggactgcggccccagcatgtactgccagttcgccagcttccagtacacctgccagccctgcagaggccagagaatgctgtgcaccagagacagcgagtgctgcggcgaccagctgtgcgtgtggggccactgcaccaagatggccaccagaggcagcaacggcaccatctgcgacaaccagagagactgccagcccggcctgtgctgcgccttccagagaggcctgctgttccccgtgtgcacccccctgccctag

SEQ ID NO: 291600 - DNA, 1206 bp, Artificial Sequence
  derived and/or modified sequence
ggcggagagggagcctggtgggcgggcggggcgcgtcttgcgggctccctcgggtaccggcgctgccgcaccccgccgcgctcccgcacccgcggcccgcccaccgcgccgctcccgcatctgcacccgcagcccggcggcctcccggcgggagcgagcagatccagtccggcccgcagcgcaactcggtccagtcggggcggcggctgcgggcgcagagcggagatgcagcggcttggggccaccctgctgtgcctgctgctggcggcggcggtccccacggcccccgcgcccgctccgacggcgacctcggctccagtcaagcccggcccggctctcagctacccgcaggaggaggccaccctcaatgagatgttccgcgaggttgaggaactgatggaggacacgcagcacaaattgcgcagcgcggtggaagagatggaggcagaagaagctgctgctaaagcatcatcagaagtgaacctggcaaacttacctcccagctatcacaatgagaccaacacagacacgaaggttggaaataataccatccatgtgcaccgagaaattcacaagataaccaacaaccagactggacaaatggtcttttcagagacagttatcacatctgtgggagacgaagaaggcagaaggagccacgagtgcatcatcgacgaggactgtgggcccagcatgtactgccagtttgccagcttccagtacacctgccagccatgccggggccagaggatgctctgcacccgggacagtgagtgctgtggagaccagctgtgtgtctggggtcactgcaccaaaatggccaccaggggcagcaatgggaccatctgtgacaaccagagggactgccagccggggctgtgctgtgccttccagagaggcctgctgttccctgtgtgcacacccctgcccgtggagggcgagctttgccatgaccccgccagccggcttctggacctcatcacctgggagctagagcctgatggagccttggaccgatgcccttgtgccagtggcctcctctgccagccccacagccacagcctggtgtatgtgtgcaagccgaccttcgtggggagccgtgaccaagatggggagatcctgctgcccagagaggtccccgatgagtatttggcagcttcatggaggaggtgcgccaggagctggaggacctggagaggagcctga

SEQ ID NO: 291601 - DNA, 2636 bp, Artificial Sequence
  derived and/or modified sequence
ggcggagagggagcctggtgggcgggcggggcgcgtcttgcgggctccctcgggtaccggcgctgccgcaccccgccgcgctcccgcacccgcggcccgcccaccgcgccgctcccgcatctgcacccgcagcccggcggcctcccggcgggagcgagcagatccagtccggcccgcagcgcaactcggtccagtcggggcggcggctgcgggcgcagagcggagatgcagcggcttggggccaccctgctgtgcctgctgctggcggcggcggtccccacggcccccgcgcccgctccgacggcgacctcggctccagtcaagcccggcccggctctcagctacccgcaggaggaggccaccctcaatgagatgttccgcgaggttgaggaactgatggaggacacgcagcacaaattgcgcagcgcggtggaagagatggaggcagaagaagctgctgctaaagcatcatcagaagtgaacctggcaaacttacctcccagctatcacaatgagaccaacacagacacgaaggttggaaataataccatccatgtgcaccgagaaattcacaagataaccaacaaccagactggacaaatggtcttttcagagacagttatcacatctgtgggagacgaagaaggcagaaggagccacgagtgcatcatcgacgaggactgtgggcccagcatgtactgccagtttgccagcttccagtacacctgccagccatgccggggccagaggatgctctgcacccgggacagtgagtgctgtggagaccagctgtgtgtctggggtcactgcaccaaaatggccaccaggggcagcaatgggaccatctgtgacaaccagagggactgccagccggggctgtgctgtgccttccagagaggcctgctgttccctgtgtgcacacccctgcccgtggagggcgagctttgccatgaccccgccagccggcttctggacctcatcacctgggagctagagcctgatggagccttggaccgatgcccttgtgccagtggcctcctctgccagccccacagccacagcctggtgtatgtgtgcaagccgaccttcgtggggagccgtgaccaagatggggagatcctgctgcccagagaggtccccgatgagtatgaagttggcagcttcatggaggaggtgcgccaggagctggaggacctggagaggagcctgactgaagagatggcgctgagggagcctgcggctgccgccgctgcactgctgggaggggaagagatttagatctggaccaggctgtgggtagatgtgcaatagaaatagctaatttatttccccaggtgtgtgctttaggcgtgggctgaccaggcttcttcctacatcttcttcccagtaagtttcccctctggcttgacagcatgaggtgttgtgcatttgttcagctcccccaggctgttctccaggcttcacagtctggtgcttgggagagtcaggcagggttaaactgcaggagcagtttgccacccctgtccagattattggctgctttgcctctaccagttggcagacagccgtttgttctacatggctttgataattgtttgaggggaggagatggaaacaatgtggagtctccctctgattggttttggggaaatgtggagaagagtgccctgctttgcaaacatcaacctggcaaaaatgcaacaaatgaattttccacgcagttctttccatgggcataggtaagctgtgccttcagctgttgcagatgaaatgttctgttcaccctgcattacatgtgtttattcatccagcagtgttgctcagctcctacctctgtgccagggcagcattttcatatccaagatcaattccctctctcagcacagcctggggagggggtcattgttctcctcgtccatcagggatctcagaggctcagagactgcaagctgcttgcccaagtcacacagctagtgaagaccagagcagtttcatctggttgtgactctaagctcagtgctctctccactaccccacaccagccttggtgccaccaaaagtgctccccaaaaggaaggagaatgggatttttcttttgaggcatgcacatctggaattaaggtcaaactaattctcacatccctctaaaagtaaactactgttaggaacagcagtgttctcacagtgtggggcagccgtccttctaatgaagacaatgatattgacactgtccctctttggcagttgcattagtaactttgaaaggtatatgactgagcgtagcatacaggttaacctgcagaaacagtacttaggtaattgtagggcgaggattataaatgaaatttgcaaaatcacttagcagcaactgaagacaattatcaaccacgtggagaaaatcaaaccgagcagggctgtgtgaaacatggttgtaatatgcgactgcgaacactgaactctacgccactccacaaatgatgttttcaggtgtcatggactgttgccaccatgtattcatccagagttcttaaagtttaaagttgcacatgattgtataagcatgctttctttgagttttaaattatgtataaacataagttgcatttagaaatcaagcataaatcacttcaactgct

SEQ ID NO: 291602 - DNA, 2426 bp, Artificial Sequence
  derived and/or modified sequence
gatcgcgttccgggacacacaggcggcggctgcgggcgcagagcggagatgcagcggcttggggccaccctgctgtgcctgctgctggcggcggcggtccccacggcccccgcgcccgctccgacggcgacctcggctccagtcaagcccggcccggctctcagctacccgcaggttgaggaactgatggaggacacgcagcacaaattgcgcagcgcggtggaagagatggaggcagaagaagctgctgctaaagcatcatcagaagtgaacctggcaaacttacctcccagctatcacaatgagaccaacacagacacgaaggttggaaataataccatccatgtgcaccgagaaattcacaagataaccaacaaccagactggacaaatggtcttttcagagacagttatcacatctgtgggagacgaagaaggcagaaggagccacgagtgcatcatcgacgaggactgtgggcccagcatgtactgccagtttgccagcttccagtacacctgccagccatgccggggccagaggatgctctgcacccgggacagtgagtgctgtggagaccagctgtgtgtctggggtcactgcaccaaaatggccaccaggggcagcaatgggaccatctgtgacaaccagagggactgccagccggggctgtgctgtgccttccagagaggcctgctgttccctgtgtgcacacccctgcccgtggagggcgagctttgccatgaccccgccagccggcttctggacctcatcacctgggagctagagcctgatggagccttggaccgatgcccttgtgccagtggcctcctctgccagccccacagccacagcctggtgtatgtgtgcaagccgaccttcgtggggagccgtgaccaagatggggagatcctgctgcccagagaggtccccgatgagtatgaagttggcagcttcatggaggaggtgcgccaggagctggaggacctggagaggagcctgactgaagagatggcgctgagggagcctgcggctgccgccgctgcactgctgggaggggaagagatttagatctggaccaggctgtgggtagatgtgcaatagaaatagctaatttatttccccaggtgtgtgctttaggcgtgggctgaccaggcttcttcctacatcttcttcccagtaagtttcccctctggcttgacagcatgaggtgttgtgcatttgttcagctcccccaggctgttctccaggcttcacagtctggtgcttgggagagtcaggcagggttaaactgcaggagcagtttgccacccctgtccagattattggctgctttgcctctaccagttggcagacagccgtttgttctacatggctttgataattgtttgaggggaggagatggaaacaatgtggagtctccctctgattggttttggggaaatgtggagaagagtgccctgctttgcaaacatcaacctggcaaaaatgcaacaaatgaattttccacgcagttctttccatgggcataggtaagctgtgccttcagctgttgcagatgaaatgttctgttcaccctgcattacatgtgtttattcatccagcagtgttgctcagctcctacctctgtgccagggcagcattttcatatccaagatcaattccctctctcagcacagcctggggagggggtcattgttctcctcgtccatcagggatctcagaggctcagagactgcaagctgcttgcccaagtcacacagctagtgaagaccagagcagtttcatctggttgtgactctaagctcagtgctctctccactaccccacaccagccttggtgccaccaaaagtgctccccaaaaggaaggagaatgggatttttcttttgaggcatgcacatctggaattaaggtcaaactaattctcacatccctctaaaagtaaactactgttaggaacagcagtgttctcacagtgtggggcagccgtccttctaatgaagacaatgatattgacactgtccctctttggcagttgcattagtaactttgaaaggtatatgactgagcgtagcatacaggttaacctgcagaaacagtacttaggtaattgtagggcgaggattataaatgaaatttgcaaaatcacttagcagcaactgaagacaattatcaaccacgtggagaaaatcaaaccgagcagggctgtgtgaaacatggttgtaatatgcgactgcgaacactgaactctacgccactccacaaatgatgttttcaggtgtcatggactgttgccaccatgtattcatccagagttcttaaagtttaaagttgcacatgattgtataagcatgctttctttgagttttaaattatgtataaacataagttgcatttagaaatcaagcataaatcacttcaactgct

SEQ ID NO: 291603 - DNA, 2650 bp, Artificial Sequence
  derived and/or modified sequence
cgacgccaaggggagggggctgacctgtgcttggtccaccccaggtaggggctgagagaggcttgaggtggaagtgggggtcgggcactctgacctggtcgaggaggggctagggtttgaaccggggacagagtctaggtgagctggggcttgggagctattagcgtagaggatccgggttcggttgctctggcgagggctccagcatcacaggcggcggctgcgggcgcagagcggagatgcagcggcttggggccaccctgctgtgcctgctgctggcggcggcggtccccacggcccccgcgcccgctccgacggcgacctcggctccagtcaagcccggcccggctctcagctacccgcaggaggaggccaccctcaatgagatgttccgcgaggttgaggaactgatggaggacacgcagcacaaattgcgcagcgcggtggaagagatggaggcagaagaagctgctgctaaagcatcatcagaagtgaacctggcaaacttacctcccagctatcacaatgagaccaacacagacacgaaggttggaaataataccatccatgtgcaccgagaaattcacaagataaccaacaaccagactggacaaatggtcttttcagagacagttatcacatctgtgggagacgaagaaggcagaaggagccacgagtgcatcatcgacgaggactgtgggcccagcatgtactgccagtttgccagcttccagtacacctgccagccatgccggggccagaggatgctctgcacccgggacagtgagtgctgtggagaccagctgtgtgtctggggtcactgcaccaaaatggccaccaggggcagcaatgggaccatctgtgacaaccagagggactgccagccggggctgtgctgtgccttccagagaggcctgctgttccctgtgtgcacacccctgcccgtggagggcgagctttgccatgaccccgccagccggcttctggacctcatcacctgggagctagagcctgatggagccttggaccgatgcccttgtgccagtggcctcctctgccagccccacagccacagcctggtgtatgtgtgcaagccgaccttcgtggggagccgtgaccaagatggggagatcctgctgcccagagaggtccccgatgagtatgaagttggcagcttcatggaggaggtgcgccaggagctggaggacctggagaggagcctgactgaagagatggcgctgagggagcctgcggctgccgccgctgcactgctgggaggggaagagatttagatctggaccaggctgtgggtagatgtgcaatagaaatagctaatttatttccccaggtgtgtgctttaggcgtgggctgaccaggcttcttcctacatcttcttcccagtaagtttcccctctggcttgacagcatgaggtgttgtgcatttgttcagctcccccaggctgttctccaggcttcacagtctggtgcttgggagagtcaggcagggttaaactgcaggagcagtttgccacccctgtccagattattggctgctttgcctctaccagttggcagacagccgtttgttctacatggctttgataattgtttgaggggaggagatggaaacaatgtggagtctccctctgattggttttggggaaatgtggagaagagtgccctgctttgcaaacatcaacctggcaaaaatgcaacaaatgaattttccacgcagttctttccatgggcataggtaagctgtgccttcagctgttgcagatgaaatgttctgttcaccctgcattacatgtgtttattcatccagcagtgttgctcagctcctacctctgtgccagggcagcattttcatatccaagatcaattccctctctcagcacagcctggggagggggtcattgttctcctcgtccatcagggatctcagaggctcagagactgcaagctgcttgcccaagtcacacagctagtgaagaccagagcagtttcatctggttgtgactctaagctcagtgctctctccactaccccacaccagccttggtgccaccaaaagtgctccccaaaaggaaggagaatgggatttttcttttgaggcatgcacatctggaattaaggtcaaactaattctcacatccctctaaaagtaaactactgttaggaacagcagtgttctcacagtgtggggcagccgtccttctaatgaagacaatgatattgacactgtccctctttggcagttgcattagtaactttgaaaggtatatgactgagcgtagcatacaggttaacctgcagaaacagtacttaggtaattgtagggcgaggattataaatgaaatttgcaaaatcacttagcagcaactgaagacaattatcaaccacgtggagaaaatcaaaccgagcagggctgtgtgaaacatggttgtaatatgcgactgcgaacactgaactctacgccactccacaaatgatgttttcaggtgtcatggactgttgccaccatgtattcatccagagttcttaaagtttaaagttgcacatgattgtataagcatgctttctttgagttttaaattatgtataaacataagttgcatttagaaatcaagcataaatcacttcaactgct

SEQ ID NO: 291604 - DNA, 1003 bp, Artificial Sequence
  derived and/or modified sequence
gatgcagcggcttggggccaccctgctgtgcctgctgctggcggcggcggtccccacggcccccgcgcccgctccgacggcgacctcggctccagtcaagcccggcccggctctcagctacccgcaggaggaggccaccctcaatgagatgttccgcgaggttgaggaactgatggaggacacgcagcacaaattgcgcagcgcggtggaagagatggaggcagaagaagctgctgctaaagcatcatcagaagtgaacctggcaaacttacctcccagctatcacaatgagaccaacacagacacgaaggttggaaataataccatccatgtgcaccgagaaattcacaaggagtgcatcatcgacgaggactgtgggcccagcatgtactgccagtttgccagcttccagtacacctgccagccatgccggggccagaggatgctctgcacccgggacagtgagtgctgtggagaccagctgtgtgtctggggtcactgcaccaaaatggccaccaggggcagcaatgggaccatctgtgacaaccagagggactgccagccggggctgtgctgtgccttccagagaggcctgctgttccctgtgtgcacacccctgcccgtggagggcgagctttgccatgaccccgccagccggcttctggacctcatcacctgggagctagagcctgatggagccttggaccgatgcccttgtgccagtggcctcctctgccagccccacagccacagcctggtgtatgtgtgcaagccgaccttcgtggggagccgtgaccaagatggggagatcctgctgcccagagaggtccccgatgagtatgaagttggcagcttcatggaggaggtgcgccaggagctggaggacctggagaggagcctgactgaagagatggcgctgagggagcctgcggctgccgccgctgcactgctgggaggggaagagatttagatctggaccaggctgtgggtagatgtgcaatag

SEQ ID NO: 291605 - DNA, 903 bp, Artificial Sequence
  derived and/or modified sequence
agatccagtccggcccgcagcgcaactcggtccagtcggggtgggtgaggggcggcggcgggggaggggacgactctgctgagctcagcctctcttggtggatgtggggcggggcgctcgagtaggacccgacgccaaggggagggggctgacctgtgcttggtccaccccaggcggcggctgcgggcgcagagcggagatgcagcggcttggggccaccctgctgtgcctgctgctggcggcggcggtccccacggcccccgcgcccgctccgacggcgacctcggctccagtcaagcccggcccggctctcagctacccgcaggaggaggccaccctcaatgagatgttccgcgaggttgaggaactgatggaggacacgcagcacaaattgcgcagcgcggtggaagagatggaggcagaagaagctgctgctaaagcatcatcagaagtgaacctggcaaacttacctcccagctatcacaatgagaccaacacagacacgaaggttggaaataataccatccatgtgcaccgagaaattcacaagataaccaacaaccagactggacaaatggtcttttcagagacagttatcacatctgtgggagacgaagaaggcagaaggagccacgagtgcatcatcgacgaggactgtgggcccagcatgtactgccagtttgccagcttccagtacacctgccagccatgccggggccagaggatgctctgcacccgggacagtgagtgctgtggagaccagctgtgtgtctggggtcactgcaccaaaatggccaccaggggcagcaatgggaccatctgtgacaaccagagggactgccagccggggctgtgctgtgccttccagagaggcctgctgttccctgtgtgcacacccctgcc

SEQ ID NO: 291606 - DNA, 513 bp, Artificial Sequence
  derived and/or modified sequence
atgtactgccagttcgccagttttcagtacacatgccagccatgccgggggcagcgaatgttgtgcacccgggattcggagtgctgtggcgatcaactgtgcgtctggggacactgcaccaagatggctacaagaggctccaacggcaccatctgcgataatcagcgagactgccagccaggcctgtgctgtgcttttcagcgaggcctgctttttccagtctgtacccccctgccagtagaaggcgagctgtgccatgaccccgcctcgcgtctcctggatctgattacttgggaactggaaccggacggagcactcgaccgctgcccttgtgcatccggtcttctgtgtcaaccgcatagtcactccctcgtgtacgtatgtaaacccaccttcgtggggagcagggaccaggatggggaaatactgttgcccagggaggtgcctgatgaatacctggccgctagttggagacgctgtgcaagatcttggaggacttggcgcggcgcctag

SEQ ID NO: 291607 - DNA, 1053 bp, Artificial Sequence
  derived and/or modified sequence
atgcaacggctcggggcaactctgctatgcctgctccttgcagccgcggttcccacagccccggctcctgctccgaccgccacttctgccccagttaagcccggccctgccctctcatatccccaagaagaggccactcttaatgagatgttccgggaggtcgaggagttgatggaagatacacaacacaagctaaggagtgcagtcgaagaaatggaagccgaggaagcggccgcgaaagcatcttcggaagtgaacctcgctaacctgcctccttcttaccataacgagacaaacactgacaccaaggtcggcaataatacgatccatgttcaccgagaaatccataagattaccaacaatcagaccggccagatggtgttttcagagacagtgattactagtgtgggagatgaagaggggcggcgctctcatgagtgcataatagacgaggactgcggaccgagcatgtactgccagtttgcatccttccagtacacttgccaaccgtgcagaggccagcgaatgttgtgcacacgagacagcgaatgttgcggggatcagctgtgcgtctgggggcactgtaccaagatggccacccgtgggagcaacggaactatctgcgacaatcagcgggattgccagcccggcctgtgctgtgccttccagagagggctgttgtttcccgtgtgcactcccctgcctgtggagggagaactttgtcatgatcctgcgtcccgactgttggacttaattacttgggaactggagcctgacggcgctcttgataggtgtccgtgcgcaagcggcctcctctgtcagcctcacagtcacagcttagtgtacgtgtgtaagcctaccttcgtcggttcacgggaccaggacggtgagattctgcttccgagagaagttcccgatgagtacgaggtggggtcttttatggaagaagtgcgtcaagaattagaagacctcgaacgctcattaaccgaggagatggcattaagggagcctgccgccgccgcagcggccctgttggggggcgaagagatttag

SEQ ID NO: 291608 - DNA, 882 bp, Artificial Sequence
  derived and/or modified sequence
atggaagatactcagcacaagctgagatctgcagtggaagaaatggaagccgaggaggccgccgccaaggcaagttccgaggtgaacttggctaatctcccgccgagctaccataacgaaactaacactgatactaaggttggaaataataccatacacgtacaccgggaaattcacaagattacaaataaccagaccggccaaatggtgttttccgaaactgtgattacttcagtgggggacgaagagggtcgcagaagccacgagtgtatcatcgatgaggattgcggcccctccatgtactgtcagtttgcctcctttcaatatacatgccaaccatgccgaggccagcggatgctgtgtactcgagatagcgaatgttgcggcgaccaactatgcgtgtgggggcactgcactaaaatggccactaggggatccaacgggacgatctgtgacaaccaaagagattgccagcctggcctatgttgtgccttccaacggggcttgctgttccccgtgtgtactccattgcccgtggaaggtgaattgtgtcacgaccctgcatctcgtctcttagatttaatcacatgggagctggaacccgatggagccctggatagatgcccgtgtgcctccgggctgctatgtcagcctcactcgcacagtttagtgtacgtctgtaagccaacctttgtcggaagtagagaccaggatggcgagattcttttgccaagggaggttcccgatgagtacgaagtgggatcattcatggaggaagtgagacaagaactagaagatctggagcgtagtctgactgaggagatggccttgagggagcccgcggccgccgccgcggctctactgggaggggaagagatttag

SEQ ID NO: 291609 - DNA, 1053 bp, Artificial Sequence
  derived and/or modified sequence
atgcaacgtttaggcgctaccctcctgtgtctcctactggctgccgcagtgcccactgcaccagcacccgcacccaccgcaacgtcggcgcccgtgaagccgggacctgcactatcttacccccaggaggaagccactctcaacgaaatgttcagagaggttgaggaactgatggaagatacgcaacataaactgcgaagcgccgtagaggaaatggaggcagaggaggccgctgcaaaagctagctcagaggtgaatctcgcgaacctgcccccttcatatcataatgagacaaataccgataccaaggtgggaaacaacaccatccatgtacacagggaaatccacaagattacgaataaccaaactggccaaatggtgtttagtgagaccgtgatcacctccgtgggtgatgaggagggaaggagatcccatgaatgcatcatcgacgaagactgcggcccatcaatgtactgtcagttcgcgagtttccaatacacctgccagccctgccgcggacagagaatgttatgcacccgggacagtgaatgttgcggagaccagttgtgcgtatggggccactgcacaaagatggcaacacggggctccaacggaaccatttgtgacaaccagagggattgccagccaggcctgtgctgcgcctttcagcgcggcttgctcttccccgtgtgtacccccctgcccgtggagggtgaattatgccacgacccagcttcgaggctgttagacctcataacatgggagcttgaacctgacggggcactagatcgttgtccatgcgcttccggactgctttgccagccccattctcattctcttgtatatgtttgcaagcccactttcgttggaagccgcgatcaggatggcgaaatccttctgcccagggaagtgcccgatgagtacgaggttgggagtttcatggaagaggtccgtcaagagctagaggacttggagcgaagtctcactgaagaaatggcactgcgcgaacctgccgcagctgctgcagctctgctagggggcgaagaaatctag

SEQ ID NO: 291610 - DNA, 969 bp, Artificial Sequence
  derived and/or modified sequence
atgcagcgcctgggggccacccttctatgtctcctgctcgctgcagctgtgcccacggcccccgccccagctcccaccgctacttcagcccctgtgaagcccggcccagccctgagctatcctcaagaagaagctaccctgaacgagatgttcagagaggtggaggaactcatggaggatactcagcacaagttgcgcagcgccgtggaggagatggaggccgaggaggcagcagcaaaagcctcttcagaggtgaacctggctaacctccctccgtcctatcacaacgagaccaacacagatacaaaggttgggaacaataccatccacgtccaccgagaaattcacaaggagtgcattatcgacgaagactgcggtccaagcatgtattgtcagttcgccagctttcagtacacctgtcagccgtgtagggggcagaggatgctgtgtacacgcgatagcgagtgctgtggtgaccagctatgcgtgtgggggcattgcaccaaaatggctacacgcggttctaatggaacaatctgcgacaatcagagagactgccaaccaggactctgttgtgctttccagcgaggacttctatttccagtgtgtactccgctgcccgtagagggcgaactgtgtcatgacccggctagccggctgttggacctgattacttgggagctcgaacccgatggtgctctggatcgatgtccatgcgccagtggactactatgccagcctcactcccacagccttgtttatgtctgtaagccgacttttgtggggtccagagaccaggatggcgagatcctacttccacgcgaggtccctgacgagtatgaagtgggctccttcatggaggaggtcaggcaggagctggaagatctcgaaagatccctgaccgaggagatggccctcagagagcccgccgctgccgcagcggctctcttaggcggcgaagaaatctag

SEQ ID NO: 291611 - DNA, 708 bp, Artificial Sequence
  derived and/or modified sequence
atgcagagattgggtgcgactctgctatgtcttttgcttgccgcagctgtgccaaccgctccagcccccgcaccaacagccacgagcgcgcctgtgaagcctggccccgcactgtcctatccgcaggaagaagccacattaaacgaaatgttccgagaagtggaagagctgatggaagatacgcagcacaaactgcggtccgcagtggaggaaatggaagctgaggaggccgccgcaaaggccagttctgaagtcaacttggccaacttgcctccaagctaccacaacgagactaacacagatacaaaagttggcaataacaccattcacgtccaccgagaaatccataagatcactaacaaccagacgggacagatggttttctcagagaccgttatcacctctgtgggcgatgaagaaggaagaagatcgcacgagtgcatcattgatgaggactgcggccctagtatgtactgccagtttgctagtttccagtatacctgtcaaccctgtcggggccaaaggatgctgtgcacacgtgactccgagtgttgcggagatcaactttgcgtctggggccattgcaccaagatggccaccaggggctccaacggcaccatttgtgacaatcagcgagactgccagcccggcctgtgctgtgcgtttcaaagggggctgctgtttcccgtttgtacaccactcccctag

SEQ ID NO: 291612 - DNA, 513 bp, Artificial Sequence
  derived and/or modified sequence
atgtactgccagtttgccagcttccagtacacctgccagccctgccggggccagaggatgctgtgcacccgggacagcgagtgctgcggggaccagctgtgtgtgtggggccactgcaccaagatggccacccggggcagcaatggcaccatctgtgacaaccagagggactgccagcccggcctgtgctgtgccttccagaggggcctgctcttccctgtgtgcacccccctgcctgtggagggggagctgtgccacgaccctgccagccggctgctggacctgatcacctgggagctggagccagatggagccctggaccgctgcccctgtgccagcggcctgctgtgccagccccacagccacagcctggtgtatgtgtgcaagcccacctttgtgggcagccgggaccaggatggagagatcctgctgccccgggaggtgcctgatgagtacctggccgcctcctggaggcgctgtgcccgctcctggaggacctggaggggggcctag

SEQ ID NO: 291613 - DNA, 1053 bp, Artificial Sequence
  derived and/or modified sequence
atgcagaggctgggcgccaccctgctgtgcctgctgctggccgctgctgtgcccacagccccagccccagcccccacagccaccagcgcccctgtgaagccaggccctgccctgagctacccccaggaggaggccaccctgaatgagatgttccgggaggtggaggagctgatggaggacacccagcacaagctgcggtctgctgtggaggagatggaggccgaggaggccgccgccaaggccagcagcgaggtgaacctggccaacctgcccccatcctaccacaatgagaccaacacagacaccaaggtgggcaacaacaccatccacgtgcaccgggagatccacaagatcaccaacaaccagacaggccagatggtgttttctgaaacagtcatcacctctgtgggagatgaggagggccgccgcagccatgagtgcatcattgatgaggactgtggccccagcatgtactgccagtttgccagcttccagtacacctgccagccctgccggggccagaggatgctgtgcacccgggacagcgagtgctgcggggaccagctgtgtgtgtggggccactgcaccaagatggccacccggggcagcaatggcaccatctgtgacaaccagagggactgccagcccggcctgtgctgtgccttccagaggggcctgctcttccctgtgtgcacccccctgcctgtggagggggagctgtgccacgaccctgccagccggctgctggacctgatcacctgggagctggagccagatggagccctggaccgctgcccctgtgccagcggcctgctgtgccagccccacagccacagcctggtgtatgtgtgcaagcccacctttgtgggcagccgggaccaggatggagagatcctgctgccccgggaggtgcctgatgaatatgaggtgggcagcttcatggaggaggtgcggcaggagctggaggacctggagaggagcctgacagaggagatggccctgcgggagcctgctgctgctgctgctgccctgctgggcggggaggagatctag

SEQ ID NO: 291614 - DNA, 882 bp, Artificial Sequence
  derived and/or modified sequence
atggaggacacccagcacaagctgcggtctgctgtggaggagatggaggccgaggaggccgccgccaaggccagcagcgaggtgaacctggccaacctgccccccagctaccacaatgagaccaacacagacaccaaggtgggcaacaacaccatccacgtgcaccgggagatccacaagatcaccaacaaccagacaggccagatggtgttcagcgagaccgtcatcacctctgtgggagatgaggagggcagaagaagccatgagtgcatcattgatgaggactgtggccccagcatgtactgccagtttgccagcttccagtacacctgccagccctgccggggccagaggatgctgtgcacccgggacagcgagtgctgcggggaccagctgtgtgtgtggggccactgcaccaagatggccacccggggcagcaatggcaccatctgtgacaaccagagggactgccagcccggcctgtgctgtgccttccagaggggcctgctcttccctgtgtgcacccccctgcctgtggagggggagctgtgccacgaccctgccagccggctgctggacctgatcacctgggagctggagccagatggagccctggaccgctgcccctgtgccagcggcctgctgtgccagccccacagccacagcctggtgtatgtgtgcaagcccacctttgtgggcagccgggaccaggatggagagatcctgctgccccgggaggtgcctgatgaatatgaggtgggcagcttcatggaggaggtgcggcaggagctggaggacctggagaggagcctgacagaggagatggccctgcgggagcctgctgctgctgctgctgccctgctgggcggggaggagatctag

SEQ ID NO: 291615 - DNA, 969 bp, Artificial Sequence
  derived and/or modified sequence
atgcagaggctgggcgccaccctgctgtgcctgctgctggccgctgctgtgcccacagccccagccccagcccccacagccaccagcgcccctgtgaagccaggccctgccctgagctacccccaggaggaggccaccctgaatgagatgttccgggaggtggaggagctgatggaggacacccagcacaagctgcggtctgctgtggaggagatggaggccgaggaggccgccgccaaggccagcagcgaggtgaacctggccaacctgcccccatcctaccacaatgagaccaacacagacaccaaggtgggcaacaacaccatccacgtgcaccgggagatccacaaggagtgcatcattgatgaggactgtggccccagcatgtactgccagtttgccagcttccagtacacctgccagccctgccggggccagaggatgctgtgcacccgggacagcgagtgctgcggggaccagctgtgtgtgtggggccactgcaccaagatggccacccggggcagcaatggcaccatctgtgacaaccagagggactgccagcccggcctgtgctgtgccttccagaggggcctgctcttccctgtgtgcacccccctgcctgtggagggggagctgtgccacgaccctgccagccggctgctggacctgatcacctgggagctggagccagatggagccctggaccgctgcccctgtgccagcggcctgctgtgccagccccacagccacagcctggtgtatgtgtgcaagcccacctttgtgggcagccgggaccaggatggagagatcctgctgccccgggaggtgcctgatgaatatgaggtgggcagcttcatggaggaggtgcggcaggagctggaggacctggagaggagcctgacagaggagatggccctgcgggagcctgctgctgctgctgctgccctgctgggcggggaggagatctag

SEQ ID NO: 291616 - DNA, 708 bp, Artificial Sequence
  derived and/or modified sequence
atgcagaggctgggcgccaccctgctgtgcctgctgctggccgctgctgtgcccacagccccagccccagcccccacagccaccagcgcccctgtgaagccaggccctgccctgagctacccccaggaggaggccaccctgaatgagatgttccgggaggtggaggagctgatggaggacacccagcacaagctgcggtctgctgtggaggagatggaggccgaggaggccgccgccaaggccagcagcgaggtgaacctggccaacctgcccccatcctaccacaatgagaccaacacagacaccaaggtgggcaacaacaccatccacgtgcaccgggagatccacaagatcaccaacaaccagacaggccagatggtgttttctgaaacagtcatcacctctgtgggagatgaggagggccgccgcagccatgagtgcatcattgatgaggactgtggccccagcatgtactgccagtttgccagcttccagtacacctgccagccctgccggggccagaggatgctgtgcacccgggacagcgagtgctgcggggaccagctgtgtgtgtggggccactgcaccaagatggccacccggggcagcaatggcaccatctgtgacaaccagagggactgccagcccggcctgtgctgtgccttccagaggggcctgctcttccctgtgtgcacccccctgccctag

SEQ ID NO: 291617 - DNA, 513 bp, Artificial Sequence
  derived and/or modified sequence
atgtactgccagttcgccagcttccagtacacctgccagccctgcaggggccagagaatgctgtgtacacgggattccgaatgttgcggcgaccagctctgtgtatggggccactgtacgaaaatggccactaggggcagcaatgggactatttgcgataaccagagggattgccaaccaggcctgtgctgcgcgtttcagcggggcctcctttttcccgtatgcacgcctctgcccgtggaaggcgaactgtgccacgatccagcaagtcggctgttggacctcattacatgggagctggaacccgacggtgctctcgataggtgcccctgcgcgtccggacttctctgccagccgcacagtcactcgcttgtttatgtatgcaaacctacatttgtaggctcgcgcgaccaggatggtgagatcctcctgcctcgggaggtacctgatgagtatctagcagcgtcttggagaaggtgcgcccgttcctggcgcacctggaggggagcatag

SEQ ID NO: 291618 - DNA, 1053 bp, Artificial Sequence
  derived and/or modified sequence
atgcagcggctgggcgccaccctgctgtgcctgctgctggccgccgcagtccccaccgcccccgcaccagccccgactgcaacgtcagcaccagtcaaaccaggcccagccctgtcttatccccaggaggaggcaacactgaacgaaatgtttagggaagtggaagaactgatggaggatacgcagcacaaacttaggtctgcagttgaagaaatggaggcagaggaggccgcagctaaggccagttcagaagtgaatctggccaatcttccaccctcgtatcacaatgaaacaaacaccgacacaaaggtggggaataacaccatccacgtgcatagggagatccacaagattacgaacaaccagaccgggcagatggtgtttagcgaaaccgttatcactagcgtaggagacgaagagggaagaagatcccatgagtgcattatcgatgaggattgtggcccctccatgtactgccaattcgcttctttccaatacacctgccagccatgtaggggtcagcgaatgctgtgcacacgcgacagcgagtgttgtggcgatcagctctgcgtgtggggtcactgtaccaaaatggctacccgcggatcaaacggcactatctgcgataatcagcgagattgtcaacccggactctgctgcgccttccaacgagggcttttgttcccggtgtgtacccccctgcccgtggagggcgagctgtgtcacgacccagcgagtagactgcttgatctcataacgtgggagctcgagcctgatggcgcactggacagatgcccatgcgcgtcaggcctgctgtgtcaaccccattcccatagcctagtgtatgtgtgtaagcctacgtttgtgggctcgcgcgatcaggatggagagatattgcttcctcgggaggttccagatgaatacgaagtgggaagtttcatggaagaggtccgacaggaacttgaggatttggaacggtccctaaccgaggagatggctctgcgcgagccagctgccgctgccgcggctctcctggggggagaggagatctag

SEQ ID NO: 291619 - DNA, 882 bp, Artificial Sequence
  derived and/or modified sequence
atggaggacacccagcacaagctgcggagcgccgtggaggagatggaagctgaggaggccgctgctaaggcaagttccgaggtgaacctggcaaatctaccgccgagctatcacaatgaaacaaacacagatacgaaggtcggtaacaacacaatccacgtacaccgggagatccacaagatcactaacaaccagacagggcagatggtcttcagcgaaacagttatcacttctgtgggtgacgaagaagggagacgcagccacgagtgcatcatcgacgaagactgtggacctagcatgtattgccagtttgccagcttccaatacacctgccagccatgtagaggacagagaatgctgtgtactagagacagcgaatgttgtggggaccaattatgcgtgtggggacactgtactaagatggcaaccagaggctccaacggcacgatttgcgataatcagcgagactgccagcccgggctgtgctgtgcgttccagaggggcctgctgttccccgtctgtacacctctccctgtcgagggagaactttgccatgatcctgctagtagactgctggacctcataacatgggaactggagcctgacggagcacttgacagatgcccatgcgctagcggtctactgtgtcagcctcactcccatagcctggtgtacgtgtgcaagccaacattcgtagggtcacgggaccaggacggcgagatcctgcttccacgtgaagtgcccgatgagtacgaagtcgggagcttcatggaggaggttcgacaggagctagaggatctcgaacgaagcctgactgaggaaatggccctcagagaaccggccgcagcagctgcagccctgctaggcggagaggaaatttag

SEQ ID NO: 291620 - DNA, 1053 bp, Artificial Sequence
  derived and/or modified sequence
atgcagcggctgggcgccaccctgctgtgcctgctgctggccgccgctgtgccgacggctccggctcctgctccgacagccacatcagccccagtgaaaccaggtcccgccctcagttatccccaggaagaagcaacgctcaatgagatgttccgggaggttgaggaactcatggaggacacccagcacaaactcaggagtgccgttgaggagatggaggctgaagaagccgctgccaaggcaagctccgaggtcaacttagccaatctgcctcccagctaccataatgagacaaatacagacacaaaggttggaaataatacgatccacgtgcatcgagagatccacaaaatcaccaacaaccagaccggacaaatggtcttcagcgaaaccgtgattacgagtgtcggcgacgaagaaggaagaaggtcccacgagtgcatcattgatgaggattgcggcccatctatgtattgtcagtttgcttcttttcagtatacatgtcagccgtgtcggggccaacgtatgctgtgtacacgtgatagtgagtgttgtggcgatcagctatgtgtgtgggggcactgtaccaaaatggccacacgaggtagcaacggtactatatgcgataatcagcgtgactgccagccaggtttatgttgtgctttccagcgtggactgctcttccccgtgtgcacccccctgcccgtcgagggcgagctttgtcatgatcccgcctcaagactgctggatcttattacgtgggagctggaaccagacggcgccctagataggtgcccatgcgccagcgggctgttatgccaaccacactcacactctctcgtttacgtgtgtaagcccacatttgtaggctctcgcgaccaggacggggaaatccttctgccccgtgaggtgcctgatgaatacgaagtagggtcattcatggaggaggtcagacaggaactggaggacctggagcggtctctgacggaggaaatggcccttcgagaacctgcagctgccgctgcagctcttttgggcggcgaagagatctag

SEQ ID NO: 291621 - DNA, 969 bp, Artificial Sequence
  derived and/or modified sequence
atgcagcggctgggcgccaccctgctgtgcctgctgctggccgccgccgtaccgaccgcacccgctccggccccaacagccaccagcgcgccagtgaaaccaggccctgctttaagttaccctcaagaggaggcaacccttaacgagatgttcagggaggttgaagagcttatggaggatacacagcataaattaagaagcgcagtagaggaaatggaggccgaggaagccgctgctaaggccagctcagaggttaatctggcaaatctcccaccatcgtaccataacgaaaccaacacggatacaaaagtcggcaacaatactatccatgttcacagggaaattcacaaggagtgcatcatagacgaagattgtggtcctagtatgtactgccaattcgctagctttcagtacacatgtcagccttgtcgggggcagcgcatgctttgcacaagagacagtgagtgctgcggtgatcagctttgcgtttggggacactgtaccaaaatggcgacacgaggctccaacgggactatttgcgacaatcaacgtgactgtcaacccggtctttgttgcgcctttcaacgcggcctgctgttccctgtgtgtactccccttcccgtagaaggcgagctctgccacgatcccgcctcgcgcctgctagatctaatcacctgggagctggagcctgacggggccctcgatcgttgcccttgtgcctctggcctgctctgtcagcctcactcccactcactagtgtatgtctgcaaaccaacatttgttggatcgcgggatcaggacggcgaaattcttctgccacgggaggtacctgatgaatatgaagtgggcagcttcatggaggaagtccgccaggagttagaggatttagaaagatccctaaccgaagaaatggcgcttagagagccagcagccgcagctgctgctctcttaggtggggaagaaatctag

SEQ ID NO: 291622 - DNA, 708 bp, Artificial Sequence
  derived and/or modified sequence
atgcagcggctgggcgccaccctgctgtgcctgctgctggccgccgctgtccccaccgcaccagcgccagcaccaactgccacttcagcacctgtgaaacctgggccagcacttagctatccccaggaagaggccactcttaacgaaatgttcagggaggtcgaggagctgatggaggatactcaacacaagctgcgatccgctgttgaggaaatggaagctgaggaggctgccgccaaagcttcctcggaagtcaacttagcgaaccttcccccaagctatcacaatgagactaacaccgatacgaaagtaggcaataacactatccacgtccacagggagatccacaagataaccaacaaccagacaggtcagatggttttttccgagaccgtgataaccagtgtgggagatgaggaaggacgccggtctcacgagtgtataattgacgaagactgtggtccgagcatgtactgtcaattcgcctcttttcagtatacctgccaaccttgccgcggacagagaatgttgtgcacaagggacagtgaatgctgcggcgaccagctgtgcgtttggggccattgcaccaaaatggccacacggggctcaaacggaaccatatgcgataaccaaagggactgtcaacccggcctttgctgtgcttttcagcgtggcctgttgtttcctgtgtgcacccctctgccctag

SEQ ID NO: 291623 - DNA, 513 bp, Artificial Sequence
  derived and/or modified sequence
atgtactgccagttcgccagttttcagtacacctgtcaaccctgtcggggtcagagaatgctgtgcactagggacagcgaatgctgcggagatcagctgtgcgtgtggggccactgtactaagatggccactcggggaagcaatggaacaatttgcgataatcaaagggactgtcagccgggtctgtgttgcgctttccaacggggtctgctgtttccagtgtgcacaccacttccggtggagggcgaactgtgccatgatcccgcttcacgactgctcgatctcattacatgggaactagaacccgatggcgcacttgatcgatgcccatgtgccagcggcttattgtgccagccccactctcacagtcttgtgtatgtctgtaagcctactttcgttggctctcgagatcaggacggagagattctcttgccaagagaagttccggacgagtatctagcggcatcttggcggaggtgcgcccgatcttggcgtacatggcgtggagcttag

SEQ ID NO: 291624 - DNA, 1053 bp, Artificial Sequence
  derived and/or modified sequence
atgcaacgacttggagcaaccctgctatgcttactgcttgcggctgctgttccaaccgctcctgctcctgcaccgactgccacatctgcccctgtcaagcccggaccggctctgagctacccccaagaggaggctacactgaatgagatgttccgggaggtagaagagcttatggaggatacacagcacaaactgcgtagtgcagtcgaagagatggaggccgaggaagccgctgcaaaggccagttcagaggttaacctcgcaaatctgcccccaagctatcataatgaaacaaacacagacactaaggttgggaacaatactatacatgttcaccgggagatccataagattaccaacaatcagacagggcagatggtgttctcagaaaccgtgattacctcagtcggagacgaagaggggagaagaagtcatgaatgcatcattgacgaggattgtgggcctagtatgtactgccagtttgccagctttcaatatacatgtcagccttgccgaggccagagaatgctttgcacccgcgacagcgaatgttgcggggatcagctgtgcgtgtggggtcactgcaccaagatggcaactagaggatccaacgggacaatatgtgacaaccaacgtgattgccagcccggtctttgttgtgcgtttcagcggggactgctgtttcccgtttgtacaccgctgccagtcgagggagaattatgtcacgatccggcatctaggctcctcgacctcatcacttgggagttggagccggacggagctctggaccgctgtccctgtgcgtccgggttgctgtgccaaccccactcgcatagcctggtttatgtctgcaaacccaccttcgtggggtcaagggaccaggatggggaaatactcctccccagagaagtccccgatgaatacgaagtcggttcattcatggaggaagtgagacaggagttagaggaccttgaacgctcactgaccgaggagatggccctgcgggagcccgcagcagctgccgcagcactgcttggaggtgaagaaatctag

SEQ ID NO: 291625 - DNA, 882 bp, Artificial Sequence
  derived and/or modified sequence
atggaggatacacagcacaagttacgcagtgctgttgaagaaatggaggctgaggaggcagccgcaaaggcatcaagcgaagtcaacctggctaatctgccaccctcatatcacaacgaaacaaacactgacacaaaagtgggtaacaataccatccacgtgcaccgtgagattcataagattacaaacaatcagaccggacagatggtcttctccgaaaccgtaataacaagcgtcggtgacgaagagggtcggaggtcgcatgagtgcatcatcgacgaggattgcgggccttccatgtactgccagttcgcctcctttcagtacacgtgtcagccttgccggggacaacgtatgttgtgcacgcgagatagtgagtgttgtggggatcagctctgcgtgtggggccattgcacgaaaatggctacccgcggatcaaatggcacaatttgcgataaccagcgagattgccagccaggcctttgctgcgcgtttcagcgcggtcttttgtttcccgtttgcacccccctgcccgtggagggcgaactttgccacgatccggcatcacggctgcttgatctcattacatgggaattggagccagatggggctctagatcggtgcccctgcgccagtggcctcctgtgccagccacactcccacagcttggtgtacgtgtgcaagcccacctttgtggggtctcgcgaccaagatggggaaatcctcctgcctagggaggtgcccgacgaatatgaggtcggttcatttatggaggaagtgcgacaagagctggaggacctcgagcgctctctgacggaagaaatggccctgcgagaaccggcagcagccgctgcggctctgctgggaggcgaagaaatctag

SEQ ID NO: 291626 - DNA, 1053 bp, Artificial Sequence
  derived and/or modified sequence
atgcaaaggctcggggcaacattactctgcctccttcttgctgctgcagtccccactgctcctgcccctgcccctaccgccacaagcgccccagtgaagcccggacctgctttatcttatccacaggaggaggcaacactcaacgagatgtttcgagaggtagaagaattgatggaggatacccaacataaattgagatcggcagtcgaggagatggaggccgaggaagcagcagcaaaagcctcatccgaagtcaacctggccaatcttccgccaagttaccacaatgagaccaacacagacactaaagtgggcaataatacaatccacgtgcaccgcgaaatccataagataacgaacaatcagaccgggcaaatggtcttttccgaaaccgtgattacatcagtaggcgatgaagaggggagacggtcccacgagtgtatcatcgatgaagactgcggcccatctatgtattgccagtttgcgtcttttcagtatacctgccaaccctgccgtggacagagaatgctgtgtactcgggatagcgagtgctgcggcgaccagttgtgtgtgtgggggcactgcactaagatggccactaggggtagcaacggaactatctgcgataaccagcgggattgccagccaggcttatgctgtgccttccagcgtggcctgctgtttcctgtgtgtaccccattgcctgtggagggtgagttgtgccacgatcctgcatctcggttgctggatctcataacctgggagctggagcctgacggtgctttggacagatgcccatgtgctagtggcctgctgtgtcagcctcacagtcacagcctagtctatgtgtgcaagcccacctttgtgggctcgagagaccaggacggtgaaattctgttacccagggaggtgccggatgaatacgaagttggctctttcatggaagaggtgaggcaagagctggaagatcttgagcgatctttgaccgaggagatggccctccgcgagccagctgccgcagctgcggcacttctcggaggggaagaaatttag

SEQ ID NO: 291627 - DNA, 969 bp, Artificial Sequence
  derived and/or modified sequence
atgcagagacttggggcaactttgctgtgtttgctactggccgcagccgtcccaactgcaccagcccctgcgccaacagctacctccgcacccgttaaacctggtcctgcactgagttacccccaggaggaagccacccttaatgaaatgttcagggaggttgaggagctgatggaagatacccagcacaagctccggagcgcagtggaggaaatggaagctgaggaagccgcagctaaggcatcctcggaggtaaacctggccaaccttcccccatcctaccacaacgaaaccaatacggatacgaaagtaggcaacaacacaatacatgttcaccgggagatccacaaggagtgcatcatcgacgaagattgcggcccttctatgtattgccaatttgcaagcttccagtacacatgtcagccgtgcagagggcagcgcatgctgtgcacccgcgattctgaatgctgcggagaccagctttgcgtctgggggcattgtaccaaaatggccacccggggatccaatggcacaatctgtgacaaccagagagactgccaaccaggattatgctgtgcattccagagagggctcttgttccctgtatgtacccctctcccagtggaaggcgaattgtgccacgaccccgctagcaggctgctggacctaatcacatgggaactggagcctgatggagctctagacagatgtccatgcgcatcaggcctgctgtgccaacctcattcccactccctcgtgtatgtatgcaagccgactttcgttggaagtagggaccaggacggcgagatcctcctgcctagggaggtccccgacgaatacgaggttggaagcttcatggaagaggtcaggcaggagctggaggacctagagcgcagcctgaccgaagaaatggctctgagagagcctgccgcagcagccgctgctctcctcggaggtgaagaaatctag

SEQ ID NO: 291628 - DNA, 708 bp, Artificial Sequence
  derived and/or modified sequence
atgcagcgactcggggcaacactgctgtgcctcctgctagcagcagctgtgcctacagcacctgccccagctccgacagcaaccagcgcacctgtaaaacccggtcccgcactgagttatccccaggaggaggccaccctgaacgagatgtttcgggaggtagaggagttgatggaagatacacagcataaactgagatcagctgtcgaagagatggaggctgaagaggcggcagccaaagcatcctcagaagtgaaccttgccaacctgccaccaagttaccataacgagactaatacagataccaaagttggcaacaacacaatccacgtgcaccgggagatccataagatcacaaacaatcagactggacagatggtgtttagtgagaccgtaataacaagcgtaggtgatgaggagggacggcgaagccacgagtgtattatcgatgaggactgtggaccttcgatgtactgccagttcgctagttttcaatacacctgccagccttgtcgcggacagaggatgctctgtactcgggacagtgaatgttgtggagatcaattgtgcgtgtgggggcattgtacgaagatggccacccggggatctaatgggacaatctgcgataaccaacgggactgccaacctgggctgtgttgcgcattccaacggggactgctatttccagtctgcactcccctgccatag

SEQ ID NO: 291629 - DNA, 513 bp, Artificial Sequence
  derived and/or modified sequence
atgtactgtcagttcgcaagcttccaatacacctgtcaaccctgccgcggccagagaatgctatgtacccgcgatagtgagtgctgcggggatcagctttgtgtttggggccactgtacaaaaatggcaaccaggggttccaacggtaccatttgtgacaaccagcgtgactgccagccgggcctgtgctgtgcctttcaacgaggtcttctcttcccagtctgcacaccccttccagtcgagggagagttgtgtcacgacccagcaagtcgactgcttgatctgataacatgggagctggaaccagacggcgccctcgaccgctgcccatgtgcaagtggactgctttgtcaaccgcattctcactctctggtgtatgtgtgcaaacccacatttgttggctctcgggatcaggatggggaaattctgctgcctcgggaagttcctgatgaatatctcgccgccagttggaggagatgtgcccgtagttggcggacttggagaggggcttag

SEQ ID NO: 291630 - DNA, 1053 bp, Artificial Sequence
  derived and/or modified sequence
atgcagcgcctgggggccaccttgctctgcctgctgctcgccgccgctgtgcctacagccccagcaccagccccgaccgccactagtgcccccgtgaagccaggacccgctcttagttatccccaggaagaagctacattgaacgagatgttccgggaggtagaggagctcatggaagacacacagcacaagctgcgctccgccgtcgaagaaatggaggccgaggaggccgccgccaaagcctcgagcgaggttaatctcgcaaatttaccgccttcataccataatgagaccaacactgacacaaaggtggggaataataccatacacgttcacagggaaatacacaagatcaccaataaccagaccgggcagatggtattcagtgaaaccgtgattaccagcgtcggcgacgaagaagggagaaggagtcacgaatgcattatagacgaagactgcggcccatcaatgtactgtcaatttgcctcattccagtatacctgccagccttgtcgcgggcaacgtatgttatgcacaagagacagtgaatgttgtggcgaccagctgtgtgtatggggtcactgcaccaagatggccacccgaggttctaatggcactatctgtgataaccaacgagactgccagccaggattgtgctgcgcttttcaacgcggactcctatttccagtctgtacaccgctgcccgtggaaggagagctgtgtcacgatccggcgtccagactgcttgaccttatcacgtgggagttagagcccgatggcgctctggacagatgcccgtgcgcaagcgggctgttatgtcaaccccatagccactctttagtatacgtgtgcaaaccgaccttcgtcggctctagagatcaagacggggagatcctgctgcccagagaggtgccagacgagtacgaggtgggctcttttatggaagaggtgcgccaggagttagaagacctcgaacgatcattaactgaggagatggcactccgtgaacccgccgccgccgctgcagccctcctgggcggtgaagaaatatag

SEQ ID NO: 291631 - DNA, 882 bp, Artificial Sequence
  derived and/or modified sequence
atggaagacactcaacacaagttgcgctctgctgtggaagagatggaagccgaggaagccgctgccaaagcctcctctgaggttaatctcgccaatcttcccccaagttaccacaacgagactaacactgatactaaggttggtaataatacaatccacgttcatagagagatccacaaaatcaccaacaaccagaccggacagatggtgttcagcgaaaccgtcattacatcagttggagatgaggagggtaggcgcagccatgaatgcatcatagacgaagactgcggaccatccatgtattgccagttcgcctcctttcagtacacctgtcagccatgcaggggccagaggatgctttgtacgcgggactcagaatgttgtggagatcaactgtgtgtctggggacattgtactaagatggccaccaggggatctaacgggaccatttgcgacaaccagagagattgtcagccggggctgtgttgtgcctttcagagagggctcttgttccccgtgtgtaccccactgcctgttgagggggagctgtgccatgaccccgctagtcgcctactagacttaatcacatgggaactcgagcctgatggagcgctggatagatgtccttgcgcgtcgggtcttctgtgccagccgcactcccactcactggtttacgtgtgcaagcccacattcgttggctcccgagaccaggatggcgagatcttactcccacgcgaagtgccagacgaatacgaggtgggctctttcatggaagaggtcaggcaggagctggaagaccttgagaggtcattaacggaagagatggcattgcgggagccggccgccgccgcggctgctttactaggcggcgaagagatctag

SEQ ID NO: 291632 - DNA, 1053 bp, Artificial Sequence
  derived and/or modified sequence
atgcagagactcggcgcaactcttctgtgccttttgctggctgctgctgtgcctactgcccccgcccctgcacccaccgcgacctcagcaccggtcaagcccggcccagcactgtcttacccccaagaagaagccaccctgaatgaaatgttccgcgaagtcgaggagctcatggaggatactcagcataagctgcggagtgccgttgaagaaatggaggcagaagaagccgcagccaaggccagcagtgaggttaaccttgccaatctccccccttcttatcacaacgagaccaatacagataccaaagtggggaataacaccattcatgttcatcgagaaattcacaaaattactaacaaccaaaccgggcagatggtgtttagcgaaaccgtcattaccagcgtcggagatgaggaaggcagacgttcacacgaatgtattattgacgaagactgcggaccttctatgtattgccaattcgcaagttttcagtacacgtgccagccgtgtcggggacagaggatgctgtgtacccgtgattctgagtgctgtggggaccagttatgcgtatggggtcattgcacaaagatggctacccggggatccaacggcacaatttgtgataaccagcgggactgccagcccggactgtgttgcgcatttcagaggggcttattgtttcccgtctgtacaccccttcctgtggaaggcgaactctgccatgatcctgcctctcggctgctggacctgattacttgggaactcgagccagacggagcactggacaggtgtccctgtgcctccggtttactttgtcagcctcacagccatagccttgtctatgtctgcaaacccacattcgtgggctcccgagatcaagatggcgagatactgctgccccgcgaggtaccagacgagtacgaagttgggtcttttatggaggaagtgcgtcaggaactcgaagatctcgaaaggtccctgactgaggaaatggctttgagggagcctgccgctgccgctgcagcgctcttgggaggagaggagatttag

SEQ ID NO: 291633 - DNA, 969 bp, Artificial Sequence
  derived and/or modified sequence
atgcaacggctgggcgcaactctcctctgtctcctgctggcagctgctgtacctaccgctccagccccagccccaactgcaacaagtgcccctgttaaacccggccccgccctcagttacccccaggaagaggctacattgaatgaaatgttccgggaggtcgaggaactgatggaagacacccagcacaaattgcggagcgcagtggaagaaatggaagcagaggaggctgcagccaaagctagcagtgaggtcaatttggcaaaccttccacccagctatcacaacgagaccaacaccgacacaaaggtgggtaataacactattcatgtccaccgagagatccataaagaatgcattattgacgaggactgtggcccatctatgtattgtcaattcgcctcctttcaatacacatgccaaccctgccgggggcagaggatgctatgcactcgtgatagtgaatgttgtggagatcagctctgtgtgtggggacactgcaccaagatggccaccagagggtcaaacggcacaatctgtgacaatcagcgcgactgccagcctggactgtgttgtgcatttcagagaggcctcctttttcccgtttgcacgccactccctgttgagggagaactgtgtcacgatcccgcaagtcgacttctggatctcatcacttgggagcttgagccagatggagccctcgacagatgtccctgcgcctcaggcttgttatgccaaccccactctcattctttagtgtatgtctgcaaacccacgttcgttgggtcccgcgaccaggatggcgaaattttgctgccgcgggaagtccccgatgagtacgaagtaggatctttcatggaggaagtccgacaggaacttgaggatctggaacggtccctgactgaggagatggcactgcgagaaccagctgccgctgctgctgcccttctggggggagaggaaatctag

SEQ ID NO: 291634 - DNA, 708 bp, Artificial Sequence
  derived and/or modified sequence
atgcaacgactcggtgctactctcctatgcctgctcctggccgccgccgtgcccactgctccggcacctgcgcccaccgcaacctctgcgccggttaagccaggacctgcactgagttatccccaggaagaggccactttgaatgagatgttccgcgaagttgaagaactgatggaagatacccagcataagctgagatccgctgtggaggaaatggaagccgaggaagctgctgctaaggctagctcagaagtgaatcttgccaacctgcctcccagctatcataatgagactaacaccgataccaaggttggaaacaataccattcacgtacacagggagatccacaagataaccaacaatcagaccggacagatggttttttctgaaaccgtgatcacgtctgtgggtgacgaagaaggacgacgctctcacgagtgcatcatcgacgaggactgcgggccatcaatgtattgtcagttcgcttcctttcagtatacctgccagccttgccgcggacaacggatgctatgcaccagagacagcgaatgttgtggcgaccagctctgtgtttggggacactgcactaagatggcaactagaggatccaacggtacaatttgtgataatcaaagagactgccaacctggactgtgctgcgccttccagaggggattactgtttccagtgtgcacgccactgccatag

SEQ ID NO: 291635 - DNA, 1053 bp, Artificial Sequence
  derived and/or modified sequence
atgcagagattgggggccaccctgctatgtctcctgttggctgctgccgtacctactgctcccgcccccgctcccaccgcaacttcagcccccgttaaacctgggcccgccctgtcttatccccaagaggaggcaactctgaatgagatgtttcgggaagtcgaagaactcatggaagacacacagcacaagcttagatcagctgtggaggaaatggaagccgaagaagccgccgcgaaggcttcatctgaagtgaatcttgccaacttacctccgtcctatcacaacgaaacaaacacagatacaaaagtgggtaataatactatacacgtgcaccgagaaatccacaaaatcacgaataaccaaaccggccagatggtattctccgaaacagtaatcacatcagtgggtgacgaggagggacgccgaagtcacgaatgcataatcgatgaggattgtggacccagcatgtattgccaatttgcaagttttcagtatacctgccagccatgcagagggcaaagaatgctctgtactagggactcagagtgctgcggagatcaactttgcgtgtgggggcactgtacaaagatggcaacgcgcggaagcaacggaacgatttgcgacaaccaacgagattgccaacccggcctttgttgcgcatttcagcgaggcttgctcttcccggtctgtaccccacttcccgtggaaggggagttgtgtcatgatcccgcctcccggcttttagacctgatcacatgggaactggagcctgacggggccctggatagatgtccatgcgcatccggcttattgtgtcagccacattctcacagtctagtgtacgtgtgcaaaccaacatttgtgggaagccgcgatcaagatggcgagatccttcttccaagagaagtccccgacgagtatgaagtaggatcattcatggaggaagtgcgccaagagttagaggatctcgagcggagcttgaccgaggagatggcactgagagagccagcagccgccgcagccgccctgcttggaggagaggaaatctag

SEQ ID NO: 291636 - DNA, 882 bp, Artificial Sequence
  derived and/or modified sequence
atggaggatacacaacataaactcaggagcgcagtggaggagatggaagctgaagaagcagctgcgaaagcctccagtgaagtgaacctggctaatttgcctccatcatatcataacgagactaacactgatactaaggttgggaataatactatccatgtacatcgagagatacataaaattacaaataatcaaacaggacagatggtcttcagcgaaactgtaattacgagcgtcggggacgaggagggtcgccgatcacacgagtgcattattgatgaggactgcggcccgtctatgtactgtcaattcgcttccttccaatacacttgccagccttgtcgcgggcagcggatgttatgcacaagagactctgaatgctgtggggaccaactctgcgtctggggccactgcactaagatggccacaagaggaagcaatggaacgatatgtgataaccaaagggattgtcagccaggtctgtgttgtgccttccagcggggactcctgtttccggtctgtactcctcttccggtcgaaggagagctctgccatgatccagcctctcgactcttagacttgattacctgggaattagaacctgacggagccctggataggtgcccatgtgcaagcggactcctatgtcaaccccattcacattctcttgtgtacgtatgcaagcctacctttgtcggatcccgggaccaggatggtgaaatattgctacccagggaggtccccgacgaatatgaagtgggatcatttatggaagaggtgcggcaagaactagaggatctcgagcgaagcttgactgaagagatggcacttcgagaacccgccgctgccgcagcagcactcctggggggtgaggaaatctag

SEQ ID NO: 291637 - DNA, 1053 bp, Artificial Sequence
  derived and/or modified sequence
atgcaacggctgggggccactcttttatgtctacttctcgccgccgcagtccccaccgcccccgcccctgcccccaccgctaccagcgccccagtgaaaccaggccccgccctaagctacccccaagaggaggctactctaaacgagatgttccgggaggtggaagaactcatggaggatacacaacacaaactgagaagcgctgtcgaagagatggaggctgaggaagcagcagccaaggcgtccagcgaagtgaacctggcgaatctacctccctcctatcataatgagaccaacaccgataccaaagtggggaataacaccattcatgttcatcgagaaattcacaaaattactaacaaccaaaccgggcagatggtgtttagcgaaaccgtcattaccagcgtcggagatgaggaaggcagacgttcacacgaatgtattattgacgaagactgcggaccttctatgtattgccaattcgcaagttttcagtacacgtgccagccgtgtcggggacagaggatgctgtgtacccgtgattctgagtgctgtggggaccagttatgcgtatggggtcattgcacaaagatggctaccagaggaagcaacggtaccatttgtgacaaccagagggactgccagccaggcctgtgttgtgcctttcagagaggacttctgtttcccgtgtgtacacccctacctgtggaaggagaattatgccacgaccctgctagtcgccttcttgacttgatcacgtgggaattagagccggatggagccctggatcgatgcccttgtgctagtgggctcctatgtcagcctcattcgcactcgcttgtgtatgtgtgtaagcccaccttcgtagggagccgggaccaggacggggaaatcttgctgccacgcgaagtccccgatgagtatgaagtcggatcttttatggaggaagtaaggcaggaactggaggatctggaacgatcacttacagaggaaatggctctccgagaacccgctgccgccgctgctgcattactgggaggagaagaaatctag

SEQ ID NO: 291638 - DNA, 969 bp, Artificial Sequence
  derived and/or modified sequence
atgcagcgtctgggcgctacactcctgtgtctgttactcgccgcggcggtgccgacagcaccagcgcctgcacctactgccacatctgcccctgtgaagccgggccccgcattgtcatacccacaagaagaggctacccttaatgagatgttcagagaggtcgaagaactaatggaagacacacaacacaaattaagatccgcagtggaagagatggaggccgaagaggcagctgccaaagccagcagcgaggttaatctagccaatctgcccccgtcgtaccataacgagaccaacactgataccaaagtaggaaacaatacaattcacgtccaccgcgaaatccataaggaatgcatcattgacgaagattgcggaccatctatgtattgccagtttgctagctttcaatatacctgtcagccttgtcgcgggcaacgcatgctgtgcaccagagactctgagtgttgtggagatcaattgtgtgtgtggggtcactgcactaagatggcaacccgcgggtcgaatggcactatttgcgacaaccagagggactgccagccaggactgtgctgcgcatttcaacgcggactcctgttcccagtatgtacaccccttcctgtagaaggagaactgtgtcacgaccctgcatcacgactgctggacctgatcacttgggagttggaaccagacggagccctggatcggtgcccgtgcgcctctggactgctgtgccaaccccattcacattccctcgtgtacgtgtgtaaaccaaccttcgtgggttcacgtgatcaagatggcgaaatactgctcccccgggaagtccctgatgaatacgaagtcgggagttttatggaggaagtgcgtcaggaactggaggatctcgaacgtagtctaaccgaggaaatggcattacgtgaaccagctgctgctgcagccgcattattgggcggcgaagagatctag

SEQ ID NO: 291639 - DNA, 708 bp, Artificial Sequence
  derived and/or modified sequence
atgcagcggcttggcgccactctcctatgcctgctgctggccgcagctgtaccaaccgctcccgctcccgctccaaccgccacaagcgcacctgtgaaacccggaccggccctgtcatatccacaagaagaggccactctgaacgagatgttccgcgaagtcgaggaactgatggaagacacacaacataagctccgctctgctgttgaggaaatggaggctgaggaagccgcagcaaaagcctcatctgaagtgaacctagcgaatctgccgccttcttaccacaatgaaacgaacaccgatacgaaggtggggaataacaccattcacgtgcatcgagaaattcataaaattaccaataaccagactggccaaatggtgttctccgagactgttattacatccgttggggatgaggagggcagaagatcccacgagtgtatcattgatgaagactgtggcccatctatgtattgccagttcgcttctttccaatatacctgtcagccatgtagaggacagcggatgctctgcacgagggactccgagtgttgtggcgatcaactctgcgtgtgggggcactgtaccaagatggcaacccgtggcagtaatggaacgatttgtgataatcagagagactgccagccagggctatgctgcgctttccaacgaggcttactttttcccgtgtgtacaccactcccctag

SEQ ID NO: 291640 - RNA, 513 nt, Artificial Sequence
  derived and/or modified sequence
auguacugucaguucgcaagcuuccaauacaccugucaacccugccgcggccagagaaugcuauguacccgcgauagugagugcugcggggaucagcuuuguguuuggggccacuguacaaaaauggcaaccagggguuccaacgguaccauuugugacaaccagcgugacugccagccgggccugugcugugccuuucaacgaggucuucucuucccagucugcacaccccuuccagucgagggagaguugugucacgacccagcaagucgacugcuugaucugauaacaugggagcuggaaccagacggcgcccucgaccgcugcccaugugcaaguggacugcuuugucaaccgcauucucacucucugguguaugugugcaaacccacauuuguuggcucucgggaucaggauggggaaauucugcugccucgggaaguuccugaugaauaucucgccgccaguuggaggagaugugcccguaguuggcggacuuggagaggggcuuag

SEQ ID NO: 291641 - RNA, 1053 nt, Artificial Sequence
  derived and/or modified sequence
augcagcgccugggggccaccuugcucugccugcugcucgccgccgcugugccuacagccccagcaccagccccgaccgccacuagugcccccgugaagccaggacccgcucuuaguuauccccaggaagaagcuacauugaacgagauguuccgggagguagaggagcucauggaagacacacagcacaagcugcgcuccgccgucgaagaaauggaggccgaggaggccgccgccaaagccucgagcgagguuaaucucgcaaauuuaccgccuucauaccauaaugagaccaacacugacacaaagguggggaauaauaccauacacguucacagggaaauacacaagaucaccaauaaccagaccgggcagaugguauucagugaaaccgugauuaccagcgucggcgacgaagaagggagaaggagucacgaaugcauuauagacgaagacugcggcccaucaauguacugucaauuugccucauuccaguauaccugccagccuugucgcgggcaacguauguuaugcacaagagacagugaauguuguggcgaccagcuguguguauggggucacugcaccaagauggccacccgagguucuaauggcacuaucugugauaaccaacgagacugccagccaggauugugcugcgcuuuucaacgcggacuccuauuuccagucuguacaccgcugcccguggaaggagagcugugucacgauccggcguccagacugcuugaccuuaucacgugggaguuagagcccgauggcgcucuggacagaugcccgugcgcaagcgggcuguuaugucaaccccauagccacucuuuaguauacgugugcaaaccgaccuucgucggcucuagagaucaagacggggagauccugcugcccagagaggugccagacgaguacgaggugggcucuuuuauggaagaggugcgccaggaguuagaagaccucgaacgaucauuaacugaggagauggcacuccgugaacccgccgccgccgcugcagcccuccugggcggugaagaaauauag

SEQ ID NO: 291642 - RNA, 882 nt, Artificial Sequence
  derived and/or modified sequence
auggaagacacucaacacaaguugcgcucugcuguggaagagauggaagccgaggaagccgcugccaaagccuccucugagguuaaucucgccaaucuucccccaaguuaccacaacgagacuaacacugauacuaagguugguaauaauacaauccacguucauagagagauccacaaaaucaccaacaaccagaccggacagaugguguucagcgaaaccgucauuacaucaguuggagaugaggaggguaggcgcagccaugaaugcaucauagacgaagacugcggaccauccauguauugccaguucgccuccuuucaguacaccugucagccaugcaggggccagaggaugcuuuguacgcgggacucagaauguuguggagaucaacugugugucuggggacauuguacuaagauggccaccaggggaucuaacgggaccauuugcgacaaccagagagauugucagccggggcuguguugugccuuucagagagggcucuuguuccccguguguaccccacugccuguugagggggagcugugccaugaccccgcuagucgccuacuagacuuaaucacaugggaacucgagccugauggagcgcuggauagauguccuugcgcgucgggucuucugugccagccgcacucccacucacugguuuacgugugcaagcccacauucguuggcucccgagaccaggauggcgagaucuuacucccacgcgaagugccagacgaauacgaggugggcucuuucauggaagaggucaggcaggagcuggaagaccuugagaggucauuaacggaagagauggcauugcgggagccggccgccgccgcggcugcuuuacuaggcggcgaagagaucuag

SEQ ID NO: 291643 - RNA, 1053 nt, Artificial Sequence
  derived and/or modified sequence
augcagagacucggcgcaacucuucugugccuuuugcuggcugcugcugugccuacugcccccgccccugcacccaccgcgaccucagcaccggucaagcccggcccagcacugucuuacccccaagaagaagccacccugaaugaaauguuccgcgaagucgaggagcucauggaggauacucagcauaagcugcggagugccguugaagaaauggaggcagaagaagccgcagccaaggccagcagugagguuaaccuugccaaucuccccccuucuuaucacaacgagaccaauacagauaccaaaguggggaauaacaccauucauguucaucgagaaauucacaaaauuacuaacaaccaaaccgggcagaugguguuuagcgaaaccgucauuaccagcgucggagaugaggaaggcagacguucacacgaauguauuauugacgaagacugcggaccuucuauguauugccaauucgcaaguuuucaguacacgugccagccgugucggggacagaggaugcuguguacccgugauucugagugcuguggggaccaguuaugcguauggggucauugcacaaagauggcuacccggggauccaacggcacaauuugugauaaccagcgggacugccagcccggacuguguugcgcauuucagaggggcuuauuguuucccgucuguacaccccuuccuguggaaggcgaacucugccaugauccugccucucggcugcuggaccugauuacuugggaacucgagccagacggagcacuggacaggugucccugugccuccgguuuacuuugucagccucacagccauagccuugucuaugucugcaaacccacauucgugggcucccgagaucaagauggcgagauacugcugccccgcgagguaccagacgaguacgaaguugggucuuuuauggaggaagugcgucaggaacucgaagaucucgaaaggucccugacugaggaaauggcuuugagggagccugccgcugccgcugcagcgcucuugggaggagaggagauuuag

SEQ ID NO: 291644 - RNA, 969 nt, Artificial Sequence
  derived and/or modified sequence
augcaacggcugggcgcaacucuccucugucuccugcuggcagcugcuguaccuaccgcuccagccccagccccaacugcaacaagugccccuguuaaacccggccccgcccucaguuacccccaggaagaggcuacauugaaugaaauguuccgggaggucgaggaacugauggaagacacccagcacaaauugcggagcgcaguggaagaaauggaagcagaggaggcugcagccaaagcuagcagugaggucaauuuggcaaaccuuccacccagcuaucacaacgagaccaacaccgacacaaagguggguaauaacacuauucauguccaccgagagauccauaaagaaugcauuauugacgaggacuguggcccaucuauguauugucaauucgccuccuuucaauacacaugccaacccugccgggggcagaggaugcuaugcacucgugauagugaauguuguggagaucagcucuguguguggggacacugcaccaagauggccaccagagggucaaacggcacaaucugugacaaucagcgcgacugccagccuggacuguguugugcauuucagagaggccuccuuuuucccguuugcacgccacucccuguugagggagaacugugucacgaucccgcaagucgacuucuggaucucaucacuugggagcuugagccagauggagcccucgacagaugucccugcgccucaggcuuguuaugccaaccccacucucauucuuuaguguaugucugcaaacccacguucguugggucccgcgaccaggauggcgaaauuuugcugccgcgggaaguccccgaugaguacgaaguaggaucuuucauggaggaaguccgacaggaacuugaggaucuggaacggucccugacugaggagauggcacugcgagaaccagcugccgcugcugcugcccuucuggggggagaggaaaucuag

SEQ ID NO: 291645 - RNA, 708 nt, Artificial Sequence
  derived and/or modified sequence
augcaacgacucggugcuacucuccuaugccugcuccuggccgccgccgugcccacugcuccggcaccugcgcccaccgcaaccucugcgccgguuaagccaggaccugcacugaguuauccccaggaagaggccacuuugaaugagauguuccgcgaaguugaagaacugauggaagauacccagcauaagcugagauccgcuguggaggaaauggaagccgaggaagcugcugcuaaggcuagcucagaagugaaucuugccaaccugccucccagcuaucauaaugagacuaacaccgauaccaagguuggaaacaauaccauucacguacacagggagauccacaagauaaccaacaaucagaccggacagaugguuuuuucugaaaccgugaucacgucugugggugacgaagaaggacgacgcucucacgagugcaucaucgacgaggacugcgggccaucaauguauugucaguucgcuuccuuucaguauaccugccagccuugccgcggacaacggaugcuaugcaccagagacagcgaauguuguggcgaccagcucuguguuuggggacacugcacuaagauggcaacuagaggauccaacgguacaauuugugauaaucaaagagacugccaaccuggacugugcugcgccuuccagaggggauuacuguuuccagugugcacgccacugccauag

SEQ ID NO: 291646 - RNA, 1053 nt, Artificial Sequence
  derived and/or modified sequence
augcagagauugggggccacccugcuaugucuccuguuggcugcugccguaccuacugcucccgcccccgcucccaccgcaacuucagcccccguuaaaccugggcccgcccugucuuauccccaagaggaggcaacucugaaugagauguuucgggaagucgaagaacucauggaagacacacagcacaagcuuagaucagcuguggaggaaauggaagccgaagaagccgccgcgaaggcuucaucugaagugaaucuugccaacuuaccuccguccuaucacaacgaaacaaacacagauacaaaaguggguaauaauacuauacacgugcaccgagaaauccacaaaaucacgaauaaccaaaccggccagaugguauucuccgaaacaguaaucacaucagugggugacgaggagggacgccgaagucacgaaugcauaaucgaugaggauuguggacccagcauguauugccaauuugcaaguuuucaguauaccugccagccaugcagagggcaaagaaugcucuguacuagggacucagagugcugcggagaucaacuuugcgugugggggcacuguacaaagauggcaacgcgcggaagcaacggaacgauuugcgacaaccaacgagauugccaacccggccuuuguugcgcauuucagcgaggcuugcucuucccggucuguaccccacuucccguggaaggggaguugugucaugaucccgccucccggcuuuuagaccugaucacaugggaacuggagccugacggggcccuggauagauguccaugcgcauccggcuuauugugucagccacauucucacagucuaguguacgugugcaaaccaacauuugugggaagccgcgaucaagauggcgagauccuucuuccaagagaaguccccgacgaguaugaaguaggaucauucauggaggaagugcgccaagaguuagaggaucucgagcggagcuugaccgaggagauggcacugagagagccagcagccgccgcagccgcccugcuuggaggagaggaaaucuag

SEQ ID NO: 291647 - RNA, 882 nt, Artificial Sequence
  derived and/or modified sequence
auggaggauacacaacauaaacucaggagcgcaguggaggagauggaagcugaagaagcagcugcgaaagccuccagugaagugaaccuggcuaauuugccuccaucauaucauaacgagacuaacacugauacuaagguugggaauaauacuauccauguacaucgagagauacauaaaauuacaaauaaucaaacaggacagauggucuucagcgaaacuguaauuacgagcgucggggacgaggagggucgccgaucacacgagugcauuauugaugaggacugcggcccgucuauguacugucaauucgcuuccuuccaauacacuugccagccuugucgcgggcagcggauguuaugcacaagagacucugaaugcuguggggaccaacucugcgucuggggccacugcacuaagauggccacaagaggaagcaauggaacgauaugugauaaccaaagggauugucagccaggucuguguugugccuuccagcggggacuccuguuuccggucuguacuccucuuccggucgaaggagagcucugccaugauccagccucucgacucuuagacuugauuaccugggaauuagaaccugacggagcccuggauaggugcccaugugcaagcggacuccuaugucaaccccauucacauucucuuguguacguaugcaagccuaccuuugucggaucccgggaccaggauggugaaauauugcuacccagggagguccccgacgaauaugaagugggaucauuuauggaagaggugcggcaagaacuagaggaucucgagcgaagcuugacugaagagauggcacuucgagaacccgccgcugccgcagcagcacuccuggggggugaggaaaucuag

SEQ ID NO: 291648 - RNA, 1053 nt, Artificial Sequence
  derived and/or modified sequence
augcaacggcugggggccacucuuuuaugucuacuucucgccgccgcaguccccaccgcccccgccccugcccccaccgcuaccagcgccccagugaaaccaggccccgcccuaagcuacccccaagaggaggcuacucuaaacgagauguuccgggagguggaagaacucauggaggauacacaacacaaacugagaagcgcugucgaagagauggaggcugaggaagcagcagccaaggcguccagcgaagugaaccuggcgaaucuaccucccuccuaucauaaugagaccaacaccgauaccaaaguggggaauaacaccauucauguucaucgagaaauucacaaaauuacuaacaaccaaaccgggcagaugguguuuagcgaaaccgucauuaccagcgucggagaugaggaaggcagacguucacacgaauguauuauugacgaagacugcggaccuucuauguauugccaauucgcaaguuuucaguacacgugccagccgugucggggacagaggaugcuguguacccgugauucugagugcuguggggaccaguuaugcguauggggucauugcacaaagauggcuaccagaggaagcaacgguaccauuugugacaaccagagggacugccagccaggccuguguugugccuuucagagaggacuucuguuucccguguguacaccccuaccuguggaaggagaauuaugccacgacccugcuagucgccuucuugacuugaucacgugggaauuagagccggauggagcccuggaucgaugcccuugugcuagugggcuccuaugucagccucauucgcacucgcuuguguauguguguaagcccaccuucguagggagccgggaccaggacggggaaaucuugcugccacgcgaaguccccgaugaguaugaagucggaucuuuuauggaggaaguaaggcaggaacuggaggaucuggaacgaucacuuacagaggaaauggcucuccgagaacccgcugccgccgcugcugcauuacugggaggagaagaaaucuag

SEQ ID NO: 291649 - RNA, 969 nt, Artificial Sequence
  derived and/or modified sequence
augcagcgucugggcgcuacacuccugugucuguuacucgccgcggcggugccgacagcaccagcgccugcaccuacugccacaucugccccugugaagccgggccccgcauugucauacccacaagaagaggcuacccuuaaugagauguucagagaggucgaagaacuaauggaagacacacaacacaaauuaagauccgcaguggaagagauggaggccgaagaggcagcugccaaagccagcagcgagguuaaucuagccaaucugcccccgucguaccauaacgagaccaacacugauaccaaaguaggaaacaauacaauucacguccaccgcgaaauccauaaggaaugcaucauugacgaagauugcggaccaucuauguauugccaguuugcuagcuuucaauauaccugucagccuugucgcgggcaacgcaugcugugcaccagagacucugaguguuguggagaucaauuguguguguggggucacugcacuaagauggcaacccgcgggucgaauggcacuauuugcgacaaccagagggacugccagccaggacugugcugcgcauuucaacgcggacuccuguucccaguauguacaccccuuccuguagaaggagaacugugucacgacccugcaucacgacugcuggaccugaucacuugggaguuggaaccagacggagcccuggaucggugcccgugcgccucuggacugcugugccaaccccauucacauucccucguguacguguguaaaccaaccuucguggguucacgugaucaagauggcgaaauacugcucccccgggaagucccugaugaauacgaagucgggaguuuuauggaggaagugcgucaggaacuggaggaucucgaacguagucuaaccgaggaaauggcauuacgugaaccagcugcugcugcagccgcauuauugggcggcgaagagaucuag

SEQ ID NO: 291650 - RNA, 708 nt, Artificial Sequence
  derived and/or modified sequence
augcagcggcuuggcgccacucuccuaugccugcugcuggccgcagcuguaccaaccgcucccgcucccgcuccaaccgccacaagcgcaccugugaaacccggaccggcccugucauauccacaagaagaggccacucugaacgagauguuccgcgaagucgaggaacugauggaagacacacaacauaagcuccgcucugcuguugaggaaauggaggcugaggaagccgcagcaaaagccucaucugaagugaaccuagcgaaucugccgccuucuuaccacaaugaaacgaacaccgauacgaagguggggaauaacaccauucacgugcaucgagaaauucauaaaauuaccaauaaccagacuggccaaaugguguucuccgagacuguuauuacauccguuggggaugaggagggcagaagaucccacgaguguaucauugaugaagacuguggcccaucuauguauugccaguucgcuucuuuccaauauaccugucagccauguagaggacagcggaugcucugcacgagggacuccgaguguuguggcgaucaacucugcgugugggggcacuguaccaagauggcaacccguggcaguaauggaacgauuugugauaaucagagagacugccagccagggcuaugcugcgcuuuccaacgaggcuuacuuuuucccguguguacaccacuccccuag

SEQ ID NO: 291651 - DNA, 1815 bp, Artificial Sequence
  derived and/or modified sequence
ggagttcggggaggcacagggtagatggaacgcagctgagaggtctgacaagatgtaccaggtcccactaccactggatcgggatgggaccctggtacggctccgcttcaccatggtggccctggtcacggtctgctgtccacttgtcgccttcctcttctgcatcctctggtccctgctcttccacttcaaggagacaacggccacacactgtggggactgaagcttcaataggagttccaggcattaagatggatggtggagatgcacaagaacatggtcatttccttagactaccccaggtgcccaattacctgccctcggtgagctcagccatcggcggggaggtgccccagcgctacgtgtggcgtttctgcatcggcctgcactcggcgcctcgcttcttggtggccttcgcctactggaaccactacctcagctgcacctccccgtgttcctgctatcgcccgctctgccgcctcaacttcggcctcaatgtcgtggagaacctcgcgttgctagtgctcacttatgtctcctcctccgaggacttcaccatccacgaaaatgctttcattgtgttcattgcctcatccctcgggcacatgctcctcacctgcattctctggcggttgaccaagaagcacacagtaagtcaggaggatcgcaagtcctacagctggaaacagcggctcttcatcatcaacttcatctccttcttctcggcgctggctgtctactttcggcacaacatgtattgtgaggctggagtgtacaccatctttgccatcctggagtacactgttgtcttaaccaacatggcgttccacatgacggcctggtgggacttcgggaacaaggagctgctcataacctctcagcctgaggaaaagcgattctgaacccttcagtcctgcttgggaggacgcagcccactgcccagaaacaagaaacacgataccattctggccttccccaccccacatcctctcttggccttactgaagatgggggaagggtaagaaggaagggtgtaggccaaggctcaccccagtgctgctggcttctcctctccacccctcatatgggcgtggggtcctcaaacatcacctttacctgagaggccccaagaagctgagctggcagagagctccaccatttggtgctaaaaaaaaaaacgtcctgaggttcatgaccaccatccagtttctggcctttacacagtcacctttcactgaggtcaggagcccctgagcagtggctgctccctgacaaccacagccatttctctgcacgggggtcattcataggactaatgtatttcatgatctactgtgcacatccaggcctgtggccacagtcccctgctaaagttgctcaggtgttctagtcctgacttcacctttttgatttggtgtgtgccctagggtatgtacccttccccatctgagcctcggtgtgtccatgtgtctggcgggggatgggtggactgtatgatttccaaggactctaccagtcagtggttctgatgtcatcgggtggaggtggtgttctatacctaaaggatgacctgctccagaaacagcaccagcacagcatgtattttcttctcttctgaaagttctggcttgtagacccctcccctcctttgcaaaggtatgggatagaggggtcagatgcagatctctactgtaaaatgggctccctggtatctcctgtcttccctactgctccaaaccctaaattttggttgtacattttatttgaaaggaaaataaattttttttttgggccaacagttgcctaggcttgcta

SEQ ID NO: 291652 - DNA, 1595 bp, Artificial Sequence
  derived and/or modified sequence
actccgcccccttccttggagcgccgcgactcgggctgagggagctcgggccaatcagagggacggccccagaatggcatggtagatggaacgcagctgagaggtgcccaattacctgccctcggtgagctcagccatcggcggggaggtgccccagcgctacgtgtggcgtttctgcatcggcctgcactcggcgcctcgcttcttggtggccttcgcctactggaaccactacctcagctgcacctccccgtgttcctgctatcgcccgctctgccgcctcaacttcggcctcaatgtcgtggagaacctcgcgttgctagtgctcacttatgtctcctcctccgaggacttcaccatccacgaaaatgctttcattgtgttcattgcctcatccctcgggcacatgctcctcacctgcattctctggcggttgaccaagaagcacacagtaagtcaggaggatcgcaagtcctacagctggaaacagcggctcttcatcatcaacttcatctccttcttctcggcgctggctgtctactttcggcacaacatgtattgtgaggctggagtgtacaccatctttgccatcctggagtacactgttgtcttaaccaacatggcgttccacatgacggcctggtgggacttcgggaacaaggagctgctcataacctctcagcctgaggaaaagcgattctgaacccttcagtcctgcttgggaggacgcagcccactgcccagaaacaagaaacacgataccattctggccttccccaccccacatcctctcttggccttactgaagatgggggaagggtaagaaggaagggtgtaggccaaggctcaccccagtgctgctggcttctcctctccacccctcatatgggcgtggggtcctcaaacatcacctttacctgagaggccccaagaagctgagctggcagagagctccaccatttggtgctaaaaaaaaaaacgtcctgaggttcatgaccaccatccagtttctggcctttacacagtcacctttcactgaggtcaggagcccctgagcagtggctgctccctgacaaccacagccatttctctgcacgggggtcattcataggactaatgtatttcatgatctactgtgcacatccaggcctgtggccacagtcccctgctaaagttgctcaggtgttctagtcctgacttcacctttttgatttggtgtgtgccctagggtatgtacccttccccatctgagcctcggtgtgtccatgtgtctggcgggggatgggtggactgtatgatttccaaggactctaccagtcagtggttctgatgtcatcgggtggaggtggtgttctatacctaaaggatgacctgctccagaaacagcaccagcacagcatgtattttcttctcttctgaaagttctggcttgtagacccctcccctcctttgcaaaggtatgggatagaggggtcagatgcagatctctactgtaaaatgggctccctggtatctcctgtcttccctactgctccaaaccctaaattttggttgtacattttatttgaaaggaaaataaattttttttttgggcc

SEQ ID NO: 291653 - protein, 262 aa, Artificial Sequence
  derived and/or modified sequence
MRVQDTSGTYYWHIPTGTTQWEPPGRASPSQGSSPQEESQLTWTGFAHGEGFEDGEFWKDEPSDEAPMELGLKEPEEGTLTFPAQSLSPEPLPQEEEKLPPRNTNPGIKCFAVRSLGWVEMTEEELAPGRSSVAVNNCIRQLSYHKNNLHDPMSGGWGEGKDLLLQLEDETLKLVEPQSQALLHAQPIISIRVWGVGRDSGRDFAYVARDKLTQMLKCHVFRCEAPAKNIATSLHEICSKARPPPLPGLVATFALQGCGWGH

SEQ ID NO: 291654 - protein, 710 aa, Artificial Sequence [sequence omitted]

SEQ ID NO: 291655 - protein, 451 aa, Artificial Sequence [sequence omitted]

SEQ ID NO: 291656 - protein, 559 aa, Artificial Sequence
  derived and/or modified sequence
MSVPSSLSQSAINANSHGGPALSLPLPLHAAHNQLLNAKLQATAVGPKDLHSKSASLLFGMRNSAASDEDSSWATLSQGSPSYGSPEDTDSFWNPNAFETDSDLPAGWMRVQDTSGTYYWHIPTGTTQWEPPGRASPSQGSSPQEESQLTWTGFAHGEGFEDGEFWKDEPSDEAPMELGLKEPEEGTLTFPAQSLSPEPLPQEEEKLPPRNTNPGIKCFAVRSLGWVEMTEEELAPGRSSVAVNNCIRQLSYHKNNLHDPMSGGWGEGKDLLLQLEDETLKLVEPQSQALLHAQPIISIRVWGVGRDSGSNRDFAYVARDKLTQMLKCHVFRCEAPAKNIATSLHEICSKIMAERRNARCLVNGLSLDHSKLVDVPFQVEFPAPKNELVQKFQVYYLGNVPVAKPVGVDVINGALESVLSSSSREQWTPSHVSVAPATLTILHQQTEAVLGECRVRFLSFLAVGRDVHTFAFIMAAGPASFCCHMFWCEPNAASLSEAVQAACMLRYQKCLDARSQASTSCLPAPPAESVARRVGWTVRRGVQSLWGSLKPKRLGAHTP

SEQ ID NO: 291657 - DNA, 2133 bp, Artificial Sequence
  derived and/or modified sequence
atgagcgtccctagttctctgagtcagagcgccatcaacgcaaattcccacggagggcctgccctgtctctgcccctgcctctgcacgccgcccacaatcaactgcttaatgcgaagctgcaggcgaccgccgtcggaccaaaagatctcagaagcgctatgggggagggcggtgggccggagccgggacccgcaaatgccaaatggttgaaagaaggccagaaccagttaagaagagctgcaacagctcatcgagaccaaaatcgaaacgttacactcacactcgcagaagaagctagccaggagcctgaaatggcgcctctgggtcctaaaggcttaatccacctgtacagcgaactcgaactttccgcacacaacgctgctaatagagggctgagggggccaggactcatcatttccacgcaggagcagggcccggatgagggtgaggaaaaggccgcgggagaagcagaggaggaggaagaggatgacgatgatgaagaagaggaagaggatttgagctcccctcctggccttcctgagcctctggagagcgtcgaggcaccaccccgtccacaggccctgacagacggccctagagaacatagcaaatccgcatctcttctgtttggaatgaggaactccgccgcatccgacgaggatagcagctgggcgaccctgtctcagggatctccctcttacggcagtcccgaagacacggactccttttggaatcccaacgccttcgaaactgactccgacctgcccgccggttggatgcgagtccaagacacgagtgggacatactactggcacatacctacgggtacaacacagtgggagccacctggccgcgcatcccccagtcagggcagtagccctcaggaggagagccagctcacgtggacaggcttcgcacacggcgagggctttgaagatggggaattttggaaagatgagccatctgatgaagcacccatggagcttgggctgaaagaacccgaggagggcactctaaccttcccagctcaaagcttgtctcctgagcctttgcctcaggaggaagaaaaactgccaccgcgcaataccaaccctggcatcaagtgtttcgctgtgagaagcctgggatgggttgaaatgaccgaggaggagcttgccccggggagatcctcagttgccgtcaacaattgcattaggcaattatcctatcacaagaataatctgcacgacccaatgtcgggcgggtggggagaggggaaagaccttctactccagctggaagatgagacactaaagctagtggaacctcagagccaggcgcttctccatgctcaaccaattatctccatacgcgtgtggggcgttggccgtgatagcgggtcaaaccgagattttgcctatgttgcgagggataaactcacacagatgctgaaatgccatgtgttccgctgtgaagcccccgctaaaaatattgctaccagcctccatgagatatgttctaaaatcatggccgagcgacgcaacgcccggtgtctcgtcaacgggctgagcctggaccactcaaagttagtagacgtgcctttccaggtggagtttcctgcgcccaaaaacgagctggtccagaagttccaggtctattacctcggcaacgtgcccgtcgcaaaaccagttggtgtggatgtgattaatggggctctcgaaagcgtgcttagttcatcaagtcgggagcagtggactccaagtcacgtttccgttgcacctgctactctgaccatcctccatcagcagacggaggctgttcttggggagtgtagagtaaggttcctctctttccttgctgttggcagggacgtgcacacattcgctttcattatggctgcaggacccgcctcattttgctgtcatatgttttggtgcgagcccaatgctgccagcttgtcggaagccgtgcaggcggcttgtatgttgcgatatcagaagtgtctggatgctcggagtcaggccagcacgagctgtttacctgcccctccagcagaatctgtggccagacgggtaggttggaccgtgcgacggggagtgcagtccctatggggctccctgaagcccaagaggctgggggcacatacgccctag

SEQ ID NO: 291658 - DNA, 1680 bp, Artificial Sequence
  derived and/or modified sequence
atgagtgtaccaagctctttgagccagtcagcgatcaacgcaaactcacatgggggacctgccctgagtctgccactgccactacacgccgcccacaatcagttactcaacgccaaactccaggccaccgccgtggggccgaaggacctgcatagtaagagtgcctctttgctgtttgggatgcggaactccgccgcctcagacgaagatagctcatgggcaacactgagccaggggtccccaagttacggtagccctgaggacactgattctttctggaatcctaacgccttcgagaccgactcagacctgcccgcaggatggatgcgcgtgcaggatacgagtggcacatattactggcatattcccaccggaacaacccagtgggaaccacctggcagagctagcccgtcgcaggggtcgagtcctcaagaagaatcccagttaacatggaccgggtttgcccacggggagggcttcgaagatggcgaattctggaaggatgaaccctccgacgaggcacccatggagctgggactgaaggaaccagaggagggcaccctgacgtttcctgcccagtctttatctcccgagccactcccacaggaggaggagaagctgcctcctaggaacaccaatcccgggattaaatgttttgccgtgaggagtcttgggtgggttgaaatgactgaggaggagctcgctcctggtcgttccagcgtggcagttaataattgcatccgccagttgtcctaccacaagaataacttgcacgaccctatgagtggaggttggggggaaggtaaagacctcctgctgcagcttgaggacgaaacgctaaaacttgtggaacctcagtctcaggctctgctccatgcccagccaatcatctccattagagtgtggggagttggtcgcgactcagggtcaaacagagactttgcgtatgtcgcccgcgataagttaacacagatgctgaagtgtcatgtcttccggtgtgaggccccggcaaaaaacatagctacctcactgcatgagatctgcagtaagatcatggccgagagacgcaacgcacgctgtttggtgaacggattgagtctggatcattccaagttagtggacgtcccttttcaagttgaatttcccgctcctaaaaacgagttagtacagaaattccaggtctactaccttgggaacgttccggtcgcaaagccggttggtgtggatgtaatcaatggggctttagaatcagtgctctcatcttcatctcgcgaacagtggaccccaagtcacgtgagtgtggcccctgccacactcacgatcctgcatcagcagacagaggcagtgctgggagaatgtcgagtacgcttcctcagctttcttgccgtgggtcgagatgtccatacgttcgcttttattatggccgccgggccagcatctttttgctgccatatgttctggtgtgaacccaatgctgcctccctttcggaggccgtacaggctgcatgcatgctccgctatcaaaagtgtttagatgcccgatcacaagctagcacctcctgtctgcccgctccgccagccgaaagtgttgcacggagagtggggtggactgttcggcgcggggtgcaaagcctttggggatcgctgaaacccaagcgacttggcgcacatacgccttag

SEQ ID NO: 291659 - DNA, 2133 bp, Artificial Sequence
  derived and/or modified sequence
atgtctgtgcccagcagcctgagccagagcgccatcaatgccaacagccatggaggccctgccctgagcctgcccctgcccctgcacgccgcccacaaccagctgctgaatgccaagctgcaggccacagctgtgggccccaaggacctgcggagcgccatgggagagggcggcggccctgagcccggccctgccaatgccaagtggctgaaggagggccagaaccagctgcggcgggccgccacagcccaccgggaccagaacagaaatgtgaccctgaccctggccgaggaggccagccaggagcctgagatggcccccctgggccccaagggcctcatccacctgtacagcgagctggagctgagcgcccacaatgctgccaacagaggcctgcggggccctggcctcatcatcagcacccaggagcagggcccagatgaaggagaggagaaggccgccggggaggccgaggaggaggaggaggatgatgatgatgaggaggaggaggaggacctgagcagccccccaggcctgcctgagcccctggagagcgtggaggccccaccccggccccaggccctgacagatggcccccgggagcacagcaagagcgccagcctgctgtttggcatgagaaattctgctgccagtgatgaggacagctcctgggccaccctgagccagggcagccccagctatggcagccctgaggacacagacagcttctggaaccccaatgcctttgaaacagacagcgacctgcctgctggctggatgagggtgcaggacaccagcggcacctactactggcacatccccaccggcaccacccagtgggagcccccaggccgggccagccccagccagggcagcagcccccaggaggagagccagctgacctggacaggctttgcccatggagagggctttgaagatggagagttctggaaggatgagcccagtgatgaggcccccatggagctgggcctgaaggagcctgaggagggcaccctgaccttccctgcccagagcctgagccctgagcccctgccccaggaggaggagaagctgcccccaagaaacaccaaccctggcatcaagtgctttgctgtgcgcagcctgggctgggtggagatgacagaggaggagctggcccctggccgcagctctgtggccgtgaacaactgcatccggcagctgagctaccacaagaacaacctgcatgaccccatgtctgggggctggggcgagggcaaggacctgctgctgcagctggaggatgagaccctgaagctggtggagccccagagccaggccctgctgcacgcccagcccatcatcagcatccgggtgtggggcgtgggccgggacagcggcagcaacagagactttgcctacgtggcccgggacaagctgacccagatgctgaagtgccacgtgttccgctgtgaggccccagccaagaacatcgccaccagcctgcacgagatctgcagcaagatcatggccgagaggagaaatgcccgctgcctggtgaatggcctgagcctggaccacagcaagctggtggatgtgcccttccaggtggagttccctgcccccaagaatgagctggtgcagaagttccaggtgtactacctgggcaatgtgcctgtggccaagcctgtgggcgtggatgtgatcaatggagccctggagagcgtgctgagcagcagcagccgggagcagtggacccccagccacgtgtctgtggccccagccaccctgaccatcctgcaccagcagacagaagctgtgctgggagaatgtcgggtgcgcttcctgtccttcctggccgtgggcagagatgtgcacacctttgccttcatcatggctgctggccctgccagcttctgctgccacatgttctggtgtgagcccaatgctgccagcctgtctgaggccgtgcaggccgcctgcatgctgcgctaccagaagtgcctggatgcccggagccaggccagcaccagctgcctgcctgcccccccagctgagagcgtggccaggagagtgggctggacagtgcggcggggcgtgcagagcctgtggggcagcctgaagcccaagaggctgggcgcccacaccccctag

SEQ ID NO: 291660 - DNA, 1680 bp, Artificial Sequence
  derived and/or modified sequence
atgtctgtgcccagcagcctgagccagagcgccatcaatgccaacagccatggaggccctgccctgagcctgcccctgcccctgcacgccgcccacaaccagctgctgaatgccaagctgcaggccacagctgtgggccccaaggacctgcacagcaagagcgccagcctgctgtttggcatgaggaacagcgctgccagtgatgaggacagctcctgggccaccctgagccagggcagccccagctatggcagccctgaggacacagacagcttctggaaccccaatgcctttgaaacagacagcgacctgcctgctggctggatgagggtgcaggacaccagcggcacctactactggcacatccccaccggcaccacccagtgggagcccccaggccgggccagccccagccagggcagcagcccccaggaggagagccagctgacctggacaggctttgcccacggggagggctttgaagatggagagttctggaaggatgagcccagtgatgaggcccccatggagctgggcctgaaggagcctgaggagggcaccctgaccttccctgcccagagcctgagccctgagcccctgccccaggaggaggagaagctgccccccaggaacaccaaccctggcatcaagtgctttgctgtgcgcagcctgggctgggtggagatgacagaggaggagctggcccctggccgcagctctgtggccgtgaacaactgcatccggcagctgagctaccacaagaacaacctgcatgaccccatgtctgggggctggggcgagggcaaggacctgctgctgcagctggaggatgagaccctgaagctggtggagccccagagccaggccctgctgcacgcccagcccatcatcagcatccgggtgtggggcgtgggccgggacagcggcagcaacagagactttgcctacgtggcccgggacaagctgacccagatgctgaagtgccacgtgttccgctgtgaggccccagccaagaacatcgccaccagcctgcacgagatctgcagcaagatcatggccgagaggagaaatgcccgctgcctggtgaatggcctgagcctggaccacagcaagctggtggatgtgcccttccaggtggagttccctgcccccaagaatgagctggtgcagaagttccaggtgtactacctgggcaatgtgcctgtggccaagcctgtgggcgtggatgtgatcaacggggccctggagagcgtgctgagcagcagcagccgggagcagtggacccccagccacgtgtctgtggccccagccaccctgaccatcctgcaccagcagacagaggccgtgctgggggagtgccgggtgcgcttcctgtccttcctggccgtgggcagagatgtgcacacctttgccttcatcatggccgccggccctgccagcttctgctgccacatgttctggtgtgagcccaatgctgccagcctgtctgaggccgtgcaggccgcctgcatgctgcgctaccagaagtgcctggatgcccggagccaggccagcaccagctgcctgcctgcccctcctgctgagagcgtggcccggcgggtgggctggacagtgagaagaggagtgcagagcctgtggggcagcctgaagcccaagaggctgggcgcccacaccccctag

SEQ ID NO: 291661 - DNA, 2133 bp, Artificial Sequence
  derived and/or modified sequence
atgagcgtgcccagcagcctgagccagagcgccatcaacgccaactctcatgggggcccagccctgtcactaccactgccactgcatgcagctcacaatcagttacttaatgccaagcttcaagccaccgctgtgggtccgaaagacttgcgctctgccatgggtgaaggtggcggacctgagccaggccccgccaacgctaagtggctgaaagaagggcagaaccagctgcgccgggccgcaaccgcccatagagaccagaatcgtaacgttacactgactctggctgaggaggccagtcaggagccggaaatggcccctctgggtccaaaaggactgatccacctctacagcgagctggagctcagcgctcataatgcagctaaccggggcctgagagggcccggcctgataataagcacgcaggagcagggcccagatgagggtgaggagaaggccgcgggggaggcagaggaggaagaggaggatgacgatgatgaagaggaagaggaagacctttcaagtcccccggggttgcccgagcccctggaatcagttgaggcccccccccgtccccaggctcttactgatggaccacgggagcactctaagtccgcaagcctgttgttcggaatgcggaacagcgctgcctcagatgaggatagtagctgggccaccctgtcacaggggtccccctcctacggaagccctgaggatactgactcattctggaatcctaacgcctttgagacagactccgacctgccagccggctggatgcgtgtccaagatacttctgggacatactattggcacatcccaaccggcacaactcaatgggagcctcccggaagagcttccccatcccagggttcttcgccacaagaggagtcccagctgacgtggaccggctttgctcatggagaaggatttgaggacggggagttctggaaggatgagccttccgatgaggccccaatggaattaggactgaaggaacctgaagagggcaccctgactttccccgcacagtcattgtctccagaaccgctccctcaggaggaagaaaagcttccgccacgtaataccaatcccggtatcaaatgtttcgcagtgaggagcctgggctgggtggagatgaccgaggaggagctagcgcccggtcgtagctcagtagccgtgaacaattgtataaggcagctgagctatcacaaaaacaatttacacgatcccatgagcggcggatggggggaaggcaaggatctgctgctgcaactggaagatgagaccctgaaactcgtcgagcctcaaagccaggcccttttacatgctcaacctattatcagtatccgggtgtggggggttggcagagattcagggtctaacagagacttcgcttacgtggcaagagataagctgacgcaaatgctgaagtgccacgtgtttaggtgcgaagccccagctaagaacattgccacttccttgcacgaaatctgctcaaagataatggccgaacgtagaaatgcaaggtgtctggtaaacgggttgagccttgatcactctaaactggtcgacgtgccttttcaggtggagtttcccgccccgaagaatgagctggttcagaagttccaggtatattatctgggcaatgtgccggtagcaaagccagtgggagtagatgtgatcaacggcgccctagagtccgtgctatcttcctcctctcgcgagcaatggacaccgtctcatgtcagcgtcgctccagccacactcaccatcttacatcaacagaccgaagccgtgcttggagaatgccgggttcgcttcctgtccttcttagccgtgggccgggacgtccatacgttcgcctttatcatggccgctggaccagcctccttctgctgtcacatgttctggtgcgagcccaacgctgccagtctgagcgaagcagtccaagccgcatgcatgcttcgctaccagaagtgcctggacgcaaggtcacaagccagtaccagttgcctccctgcgccaccagctgagtccgttgcacgacgcgttggatggacagtgagaaggggcgtacagagcctttggggaagcctgaaacctaaacgactgggagcccatacgccatag

SEQ ID NO: 291662 - DNA, 1680 bp, Artificial Sequence
  derived and/or modified sequence
atgagcgtgcccagcagcctgagccagagcgccatcaacgccaactctcacggcgggccagcactttctctcccattacccctgcatgcagcccataaccaactcctgaacgcaaagctgcaagcgactgctgtggggccgaaggacctccacagcaagtcagcttcgctgcttttcgggatgcgcaattctgcggctagcgatgaggactcaagctgggcgacactgtcccagggcagccccagctacgggagtccagaggacaccgactcattctggaatcctaacgcatttgaaaccgactcggatttgcctgctggatggatgcgtgtacaagacacaagtgggacatactattggcatattccaactggcacgacgcaatgggagcctcccggcagggcgtccccctctcaaggatcaagtcctcaggaagagagccagctcacatggactggctttgcccacggcgagggatttgaagacggtgaattttggaaggatgaacctagtgatgaagcccccatggagctggggcttaaggaaccagaagaaggcactctcacctttccggcccaatcactgtcgcctgagccgttgccacaggaagaagagaagctgcccccgagaaacacaaacccggggatcaagtgcttcgctgttcggagcctgggttgggtggaaatgactgaagaggaactggcacccggccggtccagtgttgccgtcaacaattgtataagacagctgtcctatcataagaataatctccacgaccctatgagcggcgggtggggcgagggtaaagaccttctgctccaacttgaggacgaaaccttgaaactggtcgagcctcagagtcaggctctgctccatgcacagcccataatctctattagagtttggggtgttgggcgagattcaggctcaaatcgagacttcgcctacgtggcccgcgataagctgacccagatgctgaaatgtcatgtttttcgctgcgaggcacccgcaaagaacatcgctacaagtctgcatgagatctgctcgaaaataatggccgagcgccgaaacgctcgatgtctcgtgaatgggctgagtctggatcactctaaactggtagacgtccctttccaggtggagtttcccgcgcccaagaacgaactggttcagaaatttcaggtttactacctggggaacgtgccagtggcaaagccggttggcgtcgatgtaattaacggcgctctggagtccgtgctatcctccagtagcagggagcagtggaccccttcccatgtcagcgtggcacccgccaccctgactattctccatcagcagactgaagccgtgctcggtgagtgccgggtacggttccttagctttctagctgtcggcagggatgtgcacacatttgcattcattatggcagccgggcccgcatctttctgctgccacatgttctggtgtgagccaaatgcagcctccctaagcgaagccgtgcaggcagcatgcatgctgagataccaaaaatgcctggacgcacgatcccaggcatccactagttgcttacctgcccccccagcagaatctgtggcgagacgggtgggatggaccgtgaggcgcggtgtacagtccctgtggggaagcctgaagccaaagagactgggcgcccacacaccttag

SEQ ID NO: 291663 - DNA, 2642 bp, Artificial Sequence
  derived and/or modified sequence
atgttgtgatggagaagccgcggcggagcccgaaccccgcagcctgagccacctccgtcatctgggcccggggcctcaccgcgcaggagctgccaaggccatgtctgttccatcatcactgagccagtcggccattaatgccaacagccacggaggccccgcactgagcctacccctgcctctgcacgctgcccacaaccagctgctcaacgccaagctgcaggccacagctgtgggacccaaggacctgcgcagcgccatgggggagggtggtgggcctgagccaggccctgccaatgccaagtggctaaaagagggccagaaccagctccggcgggccgccacggcccaccgtgaccagaatcgcaatgtgaccttgaccttggcggaggaggccagccaggagcctgagatggcacccttgggccccaaaggcctgatacacctgtactctgagctggagctctcagctcacaacgcagccaaccgaggcctacgaggacctggcctgatcatcagcactcaagagcaggggccagatgagggagaggagaaggcggccggggaggccgaggaggaggaggaggatgatgatgatgaagaggaggaggaggacttatcttctcccccagggctgcctgagcccctggagagtgtggaggcccctcccaggccccaagcccttacagatggcccccgggaacacagcaagagtgccagcctcctgtttggcatgcggaacagtgcagccagtgatgaggactcaagctgggctaccttatcccagggcagcccctcctatggctccccagaggacacagattccttctggaaccccaacgccttcgagacggattccgacctgccggctggatggatgagggtccaggacacctcagggacctattactggcacatcccaacagggaccacccagtgggaaccccccggccgggcctccccctcacaggggagcagcccccaagaggagtcccagctcacctggacaggttttgctcatggagaaggctttgaggatggagaattttggaaggatgaacccagtgatgaggccccaatggagctgggactgaaggaacctgaggaggggacgttgaccttcccagctcagagcctcagcccagagccgttgccccaagaggaggagaagcttcccccacggaataccaacccagggatcaagtgtttcgccgtgcgctccctaggctgggtagagatgaccgaggaggagctggcccctggacgcagcagtgtggcagtcaacaattgcatccgtcagctctcttaccacaaaaacaacctgcatgaccccatgtctgggggctggggggaaggaaaggatctgctactgcagctggaggatgagacactaaagctagtggagccacagagccaggcactgctgcacgcccaacccatcatcagcatccgcgtgtggggcgtcgggcgggacagtggaagcaacagggactttgcctacgtagctcgtgataagctgacccagatgctcaagtgccacgtgtttcgctgtgaggcacctgccaagaacatcgccaccagcctgcatgagatctgctctaagatcatggccgaacggcgtaatgcccgctgcttggtaaatggactctccctggaccactctaaacttgtggatgtccctttccaagtggaattcccagcgcctaagaatgagttggtccagaagttccaagtctattacctggggaatgtacctgttgctaaacctgttggggtagatgtgattaatggggccctcgagtcagtcctgtcctccagcagccgtgaacaatggaccccaagtcatgtcagtgtggcccctgctaccctcaccatcttgcaccagcagacagaggcagtgctgggagagtgtcgggtgcgtttcctctccttcctggccgtgggcagagatgtccacacgtttgcattcatcatggctgccggcccagcctccttctgctgccacatgttctggtgcgagcccaatgctgccagcctctcagaggctgtgcaggctgcgtgcatgcttcgctaccagaagtgtctggatgcccgttcccaggcctccacctcctgcctcccagcaccccctgctgagtctgtggcacggcgtgtagggtggactgtccgcaggggtgttcagtcgctgtggggctccctgaagcccaaacggctgggggcccataccccatgaagaagcccccaccttccctccacctgcttgtgttgggccccagggaactaaagggtgtgggtcagggaggggtctagaggctattcctaggcctcaggcctcccaaatatgcccctccccagtagctacggttccctgcctaggagctggggagggagagatctaatcccttcaaggaagtgataacactggagtggtaacaagaggagcaggaagcaaggccagccctggttctccatccccatgtgtttcaggtggaacaggaggaactggtccaggccaggcctcatcctcctggacccagcaggggcagaaggaggaagggactggtccaggcatgggtcccttccccctgctccatgggcacctctgctgtattgatatcactaataaagtctgtctgcactgc

SEQ ID NO: 291664 - DNA, 2089 bp, Artificial Sequence
  derived and/or modified sequence
atgtctgttccatcatcactgagccagtcggccattaatgccaacagccacggaggccccgcactgagcctacccctgcctctgcacgctgcccacaaccagctgctcaacgccaagctgcaggccacagctgtgggacccaaggacctgcacagcaagagtgccagcctcctgtttggcatgcggaacagtgcagccagtgatgaggactcaagctgggctaccttatcccagggcagcccctcctatggctccccagaggacacagattccttctggaaccccaacgccttcgagacggattccgacctgccggctggatggatgagggtccaggacacctcagggacctattactggcacatcccaacagggaccacccagtgggaaccccccggccgggcctccccctcacaggggagcagcccccaagaggagtcccagctcacctggacaggttttgctcatggagaaggctttgaggatggagaattttggaaggatgaacccagtgatgaggccccaatggagctgggactgaaggaacctgaggaggggacgttgaccttcccagctcagagcctcagcccagagccgttgccccaagaggaggagaagcttcccccacggaataccaacccagggatcaagtgtttcgccgtgcgctccctaggctgggtagagatgaccgaggaggagctggcccctggacgcagcagtgtggcagtcaacaattgcatccgtcagctctcttaccacaaaaacaacctgcatgaccccatgtctgggggctggggggaaggaaaggatctgctactgcagctggaggatgagacactaaagctagtggagccacagagccaggcactgctgcacgcccaacccatcatcagcatccgcgtgtggggcgtcgggcgggacagtggaagcaacagggactttgcctacgtagctcgtgataagctgacccagatgctcaagtgccacgtgtttcgctgtgaggcacctgccaagaacatcgccaccagcctgcatgagatctgctctaagatcatggccgaacggcgtaatgcccgctgcttggtaaatggactctccctggaccactctaaacttgtggatgtccctttccaagtggaattcccagcgcctaagaatgagttggtccagaagttccaagtctattacctggggaatgtacctgttgctaaacctgttggggtagatgtgattaatggggccctcgagtcagtcctgtcctccagcagccgtgaacaatggaccccaagtcatgtcagtgtggcccctgctaccctcaccatcttgcaccagcagacagaggcagtgctgggagagtgtcgggtgcgtttcctctccttcctggccgtgggcagagatgtccacacgtttgcattcatcatggctgccggcccagcctccttctgctgccacatgttctggtgcgagcccaatgctgccagcctctcagaggctgtgcaggctgcgtgcatgcttcgctaccagaagtgtctggatgcccgttcccaggcctccacctcctgcctcccagcaccccctgctgagtctgtggcacggcgtgtagggtggactgtccgcaggggtgttcagtcgctgtggggctccctgaagcccaaacggctgggggcccataccccatgaagaagcccccaccttccctccacctgcttgtgttgggccccagggaactaaagggtgtgggtcagggaggggtctagaggctattcctaggcctcaggcctcccaaatatgcccctccccagtagctacggttccctgcctaggagctggggagggagagatctaatcccttcaaggaagtgataacactggagtggtaacaagaggagcaggaagcaaggccagccctggttctccatccccatgtgtttcaggtggaacaggaggaactggtccaggccaggcctcatcctcctggacccagcaggggcagaaggaggaagggactggtccaggcatgggtcccttccccctgctccatgggcacctctgctgtattgatatcactaataaagtctgtctgcactgc

SEQ ID NO: 291665 - DNA, 2133 bp, Artificial Sequence
  derived and/or modified sequence
atgagcgtaccctcttctctgtcacaaagcgccattaacgcaaactctcatggcggacctgccctgtctcttcccctgccgttacacgccgctcacaaccaacttctaaatgctaagctccaggctacagcagtgggtccaaaggacctccgcagtgcaatgggagagggaggtgggcctgaacccggacccgctaacgctaaatggctgaaggaagggcagaatcaactcagaagagccgctacagcccatcgggaccagaatcgcaatgttaccctgacgcttgcagaggaggcttcacaggaacccgagatggccccactagggccaaagggcttgatacacctgtactctgagttggagctgtctgcccacaacgccgctaaccgcggtctccggggacctgggctgattattagtactcaggagcagggacccgacgagggggaggagaaggccgcaggcgaggctgaggaggaggaggaggatgatgatgatgaagaagaggaggaggatctgtcatcaccgccaggcctgcctgaaccccttgagtccgtcgaagcgccaccaagaccacaggctctgacagacggaccgagagagcatagcaaatctgcctccttactcttcggcatgcgcaactccgcggcttctgacgaggactcctcttgggctacccttagccagggttcaccgtcatatgggtcccccgaggacactgacagtttctggaaccccaatgcattcgagacagactccgacctgccggcagggtggatgcgggtgcaagacactagtggtacctattactggcatattcccacgggaaccacccagtgggaaccacctgggagagctagtccatcacagggctcttcacctcaggaagaatcgcagctcacctggaccggtttcgcgcatggagaaggctttgaggacggagaattctggaaggatgaaccatcagatgaggcgccaatggaactggggctcaaagaaccagaggagggcacccttacgttccctgcgcagagcctgtctccagaaccactgcctcaagaagaggagaagcttcctcccagaaacaccaacccaggaatcaaatgcttcgccgtcagatccctgggatgggtagaaatgaccgaggaggagctcgcacctggaagaagttcagtggcagtaaacaactgcatccgccagctgtcctaccataaaaataacctgcatgatcctatgtccggaggctggggcgagggcaaggatttgctgctacaactagaggatgaaactcttaaattggttgagccacagtcacaggccctcctgcatgcacagccaatcatctcaatacgggtctggggcgtgggcagggactcagggtccaaccgtgattttgcttacgttgcacgggataaactcacccagatgctgaaatgtcatgtgttccgctgtgaagcaccagcaaaaaatattgccacttccctgcacgaaatttgcagcaaaatcatggccgagaggcggaatgctcggtgcctagtaaacggtctgagtcttgaccacagcaaactggtagacgtgccctttcaggtggagtttccagccccaaaaaatgagctagtgcagaaattccaggtatactatcttggaaacgtgcctgtcgctaaacctgttggtgtcgacgtgatcaacggtgcattggaaagtgtgttgtctagcagcagtcgcgagcagtggacaccctcacatgtctccgtcgcaccggctacgttgaccatactgcatcaacagacagaggctgtcctaggcgaatgtcgcgtgcgatttttgtcctttctcgctgtgggccgagacgtgcatacctttgccttcataatggcagcaggacctgccagtttctgctgccacatgttttggtgcgaacccaatgcagcatctctgtctgaggccgtacaagccgcatgcatgcttcgctaccagaagtgcctggatgccaggagtcaagcctctacgtcctgcctccccgctcccccagcagagtccgtagctagacgggtgggatggacagtgagaaggggggtccagagcttgtgggggagtctcaaaccaaagaggttaggagctcataccccatag

SEQ ID NO: 291666 - DNA, 1680 bp, Artificial Sequence
  derived and/or modified sequence
atgtcagtgcctagctcattatcccagtctgccatcaatgccaatagccatggaggtcctgctctctcactgcccttaccattacatgccgcacacaaccagctgctgaacgcaaagctgcaggccacagctgtagggccaaaggatcttcattccaagtcagcttccctgctgtttggaatgcgcaacagcgctgcatccgatgaagactcttcctgggccaccctttctcaaggcagcccaagctatggatccccggaagacactgattcattttggaatcccaatgctttcgagaccgatagcgatcttccggctggctggatgcgggtccaggacaccagcggaacatattactggcacatccccacgggaaccacccagtgggaaccccctgggcgtgcttccccatcccaaggcagctctcctcaagaagagtcacagctgacatggactggtttcgcccatggggaaggtttcgaggacggcgagttctggaaggacgaaccatcagatgaagcacccatggagctggggctgaaagagcctgaggagggcacgctaacattcccagctcaaagcctctcccctgagccactccctcaggaggaggaaaagctccctccccgtaatacgaaccctggaataaagtgttttgcagttcgtagtctcgggtgggtggagatgaccgaggaggagctcgcacccggtcgttcttccgttgccgttaacaactgtatcagacagcttagctatcacaagaacaatctgcatgatcctatgagcgggggttggggcgaaggcaaagacctcctgttacaacttgaggacgagactttaaaattagtcgagccacagtcacaggctcttttacacgctcagcctataattagcatccgggtgtggggtgtgggtagagattcgggcagcaaccgggactttgcctacgtggcccgagacaaactgacccagatgttaaaatgtcatgtatttcggtgcgaagcgcctgccaagaacatcgctacatctctgcacgagatttgctcaaagattatggctgagcgtaggaacgccaggtgcctggtcaacggcttgtccctcgatcactccaagctggtcgatgtacccttccaagtcgaattccccgctcctaaaaatgagctggtccaaaagttccaagtctattacctcggtaatgtgcctgttgctaagcccgtgggggtggacgtcatcaatggagctctggagtctgttttgagcagctcatctcgcgaacaatggacgccatcccacgtctcagtggccccagccacgttgacgatcctgcatcagcaaacagaagcagttcttggcgagtgtcgtgttagattcctgtcattcttggcggttgggcgagatgtccatactttcgctttcataatggccgctggcccagccagcttttgctgccacatgttctggtgcgagccaaatgcagctagcctgagcgaggcagtgcaggcagcgtgcatgctgcggtaccagaagtgcttggatgccagaagccaggcctcaacgtcttgtttacccgcaccacccgctgaatctgttgccaggcgagtcgggtggaccgtgcggcgaggcgtgcaatccctgtgggggagtttaaagcctaaaaggttgggagcccacacaccgtag

SEQ ID NO: 291667 - DNA, 2133 bp, Artificial Sequence
  derived and/or modified sequence
atgagcgtgcccagcagcctgagccagagcgccatcaacgccaacagccacggcggccccgccctgagcctgcccctgcccctgcacgccgcccacaaccagctgctgaacgccaagctgcaggccaccgccgtgggccccaaggacctgagaagcgccatgggcgagggcggcggccccgagcccggccccgccaacgccaagtggctgaaggagggccagaaccagctgagaagagccgccaccgcccacagagaccagaacagaaacgtgaccctgaccctggccgaggaggccagccaggagcccgagatggcccccctgggccccaagggcctgatccacctgtacagcgagctggagctgagcgcccacaacgccgccaacagaggcctgagaggccccggcctgatcatcagcacccaggagcagggccccgacgagggcgaggagaaggccgccggcgaggccgaggaggaggaggaggacgacgacgacgaggaggaggaggaggacctgagcagcccccccggcctgcccgagcccctggagagcgtggaggccccccccagaccccaggccctgaccgacggccccagagagcacagcaagagcgccagcctgctgttcggcatgagaaacagcgccgccagcgacgaggacagcagctgggccaccctgagccagggcagccccagctacggcagccccgaggacaccgacagcttctggaaccccaacgccttcgagaccgacagcgacctgcccgccggctggatgagagtgcaggacaccagcggcacctactactggcacatccccaccggcaccacccagtgggagccccccggcagagccagccccagccagggcagcagcccccaggaggagagccagctgacctggaccggcttcgcccacggcgagggcttcgaggacggcgagttctggaaggacgagcccagcgacgaggcccccatggagctgggcctgaaggagcccgaggagggcaccctgaccttccccgcccagagcctgagccccgagcccctgccccaggaggaggagaagctgccccccagaaacaccaaccccggcatcaagtgcttcgccgtgagaagcctgggctgggtggagatgaccgaggaggagctggcccccggcagaagcagcgtggccgtgaacaactgcatcagacagctgagctaccacaagaacaacctgcacgaccccatgagcggcggctggggcgagggcaaggacctgctgctgcagctggaggacgagaccctgaagctggtggagccccagagccaggccctgctgcacgcccagcccatcatcagcatcagagtgtggggcgtgggcagagacagcggcagcaacagagacttcgcctacgtggccagagacaagctgacccagatgctgaagtgccacgtgttcagatgcgaggcccccgccaagaacatcgccaccagcctgcacgagatctgcagcaagatcatggccgagagaagaaacgccagatgcctggtgaacggcctgagcctggaccacagcaagctggtggacgtgcccttccaggtggagttccccgcccccaagaacgagctggtgcagaagttccaggtgtactacctgggcaacgtgcccgtggccaagcccgtgggcgtggacgtgatcaacggcgccctggagagcgtgctgagcagcagcagcagagagcagtggacccccagccacgtgagcgtggcccccgccaccctgaccatcctgcaccagcagaccgaggccgtgctgggcgagtgcagagtgagattcctgagcttcctggccgtgggcagagacgtgcacaccttcgccttcatcatggccgccggccccgccagcttctgctgccacatgttctggtgcgagcccaacgccgccagcctgagcgaggccgtgcaggccgcctgcatgctgagataccagaagtgcctggacgccagaagccaggccagcaccagctgcctgcccgccccccccgccgagagcgtggccagaagagtgggctggaccgtgagaagaggcgtgcagagcctgtggggcagcctgaagcccaagagactgggcgcccacaccccctag

SEQ ID NO: 291668 - DNA, 1680 bp, Artificial Sequence
  derived and/or modified sequence
atgagcgtgcccagcagcctgagccagagcgccatcaacgccaacagccacggcggccccgccctgagcctgcccctgcccctgcacgccgcccacaaccagctgctgaacgccaagctgcaggccaccgccgtgggccccaaggacctgcacagcaagagcgccagcctgctgttcggcatgagaaacagcgccgccagcgacgaggacagcagctgggccaccctgagccagggcagccccagctacggcagccccgaggacaccgacagcttctggaaccccaacgccttcgagaccgacagcgacctgcccgccggctggatgagagtgcaggacaccagcggcacctactactggcacatccccaccggcaccacccagtgggagccccccggcagagccagccccagccagggcagcagcccccaggaggagagccagctgacctggaccggcttcgcccacggcgagggcttcgaggacggcgagttctggaaggacgagcccagcgacgaggcccccatggagctgggcctgaaggagcccgaggagggcaccctgaccttccccgcccagagcctgagccccgagcccctgccccaggaggaggagaagctgccccccagaaacaccaaccccggcatcaagtgcttcgccgtgagaagcctgggctgggtggagatgaccgaggaggagctggcccccggcagaagcagcgtggccgtgaacaactgcatcagacagctgagctaccacaagaacaacctgcacgaccccatgagcggcggctggggcgagggcaaggacctgctgctgcagctggaggacgagaccctgaagctggtggagccccagagccaggccctgctgcacgcccagcccatcatcagcatcagagtgtggggcgtgggcagagacagcggcagcaacagagacttcgcctacgtggccagagacaagctgacccagatgctgaagtgccacgtgttcagatgcgaggcccccgccaagaacatcgccaccagcctgcacgagatctgcagcaagatcatggccgagagaagaaacgccagatgcctggtgaacggcctgagcctggaccacagcaagctggtggacgtgcccttccaggtggagttccccgcccccaagaacgagctggtgcagaagttccaggtgtactacctgggcaacgtgcccgtggccaagcccgtgggcgtggacgtgatcaacggcgccctggagagcgtgctgagcagcagcagcagagagcagtggacccccagccacgtgagcgtggcccccgccaccctgaccatcctgcaccagcagaccgaggccgtgctgggcgagtgcagagtgagattcctgagcttcctggccgtgggcagagacgtgcacaccttcgccttcatcatggccgccggccccgccagcttctgctgccacatgttctggtgcgagcccaacgccgccagcctgagcgaggccgtgcaggccgcctgcatgctgagataccagaagtgcctggacgccagaagccaggccagcaccagctgcctgcccgccccccccgccgagagcgtggccagaagagtgggctggaccgtgagaagaggcgtgcagagcctgtggggcagcctgaagcccaagagactgggcgcccacaccccctag

SEQ ID NO: 291669 - protein, 105 aa, Artificial Sequence
  derived and/or modified sequence
MGSACIKVTKYFLFLFNLIFFILGAVILGFGVWILADKSSFISVLQTSSSSLRMGAYVFIGVGAVTMLMGFLGCIGAVNEVRCLLGLYFAFLLLILIAQVTAGAL

SEQ ID NO: 291670 - protein, 108 aa, Artificial Sequence
  derived and/or modified sequence
MGSACIKVTKYFLFLFNLIFFILGAVILGFGVWILADKSSFISVLQTSSSSLRMGAYVFIGVGAVTMLMGFLGCIGAVNEVRCLLGLYFAFLLLILIAQVTAGALFYF

SEQ ID NO: 291671 - DNA, 2289 bp, Artificial Sequence
  derived and/or modified sequence
ggcctgccgagtccgcggcgttccccggctgcagccgggagggggccgaggagtgactgagccccgggctgtgcagtccgacgccgactgaggcacgagcgggtgacgctgggcctgcagcgcggagcagaaagcagaacccgcagagtcctccctgctgctgtgtggacgacacgtgggcacaggcagaagtgggccctgtgaccagctgcactggtttcgtggaaggaagctccaggactggcgggatgggctcagcctgtatcaaagtcaccaaatactttctcttcctcttcaacttgatcttctttatcctgggcgcagtgatcctgggcttcggggtgtggatcctggccgacaagagcagtttcatctctgtcctgcaaacctcctccagctcgcttaggatgggggcctatgtcttcatcggcgtgggggcagtcactatgctcatgggcttcctgggctgcatcggcgccgtcaacgaggtccgctgcctgctggggctgtactttgctttcctgctcctgatcctcattgcccaggtgacggccggggccctcttctacttcaacatgggcaagctgaagcaggagatgggcggcatcgtgactgagctcattcgagactacaacagcagtcgcgaggacagcctgcaggatgcctgggactacgtgcaggctcaggtgaagtgctgcggctgggtcagcttctacaactggacagacaacgctgagctcatgaatcgccctgaggtcacctacccctgttcctgcgaagtcaagggggaagaggacaacagcctttctgtgaggaagggcttctgcgaggcccccggcaacaggacccagagtggcaaccaccctgaggactggcctgtgtaccaggagggctgcatggagaaggtgcaggcgtggctgcaggagaacctgggcatcatcctcggcgtgggcgtgggtgtggccatcatcgagctcctggggatggtcctgtccatctgcttgtgccggcacgtccattccgaagactacagcaaggtccccaagtactgaggcagctgctatccccatctccctgcctggcccccaacctcagggctcccaggggtctccctggctccctcctccaggcctgcctcccacttcactgcgaagaccctcttgcccatcctgactgaaagtagggggctttctggggcctagcgatctctcctggcctatccgctgccagccttgagccctggctgttctgtggttcctctgctcaccgcccatcagggttctcttagcaactcagagaaaaatgctccccacagcgtccctggcgcaggtgggctggacttctacctgccctcaagggtgtgtatattgtataggggcaactgtatgaaaaattggggaggagggggccgggcgcggtggctcacgcctgtaatcccagcactttgggaggccgaggcgggtggatcacgaggtcaggagatcgagaccatcctggctaacatggtgaaaccccgtctctactaaaaatacaaaaaaaatttagccgggcgcggtggcgggcacctgtagtcccagctacttgggaggctgaggcaggagaatggtgtgaacccgggagcggaggttgcagtgagctgagatcgtgctactgcactccagcctgggggacagaaagagactccgtctcaaaaaaaaaaaaaaaaaaaaaaaaaattggggagggaagggcgttagataaggcactctgggctgtcaggagactgcctactgggtgggtcaacttatttcccactatgacatttatatctttatttttcacaattatattgaaggcagtgggagaggggagagggtgggttttacctgatattaaggggtggcaccccttccccaggcctgatgcaggtccatctagacagctcagattagcctaggccatgccctagggacacggcctaggggagctgggctggagggggtctgcctgggtaaggggatctggcttggccctgagctgcttagggacaggtgagtccttgggggcatggcacagagctggtcctgtattctccagggtccggagctggccaggggcggggaggaggaggatggcttctcctgggagaaggtgggctggcctttcttggcaagcggtcctctggcccctggggagtggggtgggtgaggctgtgccttgtagggggagaggggagggggctttgtgtgcaccattctgtaaaacacactcaagattctaagactattaaagaggatttataacagtcta

SEQ ID NO: 291672 - DNA, 967 bp, Artificial Sequence
  derived and/or modified sequence
gtccgcggcgttccccggctgcagccgggagggggccgaggagtgactgagccccgggctgtgcagtccgacgccgactgaggcacgagcgggtgacgctgggcctgcagcgcggagcagaaagcagaacccgcagagtcctccctgctgctgtgtggacgacacgtgggcacaggcagaagtgggccctgtgaccagctgcactggtttcgtggaaggaagctccaggactggcgggatgggctcagcctgtatcaaagtcaccaaatactttctcttcctcttcaacttgatcttctttatcctgggcgcagtgatcctgggcttcggggtgtggatcctggccgacaagagcagtttcatctctgtcctgcaaacctcctccagctcgcttaggatgggggcctatgtcttcatcggcgtgggggcagtcactatgctcatgggcttcctgggctgcatcggcgccgtcaacgaggtccgctgcctgctggggctgctgaagcaggagatgggcggcatcgtgactgagctcattcgagactacaacagcagtcgcgaggacagcctgcaggatgcctgggactacgtgcaggctcaggtgaagtgctgcggctgggtcagcttctacaactggacagacaacgctgagctcatgaatcgccctgaggtcacctacccctgttcctgcgaagtcaagggggaagaggacaacagcctttctgtgaggaagggcttctgcgaggcccccggcaacaggacccagagtggcaaccaccctgaggactggcctgtgtaccaggagggctgcatggagaaggtgcaggcgtggctgcaggagaacctgggcatcatcctcggcgtgggcgtgggtgtggccatcatcgagctcctggggatggtcctgtccatctgcttgtgccggcacgtccattccgaagactacagcaaggtccccaagtactga

SEQ ID NO: 291673 - DNA, 584 bp, Artificial Sequence
  derived and/or modified sequence
agcagaacccgcaggtgagcaagggggcagcgggccggggtagcctgccggacaaccataggcaaagttagttttagcccccgcttctgcggtccggctcggacaactttcctcggaactagtgacaggtcggggcagctggtgggtgaaaaggagctttagccaccagtcctgaacccccagttctcacactcggccgtgcacagctgcgtgatcctgggtccgtccctctacctggctctggacctcccgggttccagcaggaggaagtgaaccagagtcctccctgctgctgtgtggacgacacgtgggcacaggcagaagtgggccctgtgaccagctgcactggtttcgtggaaggaagctccaggactggcgggatgggctcagcctgtatcaaagtcaccaaatactttctcttcctcttcaacttgatcttctttatcctgggcgcagtgatcctgggcttcggggtgtggatcctggccgacaagagcagtttcatctctgtcctgcaaacctcctccagctcgcttaggatgggggcctatgtcttcatcggcgtgggggcagtcactatgctc

SEQ ID NO: 291674 - DNA, 468 bp, Artificial Sequence
  derived and/or modified sequence
gcagtccgacgccgactgaggcacgagcgggtgacgctgggcctgcagcgcggagcagaaagcagaacccgcagagtcctccctgctgctgtgtggacgacacgtgggcacaggcagaagtgggccctgtgaccagctgcactggtttcgtggaagcatttagagtcctggagtgctggtccctggggaggctcggcagcaggtcctggcattcagagctggcccagggttgagcacctgacacacccccaacctgccctgcgggcaaggacagaagaggcctgagaaccgtctcttcggactcaggggcagtggaactcagactgccttcaggaagctccaggactggcgggatgggctcagcctgtatcaaagtcaccaaatactttctcttcctcttcaacttgatcttctttatcctgggcgcagtgatcctgggcttcggggtgtggatcctggccgacaaga

SEQ ID NO: 291675 - DNA, 573 bp, Artificial Sequence
  derived and/or modified sequence
aagcctcccagggcgtggcgtgaagcggggatttggtaggggagcgcagagcgaggcctgaggtgtttccctggcagaggtccctccactgggaaacaaacggagaggggagtatgtgttcccacgtgtacacataaaccgttttgaatgatacctgagtcctccctgctgctgtgtggacgacacgtgggcacaggcagaagtgggccctgtgaccagctgcactggtttcgtggaaggaagctccaggactggcgggatgggctcagcctgtatcaaagtcaccaaatactttctcttcctcttcaacttgatcttctttatcctgggcgcagtgatcctgggcttcggggtgtggatcctggccgacaagagcagtttcatctctgtcctgcaaacctcctccagctcgcttaggatgggggcctatgtcttcatcggcgtgggggcagtcactatgctcatgggcttcctgggctgcatcggcgccgtcaacgaggtccgctgcctgctggggctgtactttgctttcctgctcctgatcctcattgcccaggtgacggccggggccct

SEQ ID NO: 291676 - DNA, 580 bp, Artificial Sequence
  derived and/or modified sequence
gagtgactgagccccgggctgtgcagtccgacgccgactgaggcacgagcgggtgacgctgggcctgcagcgcggagcagaaagcagaacccgcagttcaactgagccggaccccctaagacttcaagttggaaactcagtggggcttttccagagtcctccctgctgctgtgtggacgacacgtgggcacaggcagaagtgggccctgtgaccagctgcactggtttcgtggaaggaagctccaggactggcgggatgggctcagcctgtatcaaagtcaccaaatactttctcttcctcttcaacttgatcttctttatcctgggcgcagtgatcctgggcttcggggtgtggatcctggccgacaagagcagtttcatctctgtcctgcaaacctcctccagctcgcttaggatgggggcctatgtcttcatcggcgtgggggcagtcactatgctcatgggcttcctgggctgcatcggcgccgtcaacgaggtccgctgcctgctggggctgtactttgctttcctgctcctgatcctcattgcccaggtgacggccggggccctcttctacttc

SEQ ID NO: 291677 - protein, 267 aa, Artificial Sequence
  derived and/or modified sequence
MGSACIKVTKYFLFLFNLIFFILGAVILGFGVWILADKSSFISVLQTSSSSLRMGAYVFIGVGAVTMLMGFLGCIGAVNEVRCLLGLYFAFLLLILIAQVTAGALFYFNMGKLKQEMGGIVTELIRDYNSSREDSLQDAWDYVQAQVKCCGWVSFYNWTDNAELMNRPEVTYPCSCEVKGEEDNSLSVRKGFCEAPGNRTQSGNHPEDWPVYQEGCMEKVQAWLQENLGIILGVGVGVAIIELLGMVLSICLCRHVHSEDYSKVPKY

SEQ ID NO: 291678 - DNA, 804 bp, Artificial Sequence
  derived and/or modified sequence
atgggcagcgcctgcatcaaggtgaccaagtacttcctgttcctgttcaacctgatcttcttcatcctgggcgccgtgatcctgggcttcggcgtgtggatcctggccgacaagagcagcttcatcagcgtgctgcagaccagcagcagcagcctgagaatgggcgcctacgtgttcatcggcgtgggcgccgtgaccatgctgatgggcttcctgggctgcatcggcgccgtgaacgaggtgagatgcctgctgggcctgtacttcgccttcctgctgctgatcctgatcgcccaggtgaccgccggcgccctgttctacttcaacatgggcaagctgaagcaggagatgggcggcatcgtgaccgagctgatcagagactacaacagcagcagagaggacagcctgcaggacgcctgggactacgtgcaggcccaggtgaagtgctgcggctgggtgagcttctacaactggaccgacaacgccgagctgatgaacagacccgaggtgacctacccctgcagctgcgaggtgaagggcgaggaggacaacagcctgagcgtgagaaagggcttctgcgaggcccccggcaacagaacccagagcggcaaccaccccgaggactggcccgtgtaccaggagggctgcatggagaaggtgcaggcctggctgcaggagaacctgggcatcatcctgggcgtgggcgtgggcgtggccatcatcgagctgctgggcatggtgctgagcatctgcctgtgcagacacgtgcacagcgaggactacagcaaggtgcccaagtactag

SEQ ID NO: 291679 - DNA, 318 bp, Artificial Sequence
  derived and/or modified sequence
atggggtccgcatgcatcaaagtcacaaaatactttctgtttctctttaatctgattttttttatcctgggagccgtcatcctgggctttggggtgtggattctggcagacaagtcttcttttattagtgtcctgcaaacaagctcttccagtttgcggatgggtgcatacgtattcattggcgtcggggcagtcaccatgctcatgggatttctggggtgcattggagctgttaatgaggttaggtgtctgttggggctctactttgcctttttgctgctgatcctgattgcccaggtcaccgccggtgctctctag

SEQ ID NO: 291680 - DNA, 327 bp, Artificial Sequence
  derived and/or modified sequence
atgggctccgcatgtatcaaggtgactaagtattttctgttcctgttcaacttgatatttttcatccttggtgcggttattctggggttcggggtgtggatcctggccgacaaatcgagtttcataagcgtcctccagacgagttccagcagtctacgaatgggagcgtatgtgttcatcggggtcggtgcagtcacaatgctgatgggcttcctgggttgtatcggtgccgtcaacgaggtgcgatgcttgctcggattgtactttgccttccttttgctgattctgatcgcccaggtgacggctggcgcccttttctacttctag

SEQ ID NO: 291681 - DNA, 804 bp, Artificial Sequence
  derived and/or modified sequence
atgggatctgcttgcatcaaggtgaccaagtactttctgttcctgttcaacctgatatttttcatccttggcgcggttatcctgggtttcggcgtgtggatccttgccgacaaaagctcctttatcagcgtacttcaaacctcctctagttcactgcgcatgggtgcgtacgtgtttatcggcgtgggggcagtgacaatgttgatggggttcctgggctgcataggcgctgtgaatgaggtgagatgcctgctgggattgtatttcgcttttctgcttcttatcctgattgcccaagttaccgccggtgccctcttttacttcaacatgggaaagcttaaacaagaaatgggcgggattgtgaccgaactcatccgggattataatagttctagagaagatagcctgcaggacgcatgggactatgtccaggcccaggtcaagtgttgtggctgggtgtccttctataactggacagataatgctgagctgatgaatagacccgaagtgacctatccctgtagctgcgaagtcaaaggagaagaagacaactctcttagcgtccgcaaaggattttgcgaggccccgggaaaccgcacacaatcaggaaaccatccggaggactggcccgtttatcaggaaggctgtatggaaaaagtgcaggcgtggctgcaagaaaacctcgggataatcttgggggtaggagtgggggtggcaatcatagagctactgggcatggtgctgagcatatgtctgtgcaggcatgtgcattcagaagattactcaaaggtccctaaatattag

SEQ ID NO: 291682 - DNA, 318 bp, Artificial Sequence
  derived and/or modified sequence
atgggcagcgcctgcatcaaggtgaccaagtacttcctgttcctgttcaacctgatcttcttcatcctgggcgctgtgatcctgggcttcggcgtgtggatcctggccgacaagagcagcttcatctctgtgctgcagaccagcagcagcagcctgaggatgggcgcctacgtgttcatcggcgtgggcgctgtgaccatgctgatgggcttcctgggctgcattggagctgtgaatgaggtgcgctgcctgctgggcctgtactttgccttcctgctgctgatcctgattgcccaggtgacagctggggccctgtag

SEQ ID NO: 291683 - DNA, 327 bp, Artificial Sequence
  derived and/or modified sequence
atgggcagcgcctgcatcaaggtgaccaagtacttcctgttcctgttcaacctgatcttcttcatcctgggcgctgtgatcctgggcttcggcgtgtggatcctggccgacaagagcagcttcatctctgtgctgcagaccagcagcagcagcctgaggatgggcgcctacgtgttcatcggcgtgggcgctgtgaccatgctgatgggcttcctgggctgcattggagctgtgaatgaggtgcgctgcctgctgggcctgtactttgccttcctgctgctgatcctgattgcccaggtgacagctggggccctcttctacttctag

SEQ ID NO: 291684 - DNA, 804 bp, Artificial Sequence
  derived and/or modified sequence
atgggcagcgcctgcatcaaggtgaccaagtacttcctgttcctgttcaacctgatcttcttcatcctgggcgctgtgatcctgggcttcggcgtgtggatcctggccgacaagagcagcttcatctctgtgctgcagaccagcagcagcagcctgaggatgggcgcctacgtgttcatcggcgtgggcgctgtgaccatgctgatgggcttcctgggctgcattggagctgtgaatgaggtgcgctgcctgctgggcctgtactttgccttcctgctgctgatcctgattgcccaggtgacagctggggccctcttctacttcaacatgggcaagctgaagcaggagatgggcggcatcgtgacagagctgatccgggactacaacagcagccgggaggacagcctgcaggatgcctgggactatgtgcaggcccaggtgaagtgctgcggctgggtgtccttctacaactggacagacaatgctgagctgatgaacagacctgaggtgacctacccctgcagctgtgaggtgaagggggaggaggacaacagcctgtctgtgaggaagggcttctgtgaggcccctggcaacagaacccagagcggcaaccaccctgaggactggcctgtgtaccaggagggctgcatggagaaggtgcaggcctggctgcaggagaacctgggcatcatcctgggcgtgggcgtgggcgtggccatcatcgagctgctgggcatggtgctgagcatctgcctgtgcagacatgtgcacagcgaggactacagcaaggtgcccaagtactag

SEQ ID NO: 291685 - DNA, 318 bp, Artificial Sequence
  derived and/or modified sequence
atgggcagcgcctgcatcaaggtgaccaagtacttcctgttcctgttcaatctcatcttcttcatactgggtgccgtcattcttggtttcggtgtgtggattctggccgataagtcttcgttcatcagtgttctacaaactagttccagctcccttcggatgggggcctatgtgtttatcggggtcggagccgtcacaatgctgatgggcttccttggatgtatcggcgcggtcaatgaggttcgttgcctcttgggactttacttcgcctttttgctgttgatcctcatcgcccaggttactgctggggcgctatag

SEQ ID NO: 291686 - DNA, 327 bp, Artificial Sequence
  derived and/or modified sequence
atgggcagcgcctgcatcaaggtgaccaagtacttcctgttcctgtttaatctaatttttttcatcctcggagcagtgatccttggattcggggtatggatcctggccgacaagtctagcttcatatcagtgttgcagacatctagtagcagcctcagaatgggggcatatgtgtttatcggcgtgggcgcagtcaccatgctgatgggatttcttggatgcattggggccgtgaatgaggtccgctgcctcctaggactgtactttgcatttctgctgctcatcttgattgcacaggtgaccgccggtgcactgttttacttttag

SEQ ID NO: 291687 - DNA, 804 bp, Artificial Sequence
  derived and/or modified sequence
atgggcagcgcctgcatcaaggtgaccaagtacttcctgttcctgtttaatctgatctttttcattttgggggctgtgatcctgggatttggagtctggatcttggctgataagtccagtttcatcagcgtacttcagactagctcctcctctctgcgtatgggcgcgtacgtctttatcggagtgggagcggtgacaatgctgatggggtttcttggctgtatcggcgcagtgaatgaggtgaggtgcctgctagggctttatttcgccttcctgctgctgatactgattgcccaagttacagctggcgcactgttctactttaacatgggcaaactgaagcaggaaatgggaggaatcgtcaccgaactgatccgggactacaactcatcccgcgaggactccctccaagacgcttgggactatgtgcaggcacaagtgaaatgctgtggttgggtctccttttacaactggaccgataacgctgaactgatgaacagacctgaggtgacatatccctgttcctgtgaagtgaaaggagaagaagacaacagcctgtccgttcgaaagggattttgcgaagctcccgggaatcggacccaatcggggaaccacccggaggactggccagtgtatcaggagggatgcatggagaaggtccaggcatggctccaggagaacctcggtatcatccttggcgttggggttggcgtggcaatcattgagctgctgggaatggtcctctctatttgcctctgtagacatgtgcactcggaagactacagcaaagtgcctaagtactag

SEQ ID NO: 291688 - DNA, 318 bp, Artificial Sequence
  derived and/or modified sequence
atgggatctgcctgcattaaagtgaccaaatattttctctttctgttcaaccttattttctttatcctcggcgcagttattctgggattcggcgtatggatcctcgccgacaaaagctctttcattagcgtcctccaaacctcctcctcatctctgagaatgggtgcctacgtttttatcggagtcggagcagtgaccatgttgatggggtttctcgggtgcatcggggcagtgaacgaagtgagatgtctcctgggactctacttcgcgtttcttttgctaatcttaatagctcaagtgacagctggggcactctag

SEQ ID NO: 291689 - DNA, 327 bp, Artificial Sequence
  derived and/or modified sequence
atggggtccgcctgtattaaagtgaccaagtatttcttgttcctgttcaatttaatattttttatcctcggggctgtgattttgggatttggtgtatggatcttggcagataagtcatcttttataagcgtgctccagacatcttcttcgtctctgcggatgggtgcttacgtattcatcggcgtgggagctgtaacaatgctgatgggctttttgggctgtatcggtgctgtgaatgaggtgaggtgcctactgggcctgtacttcgcatttctgctgctgattctcatcgcccaggtcaccgccggtgcactgttttatttctag

SEQ ID NO: 291690 - DNA, 804 bp, Artificial Sequence
  derived and/or modified sequence
atgggctctgcctgtataaaggtgactaagtattttttatttttatttaatctgatttttttcattctgggcgcagtcatattaggtttcggggtgtggatactcgccgataagtcgtctttcatctccgtgctgcagacctcttctagtagcctccgcatgggcgcatatgtttttatcggcgtgggagccgttaccatgctaatgggcttcctcggatgcatcggcgctgtaaatgaagtgcgttgtctgctgggcctgtacttcgcatttttgttgttgatattgatcgctcaggttacggccggagctctgttttactttaatatggggaaactgaagcaagagatgggcggaattgttactgagttaatcagagactacaactcatcccgtgaggatagtctgcaggatgcctgggactacgtccaggcgcaagtcaaatgctgtggctgggtgagcttctacaactggactgacaacgctgagctcatgaaccgacctgaggtcacatacccatgttcgtgtgaggttaagggtgaagaagacaatagtttgtctgtacgcaaagggttttgcgaagcacccggaaataggactcagagtggtaaccacccagaggactggcccgtatatcaggagggatgtatggaaaaggtccaggcatggttacaggaaaacctgggcattattctgggggtgggtgttggggtggcaataattgagctgcttgggatggtgttgtcaatttgtctctgccgacacgtacattccgaggactattccaaagtgcctaaatattag

SEQ ID NO: 291691 - DNA, 318 bp, Artificial Sequence
  derived and/or modified sequence
atgggcagcgcctgcatcaaggtgaccaagtacttcctgttcctgttcaacctgatcttcttcatcctgggcgccgtgatcctgggcttcggcgtgtggatcctggccgacaagagcagcttcatcagcgtgctgcagaccagcagcagcagcctgagaatgggcgcctacgtgttcatcggcgtgggcgccgtgaccatgctgatgggcttcctgggctgcatcggcgccgtgaacgaggtgagatgcctgctgggcctgtacttcgccttcctgctgctgatcctgatcgcccaggtgaccgccggcgccctgtag

SEQ ID NO: 291692 - DNA, 327 bp, Artificial Sequence
  derived and/or modified sequence
atgggcagcgcctgcatcaaggtgaccaagtacttcctgttcctgttcaacctgatcttcttcatcctgggcgccgtgatcctgggcttcggcgtgtggatcctggccgacaagagcagcttcatcagcgtgctgcagaccagcagcagcagcctgagaatgggcgcctacgtgttcatcggcgtgggcgccgtgaccatgctgatgggcttcctgggctgcatcggcgccgtgaacgaggtgagatgcctgctgggcctgtacttcgccttcctgctgctgatcctgatcgcccaggtgaccgccggcgccctgttctacttctag

SEQ ID NO: 291693 - protein, 303 aa, Artificial Sequence
  derived and/or modified sequence
MAWWLIAFAHGDLAPSEGTAEPCVTSIHSFSSAFLFSIEVQVTIGFGGRMVTEECPLAILILIVQNIVGLMINAIMLGCIFMKTAQAHRRAETLIFSKHAVIALRHGRLCFMLRVGDLRKSMIISATIHMQVVRKTTSPEGEVVPLHQVDIPMENGVGGNSIFLVAPLIIYHVIDANSPLYDLAPSDLHHHQDLEIIVILEGVVETTGITTQARTSYLADEILWGQRFVPIVAEEDGRYSVDYSKFGNTVKVPTPLCTARQLDEDHSLLEALTLASARGPLRKRSVPMAKAKPKFSISPDSLS

SEQ ID NO: 291694 - DNA, 912 bp, Artificial Sequence
  derived and/or modified sequence
atggcctggtggctgatcgcctttgcacacggggacctggcgcccagtgaaggtaccgccgagccatgcgtgactagtatacactccttctccagcgccttcctgtttagcatcgaggttcaagttaccattggttttggcggaagaatggtgacagaggaatgtccacttgcgattttgatcttgattgtgcagaacatcgttggtctcatgatcaacgccattatgttgggttgtattttcatgaaaacggctcaagcacataggagggcagagaccctaatcttctcaaagcacgccgtcattgcactcagacatggacgactgtgcttcatgctccgtgtcggcgacctgcggaaatccatgataattagcgcaaccattcatatgcaggtggtgagaaagaccacaagtccagaaggtgaggtcgtccccctacatcaggtggatatacccatggagaatggcgtgggtggcaacagcatctttctcgtcgcaccacttatcatctaccatgtgatcgatgccaacagcccgttatacgacttggcaccttcagacctgcaccatcaccaggatctggagataatcgtgattctggagggtgttgttgaaactaccggaatcacaacacaagctagaacctcatatctggccgacgagattttgtggggccagagatttgtgcccattgtggcagaggaagatggtcgttactctgtcgactacagcaaattcggcaatactgtcaaggtccccaccccactctgcacagccaggcagctcgacgaagaccattctctgctggaggctctgaccttggcttccgcaagaggtccattacggaagcggtctgtacccatggcaaaggcaaagcctaaattctctatcagcccggattctctcagctag

SEQ ID NO: 291695 - DNA, 912 bp, Artificial Sequence
  derived and/or modified sequence
atggcctggtggctgattgcctttgcccacggggacctggcccccagcgagggcacagctgagccctgtgtgaccagcatccacagcttcagcagcgccttcctgttcagcattgaggtgcaggtgaccatcggctttggaggccgcatggtgacagaggagtgccccctggccatcctgatcctgattgtgcagaacatcgtgggcctgatgatcaatgccatcatgctgggctgcatcttcatgaagacagcccaggcccacagaagagctgagaccctcatcttcagcaagcacgccgtcatcgccctgcggcacggccgcctgtgcttcatgctgcgggtgggggacctgaggaagtccatgatcatcagcgccaccatccacatgcaggtggtgaggaagaccaccagccctgagggggaggtggtgcccctgcaccaggtggacatccccatggagaatggagtgggcggcaacagcatcttcctggtggcccccctcatcatctaccacgtgattgatgccaacagccccctgtatgacctggcccccagcgacctgcaccaccaccaggacctggagatcatcgtcatcctggagggcgtggtggagaccaccggcatcaccacccaggcccggaccagctacctggctgatgagatcctgtggggccagagatttgtgcccatcgtggccgaggaggatggccgctacagcgtggactacagcaagtttggaaacacagtgaaggtgcccacccccctgtgcacagcccggcagctggatgaggaccacagcctgctggaggccctgaccctggccagcgcccggggccccctgaggaagaggtctgtgcccatggccaaggccaagcccaagttcagcatcagcccagacagcctgtcctag

SEQ ID NO: 291696 - DNA, 912 bp, Artificial Sequence
  derived and/or modified sequence
atggcctggtggctgatcgccttcgcccacggcgacctggccccctctgagggtacggccgagccttgcgtcacctcgatacacagtttcagcagtgcgtttttattctctatagaggtgcaggtgaccatcggattcggtggacggatggtgactgaggagtgcccgctggcaatcttgatcttgatcgtccagaatattgtcggcctcatgattaacgccattatgctggggtgtatcttcatgaagactgcccaggcgcataggagggctgagaccctgatcttcagcaaacatgcggtgatcgctctaagacacggccgtctttgttttatgttacgagtcggtgatctgagaaagagcatgatcatctcagcaactattcatatgcaggttgtgagaaaaactaccagtccagaaggcgaggtcgtaccgcttcatcaggtggatatacccatggaaaatggggtggggggaaattccatctttcttgtcgcgccgctcatcatctaccatgtaatcgatgccaacagcccgctctacgacctcgcaccaagtgatttgcaccatcatcaagatcttgagatcatcgtcatcctagaaggggtggtggagacaaccggcattactacccaggctcggacatcgtacttggcagatgaaattctttggggccagcgattcgttccaattgtcgcagaggaggacggtagatattctgttgactactccaaattcggcaacactgtgaaggtccccacccccttgtgtacggctcgccagctggacgaggatcacagcttactggaggccctgacccttgcttcggctaggggaccgctcagaaagaggagcgttcccatggccaaagcaaaacccaaattcagtatcagcccagacagcctgtcctag

SEQ ID NO: 291697 - DNA, 912 bp, Artificial Sequence
  derived and/or modified sequence
atggcttggtggttaattgcctttgcgcatggggatctggcgccatctgagggcaccgccgaaccttgtgtgacttctatccacagcttttctagtgctttcctttttagcattgaggtgcaggttactattggctttggcggtcggatggttacagaggaatgtcccctggccatcctgattctgatcgttcagaacattgtcgggcttatgatcaatgccattatgctggggtgcatcttcatgaagacagcacaagctcaccgtcgggcagagacacttatattctcgaagcatgctgtaattgccctgagacacgggagattgtgctttatgctgcgggtgggagacctacggaagtctatgattatctctgccactattcatatgcaggtggttcgaaagacaacctcccccgagggcgaggtggtccccctgcaccaggtcgacatccctatggaaaatggagtcggcggtaatagcattttcctggtggcccctctcatcatctatcacgtaatagacgccaatagccctctctacgatcttgctccatctgatttgcaccaccaccaagaccttgaaatcatagtgattcttgagggtgtggtggaaaccaccgggatcactacacaggctaggacctcctacctcgctgacgaaattctgtgggggcagcgctttgtgccgattgtcgccgaggaagatggtcggtattccgtcgattatagcaagtttggcaacacggtaaaggtccccacccctttgtgtaccgcgcgtcagctggatgaagatcactccttactggaggccctaaccctggcctcagcaaggggaccactccgtaagcgcagtgttcctatggcaaaagccaaaccaaaattttcgataagccccgactccctgtcctag

SEQ ID NO: 291698 - DNA, 912 bp, Artificial Sequence
  derived and/or modified sequence
atggcctggtggctgatcgccttcgcccacggcgacctggcccccagcgagggcaccgccgagccctgcgtgaccagcatccacagcttcagcagcgccttcctgttcagcatcgaggtgcaggtgaccatcggcttcggcggcagaatggtgaccgaggagtgccccctggccatcctgatcctgatcgtgcagaacatcgtgggcctgatgatcaacgccatcatgctgggctgcatcttcatgaagaccgcccaggcccacagaagagccgagaccctgatcttcagcaagcacgccgtgatcgccctgagacacggcagactgtgcttcatgctgagagtgggcgacctgagaaagagcatgatcatcagcgccaccatccacatgcaggtggtgagaaagaccaccagccccgagggcgaggtggtgcccctgcaccaggtggacatccccatggagaacggcgtgggcggcaacagcatcttcctggtggcccccctgatcatctaccacgtgatcgacgccaacagccccctgtacgacctggcccccagcgacctgcaccaccaccaggacctggagatcatcgtgatcctggagggcgtggtggagaccaccggcatcaccacccaggccagaaccagctacctggccgacgagatcctgtggggccagagattcgtgcccatcgtggccgaggaggacggcagatacagcgtggactacagcaagttcggcaacaccgtgaaggtgcccacccccctgtgcaccgccagacagctggacgaggaccacagcctgctggaggccctgaccctggccagcgccagaggccccctgagaaagagaagcgtgcccatggccaaggccaagcccaagttcagcatcagccccgacagcctgagctag

SEQ ID NO: 291699 - DNA, 120 bp, Artificial Sequence
  derived and/or modified sequence
atgcaaaacagtcattcaggtgtgaaccaactggggggagtgtttgtgaatgggcgcccgctgccagattctactagacagaagattgtggagctggcccattccggcgcaagaccctag

SEQ ID NO: 291700 - DNA, 455 bp, Artificial Sequence
  derived and/or modified sequence
tgagccatcaccaatcagcataggaatctgagaattgctctcacacaccaacccagcaacatccgtggagaaaactctcaccagcaactcctttaaaacaccgtcatttcaaaccattgtggtcttcaagcaacaacagcagcacaaaaaaccccaaccaaacaaaactcttgacagaagctgtgacaaccagaaaggatgcctcataaagggggaagactttaactaggggcgcgcagatgtgtgaggccttttattgtgagagtggacagacatccgagatttcagagccccatattcgagccccgtggaatcccgcggcccccagccagagccagcatgcagaacagtcacagcggagtgaatcagctcggtggtgtctttgtcaacgggcggccactgccggactccacccggcagaagattgtagagctagctcacagcggggcccggcc

SEQ ID NO: 291701 - DNA, 120 bp, Artificial Sequence
  derived and/or modified sequence
atgcagaacagccacagcggcgtgaaccagctgggcggcgtgtttgtgaatggccggcccctgcctgacagcacccggcagaagatcgtggagctggcccacagcggggcccggccctag

SEQ ID NO: 291702 - DNA, 120 bp, Artificial Sequence
  derived and/or modified sequence
atgcagaacagccacagcggcgtgaaccagctgggcggcgtgttcgtgaacggccgaccactgccagacagcacccgtcagaaaattgtcgagttggcccacagtggggccaggccctag

SEQ ID NO: 291703 - DNA, 120 bp, Artificial Sequence
  derived and/or modified sequence
atgcaaaactcacactccggagtgaaccagctgggtggggtcttcgtcaacggccgacccctgcccgatagcacaagacaaaagattgtagaattagcgcatagcggcgctcgtccttag

SEQ ID NO: 291704 - DNA, 120 bp, Artificial Sequence
  derived and/or modified sequence
atgcagaacagccacagcggcgtgaaccagctgggcggcgtgttcgtgaacggcagacccctgcccgacagcaccagacagaagatcgtggagctggcccacagcggcgccagaccctag

SEQ ID NO: 291705 - protein, 1298 aa, Artificial Sequence
  derived and/or modified sequence
MKVVPEKNAVRILWGRERGARAMGAQRLLQELVEDKTRWMKWEGKRVELPDSPRSTFLLAFSPDRTLLASTHVNHNIYITEVKTGKCVHSLIGHRRTPWCVTFHPTISGLIASGCLDGEVRIWDLHGGSESWFTDSNNAIASLAFHPTAQLLLIATANEIHFWDWSRREPFAVVKTASEMERVRLVRFDPLGHYLLTAIVNPSNQQGDDEPEIPIDGTELSHYRQRALLQSQPVRRTPLLHNFLHMLSSRSSGIQVGEQSTVQDSATPSPPPPPPQPSTERPRTSAYIRLRQRVSYPTAECCQHLGILCLCSRCSGTRVPSLLPHQDSVPPASARATTPSFSFVQTEPFHPPEQASSTQQDQGLLNRPSAFSTVQSSTAGNTLRNLSLGPTRRSLGGPLSSHPSRYHREIAPGLTGSEWTRTVLSLNSRSEAESMPPPRTSASSVSLLSVLRQQEGGSQASVYTSATEGRGFPASGLATESDGGNGSSQNNSGSIRHELQCDLRRFFLEYDRLQELDQSLSGEAPQTQQAQEMLNNNIESERPGPSHQPTPHSSENNSNLSRGHLNRCRACHNLLTFNNDTLRWERTTPNYSSGEASSSWQVPSSFESVPSSGSQLPPLERTEGQTPSSSRLELSSSASPQEERTVGVAFNQETGHWERIYTQSSRSGTVSQEALHQDMPEESSEEDSLRRRLLESSLISLSRYDGAGSREHPIYPDPARLSPAAYYAQRMIQYLSRRDSIRQRSMRYQQNRLRSSTSSSSSDNQGPSVEGTDLEFEDFEDNGDRSRHRAPRNARMSAPSLGRFVPRRFLLPEYLPYAGIFHERGQPGLATHSSVNRVLAGAVIGDGQSAVASNIANTTYRLQWWDFTKFDLPEISNASVNVLVQNCKIYNDASCDISADGQLLAAFIPSSQRGFPDEGILAVYSLAPHNLGEMLYTKRFGPNAISVSLSPMGRYVMVGLASRRILLHPSTEHMVAQVFRLQQAHGGETSMRRVFNVLYPMPADQRRHVSINSARWLPEPGLGLAYGTNKGDLVICRPEALNSGVEYYWDQLNETVFTVHSNSRSSERPGTSRATWRTDRDMGLMNAIGLQPRNPATSVTSQGTQTLALQLQNAETQTEREVPEPGTAASGPGEGEGSEYGASGEDALSRIQRLMAEGGMTAVVQREQSTTMASMGGFGNNIIVSHRIHRSSQTGTEPGAAHTSSPQPSTSRGLLPEAGQLAERGLSPRTASWDQPGTPGREPTQPTLPSSSPVPIPVSLPSAEGPTLHCELTNNNHLLDGGSSRGDAAGPRGEPRNR

SEQ ID NO: 291706 - DNA, 3897 bp, Artificial Sequence
  derived and/or modified sequence
atgaaagtggtccctgagaaaaacgccgttcgcattctgtggggccgcgagagaggagctcgggccatgggagctcagcgcctgctgcaggaattggtggaagacaaaacaagatggatgaagtgggaggggaagcgggttgagctgcccgattctccgcgctccaccttcttgctggcttttagcccagataggaccctcctggcctcgacgcacgtgaatcataatatatacatcactgaagtcaagaccggcaagtgtgtacactcattgattggccaccggcgcactccatggtgcgtcacattccatcccacaattagcggcctgattgcctccggctgcctggacggcgaggtacggatttgggacctgcacgggggctccgaatcttggtttacagactcaaataacgctatcgccagcctggccttccaccctaccgcccaactcctgctcatagcaaccgccaacgaaatacatttctgggactggagccgacgtgagcctttcgcggtggtaaagacagcctctgaaatggaaagggtcaggctggtcaggtttgacccactggggcactatttgcttacagcaattgtgaacccctcgaatcaacagggggacgatgaaccagaaattccaatcgatgggaccgaactgtctcattatagacaaagagcattacttcagtcccagccagtccgacggaccccgttgctgcacaacttcctgcacatgctaagctctagatcatcggggattcaggtgggggagcagagcaccgtgcaggacagtgctaccccatcccctcccccccctcctccccagcccagtactgaaagacctcgcacgtctgcttacatccggctgcgccagagagtgtcttaccctacggcagaatgctgccagcatctcgggatactctgcctgtgttctcggtgctcgggtacacgtgttccatcactgcttccacaccaggattcagttccaccagctagcgcccgcgccaccacacctagtttcagtttcgtccagaccgagccattccatccccctgaacaggccagctccacacagcaagaccaggggctgctcaaccgtccgtcagcattctctaccgtgcagtcaagcaccgcaggtaatacactgagaaacctatctttggggcccacgcggcggtctctgggcggtcccctgtcaagccatccgtcgcgctaccaccgtgaaatcgcacccgggcttacgggcagcgaatggacccgaacagtactgagcctgaatagccggagcgaagccgaatccatgcctcctcctaggacttccgccagttctgtctcactgctgagtgtgttacgccagcaagaggggggaagtcaagctagcgtgtacaccagtgccaccgagggccgcggttttcctgcgtctgggctggccacagagtcagatggcggaaatggcagcagccagaataactctggctcaattagacacgagctccagtgcgatcttagacggtttttcttagagtatgatcgactgcaggagctggaccagagcctgagtggcgaagcaccccaaacgcagcaggcccaggaaatgcttaataataatatagagagcgagcgcccgggcccatcccatcagccaacacctcacagcagcgagaataacagcaacctgtctaggggacacctcaatcgctgtcgagcatgccataatctgctgaccttcaacaatgacaccttacggtgggaacgtaccactcctaactactcatctggagaagcttcatcaagctggcaagtgccgagctcattcgaatccgttcctagctccggttcccagcttcctcctcttgaacgaacagaaggtcagacgccatcatctagcagacttgaactgtctagctctgcttcaccccaagaagaacggactgtcggggttgcctttaaccaagaaacaggccactgggagcgcatctacacacagtcttctagaagtgggaccgttagccaggaggcactgcaccaggacatgccggaggagagttccgaagaggacagcctgagaaggaggcttctggagagctcgttaatttcacttagcaggtatgacggggccggcagccgggaacatccaatatatcctgacccagcacgactctcaccagccgcgtactacgcgcagaggatgattcagtacttatcccggcgcgacagtataaggcagaggtcgatgagatatcagcaaaatcgcttgagatcaagcacaagctcctcatccagtgacaaccagggaccgagtgtggagggtacagatttagaatttgaggacttcgaagataatggagacaggtcccgccatcgtgcgccaagaaatgctagaatgagtgccccttcactgggaagattcgtccccaggaggtttcttttgcccgaatatctgccgtatgcgggtattttccacgaacgcggtcagcctggactggctacacactccagcgttaacagggtgctggcaggagccgttataggggatggacagagtgctgtggctagcaatatagccaacaccacctacagactgcagtggtgggattttacaaaatttgacctcccagagatctcgaatgcctccgttaatgtcctggtacagaattgtaaaatctataacgatgcgtcatgcgatatcagcgctgatggccagctgctcgccgcctttataccatcatcccagcgcggattcccggacgaaggcatcctagcagtgtatagcctggcccctcacaatctgggcgagatgctgtatactaaaaggtttgggccaaacgcaatttccgtgagcctttccccaatgggtagatacgtgatggtgggattggcaagccggcggattctactgcatcccagcacagaacacatggttgcccaggtgtttaggctgcagcaggcgcatggtggtgaaacctcgatgagacgtgtattcaacgtgttgtacccgatgccagccgatcagagacgccatgtatccatcaactcagcccgttggctgcctgagccaggactggggctggcttacggcaccaacaagggcgacctagtgatttgccggccagaagctctgaattccggggtcgagtactactgggaccagctgaacgaaacagtattcaccgttcactcaaatagcagatcttcggagcggccgggcacctccagagctacgtggcgcacggatcgagacatgggactgatgaacgccatcgggctccagccaaggaatcccgcaacctctgtgacatcccaggggactcagactctagccctgcagttgcagaacgccgaaacgcaaaccgaaagggaagtcccagaacctggcaccgccgccagtgggcccggggaaggggaggggtcagaatacggggcctcgggcgaagacgcactttcccggatccagcggctgatggccgaggggggcatgacagcggttgttcagcgagagcagagcacgactatggcttcaatgggcgggttcgggaacaacatcatcgtctcacatcggatccataggagcagtcagaccggcacagagcccggcgcggctcatacctcttcgccgcagccgtctacctcgcgaggtctcctccccgaggccgggcagctggcagaaagggggctctcccctcgcaccgctagctgggatcagcctgggaccccagggcgggaacccacgcagcctactctgccctcatcatctcctgtgcctatccctgtgagcttgccctccgcagaggggcccactcttcattgtgaactgaccaataataaccatctgcttgacggtggcagttccaggggcgacgcggctgggcctcgcggcgaaccacgcaacaggtag

SEQ ID NO: 291707 - DNA, 3897 bp, Artificial Sequence
  derived and/or modified sequence
atgaaggtggtgcctgagaagaatgctgtgcgcatcctgtggggccgggagcggggggcccgggccatgggcgcccagaggctgctgcaggagctggtggaggacaagacccgctggatgaagtgggagggcaagagggtggagctgcctgacagccccaggagcaccttcctgctggccttctccccagacaggaccctgctggccagcacccacgtgaaccacaacatctacatcacagaggtgaagacaggaaaatgtgtgcacagcctcatcggccacaggaggaccccctggtgtgtgaccttccaccccaccatcagcggcctgattgccagcggctgcctggatggagaggtgcgcatctgggacctgcacggcggcagcgagagctggttcacagacagcaacaatgccatcgccagcctggccttccaccccacagcccagctgctgctgattgccacagccaatgagatccacttctgggactggagcagaagagagccctttgctgtggtgaagacagccagcgagatggagcgggtgcggctggtgcgctttgaccccctgggccactacctgctgacagccatcgtgaaccccagcaaccagcagggagatgatgagcctgagatccccattgatggaacagagctgagccactaccggcagagggccctgctgcagagccagcctgtgcggaggacccccctgctgcacaacttcctgcacatgctgagcagccgcagcagcggcatccaggtgggggagcagagcacagtgcaggacagcgccacccccagccccccacctcctccaccccagcccagcacagagcggcccaggaccagcgcctacatccggctgcggcagagggtgtcctaccccacagctgagtgctgccagcacctgggcatcctgtgcctgtgcagccgctgcagcggcaccagggtgcccagcctgctgccccaccaggacagcgtgcccccagccagcgcccgggccaccacccccagcttctcctttgtgcagacagagcccttccaccccccagagcaggccagcagcacccagcaggaccagggcctgctgaaccggcccagcgccttcagcacagtgcagagcagcacagctggcaacaccctgaggaacctgagcctgggccccacccggcgcagcctgggcggccccctgagcagccaccccagccgctaccaccgggagatcgcccctggcctgactggaagtgagtggaccaggacagtgctgagcctgaacagccgctctgaggccgagagcatgcccccacccaggaccagcgccagctctgtgtccctgctgtctgtgctgcggcagcaggagggcggcagccaggcctctgtgtacaccagcgccacagagggccggggcttccctgccagcggcctggccacagaaagtgatggcggcaatggcagcagccagaacaacagcggcagcatcagacatgagctgcagtgtgacctgcggcgcttcttcctggagtatgaccggctgcaggagctggaccagagcctgtctggagaggccccccagacccagcaggcccaggagatgctgaacaacaacatcgagagcgagaggcctggccccagccaccagcccaccccccacagcagcgagaacaacagcaacctgagccggggccacctgaaccgctgccgggcctgccacaacctgctgaccttcaacaatgacaccctgcgctgggagaggaccacccccaactacagcagtggagaggccagcagctcctggcaggtgcccagcagctttgagagcgtgcccagcagcggcagccagctgccccccctggagaggacagagggccagacccccagcagcagccggctggagctgagcagcagcgccagcccccaggaggagaggacagtgggcgtggccttcaaccaggagaccggccactgggagcgcatctacacccagagcagccgctctggaacagtgtcccaggaggccctgcaccaggacatgcctgaggagagcagcgaggaggacagcctgcggcggcggctgctggagagcagcctcatcagcctgagccgctatgatggagctggcagccgggagcaccccatctacccagaccctgcccggctgagccctgctgcctactatgcccagaggatgatccagtacctgagcagaagagacagcatccggcagaggtccatgagataccagcagaaccggctgcggagcagcaccagcagcagcagcagtgacaaccagggccccagcgtggagggcacagacctggagtttgaagattttgaggacaacggggacaggagccgccaccgggcccccagaaatgccaggatgtctgcccccagcctgggccgctttgtgccccggcgcttcctgctgcctgagtacctgccctatgccggcatcttccacgagcggggccagcccggcctggccacccacagctctgtgaacagagtgctggccggggctgtgattggagatggccagagcgctgtggccagcaacatcgccaacaccacctaccgcctgcagtggtgggacttcaccaagtttgacctgcctgagatcagcaatgcctctgtgaatgtgctggtgcagaactgcaagatctacaatgatgccagctgtgacatctctgcagatggccagctgctggccgccttcatccccagcagccagaggggcttcccagatgagggcatcctggccgtgtacagcctggccccccacaacctgggggagatgctgtacaccaagcgcttcggccccaatgccatctctgtgtccctgagccccatgggccgctacgtgatggtgggcctggccagccgccgcatcctgctgcaccccagcacagagcacatggtggcccaggtgttccggctgcagcaggcccatggaggagagacctccatgagaagagtcttcaacgtgctgtaccccatgcctgctgaccagaggagacatgtgtccatcaacagcgcccgctggctgcctgagcccggcctgggcctggcctacggcaccaacaagggggacctggtgatctgcaggcctgaggccctgaacagcggcgtggagtactactgggaccagctgaatgaaacagtgttcaccgtgcacagcaacagccgcagcagcgagaggcctggcaccagccgggccacctggaggacagaccgggacatgggcctgatgaatgccatcggcctgcagcccagaaatcctgccacctctgtgaccagccagggcacccagaccctggccctgcagctgcagaatgctgagacccagacagagcgggaggtgcctgagcctggaacagctgccagcggccctggagagggggagggctctgaatatggagccagcggagaagatgccctgagccgcatccagaggctgatggccgagggcggcatgacagctgtggtgcagcgggagcagagcaccaccatggcctccatgggcggcttcggcaacaacatcatcgtgagccaccgcatccacaggagcagccagacaggaacagagcccggggccgcccacaccagcagcccccagcccagcaccagccggggcctgctgcctgaggccggccagctggccgagcggggcctgagccccaggacagcctcctgggaccagcccggcaccccaggccgggagcccacccagcccaccctgcccagcagcagccctgtgcccatccctgtgtccctgcccagcgctgagggccccaccctgcactgtgagctgaccaacaacaaccacctgctggatggcggcagcagcagaggagatgctgctggccccagaggagagcccaggaacagatag

SEQ ID NO: 291708 - DNA, 3897 bp, Artificial Sequence
  derived and/or modified sequence
atgaaggtggtgcccgagaagaacgccgtgcggatcctgtggggcagagagaggggtgcacgcgcaatgggagcacagcggctcctgcaggagttagtggaagataagactcgatggatgaaatgggaaggcaagagagtcgaattacccgattcaccccggagcacctttttgcttgccttcagccctgacaggacactccttgcttctacccacgtgaaccacaacatatacatcaccgaagtgaaaaccgggaagtgtgtgcactcgctcatcgggcaccggagaacgccttggtgcgtaacattccatcccacaatttcaggtctcattgcgtccggctgcctcgacggtgaagtcagaatctgggatctacatgggggttccgagtcttggttcactgattctaacaacgctattgccagcctcgcctttcacccaactgcccagctgctcctgatagctaccgccaacgagatacacttttgggactggagccgccgtgaaccttttgccgtcgtgaaaactgcgagtgaaatggaacgggtgcgtcttgtgcgatttgatccactcggccattatttgttaacagccatcgtgaacccctccaaccagcagggcgacgacgagcctgagatccccattgatggcaccgagctgtcacactatcgccagcgggcactgctgcagtcacaaccggttagaaggacccctctgctgcacaatttcctgcacatgctctcaagccgcagctctggcattcaagtgggggagcaatcgacagtccaggattcagctacacccagtcctccccctcctcctccccagccttctacggagcgcccaaggactagtgcctacatccgacttcgacagcgagtcagttatccaacagcggaatgttgtcaacacctggggattttatgtctgtgctcccgatgtagcggaactcgagtgccttccctgctcccacatcaggactctgtgccacccgcttctgcacgcgccactaccccctctttcagcttcgtgcagaccgagccctttcaccctcctgaacaagcatcctctacccaacaggatcagggactactaaaccgtcctagcgctttttctacggtccagagcagcacggctgggaacacactgcgcaatctgagtctggggcctacacggcggtcattgggggggccactgtcttctcatccttcaagatatcaccgtgagatcgctccagggttaactggaagcgagtggacccgcaccgtgttgagcctgaacagtcggagcgaagcagagtccatgcctcctcctcggactagcgctagttcagtcagcctcttatccgtgttacgccagcaggaaggagggagccaggccagcgtgtatactagcgctaccgaaggaaggggatttcctgctagcggacttgctacggagtctgacgggggtaatggcagctcccagaacaatagtgggagcatccggcatgagttgcaatgcgacttgcgaaggttcttcctcgagtatgaccgccttcaggaactcgatcagtcactgtcaggggaggctcctcagacgcagcaagcccaagaaatgctgaataacaacattgaatctgaaaggccgggtccctcgcaccagccgacccctcactcctcagaaaataacagcaacctgtccagggggcatctgaacaggtgccgagcctgtcataatctgttgaccttcaacaatgatactttgaggtgggagaggaccacgcccaattattcttctggcgaggcctctagtagctggcaggtgccctcctcgttcgaatcagtaccaagctcgggttcgcaactgccccctttggagcgtaccgagggacagacaccttcaagcagtcggcttgaactgtcttcaagcgcgtcacctcaggaagaacgaaccgtcggtgttgctttcaaccaagagacgggccactgggagaggatctacacccagtcttcccgttctggtacagtcagccaggaggccctgcaccaggatatgccagaagaatctagtgaggaggatagtctccgccgacggctgctcgagtcctcactgattagtctgagcaggtacgacggtgcgggatctagggaacatcctatctaccccgaccccgctcgcctgtcccctgccgcgtactacgcgcaacgcatgatacagtatctctcaagacgcgatagcatccggcagaggagcatgcgctaccagcagaaccgcttgcgcagtagcacatcaagctcaagttcagacaaccaggggccctcagtggagggcacagatttggaattcgaggatttcgaagacaacggcgacagatccagacatcgggcaccccgaaatgctcggatgtccgctcccagcctggggcgtttcgtaccccggcgctttctgcttcctgagtatctgccttatgccgggatcttccatgagaggggtcagcccgggctggctacacattctagcgtgaacagggtactggcaggagcagttattggggacggccagtctgctgtggccagcaacatcgcgaatacgacctacagattacagtggtgggactttactaaattcgatttacccgaaatcagcaacgcatccgtgaatgtgctcgttcaaaattgcaagatctacaatgacgcaagctgtgacatttctgccgatggccagctgctagcagccttcattccctcctcccagcgggggtttcccgacgaggggattctggcagtgtattcactcgccccccacaacctgggggaaatgctatacacaaagagatttggccctaacgctatctcagtttccctgagtcccatggggaggtacgtaatggtgggcctggcgtctcgcagaatactgctgcacccttctaccgaacatatggtagcgcaggtgttcaggttgcagcaggcccatggcggggaaacatccatgcggcgcgtgtttaatgtgctctatcctatgccagccgaccaaagaagacacgtgtccatcaactcggcgagatggctgccggaaccaggcctcggcctcgcctatggcacgaacaaaggcgatctggtcatctgccgaccagaagccctaaattcaggagtggagtactattgggatcagctgaatgaaacagtatttaccgtgcatagcaacagtcggtcctcagaacggcccggaacgtcgcgcgccacttggagaaccgaccgcgacatgggactgatgaacgctataggtctgcagccgaggaatcctgccactagcgtaaccagtcaaggcactcaaaccctggccttacagcttcagaacgcagaaacccaaaccgaacgcgaggtgcctgagcccggcaccgccgcctctgggcctggagagggggaaggctctgagtatggcgcttctggcgaagacgctctgtctcggattcagcgactgatggcggagggcggaatgactgccgttgttcagagggagcagagcaccacaatggcgagcatgggtggcttcggaaataacattatagtgtctcataggattcacaggtcaagccaaacgggaactgagcccggagctgcccacacctcgagcccgcaaccctctacctcacggggacttctgcctgaggccggccagctggccgaaagaggcctgagcccacgaacagcttcgtgggatcagcccggtacgcccggccgggaacctacacagccaaccctgccatccagttctcccgttccaatccccgtcagtctaccgtccgccgaaggcccgactctgcattgcgaactgacaaacaataaccatttgttggacgggggatctagtagaggtgatgccgctgggcctaggggagaacctagaaacagatag

SEQ ID NO: 291709 - DNA, 3897 bp, Artificial Sequence
  derived and/or modified sequence
atgaaggtagtgccagaaaagaacgcggtccgcatattgtggggtagagagcggggagcacgtgccatgggagctcagcgtctcttgcaggagctagtagaagataaaacccgatggatgaaatgggaggggaagagggttgagctgcctgacagcccaaggagcacttttttgctggccttcagccccgaccgtacgctgcttgccagcacacatgtgaatcacaatatttatataacagaagtgaagacgggcaagtgcgtgcactcactgattggacataggagaaccccctggtgcgtgaccttccaccctaccatttcaggattgatcgccagcggatgccttgatggtgaggttcgaatatgggacttgcacggtggctccgagtcctggtttactgactctaacaacgctatcgctagtctggcctttcacccaaccgcacagctccttcttatcgccactgcgaacgaaatacacttctgggactggagcaggcgcgaaccatttgccgtggttaaaactgcctcagagatggagagagtgagactggtgcgatttgatccactggggcactatttgctgacagcaatcgttaatcccagtaaccaacagggcgatgacgaacctgaaatccccatcgatggcactgaactctcccactacagacaaagggcacttctacagagtcagccagtgcgccgtactccgctcctgcacaatttcctgcacatgttaagcagtcgctcctccggaatccaggttggagagcagtcaaccgttcaggatagcgccacgccttccccccctccacctcctccacagccctccactgaacgacctaggacgagcgcctacattagactgagacaacgcgtgtcatatccgacggctgagtgctgtcagcatttaggtatattgtgtctgtgtagtcgatgcagcggtacccgggtgcccagcttacttcctcaccaggatagtgtaccccctgcgtcagcaagggctacaactccctcattctcatttgtgcagaccgaaccatttcatccgccagaacaagccagtagcacccagcaggaccaaggcttacttaaccgaccgtccgccttctccacagttcagtccagtaccgcaggcaacaccctgagaaatttatctcttggacccacacgcaggagcctgggagggccattgtcctctcacccttccaggtaccaccgcgagattgcacctggcctaacagggtctgagtggacgcgtaccgtcttgtcattgaatagtcggagtgaagccgagtcaatgcctccacctcgcacatccgcctcctctgtcagcttactttcagtcctacggcagcaggaggggggatcacaggcgtcagtctatacttccgcaacagagggaaggggctttcccgcaagcggcctggccactgagtccgatggcggaaatggaagctcccaaaataatagcggcagcatccgacacgagctgcaatgcgacctgaggagattcttcctcgagtacgaccgcttgcaggaactggatcagagcctgtccggggaggctccacagacccagcaggcccaggagatgttgaataacaacatagagagtgagaggcctgggccttctcaccagcccacaccacacagttctgaaaacaactcaaacctctctcggggtcacctgaacagatgcagggcctgccataacctcctgaccttcaataatgacacactgcgttgggagagaacaacccccaactactcaagcggagaggcatcctcaagctggcaggtgccaagcagtttcgagtcagtaccctcaagtggcagtcagctgccaccgctcgagcgaacagaaggccagaccccctcttcgagccgactagagctgtcctcctcagcctcaccccaggaggagcggaccgtgggggtagcgtttaatcaggaaactggccactgggagcggatctatacccagtcaagtaggagcggcactgtaagtcaggaagccttacaccaagacatgccagaggaaagcagtgaagaagatagcctgcggaggagactactggaaagctctttgattagcctttcgcgctatgatggagctgggtcaagagaacacccaatttatcccgatccggcacgcttaagccccgctgcttattacgcacagcgaatgatccagtatctgtctaggagagactccatacggcagcgcagtatgcggtaccagcagaataggctgaggtcctctacctcttcctcttcatctgataaccaaggcccatctgtggagggaacggatctagagtttgaagactttgaggataacggcgaccgctcccgccacagggcccctcgcaatgcgaggatgagtgctccatccctgggcaggttcgtgcccaggcggttcttgctcccagagtatctcccttacgccggtattttccatgagcggggacagcctggtctggcaacgcatagtagcgtaaacagagtactggcaggcgctgtaataggagatgggcaatcagccgtggcttctaatattgccaacacaacctacaggctgcagtggtgggacttcacgaaattcgatctgcctgagatctcgaacgcaagcgtcaacgtgctggtacaaaactgtaaaatatataacgacgcgtcatgcgatatcagcgcagatggccagctgttagcagcttttatccctagttcacagcggggatttccggatgagggcatcctcgcagtctacagtctggcgccacacaatctcggcgagatgttgtacacaaagcgcttcggacccaatgctattagcgtgagcctcagccctatgggaaggtacgtgatggtggggcttgccagccgacgtatcctcctgcacccaagcacggagcatatggtggcccaggtgtttaggctacaacaggcccacgggggagagacctctatgaggcgcgtgtttaacgtattatatccaatgccagccgatcagcgcagacacgttagcatcaactccgcccgatggctacctgagcccggactcggattggcctatggcaccaataagggggacctcgtcatctgcagaccagaggccttgaactcaggagtggagtattactgggatcaactgaatgagacggtgtttactgtgcactctaactccagaagttctgaaagaccaggaacatcccgagccacctggcggaccgatagagacatgggtctgatgaatgctatcggactccagcctagaaaccctgccacctccgttacaagccagggcacccagacactggcgctccagctccagaacgcggaaacacaaaccgaacgcgaagtgcccgaacctggcacggccgcttcaggtcccggtgaaggtgaaggatctgaatatggagcttcgggggaagacgccctgtcccgaattcagcgactaatggccgaaggcggaatgacagctgtcgtgcagcgagagcagtctaccacaatggctagtatggggggatttgggaataacattatcgtgtctcatcgcatccatagatcatcccaaacaggcactgagccgggagctgcccacacatcatccccacagccctcaacctcccggggtctgcttccagaagccggtcagttggctgagcggggactttctccccgtactgcctcatgggatcagcctgggacccctggcagggaacctacacaacccaccctgccctctagcagccctgtgcccatccccgtatctctgccctccgctgagggcccaacccttcactgtgagctgaccaacaataaccacttgctggacgggggttcatcgcggggagatgccgctggcccacgtggcgagcccagaaatcgttag

SEQ ID NO: 291710 - DNA, 5351 bp, Artificial Sequence
  derived and/or modified sequence
aaatgaagggcccttaatcataagcaatttcctagttacacgacctcagtgctcccagaaggggattaatgaagagccaccagactatctttatggagaatctagattgggaagttaagctaagaatgtgcatttttgaaaaagtttttatggtagaagagaatgtatatcagaggaaagaatgtagagaagaaagcaacattgtccactgggaattgataagttctgcgtagaatttagagttataaggactatctcattggctcctaatgaatgctaaataacaaatggaaattgctatttccatgaggacaacttacaaggacctgtatggcctcattttagctgcttcagtgtgttggagctgttacttgctccttcatttcctgggcctggtgtgacagtggctactgagcgccatgaaggttgtcccagaaaagaatgctgtccggatactctgggggcgagaacggggtgctcgggccatgggagctcagcggcttctgcaggagctggtagaagataaaacccggtggatgaaatgggagggcaagagagtagaactgccggatagtccacgctctaccttcttattggccttcagcccagacaggactctcttagcctccacccatgtgaaccataatatctatattacggaggtgaagactggcaagtgtgttcattccctgattggacaccgccgtactccatggtgtgtcacttttcatcccaccatctcaggccttattgcttctggctgcctagatggggaggttaggatttgggatttacacggtggcagtgaaagctggttcacagatagcaacaatgccattgcctccctggctttccaccctacggctcagctcctgctgattgccactgccaatgagatccacttctgggactggagtcgacgggaaccctttgctgtggtgaagacagctagtgagatggaacgggtccgtctggtgagatttgatccacttggacactacttactcacagcaattgttaacccctctaatcaacagggtgatgacgaaccagagatccccatagatggaacagaattatcccactaccgtcagcgtgccctcctgcaatcacagccagttcgccggacgcctctcctccacaatttcctgcacatgctgtcctcccgctcttctggcatccaggtgggagagcaaagcacagtgcaagattctgctaccccctcacccccaccgcctccccctcagccctccacggagcgccccaggacttccgcttacatcaggctccgacagcgggtcagttaccccacagctgagtgctgccagcaccttgggatcctgtgcctttgcagccgctgctctggcactcgagttccttccctcttgccacaccaggacagtgtcccccctgcttctgccagagctactaccccttccttttcttttgtacagaccgagcccttccatcccccggagcaggcctcgtcaacgcagcaggaccagggcctcctgaaccggccgtctgccttcagtacagtccagagcagcactgccggcaacacgctccgcaacctcagtctgggtcctacccgccgctctttgggagggcctctgtctagccacccttctaggtatcaccgagaaatagctcctgggttgacaggatctgagtggacccggacagtactcagtctgaactcccgctctgaggcggaatccatgcccccgcccagaaccagtgcctcttcggtgagtttgctgtctgtgctgagacagcaggaaggtggctctcaggcatctgtgtacacttcagccacagaagggaggggttttccggcatcagggttggcaactgagtcagatggagggaatggctccagccaaaacaactcgggcagcattcgccatgagcttcagtgtgacctgagacgcttctttctggagtatgaccggcttcaggagctggatcagagcctgagtggggaagctccccagacccaacaggcccaggaaatgctcaacaataacattgaatctgagaggccaggcccttcccaccagcccaccccacacagcagtgagaacaactccaacctgtcccgtggccacctgaatcgctgtcgtgcttgccacaatctcctgaccttcaacaacgataccctgcgctgggaaagaaccacacctaactactcctctggcgaggctagttcctcttggcaggtccccagctcctttgagagtgtgccatcaagtggcagccagttgccacctctcgagcggactgagggccaaacgcccagctccagcaggctggagttgagcagctctgctagtccgcaggaggagaggactgtgggggtggcctttaaccaggagacaggccactgggaaagaatttacacccagtccagcagatctggaactgtgtcacaggaggccttacatcaggatatgcctgaggagagctctgaggaggattcactcaggaggaggctgctggaatcttccctcatttcattatcccgttatgatggagcaggatccagagagcacccaatttacccagacccagcgagattatctcctgctgcatactacgcccagaggatgatccagtatctctcacggagagacagtattcgccagcgctccatgcgctaccaacagaaccgtctccgttcttccacctcctcctcttcctcagacaaccagggtccatcagtagagggaaccgacttggaatttgaggactttgaggacaatggtgacagatccaggcaccgagctccacgcaatgcccggatgtctgcaccttcgcttggacgctttgtcccaaggcgtttcttgctgcctgagtacttgccttatgctgggatttttcatgaacgtggacagcctggcttggctactcactcttctgttaacagggtcctggcaggggcagtgatcggtgatggacagtctgctgtggccagtaacattgccaatactacctaccggctccagtggtgggacttcactaagtttgacctccctgaaatcagtaatgcttccgtgaatgtgctggtgcagaactgcaagatctacaatgatgccagctgtgacatttctgcagatggccagctcctggcagctttcatccccagcagccagaggggctttcctgatgaaggcatcctggcagtgtactccctggccccccataacctgggcgaaatgctctacaccaagcgatttggtcccaatgccatttcggtgagcctgtccccaatgggcagatatgtaatggtgggcttggcctcacgaaggatcctgctgcacccctccacagagcacatggtggcccaggtcttcaggctgcaacaggcccatggtggagagacctccatgaggagagttttcaacgtcctttatcccatgcctgccgaccagcggagacatgtcagtatcaactctgcccgttggctgcctgagccagggcttggcttggcctatggtactaacaaaggagacctggtgatctgccgaccagaggccttaaactctggtgttgagtactactgggaccagctgaacgagacggtcttcactgtccattccaacagcaggagcagcgagcggcctggaaccagcagagccacatggaggacagacagagacatggggctgatgaatgccattgggcttcagccccggaaccctgccacctcagtgacatctcagggcacccagactctggcccttcagctgcagaatgccgaaacacagactgagagggaggtgccggagccagggacagccgcctcaggtcctggtgaaggtgagggttcagagtatggtgccagtggagaagatgcgctcagcaggatccagaggctgatggcggagggcggcatgacagccgtggtgcagcgggagcagagcaccaccatggcctccatgggcggcttcggcaacaacatcatcgtcagccaccgcattcaccgcagctctcagacgggcactgaacctggtgccgcccacacctcctcaccccagccctccacctctcggggactgctcccagaggccgggcaactggcagagcgaggcctaagcccccggacagcttcctgggaccagcctggtacccctgggcgggagccaacccagccaaccctgccctcttcctcccctgtccccattcctgtttcccttcccagcgctgagggaccaaccctccactgcgagttgaccaataacaaccaccttctggatggtggcagcagcaggggggacgctgcaggccctaggggagaaccacggaacaggtagagacaaacgttgcactggtgcctcccctcgaaccgccaagcagaaaccggacctcacagctgactgggaactggacatgtggaagagctgctggctgcatcagggaacaggaggaggaagagggtcagggtggagaggaagatcagtcagtgggcacaagacagtcaaatgggcaaggcctgcctcggggaactagaaccttccaggatctggagcccgggagagccacactgtgggcttaatgtgaatagaggaacaagtgggtatctctgccaggcaccccactttctcctagtaacatgggctcaggggactcagccctggacagagagcctccagagagtgaacagtcttccagatctgggccaatcatcctggacagaggcccgcgaggcagctttgccctgtccacctgttgggtgggcagagccaccaggaacccagacaccacctccaactctgagccttccagagcttcagcctctcttcgtcgtcttaccccactgaaaccaacagggatcgggccaggctcccagattcttgaggacagggacttcggcatttactaatgggggactactgtggggtaagggggcgcctgcttgcctgatacaggatggggtcaagggacagtgggcaggtcctcactcaggagtggggggtgtaggctggccagcccccagggcttgtccaccagtcttctccccgcaaggccctcagagcagcgcctgtgggtgtcagtattacctgagcctaggccaaagctagcccaaggctggggaaggggaggagactccaggtcagaatgtgaggtctcagtctgtgatttaaggtgttgcatgtggactcttaactgtacgtgtagtttctagtggagaaatcaaggctctgatcattttgtttttagtatgaaaatgtgatttcctttctgtttgtaactcatcatagaaacattgtggtgggaggagaggggatagtctacagctaatgagggaaacaccaaagatcacatcattaaaatgatgacatgcccct

SEQ ID NO: 291711 - DNA, 3897 bp, Artificial Sequence
  derived and/or modified sequence
atgaaggtggtgcccgagaagaacgccgtgagaatcctgtggggcagagagagaggcgccagagccatgggcgcccagagactgctgcaggagctggtggaggacaagaccagatggatgaagtgggagggcaagagagtggagctgcccgacagccccagaagcaccttcctgctggccttcagccccgacagaaccctgctggccagcacccacgtgaaccacaacatctacatcaccgaggtgaagaccggcaagtgcgtgcacagcctgatcggccacagaagaaccccctggtgcgtgaccttccaccccaccatcagcggcctgatcgccagcggctgcctggacggcgaggtgagaatctgggacctgcacggcggcagcgagagctggttcaccgacagcaacaacgccatcgccagcctggccttccaccccaccgcccagctgctgctgatcgccaccgccaacgagatccacttctgggactggagcagaagagagcccttcgccgtggtgaagaccgccagcgagatggagagagtgagactggtgagattcgaccccctgggccactacctgctgaccgccatcgtgaaccccagcaaccagcagggcgacgacgagcccgagatccccatcgacggcaccgagctgagccactacagacagagagccctgctgcagagccagcccgtgagaagaacccccctgctgcacaacttcctgcacatgctgagcagcagaagcagcggcatccaggtgggcgagcagagcaccgtgcaggacagcgccacccccagccccccccccccccccccccagcccagcaccgagagacccagaaccagcgcctacatcagactgagacagagagtgagctaccccaccgccgagtgctgccagcacctgggcatcctgtgcctgtgcagcagatgcagcggcaccagagtgcccagcctgctgccccaccaggacagcgtgccccccgccagcgccagagccaccacccccagcttcagcttcgtgcagaccgagcccttccacccccccgagcaggccagcagcacccagcaggaccagggcctgctgaacagacccagcgccttcagcaccgtgcagagcagcaccgccggcaacaccctgagaaacctgagcctgggccccaccagaagaagcctgggcggccccctgagcagccaccccagcagataccacagagagatcgcccccggcctgaccggcagcgagtggaccagaaccgtgctgagcctgaacagcagaagcgaggccgagagcatgcccccccccagaaccagcgccagcagcgtgagcctgctgagcgtgctgagacagcaggagggcggcagccaggccagcgtgtacaccagcgccaccgagggcagaggcttccccgccagcggcctggccaccgagagcgacggcggcaacggcagcagccagaacaacagcggcagcatcagacacgagctgcagtgcgacctgagaagattcttcctggagtacgacagactgcaggagctggaccagagcctgagcggcgaggccccccagacccagcaggcccaggagatgctgaacaacaacatcgagagcgagagacccggccccagccaccagcccaccccccacagcagcgagaacaacagcaacctgagcagaggccacctgaacagatgcagagcctgccacaacctgctgaccttcaacaacgacaccctgagatgggagagaaccacccccaactacagcagcggcgaggccagcagcagctggcaggtgcccagcagcttcgagagcgtgcccagcagcggcagccagctgccccccctggagagaaccgagggccagacccccagcagcagcagactggagctgagcagcagcgccagcccccaggaggagagaaccgtgggcgtggccttcaaccaggagaccggccactgggagagaatctacacccagagcagcagaagcggcaccgtgagccaggaggccctgcaccaggacatgcccgaggagagcagcgaggaggacagcctgagaagaagactgctggagagcagcctgatcagcctgagcagatacgacggcgccggcagcagagagcaccccatctaccccgaccccgccagactgagccccgccgcctactacgcccagagaatgatccagtacctgagcagaagagacagcatcagacagagaagcatgagataccagcagaacagactgagaagcagcaccagcagcagcagcagcgacaaccagggccccagcgtggagggcaccgacctggagttcgaggacttcgaggacaacggcgacagaagcagacacagagcccccagaaacgccagaatgagcgcccccagcctgggcagattcgtgcccagaagattcctgctgcccgagtacctgccctacgccggcatcttccacgagagaggccagcccggcctggccacccacagcagcgtgaacagagtgctggccggcgccgtgatcggcgacggccagagcgccgtggccagcaacatcgccaacaccacctacagactgcagtggtgggacttcaccaagttcgacctgcccgagatcagcaacgccagcgtgaacgtgctggtgcagaactgcaagatctacaacgacgccagctgcgacatcagcgccgacggccagctgctggccgccttcatccccagcagccagagaggcttccccgacgagggcatcctggccgtgtacagcctggccccccacaacctgggcgagatgctgtacaccaagagattcggccccaacgccatcagcgtgagcctgagccccatgggcagatacgtgatggtgggcctggccagcagaagaatcctgctgcaccccagcaccgagcacatggtggcccaggtgttcagactgcagcaggcccacggcggcgagaccagcatgagaagagtgttcaacgtgctgtaccccatgcccgccgaccagagaagacacgtgagcatcaacagcgccagatggctgcccgagcccggcctgggcctggcctacggcaccaacaagggcgacctggtgatctgcagacccgaggccctgaacagcggcgtggagtactactgggaccagctgaacgagaccgtgttcaccgtgcacagcaacagcagaagcagcgagagacccggcaccagcagagccacctggagaaccgacagagacatgggcctgatgaacgccatcggcctgcagcccagaaaccccgccaccagcgtgaccagccagggcacccagaccctggccctgcagctgcagaacgccgagacccagaccgagagagaggtgcccgagcccggcaccgccgccagcggccccggcgagggcgagggcagcgagtacggcgccagcggcgaggacgccctgagcagaatccagagactgatggccgagggcggcatgaccgccgtggtgcagagagagcagagcaccaccatggccagcatgggcggcttcggcaacaacatcatcgtgagccacagaatccacagaagcagccagaccggcaccgagcccggcgccgcccacaccagcagcccccagcccagcaccagcagaggcctgctgcccgaggccggccagctggccgagagaggcctgagccccagaaccgccagctgggaccagcccggcacccccggcagagagcccacccagcccaccctgcccagcagcagccccgtgcccatccccgtgagcctgcccagcgccgagggccccaccctgcactgcgagctgaccaacaacaaccacctgctggacggcggcagcagcagaggcgacgccgccggccccagaggcgagcccagaaacagatag

SEQ ID NO: 291712 - protein, 261 aa, Artificial Sequence
  derived and/or modified sequence
MSDEEVEQVEEQYEEEEEAQEEAAEVHEEGMRTQDFFHEEKPRPKLTAPKIPEGEKVDFDDIQKKRQNKDLMELQALIDSHFEARKKEEEELVALKERIEKRRAERAEQQRIRAEKERERQNRLAEEKARREEEDAKRRAEDDLKKKKALSSMGANYSSYLAKADQKRGKKQTAREMKKKILAERRKPLNIDHLGEDKLRDKAKELWETLHQLEIDKFEFGEKLKRQKYDITTLRSRIDQAQKHSKKAGTPAKGKVGGRWK

SEQ ID NO: 291713 - protein, 270 aa, Artificial Sequence
  derived and/or modified sequence
MSDEEVEQVEEQYEEEEEAQEEAAEVHEEAHPGEESVREDTAEEDAEEEKPRPKLTAPKIPEGEKVDFDDIQKKRQNKDLMELQALIDSHFEARKKEEEELVALKERIEKRRAERAEQQRIRAEKERERQNRLAEEKARREEEDAKRRAEDDLKKKKALSSMGANYSSYLAKADQKRGKKQTAREMKKKILAERRKPLNIDHLGEDKLRDKAKELWETLHQLEIDKFEFGEKLKRQKYDITTLRSRIDQAQKHSKKAGTPAKGKVGGRWK

SEQ ID NO: 291714 - protein, 144 aa, Artificial Sequence
  derived and/or modified sequence
MSDEEVEQVEEQYEEEEEAQEEAAEVHEEERRAEDDLKKKKALSSMGANYSSYLAKADQKRGKKQTAREMKKKILAERRKPLNIDHLGEDKLRDKAKELWEPPQSCQGLPDSPGGGEAIPGRPPRLCPCCLHPLGPVNKAAEPP

SEQ ID NO: 291715 - protein, 261 aa, Artificial Sequence
  derived and/or modified sequence
MSDEEVEQVEEQYEEEEEAQEEAAEVHEEVHEPEEVQEEEKPRPKLTAPKIPEGEKVDFDDIQKKRQNKDLMELQALIDSHFEARKKEEEELVALKERIEKRRAERAEQQRIRAEKERERQNRLAEEKARREEEDAKRRAEDDLKKKKALSSMGANYSSYLAKADQKRGKKQTAREMKKKILAERRKPLNIDHLGEDKLRDKAKELWETLHQLEIDKFEFGEKLKRQKYDITTLRSRIDQAQKHSKKAGTPAKGKVGGRWK

SEQ ID NO: 291716 - protein, 260 aa, Artificial Sequence
  derived and/or modified sequence
MSDEEVEQVEEQYEEEEEAQEEAAEVHEEDTAEEDAEEEKPRPKLTAPKIPEGEKVDFDDIQKKRQNKDLMELQALIDSHFEARKKEEEELVALKERIEKRRAERAEQQRIRAEKERERQNRLAEEKARREEEDAKRRAEDDLKKKKALSSMGANYSSYLAKADQKRGKKQTAREMKKKILAERRKPLNIDHLGEDKLRDKAKELWETLHQLEIDKFEFGEKLKRQKYDITTLRSRIDQAQKHSKKAGTPAKGKVGGRWK

SEQ ID NO: 291717 - protein, 245 aa, Artificial Sequence
  derived and/or modified sequence
MSDEEVEQVEEQYEEEEEAQEEEEKPRPKLTAPKIPEGEKVDFDDIQKKRQNKDLMELQALIDSHFEARKKEEEELVALKERIEKRRAERAEQQRIRAEKERERQNRLAEEKARREEEDAKRRAEDDLKKKKALSSMGANYSSYLAKADQKRGKKQTAREMKKKILAERRKPLNIDHLGEDKLRDKAKELWETLHQLEIDKFEFGEKLKRQKYDITTLRSRIDQAQKHSKKAGTPAKGKVGGRWK

SEQ ID NO: 291718 - protein, 252 aa, Artificial Sequence
  derived and/or modified sequence
MSDEEVEQVEEQYEEEEEAQEEAAEVHEEEEKPRPKLTAPKIPEGEKVDFDDIQKKRQNKDLMELQALIDSHFEARKKEEEELVALKERIEKRRAERAEQQRIRAEKERERQNRLAEEKARREEEDAKRRAEDDLKKKKALSSMGANYSSYLAKADQKRGKKQTAREMKKKILAERRKPLNIDHLGEDKLRDKAKELWETLHQLEIDKFEFGEKLKRQKYDIMNVRARVQMLAKFSKKAGTPAKGKVGGRWK

SEQ ID NO: 291719 - DNA, 759 bp, Artificial Sequence
  derived and/or modified sequence
atgagcgacgaggaggtggagcaggtggaggagcagtacgaggaggaggaggaggcccaggaggaggccgccgaggtgcacgaggaggaggagaagcccagacccaagctgaccgcccccaagatccccgagggcgagaaggtggacttcgacgacatccagaagaagagacagaacaaggacctgatggagctgcaggccctgatcgacagccacttcgaggccagaaagaaggaggaggaggagctggtggccctgaaggagagaatcgagaagagaagagccgagagagccgagcagcagagaatcagagccgagaaggagagagagagacagaacagactggccgaggagaaggccagaagagaggaggaggacgccaagagaagagccgaggacgacctgaagaagaagaaggccctgagcagcatgggcgccaactacagcagctacctggccaaggccgaccagaagagaggcaagaagcagaccgccagagagatgaagaagaagatcctggccgagagaagaaagcccctgaacatcgaccacctgggcgaggacaagctgagagacaaggccaaggagctgtgggagaccctgcaccagctggagatcgacaagttcgagttcggcgagaagctgaagagacagaagtacgacatcatgaacgtgagagccagagtgcagatgctggccaagttcagcaagaaggccggcacccccgccaagggcaaggtgggcggcagatggaagtag

SEQ ID NO: 291720 - DNA, 753 bp, Artificial Sequence
  derived and/or modified sequence
atgagcgacgaggaggtggagcaggtggaggagcagtacgaggaggaggaggaggcccaggaggaggaggaggtgcaggaggaggagaagcccagacccaagctgaccgcccccaagatccccgagggcgagaaggtggacttcgacgacatccagaagaagagacagaacaaggacctgatggagctgcaggccctgatcgacagccacttcgaggccagaaagaaggaggaggaggagctggtggccctgaaggagagaatcgagaagagaagagccgagagagccgagcagcagagaatcagagccgagaaggagagagagagacagaacagactggccgaggagaaggccagaagagaggaggaggacgccaagagaagagccgaggacgacctgaagaagaagaaggccctgagcagcatgggcgccaactacagcagctacctggccaaggccgaccagaagagaggcaagaagcagaccgccagagagatgaagaagaagatcctggccgagagaagaaagcccctgaacatcgaccacctgggcgaggacaagctgagagacaaggccaaggagctgtgggagaccctgcaccagctggagatcgacaagttcgagttcggcgagaagctgaagagacagaagtacgacatcatgaacgtgagagccagagtgcagatgctggccaagttcagcaagaaggccggcacccccgccaagggcaaggtgggcggcagatggaagtag

SEQ ID NO: 291721 - DNA, 759 bp, Artificial Sequence
  derived and/or modified sequence
atgtccgatgaggaggtcgagcaagttgaggaacagtacgaggaagaggaggaggcccaggaggaggctgcggaggtgcatgaggaggaagagaaacctagacccaagctgacggcgcctaaaattccagaaggcgaaaaggtggactttgacgatattcagaagaaacgccaaaataaggacctcatggagctgcaggccctgatcgattcccactttgaagctcggaaaaaagaagaagaggagctcgtggcgctcaaggagaggatcgaaaagagaagggcagaacgggcggagcagcagcgaattcgcgcagaaaaggaaagagagcggcagaaccgcctcgccgaggaaaaggctcgtcgggaagaggaggacgcaaagaggagagccgaggatgacctcaaaaagaaaaaagccctcagctctatgggggctaactattcctcttacctggccaaggctgaccagaagcgcggaaagaagcagaccgctagggagatgaagaaaaaaatcctagccgagagacggaagccattgaacattgatcacctcggtgaagacaagctgagagataaggcgaaagagctgtgggaaacactccatcagctggagattgataaatttgagttcggtgagaaactgaaacgccagaagtacgatattatgaacgtcagagcacgggtgcaaatgctggctaaattctccaaaaaagcgggcacacccgctaagggaaaagtcggcggacgctggaagtag

SEQ ID NO: 291722 - DNA, 753 bp, Artificial Sequence
  derived and/or modified sequence
atgagtgacgaggaagtggaacaggtcgaagagcagtatgaggaggaggaggaagcgcaagaagaagaagaagtgcaagaggaggagaagcctaggcctaagttaacggctccaaagatcccagagggggagaaagtggactttgacgatatccaaaagaagcgccaaaataaagacctgatggagcttcaggccctaatcgatagccacttcgaagcacgtaaaaaggaggaggaggaacttgtagctctcaaagaacgcatagaaaagaggcgtgccgaaagagcggaacaacaacggatccgagccgaaaaggagcgcgaacggcagaatcggttagcagaggagaaagctcgacgcgaagaagaggatgctaagcgacgcgccgaggacgacctgaagaagaagaaagcactctcatctatgggcgccaactacagctcctatttagctaaagccgatcaaaaacggggcaaaaagcagaccgcacgggaaatgaagaagaaaatactggccgaaagacgcaaacctctaaatattgatcacctgggcgaagacaaattgcgagacaaggctaaggaattgtgggaaaccctgcatcagctggaaattgacaaattcgagttcggtgagaaattgaaacgacagaagtacgatataatgaacgtgagagcacgggtacagatgttagccaaattttctaagaaggcaggtactcccgcaaaggggaaggttggcggcagatggaagtag

SEQ ID NO: 291723 - DNA, 759 bp, Artificial Sequence
  derived and/or modified sequence
atgtctgatgaggaggtggagcaggtggaggagcagtatgaggaggaggaggaggcccaggaggaggccgctgaggtgcatgaggaggaggagaagccccggcccaagctgacagcccccaagatccctgagggggagaaggtggactttgatgacatccagaagaagaggcagaacaaggacctgatggagctgcaggccctgattgacagccactttgaggccaggaagaaggaggaggaggagctggtggccctgaaggagcgcatcgagaagagaagagctgagcgggcagagcagcagaggatccgggcagagaaggagcgggagcggcagaaccggctggccgaggagaaggcccggcgggaggaggaggatgccaagagaagagcagaagatgacctgaagaagaagaaggccctgagctccatgggcgccaactacagcagctacctggccaaggctgaccagaagaggggcaagaagcagacagcccgggagatgaagaagaagatcctggccgagaggaggaagcccctgaacatcgaccacctgggggaggacaagctgcgggacaaggccaaggagctgtgggagaccctgcaccagctggagattgacaagtttgaatttggagagaagctgaagaggcagaagtatgacatcatgaatgtgcgggcccgggtgcagatgctggccaagttcagcaagaaggccggcaccccagccaagggcaaggtgggcggccgctggaagtag

SEQ ID NO: 291724 - DNA, 753 bp, Artificial Sequence
  derived and/or modified sequence
atgtctgatgaggaggtggagcaggtggaggagcagtatgaggaggaggaggaggcccaggaggaggaggaggtgcaggaggaggagaagccccggcccaagctgacagcccccaagatccctgagggggagaaggtggactttgatgacatccagaagaagaggcagaacaaggacctgatggagctgcaggccctgattgacagccactttgaggccaggaagaaggaggaggaggagctggtggccctgaaggagcgcatcgagaagagaagagctgagcgggcagagcagcagaggatccgggcagagaaggagcgggagcggcagaaccggctggccgaggagaaggcccggcgggaggaggaggatgccaagagaagagcagaagatgacctgaagaagaagaaggccctgagctccatgggcgccaactacagcagctacctggccaaggctgaccagaagaggggcaagaagcagacagcccgggagatgaagaagaagatcctggccgagaggaggaagcccctgaacatcgaccacctgggggaggacaagctgcgggacaaggccaaggagctgtgggagaccctgcaccagctggagattgacaagtttgaatttggagagaagctgaagaggcagaagtatgacatcatgaatgtgcgggcccgggtgcagatgctggccaagttcagcaagaaggccggcaccccagccaagggcaaggtgggcggccgctggaagtag

SEQ ID NO: 291725 - DNA, 759 bp, Artificial Sequence
  derived and/or modified sequence
atgagcgacgaggaggtggagcaggtggaggagcagtacgaggaggaagaggaagcccaggaagaggctgctgaagtgcacgaagaagaggaaaagccacgccctaagctaactgcacccaaaatcccagaaggtgagaaggttgacttcgacgatatccagaagaaaaggcagaacaaggacctgatggaattgcaagcgttgatcgattctcacttcgaagctcgaaagaaggaggaagaagagctagtcgcactcaaagaacgcattgaaaagaggcgggccgaaagagcggagcaacagcgcatcagggctgaaaaggaacgcgaacgacagaacagactcgcggaggagaaagcacgcagggaggaggaggatgcaaagagaagagcagaggacgacttaaagaagaaaaaggctctgagcagcatgggagccaattattccagctatctggccaaggccgaccagaaaagaggcaagaagcagaccgctagggagatgaagaagaagatcttggcagagcggcgcaaaccactgaatatcgatcatctcggggaggataagttacgggacaaggcaaaagaactgtgggaaaccctgcaccagctggaaatcgacaagttcgaattcggcgagaagctaaaacgccagaagtacgatatcatgaacgttcgcgccagggtgcaaatgctcgcgaagttcagtaagaaggccgggacacccgccaagggaaaggtggggggcaggtggaaatag

SEQ ID NO: 291726 - DNA, 753 bp, Artificial Sequence
  derived and/or modified sequence
atgagcgacgaggaggtggagcaggtggaggagcagtacgaggaggaagaggaggctcaggaagaagaggaagtgcaggaggaggaaaaaccgagaccaaaactcacagcccctaagatcccagaaggagagaaagttgacttcgatgacatccaaaaaaaacggcagaataaggacctcatggaactccaggctctgattgattcgcactttgaagccagaaagaaggaagaagaggagctcgtggcattgaaagaacgaatagaaaaacggcgagcagagcgagccgagcagcaaagaatccgggcggagaaagagagagaaagacagaaccggctggctgaggagaaagccagaagggaggaggaggatgctaagaggagagctgaggatgatctgaagaaaaagaaggccttatcctctatgggagcaaactactcgtcatacctagctaaagcagatcagaagcgcggcaagaaacagactgctcgagaaatgaagaaaaagatcctggccgaacggagaaagccactgaacatagaccaccttggagaagataagctccgggataaggccaaagaactttgggaaaccttacaccagctagagattgacaaattcgaatttggcgaaaagcttaagagacaaaaatacgatattatgaatgttcgggcaagagtccagatgctggcaaaattcagcaagaaagcagggacgccggccaaaggtaaagtgggtggaagatggaaatag

SEQ ID NO: 291727 - DNA, 759 bp, Artificial Sequence
  derived and/or modified sequence
atgagtgatgaggaggtggagcaggtggaggagcaatacgaggaggaagaagaggcacaggaggaggccgctgaggtgcatgaggaagaggagaagccacgccctaaactgaccgctccaaagattcccgagggtgaaaaagttgatttcgacgacatccaaaagaaaagacagaataaagatctgatggagttgcaggctttaattgattctcatttcgaggccaggaagaaggaggaggaggagctcgtagcccttaaggaacgcatagagaagagacgtgcagaaagagcggaacagcaacggattcgcgcagaaaaggaaagggagcgtcaaaaccgcctcgcagaagagaaggcgagacgggaggaggaagatgctaagcgacgggctgaggacgacctgaaaaaaaagaaagccctgtcttcaatgggagctaattattcaagctatttggcgaaggcggatcagaaaagagggaagaaacagaccgctagggaaatgaagaaaaagatcctcgcggaaagacgtaagccactgaatatcgaccacttaggcgaggacaaactccgcgataaagctaaagaactctgggagacgctccaccagctggagattgacaagtttgagttcggcgagaaactgaagagacaaaagtacgacatcatgaatgtgagagcacgcgtccagatgttggcaaaattttccaagaaggcaggaacacctgccaagggcaaggtgggtgggagatggaaatag

SEQ ID NO: 291728 - DNA, 753 bp, Artificial Sequence
  derived and/or modified sequence
atgtcagatgaagaagtcgagcaggtcgaagagcagtacgaggaggaggaagaagcccaggaggaagaggaggtacaggaggaagagaagccccgtcctaaactgactgcccctaaaattccagaaggcgaaaaggtggacttcgacgatatacagaagaagagacagaataaggacctcatggagctgcaagctctcattgatagccatttcgaagcccgaaagaaggaggaagaagaactggtagctctaaaggagaggatagagaaaaggcgggctgagcgggcagaacagcagaggattcgggcagaaaaggagcgcgagaggcaaaatcgcttggcagaagaaaaggcgagacgtgaggaggaagatgccaagcggagggctgaggacgacctgaagaaaaaaaaggctctctcatccatgggtgcaaactactcgtcctacctggccaaggctgatcagaagcgcggtaaaaagcagaccgcaagagagatgaaaaagaaaattctagcagagagacggaagccactgaacatcgatcacctgggggaggataaacttagagacaaggccaaggaactgtgggagaccctgcaccaacttgagatcgataagtttgagttcggcgaaaaactgaagcggcagaaatacgacatcatgaacgttagagcccgagtccaaatgctcgccaagttcagtaagaaggcaggtacacccgcaaaagggaaagtgggaggccgatggaagtag

SEQ ID NO: 291729 - DNA, 1184 bp, Artificial Sequence
  derived and/or modified sequence
acttggtaaggggcctgcacgggcatagccccccccagcaagactccgcacacaccccggccacccagtcactggccaatgggctcctaggaagatcaaatgtcactataacacgagggtgtgagccgggcgccagtgcctgcagccggtgctgtccacagggagctccagcccttctcacactcgacccgcagaaaccacccaccttcaccatgtctgacgaggaagttgaacaggtggaggagcagtacgaagaagaagaggaagcccaggaggaagctgcagaagtccatgaggaagaggagaaaccgagacccaaactcactgctcctaagatcccagaaggggagaaagtggacttcgatgacatccagaagaagcgtcagaacaaagacctaatggagctccaggccctcatcgacagccactttgaagcccggaagaaggaggaggaggagctggtcgctctcaaagagagaatcgagaagcgccgtgcagagagagcggagcagcagaggattcgtgcagagaaggagagggagcgccagaacagactggcggaggaaaaggccagaagggaggaggaggatgccaagaggagggcagaggacgacctgaagaagaagaaagctctgtcttccatgggagccaactacagcagctacctggccaaggctgaccagaagagaggcaagaagcagacagcccgggaaatgaagaagaagattctggctgagagacgcaagccgctcaacatcgatcaccttggtgaagacaaactgagggacaaggccaaggagctctgggagaccctgcaccagctggagattgacaagttcgagtttggggagaagctgaaacgccagaaatatgacatcatgaatgtccgggccagagtgcagatgctggccaagttcagcaagaaggctgggaccccagccaagggcaaagtcggcgggcgctggaagtagagaggccagaaaggcccctcgaggcagagaccctccgccctcttgcacaccagggccgctcgtgggactccacatcctccagcccccacaatcctgtcaggggctccctgacagtcctgggggtggagaggccatcccggggcgtcccccgcgtctgtgtccttgctgccttcatcccctggggcctgtgaataaagctgcagaacccccttc

SEQ ID NO: 291730 - DNA, 1042 bp, Artificial Sequence
  derived and/or modified sequence
gcctgcagccggtgctgtccacagggagctccagcccttctcacactcgacccgcagaaaccacccaccttcaccatgtctgacgaggaagttgaacaggtggaggagcagtacgaagaagaagaggaagcccaggaggaagaggaagttcaagaagaggagaaaccgagacccaaactcactgctcctaagatcccagaaggggagaaagtggacttcgatgacatccagaagaagcgtcagaacaaagacctaatggagctccaggccctcatcgacagccactttgaagcccggaagaaggaggaggaggagctggtcgctctcaaagagagaatcgagaagcgccgtgcagagagagcggagcagcagaggattcgtgcagagaaggagagggagcgccagaacagactggcggaggaaaaggccagaagggaggaggaggatgccaagaggagggcagaggacgacctgaagaagaagaaagctctgtcttccatgggagccaactacagcagctacctggccaaggctgaccagaagagaggcaagaagcagacagcccgggaaatgaagaagaagattctggctgagagacgcaagccgctcaacatcgatcaccttggtgaagacaaactgagggacaaggccaaggagctctgggagaccctgcaccagctggagattgacaagttcgagtttggggagaagctgaaacgccagaaatatgacatcatgaatgtccgggccagagtgcagatgctggccaagttcagcaagaaggctgggaccccagccaagggcaaagtcggcgggcgctggaagtagagaggccagaaaggcccctcgaggcagagaccctccgccctcttgcacaccagggccgctcgtgggactccacatcctccagcccccacaatcctgtcaggggctccctgacagtcctgggggtggagaggccatcccggggcgtcccccgcgtctgtgtccttgctgccttcatcccctggggcctgtgaataaagctgcagaacccccttca

SEQ ID NO: 291731 - DNA, 771 bp, Artificial Sequence
  derived and/or modified sequence
atgagcgacgaggaggtggagcaggtggaggagcagtacgaggaggaggaggaggcccaggaggaggccgccgaggtgcacgaggaggtgcacgagcccgaggagaagcccagacccaagctgaccgcccccaagatccccgagggcgagaaggtggacttcgacgacatccagaagaagagacagaacaaggacctgatggagctgcaggccctgatcgacagccacttcgaggccagaaagaaggaggaggaggagctggtggccctgaaggagagaatcgagaagagaagagccgagagagccgagcagcagagaatcagagccgagaaggagagagagagacagaacagactggccgaggagaaggccagaagagaggaggaggacgccaagagaagagccgaggacgacctgaagaagaagaaggccctgagcagcatgggcgccaactacagcagctacctggccaaggccgaccagaagagaggcaagaagcagaccgccagagagatgaagaagaagatcctggccgagagaagaaagcccctgaacatcgaccacctgggcgaggacaagctgagagacaaggccaaggagctgtgggagaccctgcaccagctggagatcgacaagttcgagttcggcgagaagctgaagagacagaagtacgacatcaccaccctgagaagcagaatcgaccaggcccagaagcacagcaagaaggccggcacccccgccaagggcaaggtgggcggcagatggaagtag

SEQ ID NO: 291732 - DNA, 777 bp, Artificial Sequence
  derived and/or modified sequence
atgagcgacgaggaggtggagcaggtggaggagcagtacgaggaggaggaggaggcccaggaggaggaggaggtgcaggaggacaccgccgaggaggacgccgaggaggagaagcccagacccaagctgaccgcccccaagatccccgagggcgagaaggtggacttcgacgacatccagaagaagagacagaacaaggacctgatggagctgcaggccctgatcgacagccacttcgaggccagaaagaaggaggaggaggagctggtggccctgaaggagagaatcgagaagagaagagccgagagagccgagcagcagagaatcagagccgagaaggagagagagagacagaacagactggccgaggagaaggccagaagagaggaggaggacgccaagagaagagccgaggacgacctgaagaagaagaaggccctgagcagcatgggcgccaactacagcagctacctggccaaggccgaccagaagagaggcaagaagcagaccgccagagagatgaagaagaagatcctggccgagagaagaaagcccctgaacatcgaccacctgggcgaggacaagctgagagacaaggccaaggagctgtgggagaccctgcaccagctggagatcgacaagttcgagttcggcgagaagctgaagagacagaagtacgacatcaccaccctgagaagcagaatcgaccaggcccagaagcacagcaagaaggccggcacccccgccaagggcaaggtgggcggcagatggaagtag

SEQ ID NO: 291733 - DNA, 738 bp, Artificial Sequence
  derived and/or modified sequence
atgagcgacgaggaggtggagcaggtggaggagcagtacgaggaggaggaggaggcccaggaggaggaggagaagcccagacccaagctgaccgcccccaagatccccgagggcgagaaggtggacttcgacgacatccagaagaagagacagaacaaggacctgatggagctgcaggccctgatcgacagccacttcgaggccagaaagaaggaggaggaggagctggtggccctgaaggagagaatcgagaagagaagagccgagagagccgagcagcagagaatcagagccgagaaggagagagagagacagaacagactggccgaggagaaggccagaagagaggaggaggacgccaagagaagagccgaggacgacctgaagaagaagaaggccctgagcagcatgggcgccaactacagcagctacctggccaaggccgaccagaagagaggcaagaagcagaccgccagagagatgaagaagaagatcctggccgagagaagaaagcccctgaacatcgaccacctgggcgaggacaagctgagagacaaggccaaggagctgtgggagaccctgcaccagctggagatcgacaagttcgagttcggcgagaagctgaagagacagaagtacgacatcaccaccctgagaagcagaatcgaccaggcccagaagcacagcaagaaggccggcacccccgccaagggcaaggtgggcggcagatggaagtag

SEQ ID NO: 291734 - DNA, 783 bp, Artificial Sequence
  derived and/or modified sequence
atgagcgacgaggaggtggagcaggtggaggagcagtacgaggaggaggaggaggcccaggaggaggccgccgaggtgcacgaggaggacaccgccgaggaggacgccgaggaggagaagcccagacccaagctgaccgcccccaagatccccgagggcgagaaggtggacttcgacgacatccagaagaagagacagaacaaggacctgatggagctgcaggccctgatcgacagccacttcgaggccagaaagaaggaggaggaggagctggtggccctgaaggagagaatcgagaagagaagagccgagagagccgagcagcagagaatcagagccgagaaggagagagagagacagaacagactggccgaggagaaggccagaagagaggaggaggacgccaagagaagagccgaggacgacctgaagaagaagaaggccctgagcagcatgggcgccaactacagcagctacctggccaaggccgaccagaagagaggcaagaagcagaccgccagagagatgaagaagaagatcctggccgagagaagaaagcccctgaacatcgaccacctgggcgaggacaagctgagagacaaggccaaggagctgtgggagaccctgcaccagctggagatcgacaagttcgagttcggcgagaagctgaagagacagaagtacgacatcaccaccctgagaagcagaatcgaccaggcccagaagcacagcaagaaggccggcacccccgccaagggcaaggtgggcggcagatggaagtag

SEQ ID NO: 291735 - DNA, 753 bp, Artificial Sequence
  derived and/or modified sequence
atgagcgacgaggaggtggagcaggtggaggagcagtacgaggaggaggaggaggcccaggaggaggaggaggtgcaggaggaggagaagcccagacccaagctgaccgcccccaagatccccgagggcgagaaggtggacttcgacgacatccagaagaagagacagaacaaggacctgatggagctgcaggccctgatcgacagccacttcgaggccagaaagaaggaggaggaggagctggtggccctgaaggagagaatcgagaagagaagagccgagagagccgagcagcagagaatcagagccgagaaggagagagagagacagaacagactggccgaggagaaggccagaagagaggaggaggacgccaagagaagagccgaggacgacctgaagaagaagaaggccctgagcagcatgggcgccaactacagcagctacctggccaaggccgaccagaagagaggcaagaagcagaccgccagagagatgaagaagaagatcctggccgagagaagaaagcccctgaacatcgaccacctgggcgaggacaagctgagagacaaggccaaggagctgtgggagaccctgcaccagctggagatcgacaagttcgagttcggcgagaagctgaagagacagaagtacgacatcaccaccctgagaagcagaatcgaccaggcccagaagcacagcaagaaggccggcacccccgccaagggcaaggtgggcggcagatggaagtag

SEQ ID NO: 291736 - DNA, 786 bp, Artificial Sequence
  derived and/or modified sequence
atgagcgacgaggaggtggagcaggtggaggagcagtacgaggaggaggaggaggcccaggaggaggccgccgaggtgcacgaggagggcatgagaacccaggacttcttccacgaggagaagcccagacccaagctgaccgcccccaagatccccgagggcgagaaggtggacttcgacgacatccagaagaagagacagaacaaggacctgatggagctgcaggccctgatcgacagccacttcgaggccagaaagaaggaggaggaggagctggtggccctgaaggagagaatcgagaagagaagagccgagagagccgagcagcagagaatcagagccgagaaggagagagagagacagaacagactggccgaggagaaggccagaagagaggaggaggacgccaagagaagagccgaggacgacctgaagaagaagaaggccctgagcagcatgggcgccaactacagcagctacctggccaaggccgaccagaagagaggcaagaagcagaccgccagagagatgaagaagaagatcctggccgagagaagaaagcccctgaacatcgaccacctgggcgaggacaagctgagagacaaggccaaggagctgtgggagaccctgcaccagctggagatcgacaagttcgagttcggcgagaagctgaagagacagaagtacgacatcaccaccctgagaagcagaatcgaccaggcccagaagcacagcaagaaggccggcacccccgccaagggcaaggtgggcggcagatggaagtag

SEQ ID NO: 291737 - DNA, 786 bp, Artificial Sequence
  derived and/or modified sequence
atgagcgacgaggaggtggagcaggtggaggagcagtacgaggaggaggaggaggcccaggaggaggccgccgaggtgcacgaggaggtgcacgagcccgaggaggtgcaggaggaggagaagcccagacccaagctgaccgcccccaagatccccgagggcgagaaggtggacttcgacgacatccagaagaagagacagaacaaggacctgatggagctgcaggccctgatcgacagccacttcgaggccagaaagaaggaggaggaggagctggtggccctgaaggagagaatcgagaagagaagagccgagagagccgagcagcagagaatcagagccgagaaggagagagagagacagaacagactggccgaggagaaggccagaagagaggaggaggacgccaagagaagagccgaggacgacctgaagaagaagaaggccctgagcagcatgggcgccaactacagcagctacctggccaaggccgaccagaagagaggcaagaagcagaccgccagagagatgaagaagaagatcctggccgagagaagaaagcccctgaacatcgaccacctgggcgaggacaagctgagagacaaggccaaggagctgtgggagaccctgcaccagctggagatcgacaagttcgagttcggcgagaagctgaagagacagaagtacgacatcaccaccctgagaagcagaatcgaccaggcccagaagcacagcaagaaggccggcacccccgccaagggcaaggtgggcggcagatggaagtag

SEQ ID NO: 291738 - DNA, 810 bp, Artificial Sequence
  derived and/or modified sequence
atgagcgacgaggaggtggagcaggtggaggagcagtacgaggaggaggaggaggcccaggaggaggccgccgaggtgcacgaggaggtgcacgagcccgaggaggtgcaggaggacaccgccgaggaggacgccgaggaggagaagcccagacccaagctgaccgcccccaagatccccgagggcgagaaggtggacttcgacgacatccagaagaagagacagaacaaggacctgatggagctgcaggccctgatcgacagccacttcgaggccagaaagaaggaggaggaggagctggtggccctgaaggagagaatcgagaagagaagagccgagagagccgagcagcagagaatcagagccgagaaggagagagagagacagaacagactggccgaggagaaggccagaagagaggaggaggacgccaagagaagagccgaggacgacctgaagaagaagaaggccctgagcagcatgggcgccaactacagcagctacctggccaaggccgaccagaagagaggcaagaagcagaccgccagagagatgaagaagaagatcctggccgagagaagaaagcccctgaacatcgaccacctgggcgaggacaagctgagagacaaggccaaggagctgtgggagaccctgcaccagctggagatcgacaagttcgagttcggcgagaagctgaagagacagaagtacgacatcaccaccctgagaagcagaatcgaccaggcccagaagcacagcaagaaggccggcacccccgccaagggcaaggtgggcggcagatggaagtag

SEQ ID NO: 291739 - DNA, 813 bp, Artificial Sequence
  derived and/or modified sequence
atgagcgacgaggaggtggagcaggtggaggagcagtacgaggaggaggaggaggcccaggaggaggccgccgaggtgcacgaggaggcccaccccggcgaggagagcgtgagagaggacaccgccgaggaggacgccgaggaggagaagcccagacccaagctgaccgcccccaagatccccgagggcgagaaggtggacttcgacgacatccagaagaagagacagaacaaggacctgatggagctgcaggccctgatcgacagccacttcgaggccagaaagaaggaggaggaggagctggtggccctgaaggagagaatcgagaagagaagagccgagagagccgagcagcagagaatcagagccgagaaggagagagagagacagaacagactggccgaggagaaggccagaagagaggaggaggacgccaagagaagagccgaggacgacctgaagaagaagaaggccctgagcagcatgggcgccaactacagcagctacctggccaaggccgaccagaagagaggcaagaagcagaccgccagagagatgaagaagaagatcctggccgagagaagaaagcccctgaacatcgaccacctgggcgaggacaagctgagagacaaggccaaggagctgtgggagaccctgcaccagctggagatcgacaagttcgagttcggcgagaagctgaagagacagaagtacgacatcaccaccctgagaagcagaatcgaccaggcccagaagcacagcaagaaggccggcacccccgccaagggcaaggtgggcggcagatggaagtag

SEQ ID NO: 291740 - DNA, 435 bp, Artificial Sequence
  derived and/or modified sequence
atgagcgacgaggaggtggagcaggtggaggagcagtacgaggaggaggaggaggcccaggaggaggccgccgaggtgcacgaggaggagagaagagccgaggacgacctgaagaagaagaaggccctgagcagcatgggcgccaactacagcagctacctggccaaggccgaccagaagagaggcaagaagcagaccgccagagagatgaagaagaagatcctggccgagagaagaaagcccctgaacatcgaccacctgggcgaggacaagctgagagacaaggccaaggagctgtgggagcccccccagagctgccagggcctgcccgacagccccggcggcggcgaggccatccccggcagaccccccagactgtgcccctgctgcctgcaccccctgggccccgtgaacaaggccgccgagcccccctag

SEQ ID NO: 291741 - DNA, 771 bp, Artificial Sequence
  derived and/or modified sequence
atgagcgacgaggaggtggaacaggttgaggagcagtacgaagaggaagaggaggctcaagaagaggcagcggaggtgcatgaagaggtgcatgagccagaggagaaaccacgacccaagcttactgcacccaagatcccagagggcgagaaggtggacttcgacgatatccagaagaaaagacagaataaagatctcatggagttgcaagctctcatagacagtcactttgaagccagaaagaaagaggaagaggaactggtggctttaaaggagaggatcgagaaaagacgcgcggaacgggcagagcagcagagaatccgggccgagaaggagagggagaggcagaaccgcctggccgaagagaaggcacggagggaggaggaggacgctaagcgaagagccgaggatgacttgaaaaagaagaaagccttaagttccatgggtgccaactactccagctatcttgccaaggccgaccaaaaacgcggcaagaagcaaactgcacgcgagatgaaaaaaaagattcttgctgagcggcgaaagcccttgaacattgaccatcttggggaggataagctgcgggataaggcaaaagagttgtgggagacactgcaccagctcgagattgacaagttcgaatttggcgagaagctcaaaagacagaaatacgacatcaccaccctgcgctcaaggatcgatcaagctcagaaacactcgaagaaagccggcactccggctaaaggtaaggtaggtggcaggtggaaatag

SEQ ID NO: 291742 - DNA, 777 bp, Artificial Sequence
  derived and/or modified sequence
atgagtgacgaagaagtcgagcaagtggaggagcaatacgaggaggaggaggaggcacaggaggaagaggaagtccaagaagacaccgcggaggaggatgcagaggaagagaagccccggcctaagctgacagctccaaagataccagaaggtgagaaggtggactttgatgacatccagaagaagcgtcagaacaaggatctcatggaactccaagccctgattgacagtcacttcgaggcccgtaagaaggaggaggaggaattggtggccctgaaggagaggatcgagaaaaggagggcagagagagccgaacagcagcgaattcgtgccgagaaagaacgagagcgtcaaaaccgcttggcggaagagaaggccaggagagaggaggaggacgccaagcgaagagccgaagacgacttgaaaaaaaaaaaggctctctcatcgatgggggctaattattcctcatatctggccaaggctgaccagaagaggggcaaaaagcagaccgctagggaaatgaagaagaagatcctagcagagcgccggaagccactcaacatcgatcacctaggcgaggacaaactgagggataaggctaaagagctgtgggaaactctgcaccaactggagatcgacaagtttgagttcggagaaaaactaaaacgtcagaaatacgacatcacgacccttcgcagccggatagaccaggctcagaaacactcgaaaaaggccggaacgccggctaagggcaaggtgggcggacggtggaagtag

SEQ ID NO: 291743 - DNA, 738 bp, Artificial Sequence
  derived and/or modified sequence
atgagtgatgaggaagtggaacaggttgaagagcaatatgaagaagaggaggaagcacaagaggaggaggaaaagccgcggcctaagttgacagcacctaaaatccctgagggcgaaaaggtcgacttcgacgatatccaaaagaagagacagaacaaagatctcatggagttgcaagcgcttatcgattcccatttcgaagctcgcaagaaagaagaagaggagttggtggccctgaaggaacggattgagaaaaggcgagctgagcgggcagagcagcaaagaataagagccgaaaaggaacgggaacgacagaatcggctggctgaagaaaaagcgcgtagggaagaggaggatgctaagagaagggctgaggacgacctgaagaaaaaaaaagcgctgagcagcatgggcgccaactatagctcatacttagccaaggctgatcagaaaagaggcaagaagcaaacagccagggagatgaaaaaaaagattctggcagagcggaggaaacctctgaacatcgaccacttaggcgaagacaagctgagagacaaggccaaagagttgtgggaaaccctgcatcagcttgaaatagataagttcgagttcggcgagaagctgaagagacagaagtatgacattaccaccctcagatctcggatcgaccaggcccagaagcacagtaaaaaagccggcactcccgcaaagggaaaggtgggaggccggtggaaatag

SEQ ID NO: 291744 - DNA, 783 bp, Artificial Sequence
  derived and/or modified sequence
atgtccgacgaagaggtcgagcaggtagaggagcagtacgaagaggaagaggaagcgcaagaggaggccgccgaagtgcacgaggaggacacggctgaagaagatgccgaggaggagaagccccgaccaaagctcacagccccaaagatccctgaaggggagaaggtcgatttcgacgatatccagaagaaaaggcaaaataaggatctgatggagctgcaggcattaattgatagccacttcgaagctcgaaaaaaggaagaagaggaactggtggccctgaaggagcgaatcgagaagcggagggccgagagagctgaacagcagcggatcagagctgaaaaggagagggagcgccagaatagactcgccgaagagaaagcacgtcgagaggaggaagacgcaaagagacgcgcagaggacgacctgaaaaagaaaaaggcactctcttccatgggcgctaactactcttcctatcttgccaaggccgatcagaagcggggcaaaaagcaaaccgcacgcgaaatgaagaaaaaaatcttagcagaacggcgaaaacctctgaatattgaccacttaggggaagacaaactgagggacaaggcaaaggaattgtgggaaactctgcaccaactggaaatcgacaagttcgagttcggggagaaacttaagcgtcagaagtacgacattaccactctcagaagccgaatcgatcaggctcaaaaacactcaaaaaaagctgggacacctgctaaagggaaagtaggggggcggtggaaatag

SEQ ID NO: 291745 - DNA, 753 bp, Artificial Sequence
  derived and/or modified sequence
atgtcagacgaggaagtagagcaggttgaagaacagtatgaggaggaggaagaggctcaggaggaggaggaagtgcaagaggaggagaagccccggccaaaactcactgcgccaaagatccccgaaggagagaaagtggacttcgacgatatccaaaagaagcgacagaataaagacctgatggagctacaggccctaatcgactcacatttcgaggcacggaaaaaagaggaagaggagctagtagcacttaaagaacggatagaaaagcgaagagccgagcgagccgaacagcagagaataagggccgagaaggaacgtgagaggcaaaaccgcctggccgaagagaaggctaggagagaggaagaggacgctaagagaagggcagaagacgacctgaagaaaaaaaaggctctgtcttccatgggcgccaactattctagttatctcgccaaggctgaccagaaaagaggtaagaaacagacggctagagaaatgaaaaaaaagattctggccgaaagacgcaaaccactcaacatcgaccacctgggcgaagacaaactaagggacaaagcgaaggagctgtgggaaactcttcaccagctggagattgataagtttgaattcggtgagaagctgaagagacagaagtatgacatcaccacactccgctcacggatagatcaggcacagaagcattccaagaaggcggggactcccgccaagggtaaagtaggcggcagatggaagtag

SEQ ID NO: 291746 - DNA, 786 bp, Artificial Sequence
  derived and/or modified sequence
atgtctgatgaagaagtagaacaggttgaagaacagtacgaagaagaagaggaggcccaggaggaagcggcagaagtccatgaggagggtatgcggacgcaagacttttttcatgaagagaaaccccgccccaaattgactgctccaaagatccctgagggagagaaagttgacttcgacgacattcagaaaaagcgacagaacaaagatttgatggagttgcaggcccttatcgatagtcacttcgaggcaagaaagaaggaggaggaggaattggtcgctctgaaagagcgaattgaaaagagacgcgcggaaagggcagagcagcaaagaatccgggctgagaaggaacgggagcggcagaatcggctagcagaggagaaagcacgccgcgaagaggaggacgcaaagaggcgggccgaagacgatttgaagaagaagaaggctttgtcatccatgggcgcaaactacagctcttaccttgccaaggcggaccaaaaaagagggaaaaaacaaacagccagggagatgaaaaaaaaaatccttgcagagcgccggaaaccactgaacatcgaccatctgggagaggataaactgcgggataaagctaaggagctctgggagaccctgcaccagttagagattgataagtttgaatttggagaaaaactgaaacgccagaagtatgatatcaccacgttgaggtcccgcattgaccaggcccagaaacattccaaaaaagctggaacacccgcaaaaggcaaggttggcgggcgttggaaatag

SEQ ID NO: 291747 - DNA, 786 bp, Artificial Sequence
  derived and/or modified sequence
atgagtgacgaagaggtggaacaagtggaggaacagtatgaggaagaggaggaggcccaggaggaggctgctgaggtccatgaggaagtgcacgaacctgaagaggttcaagaagaagagaagcctcgaccgaaacttacagccccaaaaattcccgagggcgaaaaagtggacttcgatgacatccagaaaaagaggcaaaacaaggacctgatggaactgcaggcgctgatcgacagccacttcgaagcccgtaagaaggaggaggaggagctggtggccctgaaagagagaattgaaaagaggagggccgagcgtgctgaacagcaacgcattagggcagagaaggagcgcgaacggcaaaatcgcttggcagaggagaaggccaggcgagaggaggaggatgcaaagcggcgggccgaggatgaccttaaaaagaaaaaagctctgtcatccatgggcgctaactattctagttacctggcaaaagctgatcagaagaggggtaaaaagcagactgcccgtgaaatgaagaagaaaatccttgctgagaggcgcaaaccattgaatatagatcacctgggagaagacaaacttcgggataaagctaaggagctctgggagactttacatcaacttgagatcgacaagttcgagtttggtgaaaaactgaagagacagaagtacgacattactacattgaggagccggatcgaccaggcacagaagcatagcaagaaagctggaacacctgccaagggcaaggtggggggacgatggaagtag

SEQ ID NO: 291748 - DNA, 810 bp, Artificial Sequence
  derived and/or modified sequence
atgagcgatgaagaggtagaacaggtcgaagaacagtatgaggaagaagaagaggcccaagaggaggcagccgaggttcatgaagaggttcacgaacctgaagaagtgcaggaggataccgcagaggaagatgctgaggaagaaaaacctcgccccaagttgacagcaccaaagattccagagggagaaaaggtggacttcgatgacatccaaaagaaacgacaaaataaggaccttatggagctccaggcgttaatagacagtcattttgaagcacgaaaaaaagaagaagaggagctcgtcgccctgaaagagcgcattgagaaacgaagagcagaaagggccgagcagcagcggatccgcgccgaaaaagagcgcgaacggcaaaaccgcctcgccgaagagaaagcgaggcgagaagaagaggacgccaagagacgggctgaggacgacctgaagaaaaagaaagcactttccagcatgggagcaaattacagtagttacctggccaaagccgaccagaagcggggaaagaagcaaaccgctcgtgagatgaaaaagaagatactcgctgagagacggaaacctttgaacattgaccaccttggcgaagacaaactgcgggacaaggctaaggaactttgggagacgctgcaccagctggagatcgacaagttcgagttcggcgagaagcttaaacggcagaagtacgacatcacaacgcttagatccagaatagaccaggctcagaagcattcgaaaaaggctggaacacccgcgaaaggaaaagtaggagggcggtggaaatag

SEQ ID NO: 291749 - DNA, 813 bp, Artificial Sequence
  derived and/or modified sequence
atgtcagacgaggaggtggaacaagtggaggaacaatacgaggaggaggaggaagcccaagaagaggcggctgaggtgcacgaggaggcgcacccgggagaagaaagcgttcgcgaagacacggccgaagaggacgcagaagaggaaaagccacgacctaagctgacagcccctaagataccggagggcgaaaaagtggactttgacgatattcagaagaaacgccaaaacaaagacctcatggagctccaggctcttattgattctcacttcgaagctcgaaagaaagaagaggaagagcttgttgccctgaaggagaggatcgaaaaacgtcgagctgagcgagccgagcaacaacgcattcgcgccgaaaaggaaagggagagacaaaacagattggcggaggagaaagcacgccgtgaggaggaagatgccaagagaagagccgaagacgatttgaaaaagaagaaggctcttagctcaatgggggccaactattcttcttatctggctaaggctgatcaaaagcgaggcaaaaaacagacagccagagagatgaagaagaagattctggcagaacgcaggaagccacttaacattgaccaccttggtgaagataagctgcgcgacaaagcgaaagagctgtgggagacattacaccagctggagatcgataagttcgagttcggcgaaaaactgaagcgccagaaatatgacataacgactctgagatcccgtatagatcaagcccagaaacattcaaagaaagctgggacacccgcaaagggcaaagtgggcggcaggtggaagtag

SEQ ID NO: 291750 - DNA, 435 bp, Artificial Sequence
  derived and/or modified sequence
atgtcagatgaggaggtcgaacaggtcgaagagcaatacgaagaagaggaagaagctcaagaggaagccgcagaagttcatgaagaggagcgtagggctgaggacgaccttaagaaaaaaaaagcccttagctccatgggggccaactattcctcatacctcgccaaagctgaccaaaagcgcggcaaaaagcagaccgcccgtgagatgaaaaagaaaatccttgctgagagacggaaaccactgaatatcgaccacctgggagaggacaaattgagggacaaagccaaggaactgtgggagcctccccagtcatgtcagggactgcccgattctccgggaggaggagaagcaatcccaggacgcccaccccgcctttgtccctgctgtttacaccctctcggtccagtcaacaaggctgccgaacctccttag

SEQ ID NO: 291751 - DNA, 771 bp, Artificial Sequence
  derived and/or modified sequence
atgtctgatgaggaggtggagcaggtggaggagcagtatgaggaggaggaggaggcccaggaggaggccgctgaggtgcatgaggaggtgcatgagcctgaggagaagccccggcccaagctgacagcccccaagatccctgagggggagaaggtggactttgatgacatccagaagaagaggcagaacaaggacctgatggagctgcaggccctgattgacagccactttgaggccaggaagaaggaggaggaggagctggtggccctgaaggagcgcatcgagaagagaagagctgagcgggcagagcagcagaggatccgggcagagaaggagcgggagcggcagaaccggctggccgaggagaaggcccggcgggaggaggaggatgccaagagaagagcagaagatgacctgaagaagaagaaggccctgagctccatgggcgccaactacagcagctacctggccaaggctgaccagaagaggggcaagaagcagacagcccgggagatgaagaagaagatcctggccgagaggaggaagcccctgaacatcgaccacctgggggaggacaagctgcgggacaaggccaaggagctgtgggagaccctgcaccagctggagattgacaagtttgaatttggagagaagctgaagaggcagaagtatgacatcaccaccctgcggagcagaattgaccaggcccagaagcacagcaagaaggccggcaccccagccaagggcaaggtgggcggccgctggaagtag

SEQ ID NO: 291752 - DNA, 777 bp, Artificial Sequence
  derived and/or modified sequence
atgtctgatgaggaggtggagcaggtggaggagcagtatgaggaggaggaggaggcccaggaggaggaggaggtgcaggaggacacagctgaggaggatgctgaggaggagaagccccggcccaagctgacagcccccaagatccctgagggggagaaggtggactttgatgacatccagaagaagaggcagaacaaggacctgatggagctgcaggccctgattgacagccactttgaggccaggaagaaggaggaggaggagctggtggccctgaaggagcgcatcgagaagagaagagctgagcgggcagagcagcagaggatccgggcagagaaggagcgggagcggcagaaccggctggccgaggagaaggcccggcgggaggaggaggatgccaagagaagagcagaagatgacctgaagaagaagaaggccctgagctccatgggcgccaactacagcagctacctggccaaggctgaccagaagaggggcaagaagcagacagcccgggagatgaagaagaagatcctggccgagaggaggaagcccctgaacatcgaccacctgggggaggacaagctgcgggacaaggccaaggagctgtgggagaccctgcaccagctggagattgacaagtttgaatttggagagaagctgaagaggcagaagtatgacatcaccaccctgcggagcagaattgaccaggcccagaagcacagcaagaaggccggcaccccagccaagggcaaggtgggcggccgctggaagtag

SEQ ID NO: 291753 - DNA, 738 bp, Artificial Sequence
  derived and/or modified sequence
atgtctgatgaggaggtggagcaggtggaggagcagtatgaggaggaggaggaggcccaggaggaggaggagaagccccggcccaagctgacagcccccaagatccctgagggggagaaggtggactttgatgacatccagaagaagaggcagaacaaggacctgatggagctgcaggccctgattgacagccactttgaggccaggaagaaggaggaggaggagctggtggccctgaaggagagaattgagaagagaagagctgagagagctgagcagcagaggatccgggcagagaaggagcgggagcggcagaaccggctggccgaggagaaggcccggcgggaggaggaggatgccaagagaagagcagaagatgacctgaagaagaagaaggccctgagctccatgggcgccaactacagcagctacctggccaaggctgaccagaagaggggcaagaagcagacagcccgggagatgaagaagaagatcctggccgagaggaggaagcccctgaacatcgaccacctgggggaggacaagctgcgggacaaggccaaggagctgtgggagaccctgcaccagctggagattgacaagtttgaatttggagagaagctgaagaggcagaagtatgacatcaccaccctgcggagcagaattgaccaggcccagaagcacagcaagaaggccggcaccccagccaagggcaaggtgggcggccgctggaagtag

SEQ ID NO: 291754 - DNA, 783 bp, Artificial Sequence
  derived and/or modified sequence
atgtctgatgaggaggtggagcaggtggaggagcagtatgaggaggaggaggaggcccaggaggaggccgctgaggtgcatgaggaggacacagctgaggaggatgctgaggaggagaagccccggcccaagctgacagcccccaagatccctgagggggagaaggtggactttgatgacatccagaagaagaggcagaacaaggacctgatggagctgcaggccctgattgacagccactttgaggccaggaagaaggaggaggaggagctggtggccctgaaggagcgcatcgagaagagaagagctgagcgggcagagcagcagaggatccgggcagagaaggagcgggagcggcagaaccggctggccgaggagaaggcccggcgggaggaggaggatgccaagagaagagcagaagatgacctgaagaagaagaaggccctgagctccatgggcgccaactacagcagctacctggccaaggctgaccagaagaggggcaagaagcagacagcccgggagatgaagaagaagatcctggccgagaggaggaagcccctgaacatcgaccacctgggggaggacaagctgcgggacaaggccaaggagctgtgggagaccctgcaccagctggagattgacaagtttgaatttggagagaagctgaagaggcagaagtatgacatcaccaccctgcggagcagaattgaccaggcccagaagcacagcaagaaggccggcaccccagccaagggcaaggtgggcggccgctggaagtag

SEQ ID NO: 291755 - DNA, 753 bp, Artificial Sequence
  derived and/or modified sequence
atgtctgatgaggaggtggagcaggtggaggagcagtatgaggaggaggaggaggcccaggaggaggaggaggtgcaggaggaggagaagccccggcccaagctgacagcccccaagatccctgagggggagaaggtggactttgatgacatccagaagaagaggcagaacaaggacctgatggagctgcaggccctgattgacagccactttgaggccaggaagaaggaggaggaggagctggtggccctgaaggagcgcatcgagaagagaagagctgagcgggcagagcagcagaggatccgggcagagaaggagcgggagcggcagaaccggctggccgaggagaaggcccggcgggaggaggaggatgccaagagaagagcagaagatgacctgaagaagaagaaggccctgagctccatgggcgccaactacagcagctacctggccaaggctgaccagaagaggggcaagaagcagacagcccgggagatgaagaagaagatcctggccgagaggaggaagcccctgaacatcgaccacctgggggaggacaagctgcgggacaaggccaaggagctgtgggagaccctgcaccagctggagattgacaagtttgaatttggagagaagctgaagaggcagaagtatgacatcaccaccctgcggagcagaattgaccaggcccagaagcacagcaagaaggccggcaccccagccaagggcaaggtgggcggccgctggaagtag

SEQ ID NO: 291756 - DNA, 786 bp, Artificial Sequence
  derived and/or modified sequence
atgtctgatgaggaggtggagcaggtggaggagcagtatgaggaggaggaggaggcccaggaggaggccgctgaggtgcatgaggagggcatgaggacccaggacttcttccacgaggagaagccccggcccaagctgacagcccccaagatccctgagggggagaaggtggactttgatgacatccagaagaagaggcagaacaaggacctgatggagctgcaggccctgattgacagccactttgaggccaggaagaaggaggaggaggagctggtggccctgaaggagagaattgagaagagaagagctgagagagctgagcagcagaggatccgggcagagaaggagcgggagcggcagaaccggctggccgaggagaaggcccggcgggaggaggaggatgccaagagaagagcagaagatgacctgaagaagaagaaggccctgagctccatgggcgccaactacagcagctacctggccaaggctgaccagaagaggggcaagaagcagacagcccgggagatgaagaagaagatcctggccgagaggaggaagcccctgaacatcgaccacctgggggaggacaagctgcgggacaaggccaaggagctgtgggagaccctgcaccagctggagattgacaagtttgaatttggagagaagctgaagaggcagaagtatgacatcaccaccctgcggagcagaattgaccaggcccagaagcacagcaagaaggccggcaccccagccaagggcaaggtgggcggccgctggaagtag

SEQ ID NO: 291757 - DNA, 786 bp, Artificial Sequence
  derived and/or modified sequence
atgtctgatgaggaggtggagcaggtggaggagcagtatgaggaggaggaggaggcccaggaggaggccgctgaggtgcatgaggaggtgcatgagcctgaggaggtgcaggaggaggagaagccccggcccaagctgacagcccccaagatccctgagggggagaaggtggactttgatgacatccagaagaagaggcagaacaaggacctgatggagctgcaggccctgattgacagccactttgaggccaggaagaaggaggaggaggagctggtggccctgaaggagagaattgagaagagaagagctgagagagctgagcagcagaggatccgggcagagaaggagcgggagcggcagaaccggctggccgaggagaaggcccggcgggaggaggaggatgccaagagaagagcagaagatgacctgaagaagaagaaggccctgagctccatgggcgccaactacagcagctacctggccaaggctgaccagaagaggggcaagaagcagacagcccgggagatgaagaagaagatcctggccgagaggaggaagcccctgaacatcgaccacctgggggaggacaagctgcgggacaaggccaaggagctgtgggagaccctgcaccagctggagattgacaagtttgaatttggagagaagctgaagaggcagaagtatgacatcaccaccctgcggagcagaattgaccaggcccagaagcacagcaagaaggccggcaccccagccaagggcaaggtgggcggccgctggaagtag

SEQ ID NO: 291758 - DNA, 810 bp, Artificial Sequence
  derived and/or modified sequence
atgtctgatgaggaggtggagcaggtggaggagcagtatgaggaggaggaggaggcccaggaggaggccgctgaggtgcatgaggaggtgcatgagcctgaggaggtgcaggaggacacagcagaagaagatgctgaggaggagaagccccggcccaagctgacagcccccaagatccctgagggggagaaggtggactttgatgacatccagaagaagaggcagaacaaggacctgatggagctgcaggccctgattgacagccactttgaggccaggaagaaggaggaggaggagctggtggccctgaaggagagaattgagaagagaagagctgagagagctgagcagcagaggatccgggcagagaaggagcgggagcggcagaaccggctggccgaggagaaggcccggcgggaggaggaggatgccaagagaagagcagaagatgacctgaagaagaagaaggccctgagctccatgggcgccaactacagcagctacctggccaaggctgaccagaagaggggcaagaagcagacagcccgggagatgaagaagaagatcctggccgagaggaggaagcccctgaacatcgaccacctgggggaggacaagctgcgggacaaggccaaggagctgtgggagaccctgcaccagctggagattgacaagtttgaatttggagagaagctgaagaggcagaagtatgacatcaccaccctgcggagcagaattgaccaggcccagaagcacagcaagaaggccggcaccccagccaagggcaaggtgggcggccgctggaagtag

SEQ ID NO: 291759 - DNA, 813 bp, Artificial Sequence
  derived and/or modified sequence
atgtctgatgaggaggtggagcaggtggaggagcagtatgaggaggaggaggaggcccaggaggaggccgctgaggtgcatgaggaggcccaccctggagaggagagcgtgcgggaggacacagctgaggaggatgctgaggaggagaagccccggcccaagctgacagcccccaagatccctgagggggagaaggtggactttgatgacatccagaagaagaggcagaacaaggacctgatggagctgcaggccctgattgacagccactttgaggccaggaagaaggaggaggaggagctggtggccctgaaggagcgcatcgagaagagaagagctgagcgggcagagcagcagaggatccgggcagagaaggagcgggagcggcagaaccggctggccgaggagaaggcccggcgggaggaggaggatgccaagagaagagcagaagatgacctgaagaagaagaaggccctgagctccatgggcgccaactacagcagctacctggccaaggctgaccagaagaggggcaagaagcagacagcccgggagatgaagaagaagatcctggccgagaggaggaagcccctgaacatcgaccacctgggggaggacaagctgcgggacaaggccaaggagctgtgggagaccctgcaccagctggagattgacaagtttgaatttggagagaagctgaagaggcagaagtatgacatcaccaccctgcggagcagaattgaccaggcccagaagcacagcaagaaggccggcaccccagccaagggcaaggtgggcggccgctggaagtag

SEQ ID NO: 291760 - DNA, 435 bp, Artificial Sequence
  derived and/or modified sequence
atgtctgatgaggaggtggagcaggtggaggagcagtatgaggaggaggaggaggcccaggaggaggccgctgaggtgcatgaggaggagaggagagcagaagatgacctgaagaagaagaaggccctgagctccatgggcgccaactacagcagctacctggccaaggctgaccagaagaggggcaagaagcagacagcccgggagatgaagaagaagatcctggccgagaggaggaagcccctgaacatcgaccacctgggggaggacaagctgcgggacaaggccaaggagctgtgggagcccccccagagctgccagggcctgcctgacagccctgggggcggggaggccatccctggccggcccccccggctgtgcccctgctgcctgcaccccctgggccctgtgaacaaggctgctgagcccccatag

SEQ ID NO: 291761 - DNA, 771 bp, Artificial Sequence
  derived and/or modified sequence
atgagcgacgaggaggtggagcaggtggaggagcagtacgaggaggaggaggaggcgcaggaagaagctgccgaggttcatgaggaggttcacgaacccgaagaaaagccacgccccaaattgaccgcgcccaagatccccgaaggagaaaaggtggatttcgacgatatccagaagaaaaggcaaaataaggacctcatggaactccaagctctgattgattcccacttcgaagcacgcaagaaggaggaggaggagcttgtggctctcaaggaaaggatagaaaaacgacgagctgaaagggccgaacagcagcgcatccgcgcagaaaaggaacgtgagagacagaatagacttgccgaagagaaggccaggagagaagaggaggatgctaaacggagagccgaggatgatcttaaaaagaaaaaggctctgagtagtatgggtgccaattacagctcttatttagcgaaagctgaccagaagagaggaaaaaagcagactgcgcgtgaaatgaagaaaaagattttagccgagaggaggaagcccttgaatattgaccacctcggcgaagacaaacttcgtgacaaggcaaaagagctctgggagaccctgcatcagctggaaatagataagtttgagtttggcgagaaacttaagcgacagaagtatgacattactaccctcaggagcaggattgaccaagcacagaagcactccaagaaagctggcacgccggccaaaggcaaagtcggcggccggtggaagtag

SEQ ID NO: 291762 - DNA, 777 bp, Artificial Sequence
  derived and/or modified sequence
atgagcgacgaggaggtggagcaggtggaggagcagtacgaggaggaagaggaggcccaggaagaagaggaggtgcaggaagataccgccgaggaggatgcagaagaggaaaaaccgagaccaaagcttactgcacccaaaatccccgagggggagaaggtcgacttcgacgatatccagaaaaagcggcagaataaggatctgatggagcttcaggcactgatagatagccacttcgaggcgcgaaagaaggaggaggaggagctggtcgccctaaaagagagaattgagaagagaagggctgagagggctgagcaacagagaatcagagccgagaaagaaagagagagacagaaccgactcgcagaagaaaaggcccggagggaggaagaggatgctaagcgaagagcagaagatgaccttaaaaaaaagaaggctttgtccagcatgggagcgaattattcatcctatctcgccaaggccgatcaaaagagggggaaaaaacagaccgctagggaaatgaaaaagaagattctcgccgaaaggcgtaagccattaaacattgatcatctgggcgaagacaagctcagggataaggcgaaggaactgtgggaaactcttcaccagctggagatagataagttcgagttcggtgaaaaactcaaaaggcagaaatacgatatcactacccttcggagtagaatagaccaagcccaaaaacatagtaagaaagcaggaacccctgctaagggaaaagtgggcggccgctggaagtag

SEQ ID NO: 291763 - DNA, 738 bp, Artificial Sequence
  derived and/or modified sequence
atgagcgacgaggaggtggagcaggtggaggagcagtacgaggaggaggaagaagcccaggaagaggaagagaagcccagacccaagctcaccgcacctaagatcccggagggagagaaagttgacttcgatgacattcagaaaaagcgccaaaataaagatctgatggagctccaagcattgatcgactcgcacttcgaagccagaaagaaggaggaggaggagcttgtggctctgaaggagagaattgagaaacgacgtgccgagagagcagagcagcaacggattcgggcagagaaagagagagagcgccagaaccggttagccgaggaaaaagcgagaagggaagaggaagacgctaagcgccgggctgaagacgatttgaagaagaaaaaggccctttccagcatgggagcaaattattcatcatacctggcaaaggctgaccagaagaggggcaaaaagcagacagcgagagagatgaagaagaagatcctggccgagagacggaagcctctgaacattgaccacctcggcgaggataagctccgagataaggctaaagagctctgggaaacactccatcaactggaaatcgacaagttcgagtttggggaaaaattgaagcgccagaagtatgacatcactacactgcgtagccggattgaccaggctcagaaacactcaaagaaagcgggcacacccgccaaaggaaaagtaggcggcagatggaaatag

SEQ ID NO: 291764 - DNA, 783 bp, Artificial Sequence
  derived and/or modified sequence
atgagcgacgaggaggtggagcaggtggaggagcagtacgaggaggaagaggaagcgcaggaggaggccgctgaggtccatgaggaggacaccgcagaagaggatgctgaagaggagaaaccccggccgaagctgaccgctcctaagatacctgaaggtgagaaggtggattttgacgacattcaaaaaaagaggcagaacaaagatctcatggagcttcaggctctgatagactcccatttcgaggcccggaagaaggaggaagaggagttggtggccctcaaggagagaatagagaagaggcgggccgaacgggccgaacaacaaagaatccgcgcggaaaaggagagagaaagacagaatcggctggcggaggagaaggcaagacgggaagaggaggatgccaaaagacgtgctgaagatgacttaaaaaagaaaaaggcattgtcaagcatgggcgccaactactctagttatctggcaaaggccgaccaaaaaagaggaaagaaacaaacagcacgcgagatgaagaaaaaaatattggcggagcgccgaaaacccctcaacattgaccatctgggagaagataagctcagagacaaggccaaagagctctgggaaaccttgcaccaactggagattgataaatttgagttcggtgagaaattgaaaaggcagaagtacgacatcactaccctgagatctcgcatcgaccaggctcagaagcactccaaaaaagcaggcacccctgccaaaggaaaagtgggggggcgctggaaatag

SEQ ID NO: 291765 - DNA, 753 bp, Artificial Sequence
  derived and/or modified sequence
atgagcgacgaggaggtggagcaggtggaggagcagtacgaggaggaggaggaggcacaggaagaggaggaggttcaggaggaggagaagcccaggccgaagctgactgcccccaaaattcctgagggagagaaggttgatttcgatgatatacagaaaaagagacagaacaaagacctgatggagctccaggctcttatcgattcccattttgaggcaagaaaaaaggaggaagaagagctggtcgccctaaaggagcgtatcgagaagagaagagctgagcgcgccgagcagcaacggattcgcgccgagaaggaacgcgaacgccagaacaggctggccgaagaaaaggcgcggagggaagaggaagacgctaaaaggagggctgaggacgatctgaagaaaaaaaaggccttaagctcaatgggagcgaattatagctcttacttagcaaaagctgaccaaaagcgggggaaaaagcaaaccgcgagggagatgaagaagaagattctggcagaacgcagaaagcccctgaatattgaccacttgggcgaggacaaactgcgggataaagcaaaagagctgtgggaaacacttcaccagctcgaaatcgataaatttgagttcggggagaagctaaagcgccagaagtatgatatcacaactctgagatccaggatcgaccaggctcagaaacacagtaaaaaggccggcacgccggcgaaaggcaaggtgggcggacgctggaaatag

SEQ ID NO: 291766 - DNA, 786 bp, Artificial Sequence
  derived and/or modified sequence
atgagcgacgaggaggtggagcaggtggaggagcagtacgaggaggaagaggaggctcaagaggaagcagcggaagtccatgaagaggggatgcgaacacaggatttcttccatgaggagaaaccacgcccgaaactcactgcaccaaaaatccccgaaggtgagaaagtggacttcgacgatatacagaagaaaaggcagaacaaagacctgatggagttgcaggcgctcatcgacagtcatttcgaggctcgtaaaaaagaggaggaagagttggtagcactgaaggaaagaattgaaaagcggagggccgagcgtgccgagcagcagcgcatcagggccgagaaggagcgggaaagacagaacagactcgcggaggaaaaggccagaagggaggaggaagatgccaagcgcagagctgaagatgaccttaaaaagaagaaagctttgtcaagcatgggagctaactactcatcctacctcgctaaggctgatcagaagagaggaaagaagcagaccgccagagagatgaaaaagaagattctggccgaacgcaggaagcccctgaacatcgaccacctgggggaggacaagctgagagataaggccaaagagctttgggaaactctccaccagcttgagatcgataaatttgaattcggggaaaagttgaagcgacaaaagtatgacattactacgcttcgcagtaggatagatcaagctcagaagcactccaaaaaggccgggacccccgccaaggggaaggtcgggggccggtggaagtag

SEQ ID NO: 291767 - DNA, 786 bp, Artificial Sequence
  derived and/or modified sequence
atgagcgacgaggaggtggagcaggtggaggagcagtacgaggaggaggaggaggcacaggaagaagccgccgaagttcacgaggaggtccacgaaccagaggaggtgcaagaagaggagaagcctaggcctaagctcaccgcccctaagattccggaaggagagaaagtcgatttcgatgacattcagaagaaacgccagaacaaagatctgatggagctccaggcgctcattgactctcactttgaggccagaaaaaaagaagaggaggaactggtggccctgaaggagcgtattgaaaaaaggcgagccgaacgggcagagcaacaaaggatcagagccgagaaagaacgagagcgacagaatcgccttgcagaggaaaaagcacgtagggaggaggaagacgcgaagcgccgcgcggaggacgatcttaaaaaaaagaaggccctgagcagcatgggagcaaactattcctcttacctggcaaaggcagatcagaagcggggaaaaaagcagacagcccgcgagatgaagaagaagatcctggctgaaaggcggaaaccactcaacattgaccacctcggggaggacaaactgagggacaaagccaaggagttgtgggagaccttgcaccagctcgagatcgataagtttgaatttggagaaaaacttaagaggcagaaatacgacattaccaccctcaggtcccgaattgaccaggcccagaaacactccaaaaaggccgggacacccgccaagggcaaggttggtggacggtggaaatag

SEQ ID NO: 291768 - DNA, 810 bp, Artificial Sequence
  derived and/or modified sequence
atgagcgacgaggaggtggagcaggtggaggagcagtacgaggaggaggaagaagcccaggaggaggccgcagaggtgcacgaagaggtacacgagcctgaggaggttcaggaagataccgcggaagaggacgcagaggaggaaaaacctcgtcccaaactgaccgctcctaaaatccctgaaggcgagaaggtagatttcgatgatatccaaaaaaagagacaaaacaaggatcttatggagttgcaggctctgatagactcacactttgaggctagaaagaaggaggaggaggaactggtggccttaaaggagaggatcgagaaacgaagagccgagagagcggaacagcaaagaatacgggcagagaaagaacgggagcgtcagaacaggctggcagaagaaaaggcacgccgcgaggaggaagatgctaagcgccgagccgaggacgatttgaagaagaagaaagcgctgtcctccatgggcgctaactactcctcatacctggctaaggccgaccaaaagcggggcaagaagcaaactgccagggaaatgaagaaaaagattctcgccgaaagacggaaacccctgaacatcgaccacctgggcgaagataaattgcgcgacaaggcaaaggagctctgggagactctgcatcagttagaaatcgacaaattcgagttcggagagaaactcaaacgccagaagtatgacatcactaccctcaggtcccgcatcgatcaggctcagaagcactctaagaaggccggtactcccgctaagggcaaagtgggcggccggtggaaatag

SEQ ID NO: 291769 - DNA, 813 bp, Artificial Sequence
  derived and/or modified sequence
atgagcgacgaggaggtggagcaggtggaggagcagtacgaggaggaagaagaggcccaggaagaagccgctgaagtccacgaagaggctcaccccggcgaggagagcgtgcgcgaagacactgccgaagaggatgccgaagaggagaaaccccgtcccaaattgactgccccaaaaatcccagaaggtgagaaagtcgattttgatgacattcagaaaaaacgccagaacaaagatctgatggagctgcaggcgctgatcgattcccactttgaggcgcggaagaaagaagaagaagagttagttgcgctgaaagagcgcatagagaagcgccgcgccgagcgcgcagagcagcagcgcatccgagcggaaaaggaaagggagagacagaatagacttgccgaggaaaaggcccgccgagaggaagaggacgccaagcgcagagcagaggacgacttgaagaaaaagaaagctctgagttccatgggggctaattatagctcgtatttggcaaaggccgatcaaaagaggggcaagaaacagaccgctagagaaatgaagaaaaaaatactggccgaaagaaggaaacctttgaatattgaccatctcggcgaagataagctgcgagacaaggctaaagagctttgggagactttacaccaactggaaatcgataagtttgagtttggggagaagcttaagagacagaagtatgatatcacaacactcaggtctaggattgaccaggcacagaaacacagcaagaaggccgggactccggccaagggcaaagtgggaggccgctggaaatag

SEQ ID NO: 291770 - DNA, 435 bp, Artificial Sequence
  derived and/or modified sequence
atgagcgacgaggaggtggagcaggtggaggagcagtacgaggaggaggaagaggcacaggaggaggctgccgaggtgcacgaagaggaacgtagagctgaggatgatctgaagaagaagaaggccctcagctctatgggcgccaattatagctcctatcttgctaaggcggaccagaaaagaggtaaaaaacaaactgccagagaaatgaaaaagaagatcctggctgagagaagaaagccactcaatatcgatcacctgggtgaagacaagctgagagacaaggccaaagagctttgggagcccccccagtcctgccaggggctgcctgacagtcctgggggaggagaggctataccaggccgccctcctcggctgtgcccatgctgcctgcacccattgggtccggttaataaggccgccgagccaccctag

SEQ ID NO: 291771 - DNA, 771 bp, Artificial Sequence
  derived and/or modified sequence
atgagcgatgaggaagtggaacaggtggaggagcagtatgaagaggaggaggaagcacaggaggaagctgccgaagtgcacgaggaagtccacgagcccgaagagaagccccgacccaagctgaccgcacccaaaataccagagggagagaaagtcgatttcgatgacatacagaagaaaaggcagaataaggacttaatggagctacaggccctgatagactcacacttcgaagctagaaagaaggaagaggaagagttggtggctctgaaggagaggatcgaaaaacgcagagctgaacgggctgagcaacagagaattagggcagaaaaagagagggaaagacagaataggctagcagaagagaaagctcgccgagaggaggaagacgctaagcggagggccgaggacgatcttaaaaaaaagaaggccctctcctccatgggcgctaattactctagctacctcgcgaaggcagatcagaagagagggaaaaaacaaacagcgcgagagatgaagaagaaaatcttggcggagcggagaaaaccgctgaacattgatcatctgggtgaagacaaactacgcgacaaagcgaaagagctctgggagaccctacaccagcttgaaatcgataagttcgaattcggcgagaagctcaagcggcaaaagtacgacatcaccactctgcggtcacggatcgatcaggctcaaaaacactccaagaaggccggaactcctgccaagggcaaagtaggcggtcggtggaagtag

SEQ ID NO: 291772 - DNA, 777 bp, Artificial Sequence
  derived and/or modified sequence
atgtctgatgaggaagtcgaacaggtcgaggaacagtacgaggaagaggaagaagcccaggaagaagaggaagtgcaggaagatactgccgaggaggatgccgaagaggagaaacctcggcctaagttaacggcccctaaaatccctgagggtgagaaagtggacttcgacgacatacagaagaaaagacagaataaagatttaatggagctccaagcactgatcgattctcatttcgaagcacgaaagaaggaggaagaagaattggttgctttaaaggagagaatagagaagcgcagagcggaaagagccgagcagcagcggattagagcagaaaaagagcgtgaaaggcagaaccggcttgccgaggaaaaggctcggagggaggaggaagacgccaagagacgagctgaggacgatctaaagaagaagaaggcactgagctcaatgggcgctaactacagtagctatctggctaaagcagatcaaaaaaggggtaagaaacagaccgccagagagatgaaaaagaagatattggctgaacggagaaaaccattgaacatagaccatctgggcgaagacaaactacgcgataaggccaaagaattgtgggaaaccctgcaccagctcgagattgacaaatttgagttcggtgaaaagcttaagcggcagaaatacgatatcactacactccgttcccggatcgatcaggcccaaaagcattccaagaaagccggaactccggctaaaggaaaggttggaggcaggtggaaatag

SEQ ID NO: 291773 - DNA, 738 bp, Artificial Sequence
  derived and/or modified sequence
atgtcagacgaggaagtcgagcaggtcgaggagcagtatgaggaagaggaagaggctcaagaggaagaggagaagccgaggcctaagctgaccgcacccaaaattccagaaggagagaaagtcgacttcgatgacatccagaaaaagcgacagaataaagacctaatggaactgcaggcactaattgactcccacttcgaagccagaaaaaaggaggaggaagagcttgtggccctgaaagagagaattgagaaacgcagagcagaacgggcagagcaacagcgaattagggctgaaaaggagagagagagacagaaccgactggctgaggaaaaggcgcgacgcgaggaggaagatgcaaagcggagggcagaggacgatctgaaaaagaagaaggctctatcgtctatgggagccaactattcttcatatttggcaaaagcagatcagaaaagaggtaaaaaacagaccgctcgggagatgaaaaaaaagattctggctgagcggcgtaaaccattgaacatcgaccatctaggcgaagataagcttcgcgataaggccaaggaactgtgggaaactttgcaccaactggagatcgataaattcgagttcggggaaaaactaaagcggcaaaagtacgacatcactacccttcggagtcgaattgaccaggctcagaaacatagcaaaaaggctggaactccagcaaaagggaaagtcgggggaagatggaagtag

SEQ ID NO: 291774 - DNA, 783 bp, Artificial Sequence
  derived and/or modified sequence
atgagcgacgaggaggtcgagcaggtggaagaacagtatgaggaggaggaggaagctcaggaggaggctgcagaagtgcacgaggaggataccgccgaggaagacgcagaggaggagaaacccaggccgaagctgaccgccccaaaaatccctgagggagagaaggtagactttgatgatattcaaaaaaagagacagaataaagaccttatggagctgcaagccctaatcgattctcatttcgaagccagaaaaaaggaagaggaagagctcgttgcactcaaggaacgcattgagaagcggagggctgagagggctgagcagcagcggatacgtgcggaaaaagagagagagaggcaaaaccgcttagccgaggagaaagctcggagggaagaggaggatgccaagcgaagagctgaagacgatctcaagaaaaagaaggccctgtcaagcatgggcgcaaattattctagttatttggccaaagcagaccagaaacggggtaagaagcagaccgcaagagagatgaaaaagaagatcttggcggagcgtcgcaagcctctgaacattgaccatcttggtgaggataaactccgggacaaggctaaggagttgtgggagacacttcaccagctggaaattgacaaattcgaatttggtgagaaactgaagcgtcaaaagtacgatattacaacactgagaagccgaatagatcaggcccagaaacatagcaaaaaagcagggactcctgctaagggaaaagttggcggaagatggaaatag

SEQ ID NO: 291775 - DNA, 753 bp, Artificial Sequence
  derived and/or modified sequence
atgagcgacgaggaggtcgagcaagtggaagagcaatacgaggaggaggaagaggcccaagaggaggaggaagtgcaggaagaagagaagcccagacctaaactcactgctcccaagatacccgagggcgaaaaggtggactttgacgatattcagaaaaagaggcagaacaaagacctgatggagctgcaggcactgatcgattcacacttcgaggccagaaaaaaggaagaagaagagcttgtcgcactgaaggaacgcattgaaaagcgcagagccgagagagccgagcaacagaggattagagccgagaaggagagagagaggcagaatcgtttagctgaggaaaaggcccgaagggaagaggaggacgcaaaacgacgggcagaggacgacctgaaaaaaaaaaaagcacttagttcaatgggagctaattacagctcctacctggccaaagcagatcagaagagaggcaagaagcagaccgcaagagagatgaaaaagaaaattctggctgaaaggagaaagccactgaacattgaccacctcggagaggacaagttacgcgacaaggcaaaagaactgtgggaaaccctccaccagttggagatcgacaaattcgagttcggggagaagctgaaaagacaaaaatatgacataaccacactgcggtctcggatcgaccaggcgcaaaaacatagcaagaaagccggaaccccagcaaaggggaaagtaggcggaaggtggaaatag

SEQ ID NO: 291776 - DNA, 786 bp, Artificial Sequence
  derived and/or modified sequence
atgtcagacgaggaggtggaacaggtggaggagcagtacgaagaagaggaggaggcccaagaggaagccgcagaggtacacgaagaaggaatgagaacccaggacttcttccacgaggagaagccccgtcccaaattaactgcccctaagatccccgaaggggaaaaagtggactttgatgacatccagaagaagagacagaacaaggacctgatggagctccaggctctgatcgactcccactttgaagcgagaaagaaagaagaggaggagcttgttgctctcaaggaaaggatcgaaaaaagacgcgcagagcgtgctgagcagcagcggatcagggccgaaaaagaaagggagcggcagaatcgcttagccgaggagaaggcccgacgcgaggaggaggacgcgaaaaggagagcagaagatgatcttaaaaaaaaaaaggccctgtcaagtatgggggcaaactactcatcctacctggcaaaggccgaccagaaaaggggcaagaaacagactgcgagggagatgaagaaaaagattcttgccgaaaggcggaagccactcaatattgaccatctcggcgaggacaaactcagagataaggcaaaagagctttgggagacgctgcaccagttagagattgacaaattcgaatttggagagaagctcaaacgtcaaaaatatgacatcactactttgagaagccgcattgaccaggcacaaaagcattctaagaaagccggtacacctgcaaaaggcaaggtgggcggacggtggaagtag

SEQ ID NO: 291777 - DNA, 786 bp, Artificial Sequence
  derived and/or modified sequence
atgtccgacgaagaggttgaacaggtcgaggaacagtacgaggaggaagaggaggctcaggaagaggccgcagaagtccacgaagaagtccacgaacccgaggaggtccaagaagaggagaaaccccgaccaaaactgaccgcaccaaagatcccagagggggagaaagtcgacttcgacgatatacaaaagaagcgccagaataaggacctgatggagttgcaggccttaattgatagccattttgaggcgaggaaaaaagaggaggaggagctggtggcgctgaaggagcggattgagaagcgtcgggctgagcgtgctgagcagcagagaatacgggctgagaaagagcgagaacgccagaaccgcctcgctgaggagaaggcaaggagggaggaggaggacgccaaaaggagagctgaggacgacctgaaaaagaaaaaagcattgtcttccatgggagcgaattattcctcatacctggccaaagcagaccaaaagaggggaaagaagcagacagcacgggagatgaagaagaaaatcttagccgagagacgaaaaccactcaatatcgatcaccttggcgaagacaaattacgcgataaggcaaaggagctgtgggaaacacttcaccagctggagatagataaattcgagtttggagaaaagctcaagagacaaaagtatgacattacaacacttcgctccagaatagaccaggctcagaaacatagcaagaaggccggaacacccgcaaaggggaaagtcggaggaaggtggaagtag

SEQ ID NO: 291778 - DNA, 810 bp, Artificial Sequence
  derived and/or modified sequence
atgagcgacgaggaagtggaacaagtcgaagagcaatatgaagaagaggaagaggcacaggaggaagcggcagaggtgcacgaggaggtccacgagcctgaagaggtgcaggaggacacggcggaagaagatgctgaagaggagaagcctagacctaagctgacagcgcctaaaatccctgagggagaaaaagtagattttgatgacatacagaaaaaacgccaaaataaggacctgatggagttgcaggccctgattgactcacactttgaagcacggaagaaagaagaggaggaactggttgctttaaaagaaaggatagagaaacggcgtgccgaacgggcagagcagcagagaatccgagccgaaaaggaacgcgaacggcagaaccgcctcgcagaggagaaagccaggcgggaggaggaagatgccaaacgacgggcagaggacgatctaaagaaaaaaaaagccctgtcttccatgggcgcaaactattccagttatctagccaaagccgaccagaagagaggcaaaaaacagactgctcgggagatgaagaagaaaattctcgccgaacgccgtaaacctctgaacatcgaccaccttggcgaagacaaattaagagataaagctaaagaactctgggagacactgcaccagcttgaaattgacaaattcgagttcggagaaaaactaaaacgccaaaagtatgatattacaactctgcggagccgaattgatcaggctcagaagcatagcaagaaggccggtacccccgctaaaggaaaggttggagggaggtggaaatag

SEQ ID NO: 291779 - DNA, 813 bp, Artificial Sequence
  derived and/or modified sequence
atgagtgatgaagaggttgaacaagtggaggagcagtacgaggaggaggaggaagctcaggaggaggccgctgaagtgcacgaagaggcccaccctggagaggagagcgtacgggaagataccgcagaagaggatgcagaggaagagaaacccaggccaaagctcacagccccaaaaatcccagaaggagagaaggtggatttcgacgacatccagaagaaacgacaaaacaaagatctgatggagttacaggcattaatcgactcacatttcgaagcgagaaaaaaggaggaggaggagttagtggcgctgaaagagcgaatcgagaagaggagggcagagagggccgagcaacagcggattcgggctgaaaaggagcgtgaacgtcaaaaccgactcgccgaagagaaagctaggcgtgaggaggaggatgcgaagagaagagctgaagatgatctcaagaagaaaaaagccctgtcttccatgggcgcaaattattcttcttaccttgcaaaggctgaccaaaagaggggtaaaaagcagactgccagggagatgaaaaagaagattctagctgagagaaggaagcccctcaatattgaccacctcggcgaggacaagctgcgagataaagcaaaagaactgtgggagactctccaccagttggaaattgataaatttgaattcggagagaagctgaaaagacagaagtatgacattaccactttgcgatcccgaattgatcaggctcaaaaacattccaaaaaggcgggaacacccgcaaagggaaaggttggtgggaggtggaagtag

SEQ ID NO: 291780 - DNA, 435 bp, Artificial Sequence
  derived and/or modified sequence
atgagtgacgaggaggtggaacaagttgaggagcagtacgaagaagaggaggaggctcaggaggaagctgctgaagtacatgaggaggagcgccgagctgaggacgacctgaaaaaaaagaaggcgctctcttccatgggtgcaaattactcgtcgtacctggccaaggcagaccaaaagcggggtaaaaagcagaccgcgagggaaatgaagaagaaaatccttgccgaacggcgaaaacccctgaacattgaccacttgggagaggacaaactccgcgataaagcaaaagaattatgggagccccctcagtcttgccagggactaccagatagtcccggaggtggggaagccattcctggcaggcctcccagactttgcccttgttgtctgcatccactcggtcctgttaacaaagctgcggaaccaccatag

SEQ ID NO: 291781 - DNA, 1060 bp, Artificial Sequence
  derived and/or modified sequence
gcctgcagccggtgctgtccacagggagctccagcccttctcacactcgacccgcagaaaccacccaccttcaccatgtctgacgaggaagttgaacaggtggaggagcagtacgaagaagaagaggaagcccaggaggaagctgcagaagtccatgaggaagttcatgaaccagaggagaaaccgagacccaaactcactgctcctaagatcccagaaggggagaaagtggacttcgatgacatccagaagaagcgtcagaacaaagacctaatggagctccaggccctcatcgacagccactttgaagcccggaagaaggaggaggaggagctggtcgctctcaaagagagaatcgagaagcgccgtgcagagagagcggagcagcagaggattcgtgcagagaaggagagggagcgccagaacagactggcggaggaaaaggccagaagggaggaggaggatgccaagaggagggcagaggacgacctgaagaagaagaaagctctgtcttccatgggagccaactacagcagctacctggccaaggctgaccagaagagaggcaagaagcagacagcccgggaaatgaagaagaagattctggctgagagacgcaagccgctcaacatcgatcaccttggtgaagacaaactgagggacaaggccaaggagctctgggagaccctgcaccagctggagattgacaagttcgagtttggggagaagctgaaacgccagaaatatgacatcaccacgctcaggagccgcattgaccaggcccagaagcacagcaagaaggctgggaccccagccaagggcaaagtcggcgggcgctggaagtagagaggccagaaaggcccctcgaggcagagaccctccgccctcttgcacaccagggccgctcgtgggactccacatcctccagcccccacaatcctgtcaggggctccctgacagtcctgggggtggagaggccatcccggggcgtcccccgcgtctgtgtccttgctgccttcatcccctggggcctgtgaataaagctgcagaacccccttca

SEQ ID NO: 291782 - DNA, 1210 bp, Artificial Sequence
  derived and/or modified sequence
ttcctatacttggtaaggggcctgcacgggcatagccccccccagcaagactccgcacacaccccggccacccagtcactggccaatgggctcctaggaagatcaaatgtcactataacacgagggtgtgagccgggcgccagtgcctgcagccggtgctgtccacagggagctccagcccttctcacactcgacccgcagaaaccacccaccttcaccatgtctgacgaggaagttgaacaggtggaggagcagtacgaagaagaagaggaagcccaggaggaagaggaagttcaagaagacaccgcagaggaggacgcggaagaggagaaaccgagacccaaactcactgctcctaagatcccagaaggggagaaagtggacttcgatgacatccagaagaagcgtcagaacaaagacctaatggagctccaggccctcatcgacagccactttgaagcccggaagaaggaggaggaggagctggtcgctctcaaagagagaatcgagaagcgccgtgcagagagagcggagcagcagaggattcgtgcagagaaggagagggagcgccagaacagactggcggaggaaaaggccagaagggaggaggaggatgccaagaggagggcagaggacgacctgaagaagaagaaagctctgtcttccatgggagccaactacagcagctacctggccaaggctgaccagaagagaggcaagaagcagacagcccgggaaatgaagaagaagattctggctgagagacgcaagccgctcaacatcgatcaccttggtgaagacaaactgagggacaaggccaaggagctctgggagaccctgcaccagctggagattgacaagttcgagtttggggagaagctgaaacgccagaaatatgacatcaccacgctcaggagccgcattgaccaggcccagaagcacagcaagaaggctgggaccccagccaagggcaaagtcggcgggcgctggaagtagagaggccagaaaggcccctcgaggcagagaccctccgccctcttgcacaccagggccgctcgtgggactccacatcctccagcccccacaatcctgtcaggggctccctgacagtcctgggggtggagaggccatcccggggcgtcccccgcgtctgtgtccttgctgccttcatcccctggggcctgtgaataaagctgcagaacccccttca

SEQ ID NO: 291783 - DNA, 794 bp, Artificial Sequence
  derived and/or modified sequence
cacagggagctccagcccttctcacactcgacccgcagaaaccacccaccttcaccatgtctgacgaggaagttgaacaggtggaggagcagtacgaagaagaagaggaagcccaggaggaagaggagaaaccgagacccaaactcactgctcctaagatcccagaaggggagaaagtggacttcgatgacatccagaagaagcgtcagaacaaagacctaatggagctccaggccctcatcgacagccactttgaagcccggaagaaggaggaggaggagctggtcgctctcaaagagagaatcgagaagcgccgtgcagagagagcggagcagcagaggattcgtgcagagaaggagagggagcgccagaacagactggcggaggaaaaggccagaagggaggaggaggatgccaagaggagggcagaggacgacctgaagaagaagaaagctctgtcttccatgggagccaactacagcagctacctggccaaggctgaccagaagagaggcaagaagcagacagcccgggaaatgaagaagaagattctggctgagagacgcaagccgctcaacatcgatcaccttggtgaagacaaactgagggacaaggccaaggagctctgggagaccctgcaccagctggagattgacaagttcgagtttggggagaagctgaaacgccagaaatatgacatcaccacgctcaggagccgcattgaccaggcccagaagcacagcaagaaggctgggaccccagccaagggcaaagtcggcgggcgctggaagtag

SEQ ID NO: 291784 - DNA, 1208 bp, Artificial Sequence
  derived and/or modified sequence
acttggtaaggggcctgcacgggcatagccccccccagcaagactccgcacacaccccggccacccagtcactggccaatgggctcctaggaagatcaaatgtcactataacacgagggtgtgagccgggcgccagtgcctgcagccggtgctgtccacagggagctccagcccttctcacactcgacccgcagaaaccacccaccttcaccatgtctgacgaggaagttgaacaggtggaggagcagtacgaagaagaagaggaagcccaggaggaagctgcagaagtccatgaggaagacaccgcagaggaggacgcggaagaggagaaaccgagacccaaactcactgctcctaagatcccagaaggggagaaagtggacttcgatgacatccagaagaagcgtcagaacaaagacctaatggagctccaggccctcatcgacagccactttgaagcccggaagaaggaggaggaggagctggtcgctctcaaagagagaatcgagaagcgccgtgcagagagagcggagcagcagaggattcgtgcagagaaggagagggagcgccagaacagactggcggaggaaaaggccagaagggaggaggaggatgccaagaggagggcagaggacgacctgaagaagaagaaagctctgtcttccatgggagccaactacagcagctacctggccaaggctgaccagaagagaggcaagaagcagacagcccgggaaatgaagaagaagattctggctgagagacgcaagccgctcaacatcgatcaccttggtgaagacaaactgagggacaaggccaaggagctctgggagaccctgcaccagctggagattgacaagttcgagtttggggagaagctgaaacgccagaaatatgacatcaccacgctcaggagccgcattgaccaggcccagaagcacagcaagaaggctgggaccccagccaagggcaaagtcggcgggcgctggaagtagagaggccagaaaggcccctcgaggcagagaccctccgccctcttgcacaccagggccgctcgtgggactccacatcctccagcccccacaatcctgtcaggggctccctgacagtcctgggggtggagaggccatcccggggcgtcccccgcgtctgtgtccttgctgccttcatcccctggggcctgtgaataaagctgcagaacccccttc

SEQ ID NO: 291785 - DNA, 1178 bp, Artificial Sequence
  derived and/or modified sequence
acttggtaaggggcctgcacgggcatagccccccccagcaagactccgcacacaccccggccacccagtcactggccaatgggctcctaggaagatcaaatgtcactataacacgagggtgtgagccgggcgccagtgcctgcagccggtgctgtccacagggagctccagcccttctcacactcgacccgcagaaaccacccaccttcaccatgtctgacgaggaagttgaacaggtggaggagcagtacgaagaagaagaggaagcccaggaggaagaggaagttcaagaagaggagaaaccgagacccaaactcactgctcctaagatcccagaaggggagaaagtggacttcgatgacatccagaagaagcgtcagaacaaagacctaatggagctccaggccctcatcgacagccactttgaagcccggaagaaggaggaggaggagctggtcgctctcaaagagagaatcgagaagcgccgtgcagagagagcggagcagcagaggattcgtgcagagaaggagagggagcgccagaacagactggcggaggaaaaggccagaagggaggaggaggatgccaagaggagggcagaggacgacctgaagaagaagaaagctctgtcttccatgggagccaactacagcagctacctggccaaggctgaccagaagagaggcaagaagcagacagcccgggaaatgaagaagaagattctggctgagagacgcaagccgctcaacatcgatcaccttggtgaagacaaactgagggacaaggccaaggagctctgggagaccctgcaccagctggagattgacaagttcgagtttggggagaagctgaaacgccagaaatatgacatcaccacgctcaggagccgcattgaccaggcccagaagcacagcaagaaggctgggaccccagccaagggcaaagtcggcgggcgctggaagtagagaggccagaaaggcccctcgaggcagagaccctccgccctcttgcacaccagggccgctcgtgggactccacatcctccagcccccacaatcctgtcaggggctccctgacagtcctgggggtggagaggccatcccggggcgtcccccgcgtctgtgtccttgctgccttcatcccctggggcctgtgaataaagctgcagaacccccttc

SEQ ID NO: 291786 - DNA, 1211 bp, Artificial Sequence
  derived and/or modified sequence
acttggtaaggggcctgcacgggcatagccccccccagcaagactccgcacacaccccggccacccagtcactggccaatgggctcctaggaagatcaaatgtcactataacacgagggtgtgagccgggcgccagtgcctgcagccggtgctgtccacagggagctccagcccttctcacactcgacccgcagaaaccacccaccttcaccatgtctgacgaggaagttgaacaggtggaggagcagtacgaagaagaagaggaagcccaggaggaagctgcagaagtccatgaggaaggtatgaggacacaggacttcttccacgaggagaaaccgagacccaaactcactgctcctaagatcccagaaggggagaaagtggacttcgatgacatccagaagaagcgtcagaacaaagacctaatggagctccaggccctcatcgacagccactttgaagcccggaagaaggaggaggaggagctggtcgctctcaaagagagaatcgagaagcgccgtgcagagagagcggagcagcagaggattcgtgcagagaaggagagggagcgccagaacagactggcggaggaaaaggccagaagggaggaggaggatgccaagaggagggcagaggacgacctgaagaagaagaaagctctgtcttccatgggagccaactacagcagctacctggccaaggctgaccagaagagaggcaagaagcagacagcccgggaaatgaagaagaagattctggctgagagacgcaagccgctcaacatcgatcaccttggtgaagacaaactgagggacaaggccaaggagctctgggagaccctgcaccagctggagattgacaagttcgagtttggggagaagctgaaacgccagaaatatgacatcaccacgctcaggagccgcattgaccaggcccagaagcacagcaagaaggctgggaccccagccaagggcaaagtcggcgggcgctggaagtagagaggccagaaaggcccctcgaggcagagaccctccgccctcttgcacaccagggccgctcgtgggactccacatcctccagcccccacaatcctgtcaggggctccctgacagtcctgggggtggagaggccatcccggggcgtcccccgcgtctgtgtccttgctgccttcatcccctggggcctgtgaataaagctgcagaacccccttc

SEQ ID NO: 291787 - DNA, 844 bp, Artificial Sequence
  derived and/or modified sequence
tccacagggagctccagcccttctcacactcgacccgcagaaaccacccaccttcaccatgtctgacgaggaagttgaacaggtggaggagcagtacgaagaagaagaggaagcccaggaggaagctgcagaagtccatgaggaagttcatgaaccagaggaagttcaagaagaggagaaaccgagacccaaactcactgctcctaagatcccagaaggggagaaagtggacttcgatgacatccagaagaagcgtcagaacaaagacctaatggagctccaggccctcatcgacagccactttgaagcccggaagaaggaggaggaggagctggtcgctctcaaagagagaatcgagaagcgccgtgcagagagagcggagcagcagaggattcgtgcagagaaggagagggagcgccagaacagactggcggaggaaaaggccagaagggaggaggaggatgccaagaggagggcagaggacgacctgaagaagaagaaagctctgtcttccatgggagccaactacagcagctacctggccaaggctgaccagaagagaggcaagaagcagacagcccgggaaatgaagaagaagattctggctgagagacgcaagccgctcaacatcgatcaccttggtgaagacaaactgagggacaaggccaaggagctctgggagaccctgcaccagctggagattgacaagttcgagtttggggagaagctgaaacgccagaaatatgacatcaccacgctcaggagccgcattgaccaggcccagaagcacagcaagaaggctgggaccccagccaagggcaaagtcggcgggcgctggaagtag
